United States Patent Application Publication US 2007/0048740 A1 - sequence listing, part 3

SEQ ID NO: 1015 - DNA, 3048 bp, Homo sapiens
aataccccatcttccttggctgtgtgtgctgatggggagctctacgtggccgaccttgggaacatccgaattcggtttatccggaagaacaagcctttcctcaacacccagaacatgtatgagctgtcttcaccaattgaccaggagctctatctgtttgataccaccggcaagcacctgtacacccaaagcctgcccacaggagactacctgtacaacttcacctacactggggacggcgacatcacactcatcacagacaacaatggcaacatggtaaatgtccgccgagactctactgggatgcccctctggctggtggtcccagatggccaggtgtactgggtgaccatgggcaccaacagtgcactcaagagtgtgaccacacaaggacacgagttggccatgatgacataccatggcaattccggccttctggcaaccaaaagcaatgaaaacggatggacaacattttatgagtacgacagctttggccgcctgacaaatgtgaccttccctaccggccaggtgagcagtttccgaagtgatacagacagttcagtgcatgtccaggtagagacctccagcaaggatgatgtcaccataaccaccaacctgtctgcctcaggtgccttctacacactgctgcaagaccaagtccggaacagctactacatcggggccgatggctccttgcggctgctgctggccaacggcatggaggtggcgctgcagactgagccccacttgctggctggcaccgtcaaccccaccgtgggcaagaggaatgtcacgctgcccatcgacaacggcctcaacctggtggagtggcgccagcgcaaagagcaggctcggggccaggtcactgtctttgggcgccggctgcgggttcacaaccgaaatctcctatctctggactttgatcgcgtaacacgcacagagaagatctatgatgaccaccgcaagttcacccttcggattctgtacgaccaggcggggcggcccagcctctggtcacccagcagcaggctgaatggtgtcaacgtgacatactcccctgggggttacattgctggcatccagaggggcatcatgtctgaaagaatggaatacgaccaggcgggccgcatcacatccaggatcttcgctgatgggaagacatggagctacacatacttagagaagtccatggtgctgctactacacagccagaggcagtatatctttgagttcgacaagaatgaccgcctctcttctgtgacgatgcccaacgtggcgcggcagacactagagaccatccgctcagtgggctactacagaaacatctatcagccccctgagggcaatgcctcagtcatacaggacttcactgaggatgggcacctccttcacaccttctacctgggcactggccgcagggtgatatacaagtatggcaaactgtcaaagctggcagagacgctctatgacaccaccaaggtcagtttcacctatgacgagacggcaggcatgctgaagaccatcaacctacagaatgagggcttcacctgcaccatccgctaccgtcagattgggcccctgattgaccgacagatcttccgcttcactgaggaaggcatggtcaacgcccgttttgactacaactatgacaacagcttccgggtgaccagcatgcaggctgtgatcaacgagaccccactgcccattgatctctatcgctatgatgatgtgtcaggcaagacagagcagtttgggaagtttggtgtcatttactatgacattaaccagatcatcaccacagctgtcatgacccacaccaagcattttgatgcatatggcaggatgaaggaagtgcagtatgagatcttccgctcgctcatgtactggatgaccgtccagtatgataacatggggcgagtagtgaagaaggagctgaaggtaggaccctacgccaataccactcgctactcctatgagtatgatgctgacggccagctgcagacagtctccatcaatgacaagccactctggcgctacagctacgacctcaatgggaacctgcacttactgagccctgggaacagtgcacggctcacaccactacggtatgacatccgcgaccgcatcactcggctgggtgacgtgcaatacaagatggatgaggatggcttcctgaggcagcggggcggtgatatctttgagtacaactcagctggcctgctcatcaaggcctacaaccgggctggcagctggagtgtcaggtaccgctacgatggcctggggcggcgcgtgtccagcaagagcagccacagccaccacctgcagttcttctatgcagacctgaccaaccccaccaaggtcacccacctgtacaaccactccagctctgagatcacctccctctactacgacttgcaaggacacctctttgccatggagctgagcagtggtgatgagttttacatagcttgtgacaacatcgggacccctcttgctgtctttagtggaacaggtttgatgatcaagcaaatcctgtacacagcctatggggagatctacatggataccaaccccaactttcaaatcatcataggctaccatggtggcctctatgatccactcaccaagcttgtccacatgggccggcgagattatgatgtgctggccggacgctggactagcccagaccacgagctgtggaagcaccttagtagcagcaacgtcatgccttttaatctctatatgttcaaaaacaacaaccccatcagcaactcccaggacatcaagtgcttcatgacagagaggaccaaggacttcttgccaaagacagctactcttttgtggccgcatacctgactgtgttgtacttttaaaaaaatgattttttaacaagtgcagaaacaaaaagatactggttgcattgtaactcatgcaacatccttttttttagaaaagaaaaacacagatttggccttcgcacattttttgcaaagaacagaaggtatttttttctgtagtgtgatcacaatgaaaactttattgtctttt

SEQ ID NO: 1016 - DNA, 3991 bp, Homo sapiens
aacttcgttaggattgggaaatggtttgtccgaccctacgaaaaggatgaaaagccagtcaacaaaagtgagcatttgtcctgtgctttcacattctttctgcatggagaaagtaatgtatgcacaagtgtggagattgcccagcaccagccaatttatttgatcaatgaggagcatatacacatggctcagtcttcacctgcaccatttcaagtactggtaagtccttatggcttaaatgggacgctaacaggccaagcatacaagatgtcagacccagccactcgtaagttgattgaggaatggcagtatttctacccgatggtgctaaaaaagaaagaagaatcgaaagaggaagacgagttgggatatgatgatgatttccctgtggcagttgaagtaattgttggtggtgttcggatggtttacccttcagcatttgttttgatctctcagaatgacatcccggttcctcagagtgttgccagtgctggaggccacattgcagttgggcagcaagggcttggtagtgtgaaggacccaagtaactgtgggatgcctctgacccctcccacctctccagaacaggctatcctaggtgagagtggaggtatgcagagtgctgccagtcacctggtttcccaagatggagggatgataacgatgcacagtccaaagagatcggggaagattcctccaaaactccacaatcatatggtccatcgagtctggaaggaatgcatcctcaacagaacccagtccaagaggagccaaatgtcaactccaactcttgaagaagagcctgctagcaatcctgctacttgggattttgtggatccaacccaaagagtcagctgttcttgttccaggcataagcttttaaaacgttgtgcagtcgggcccaatcgacctcccacagtatctcaaccagggttcagtgcaggaccatcatcatcttcatctttaccacctcctgcttcttctaagcacaaaacagcagaaagacaggaaaaaggagacaagctgcaaaagagacccttaataccatttcaccataggccctctgtggccgaagaattatgcatggagcaaaatacaccaggacagaaactagggttggcagggatagactcctccttagaggtgtctagcagtaggaaatatgataagcaaatggtcgtgccttccagaaatacaagcaagcaaatgaatctgaatcctatggattcacctcattcccctatatcccctctgccaccaacactcagccctcagccacgaggtcaggaaacagagagtttggacccaccatcggtccctgtgaatccagccctttatggaaatggactagaactccagcagttgtctactctggatgacagaactgtcctcgtaggccaaagactgcctctcatggcagaggtcagcgagacagccttatattgtgggattaggccctcgaacccggagtcatcagaaaagtggtggcatagttatcgtctcccacccagtgatgatgctgagttcaggcctccagagctccagggtgagagatgtgatgccaaaatggaggtaaactcagagagcactgcattgcaaagactcttagcacaacctaacaaacggtttaaaatctggcaagacaaacagccccagttgcagccactccacttccttgacccattgcctctatcacaacaacctggagacagtttgggagaagtgaatgacccatatacctttgaagatggtgacataaaatacatctttacagccaacaagaaatgcaaacaagggacggagaaagattccctgaaaaagaataagtcagaggatggatttggtaccaaggatgtcactacaccaggtcattccacgccggtgcctgatgggaaaaatgccatgtctattttcagttctgctactaaaacagatgtccggcaggataatgctgctggcagagctggctccagtagccttacacaggtaacagatttggcaccttccctgcatgacttagacaacatctttgataattctgatgacgacgaacttggggctgtatcacctgctctgcgctcatcaaaaatgcctgcagttgggacagaagaccgacctcttgggaaggatggaagagctgctgttccttatccaccaacagttgcagacttgcaaaggatgtttcccactccaccatctttggaacagcatcctgcattttctcctgtgatgaattataaagatgggatcagctcagagacagtgacagcattaggcatgatggagagccctatggtcagtatggtttcaacacaactcacagaattcaaaatggaagtggaagatggattaggaagtcccaagcccgaggaaattaaggacttttcatatgtgcacaaagttccatcctttcaaccttttgtgggatcctccatgtttgctccactgaagatgttgccgagccattgtttgctacctctgaagatacctgatgcctgtctgtttcggccttcatgggcaattcctcctaaaattgaacaactgcccatgccccctgcagccactttcattagagatggctacaataacgtgcctagtgttgggagcctagcagatccagactatctgaacacaccacagatgaacacacccgtgacgttgaacagcgctgccccagccagcaatagtggggcaggagtcctaccatctccagcaacccctcgcttctctgtccccacaccacgaacccccaggaccccaagaactcccagaggtgggggcactgccagtggtcaagggtctgttaagtatgatagcaccgatcaaggatcaccagcctccaccccctctactacacggcccctcaactctgtggagcccgccaccatgcagccaattcccgaagcccacagcctctatgttaccctgattctctccgattccgtgatgaatatctttaaagacagaaactttgacagctgttgcatctgtgcctgcaacatgaacatcaaaggggcggatgtcgggctttacatccccgattcttccaatgaggaccagtaccgctgtacctgtgggtttagtgcgattatgaaccgcaaacttggctacaattcaggactcttccttgaagatgagttggatatttttgggaagaattctgatattggtcaggctgcagagaggcgcttaatgatgtgtcagtccaccttccttcctcaggtggaaggaaccaaaaaaccccaggagccacccataagccttctcctcctcctccagaatcaacacacacaaccttttgcttcactgaatttcctggactacatttcctctaacaatcgccaaactcttccctgtgtaagctggagttatgaccgggtgcaagcagataataatgattactggacggaatgctttaatgcgttggagcaggggcggcagtatgtggataaccccactggtggaaaagtggacgaagctctggtgagaagtgccactgtgcactcttggcctcacagcaatgtgctggacatcagcatgctctcctcccaggatgtggttcgtatgctgttgtccctgcagccctttctccaagatgccatccaaaagaagcgcacgggcaggacctgggagaacatccagcatgtgcagggaccactcacttggcagcagttccataaaatggcaggacggggaacctacggttcggaagaatctcctgagccgttgcccatccccactctgctggtaggctatgacaaggatttcctcaccatctcgccattctccttgccgttttgggagaggctcttgttggacccatatgggggccaccgtgatgttgcctatattgtggtgtgtccagaaaatgaggccttgctcgaaggagccaaaactttcttcagggacttgagtgctgtatacgagatgtgtaggcttgggcagcacaagcccatctgcaaagtgctacgtgacgggatcatgcgcatgg

SEQ ID NO: 1017 - DNA, 3846 bp, Homo sapiens
aaaaagcagcgctggggagaggatgaaggcagagagcgcgggtgagtcacgggcggagctggccttgttcgctcgctggctcctgcccgccctccgtcctccgccctctcgccagcgctcacctccgccgcctgccgcctgccgccagccgccgggtctggctcgccctgggctcctgccccttaccgctggagagctcgccggcgcacagggcctatgagcgaccgtcagtagcgcaccagccagccgtgcccggagcccgccgcagcctcgaggtcccgtctgaggtgcccctgaccgtccctgccctcaccccaccccggatcccggcaatgctaaccgctgtctgcggctctctgggcagccagcacacggaagcgccgcacgcctccccgccgcgcctcgacctgcagcctctccaaacttaccagggccacacgagccctgaggccggggactacccctccccgctgcagcctggagagctgcagagcctcccgctgggcccggaggtggacttctcgcagggctatgagctgccaggggcctcctcgcgggtaacctgcgaggacctggaaagcgacagtcccttggccccgggccccttttccaagctcctgcagccggacatgtcacaccattatgaatcgtggttcaggccgactcacccaggcgcggaggatggctcgtggtgggaccttcatccgggcaccagctggatggacctcccccacactcagggcgcgctgacctcacctggccacccgggggcgcttcaggcgggcttggggggctacgtcggagaccaccagctttgtgccccgccaccccacccgcatgcgcaccacctccttccagctgccggagggcagcatctcctagggccgcccgacggggctaaggccttggaagtagccgccccggagtctcaagggctggattccagcctggacggggcggcgcgtcccaaaggctcccggcggtcggtgccccgcagctcaggccagaccgtctgtcgctgccccaactgtctggaggcggagcgactgggggctccatgtgggcccgatgggggcaagaagaagcatttgcacaactgccacatcccgggctgcgggaaagcctacgccaagacgtcgcacctgaaggcgcacctgcgctggcacagcggcgaccgtcccttcgtgtgcaactggctcttctgcggcaagcgcttcgcgcgctcggacgagctgcagcgccacctccagacccacaccggcaccaagaagttcccctgtgcagtctgcagccgcgtcttcatgcgcagcgaccacctggccaagcacatgaaaacccacgagggcgccaaggaggaggcggctggggcggcctcgggagagggcaaggccggcggcgcagtggagccccccgggggcaaaggcaaacgcgaggccgagggcagcgtggctccctccaactgagctcctcagtgccgcctccctgcgggtatcccggggggcactggatgcgagcccccaggtctgacgtccttgggggtggcttgaggaagaggggaaggtgcgtatttattcagggaggaggaaaagtggtgcagggacagggagatggggcgctaggggttcttagtctctggggctactaggcaggatgaatttgactgggtcggtaggagctgcgcaatgcccctctgttctcccctgcctcacagtttccctcgcccctgggctggggggttggggtgggacacccgtaccgcggctggctggcggggacaggctagaggagacagcaagtcccagtccccggagcagagagaagtggggccggcccggggcgctggtggtggctgtctggacacgtccttagcgcctgggaaccaggacataaagcgcctccggagccgccctgcggcggggtccctttcatcccacttaaagtgcttctgcccctagggtttccggagggagagccgagatgggatgggggagcctgggggtcccccttggcaggggtgtctctttctggtttggagggttgttgctgtaaaaataactcctttgatgagcttccttattaaccctttcagacccagtctgttggagccatgaaggaagagggaaagagggctgccattcctgacagcctcccagccagggctggcgataaaggaccgagatagatggagggggcgagtagggaagtcctcttctaaaatgagagatagggatttggtggggtatggaaggaactaaccccttccctctccacctctgattcagcccttaattcttggtctatgataaataaagttcagtagtctcacattccccatctattaccctaggtgtgttttcaaggcagccagggtagaatccatgtagttcccaccagttgccttcccctcagggatggaaggaagagggtttcttgggctggttgagggcagattgggggtgtctcatcagagggacctccactggttcccactcagagtggaggcctgcagcctacctgaccatctctttagctgtcaccaagaaaataaaccccactgtctctctagctcggcccttgtctttcccttgcccctgccatagcatgttcattaggggattccttcctccccctcatctcacaggggaagggagaggaaagagttgttctcccactggaaggggttctgccttctgaggtgacatccaggaagctgtccccattcccttctcctttagatgctagaaacacattttgattctgatcatggggtgggggagagaggaaaggagggaggggagaagcccagcagaagctgagccaggcagaggggaaagaagctgatatgaggaagggtctgacaggccacagcccttgcagccggagggctttcccacactcaagagaggggccttacagtccctctgacacccctcccccttcccctcgctccctttcttcacccggagccctctgcagagattagctgtgtattgatttttaagttataagcaaagggtattttatttaatattaggttatgtgtgtgcatgttgtgtgtacctgtgtgcatgtatgtgtgtttctctactgagcctggggtctctagtcagggagaccccatcttattcaccatgtccaagatcctgggatctgggcccagcatctcttcctcctttgtagatgctggagcccagccaaggtctgggagctatatgggaagtgggggctgggatctgggtgggaatatgtgtttgtatacaaaggggccctccttaaaagggacaggatgaccttcccgaggaactcattggcctggggtagtttaagaagtaatgttctttctttctttctcttttccctacctcctgctaacccaaccagagatccccttccttgctgagagggttgggggcaggaggagatttggcagtgcctgcaggttgcctggccaggtggagagggggaaagaggaagggcaccgtgggtgtaagatgcctttctcctccacccatcgaaaccagccaccccttccctgtgccaccaagacagccttttccagtggccatcctaaggggaactcccaaatgggtgttgctggtggacacagatgctccccccaatggaagccccaagctctgaggtatgcgggtagaggctttggataggttttcttctgctcccctcttttatagatctaggctgcttggctgcctgtctttctaggcagtccccctagaggaaaaatgtaggaatttattttttctttaactgctgtgaactcactttgagggggtaggaggagggagaaacagcctgtgttttttatgcaataaagtcatcaactac

SEQ ID NO: 1018 - DNA, 3652 bp, Homo sapiens
agtgctggtcggagggacgaggggggtgcggagccagccaggccgccctcccgttctcacagcagccgagcagagcgggctgccatggcgctggccaggcctgggaccccggacccccaggccctggcctctgtcctgctactgctgctctgggcccctgccctttccctcctggctgggacggtgccttcagagccccccagtgcctgtgcctcagacccgtgcgctccagggaccgagtgccaggctaccgagagtggtggctatacctgtgggcccatggagccccggggctgtgccacccagccatgccaccacggcgctctgtgtgtgccccagggtccagatcccaacggcttccgctgctactgcgtgccgggtttccagggcccacgctgcgagctggacatcgatgagtgtgcatcccggccgtgccaccatggggccacctgccgcaacctggccgatcgctacgagtgccattgcccccttggctatgcaggcgtgacctgcgagacggaggtggacgagtgcgcctcagcgccctgcctgcacggggcctcgtgcctggacggcgtgggctccttccgctgtgtgtgcgcgccaggctacgggggcacccgttgccagctggacctcgacgagtgccagagccagccgtgcgcacatgggggcacgtgccacgacctggtcaacgggttccggtgcgactgcgcgggcaccggctacgagggcacgcactgcgagcgggaggtgctggagtgcgcatcggcgccctgcgagcacaacgcgtcctgcctcgagggcctcgggagcttccgctgcctctgttggccaggctacagcggcgagctgtgcgaggtggacgaggacgagtgtgcatcgagcccctgccagcatgggggccgatgcctgcagcgctctgacccggccctctacgggggtgtccaggccgccttccctggcgccttcagcttccgccatgctgcgggtttcctgtgccactgccctcctggctttgagggagccgactgcggtgtggaggtggacgagtgtgcctcacggccatgcctcaatggaggccactgccaggacctgcccaatggcttccagtgtcactgcccagatggctacgcagggccgacatgtgaggaagatgtggatgaatgcctgtcggatccctgcctgcacggcggaacctgcagtgacactgtggcaggctatatctgcaggtgcccagagacctggggtgggcgcgactgttctgtgcagctcactggctgccagggccacacctgcccgctggctgccacctgcatccctatcttcgagtctggggtccacagttacgtctgccactgcccacctggtacccatggaccgttctgtggccagaataccaccttctctgtgatggctgggagccccattcaggcatcagtgccagctggtggccccctgggtctggcactgaggtttcgcaccacactgcccgctgggaccttggccactcgcaatgacaccaaggaaagcttggagctggcattggtggcagccacacttcaggccacactctggagctacagcaccactgtgcttgtcctgagactgccggacctggccctaaacgatggccattggcaccaggtggaggttgtgctccatctagcgaccctggagctacggctctggcatgagggctgccctgcccggctctgtgtggcctctggtcctgtggccctggcttccacggcttcggcaactccgctgcctgccgggatctcctctgcccagctgggggacgcgacctttgcgggctgcctccaggacgtgcgtgtggatggccacctcctgctgcctgaggatctcggtgagaacgtcctcctgggctgtgagcgccgagagcagtgccggcctctgccttgtgtccacggagggtcctgtgtggatctgtggactcatttccgttgcgactgtgcccggccccatagaggtcccacgtgcgctgatgagattcctgctgccacctttggcttgggaggcgccccaagctctgcctcctttctgctccaagagctgccaggtcccaacctcacagtgtctttccttctccgcactcgggagtccgctggcctgttgctccagtttgccaatgactccgcagctggcctaacagtattcctgagtgagggtcggatccgggctgaggcgccgggcagtcctgctgtagtgctccctgggcgctgggatgatgggctccgtcacctggtgatgctcagcttcgggcctgaccagctgcaggacctggggcagcacgtgcacgtgggtgggaggctccttgctgccgacagccagccctggggtgggcccttccgaggctgcctccaggacctgcgactcgatggctgccacctccccttctttcctctgccactggataactcaagccagcccagcgagctcggcggcaggcagtcctggaacctcactgcgggctgcgtctccgaggacatgtgcagtcctgacccctgtttcaatggtgggacttgcctcgtcacctggaatgacttccactgtacctgccctgccaatttcacggggcctacatgtgcccagcagctgtggtgtcccggccagccctgtctcccacctgccacgtgtgaggaggtccctgatggctttgtgtgtgtggcggaggccacgttccgcgagggtccccccgccgcgttcagcgggcacaacgcgtcgtcagggcgcttgctcggcggcctgtcgctggcctttcgcacgcgcgactccgaggcctggctgctgcgtgccgcggcgggcgccctggaaggcgtgtggctggcggtgcgcaatggctcgctggcggggggcgtgcgcggaggccatggcctgcccggcgctgtgctgcccataccggggccgcgcgtggccgatggtgcctggcaccgcgtgcgtctggccatggagcgcccggcggccgccacctcgcgctggctgctgtggctggatggtgccgccaccccggtggcgctgcgcggcctggccagtgacctgggcttcctgcagggcccgggtgctgtgcgcatcctgctggctgagaacttcaccggctgcttgggccgcgtggcgctgggcggcctgcccctgcccttggcgcggccccggcccggcgcggcccctggcgcccgagagcacttcgcgtcttggcctgggacgccggccccgatcctcggctgccgcggcgcgcccgtgtgtgcgccctcgccctgtctgcacgacggtgcctgccgtgacctcttcgacgcctttgcctgcgcctgcggcccggggtgggaaggcccgcgctgcgaagcccacgtcgacccctgtcactccgccccctgcgcccgtggccgctgtcacacgcaccccgacggccgcttcgagtgccgctgcccgcctggcttcgggggcccgcgctgcaggtgggatggctgggcaggggggtgggctgcgaatgccccctggggctatggtggggcagagaagtctgccaggtctgtggatgagtcgcttcccttccctggtcctcatgtccttatctgtgacatgaggaggacagtttaatttgataaatttcctgataaaatacagatcaaaacac

SEQ ID NO: 1019 - DNA, 699 bp, Homo sapiens
atagtgatgccgtatccactgagactccggatcctaacagctggaagctaaaaacaggcgccatggagtacacagggagcaaatatatcggggaatatgtagatgggaggatggagggcaaagccaagtacatcctccctaccgaaacaatatatgttggggaaatgaaggatggcatgtttcacggcgagggagccctgtacttccccagcggaagccaatacgacgccatttgggaaaacggattggccataaagggcacatatacgttctcagatgggctgcactatgatgagaaaaactggcattactgcgacggctatgatcggaggttttacacagagatcctcaatggcttgaagcctgcaggtatggctcaactcaccaatatggacccacctagaaaaatccccaagggctattacgattgtggagacggcttctataacccagtcacgagggtagtcaaggactataggaaccgctttctaagaaacgcagatgatgacgagcatgagtggatcacccgtacctgtcgaaagggctaggatgagatcgtgggtcacaggcccgagccgtgaactctgtggctgcctccaccagaggtttccatctgccctactagcattggctgccctgggggacgggctgtagttctagaacctgattttaactcaggaataaagactttctgcggtc

SEQ ID NO: 1020 - DNA, 3844 bp, Homo sapiens
ttggagaaaagatggctgctgtgcaagttgtcggttcgtggccttccgtgcagccgcgggaggcaccgcgggaagcaatccctgagcgaggcaatgggtttcgcctcttgtctgccaggctctgcgccctgcgcccggatgacagcagctccgcccgcaccgagatccacctgctcttcgatcagctcatctccgagaactacagcgagggcagtggcgtggccccggaggacgttagtgctcttcttgtccaggcttgccgactggtacctcttaatcagaatcatcttgtcagcaaagtgagccagcttatccaccatttacttaacagattacaggtaattgttgatgaacagcacttggatttcctgttggcatatactatttcggctattcatcagtgtagttcctggacacacagggaaattcttcaagccctggcagctctggtgtactgcaatggctccaaatgtcaaaagtacctcccagagctgctaggcaacaccggactcttaatgaagttgagtgacttggctcagtctgatcctgaagtcaggagagctgcagtacattgtatggcaaacttatgtctcagtgtgccaggacagccgtatttggaggagccctaccaaaatgtctgtttccaagcttttctgactattttacagtctccaaaatcatctgatatggatgatatcacattttgcatgttattgcaaaatgcattaaaaggtatacagtcacttctaaatggtgggagaatgaaactaacacagactgatgaacttggagcacttttagctgtgctaaagaaattcatgtttcacggactccctggactaaacatagagatgcccacggtgttatacccaactccgcttcctcagtatgatgggcgaacacctatcaaaccacagcaatcagaatccagtgcttctcgaccaactttgaataaaaagaaaaaatccaaagtaaaaccaaagaaaatccagcaaggagaggaggaggaaaaggaatccagtggtgaaatagaggcagccccagtcactggcacaggcagagtgaacctgcatgaagggaacacttggtgtccctcctccctgggtgtccagagtttgcctttagatggaagtggagctgcagaaaaagatggagtctcctcatccttcagttcttccagttggaaaagggtcagcagtagtgagtcagacttttctgatgctgaaggaggcatgcagagtaaaatgaggtcttaccaagctaaagttcgccaaggagccttagtttgttttctttctactataaaatcgatagaaaaaaaagttctttatggctactggtcagcttttattcctgatacgcctgaacttggcagcccacagtcagtgtccttgatgactcttacattgaaagacccttctccaaagacacgtgcctgtgctctgcaagttttatctgccatcttggaaggctcaaagcagtttctttctgttgctgaagataccagtgaccacagaagggcttttacccccttctccgtaatgatcgcttgcagcattagagagttgcacagatgtcttttgttagctttggtggcggagtcatcctcacagaccgttactcagataattaagtgccttgcaaatttagtatcaaatgcaccttatgatcgtctaaaactcagcctgctgaccaaagtctggaaccagataaagccttatattcgccacaaagatgttaatgttcgtgtgtcaagtctcacactcttgggagctatagtgtccacccacgcacctttacctgaagtccaactacttctgcaacagccatgttcttctggactcggtaatagcaattcagcaacccctcacctcagccctcctgattggtggaagaaagcccctgcaggaccctctctggaagaaacgtcagttagctcacctaaggggtcttcagagccctgctggctcattcgactctgcatttccattgtcgtactgcccaaggaggattcctgttcaggtagcgatgctggctctgcagcaggaagcacctacgaaccatcccccatgcgactggaggccttacaggtattgactcttctggcaaggggctacttttcaatgactcaagcctacttgatggagcttggagaggtgatttgcaagtgcatgggggaagcagatccatccattcagcttcatggagcaaagcttctggaagaactgggcacaggcttaatacagcagtataaaccagactccactgcagcacctgatcagagagcaccagtcttcttggtggtgatgttctggactatgatgctgaacggtcctttacccagagccctgcagaattcagaacacccaactctccaggcgagcgcctgtgatgccctgtcttccatcttgccagaggccttcagcaatctgccgaatgacaggcagatgctgtgcatcacagtgctgctcgggctgaatgacagcaagaatcgcttagtgaaagctgcaacttcacgggccctgggagtctatgtgctttttccctgtctcagacaggatgtcatatttgttgcagacgcagcaaatgcaatattgatgtcacttgaagacaagtctctgaatgttcgagccaaagcagcctggtccctgggcaacctgacagacactctgattgtcaacatggaaacaccagacccaagtttccaggaagagttctctggtctcctgctcttgaaaatgttacgatcagctatagaagcatccaaggataaagacaaggtaaaaagcaatgcagtccgggcccttggaaatttgcttcattttctgcaaccctctcatatagaaaaacccacatttgcagaaatcattgaggagtctatccaggccctaatttctactgttctaacagaagctgccatgaaagtccgatggaatgcttgttatgcaatgggaaatgtatttaaaaatcctgcccttcctttagggacagccccatggacctcccaggcctacaatgccctgacatcggtcgtgacatcatgcaagaacttcaaagtgcgcatcagatctgcagccgccctttccgtcccggggaagagagagcagtacgggtctgttgaccagtatgctcggatctggaatgcattggtcaccgctttacagaagagtgaagacaccatagactttttggaattcaagtactgtgtcagcctacggacccaaatctgccaggcactgattcacctcttgagcttggccagtgcctcggacctcccttgtatgaaagaaacccttgaactgagtgggaatatggtccagtcctatattctacagtttttaaaatcaggagcagagggagatgacactggagcaccccacagcccacaggaaagagaccagatggtcagaatggcccttaaacacatgggcagcatccaggcaccaactggagacacagccagaagggccatcatgggctttttagaagagatcctggccgtttgttttgactcatctggatcacaaggggcactcccagggttaacaaatcagtgaagatcccaccatactttctagatgtcgaaggcggcagtaggaagacctgagcttgagcataagatctgtgggatttcatcttaggggcagaaacaatccgttcactatttatttagaatgacttagcagccatttaaattttcacagagggctcaaccacctttggagtgactccatagcactggccatggtcagggttgttggaacatctgacctgtgcatccaggagccgaggagtcaggttgtaatacaggccaagcagacgggctttgagggcatttagtctc

SEQ ID NO: 1021 - DNA, 2799 bp, Homo sapiens
tcttatccccagaaagtgcaaggagggcatagtcctgatgaccacagagttagaggaagtggaaaaggagggaaaccacctcagaggtcaatagcagattcttttagatttgaaggaaagtggcatgaagatgagttgaggcaccagaggatacaagaagaaaaatactcccagtcaactagaagaggctctgaagactttgagacaaggagctcatttcagaagaggtatcctgaggatcgtgatttcagaaaatatggacacacatcaaaaagacctaaagacgtggagaggtatgaaagcagagagcctgccaggaacccaaagtggaagcctgagcattccctcccaccttaccaagaggacacagaccagtggaaccttgggccccaaacttatcgacatgctgagagggaacacccagagaccagttcagcaaccaaagtatcctatgactatcgtcacaaacgtcctaagctcttggatggggaccaggacttttctgatgggagaactcagaagtactgtaaggaagaagatagaaaatatagttttcaaaaaggccctctaaatagagagttagattgttttaatactggaagagggagagagactcaagatggacaagtcaaagaaccttttaaaccgtctaagaaagacagcattgcctgtacttattcaaataaaaatgatgttgatttgcgatctagtaatgacaaatggaaggaaaaaataaagaaagaaggggattgtagaaaagagagcaattcttccagtaaccaacttgataaaagtcaaaaacttcctgatgtgaaaccctcgcctatcaatcttaggaagaaatcacttacagttaaagtagatgtgaagaaaacagtagatacattcagggttgcttctagctattccacagagagacagatgtcacatgatttggttgctgttggcaggaaaagtgagaactttcatccagtgtttgaacatcttgactcaactcagaatactgaaaacaaacctacaggagaatttgctcaggaaatcataacaataatccatcaagttaaagcaaattattttccatcacctggcattactttacatgagcgtttctcaacaatgcaagatatacacaaggcagatgtaaatgaaattccattgaattcagatccagaaatacacaggagaatagatatgtctttggccgagcttcagagtaaacaagctgtgatctatgaatcggaacagactctgatcaaaataatagatccaaatgacctacgacatgacattgaaagaaggcgaaaagaacggttacagaatgaagatgagcacatttttcacatagctagtgctgcagagagggatgatcagaattccagtttttcaaaggtaaagaatgttcatactgatggattccaaaaacccacacattttataaaatcaaattttagaaaatgtattgaaaaaccttacatgaattatactacgcagagaaaagacataattactcacaaaccatttgaggttgagggaaaccaccgaaacacaagagtaagaccttttaagagcaactttagaggtggcagatgccagcccaattataaatcaggcctggtacagaagagcttgtacattcaggctaagtatcagcgtttacggttcactggcccaaggggatttatcactcataagttcagagaaagattaatgagaaaaaagaaggaatatacagatgttgccacaggaatctaatctgaaatcgtacaaatggaaatgacgctacaggaggatgtttgggagcatctctctctttttgtcaggagttagaagtgacactaaggcactaatactgtaacttcttgataaaataactttattttttagtagtggaatgctgcaacttttttacacctaacaattgcttttaaattacagtattcaatttaaaagttgtattaactacagtttcctttgcaaaaagtctcaaaagaatcacttgaagggcattatttgttgatgcatttttctctgagcatggtttcatagagagaacttcaccaagtaatattcagacgtttatatgttgaaagttttgcttacataataaaaacaaaaacaagtgtctgaattgtatagtgtctttacatgaaagaactttaaacagtggccttatggtagaaaatttcataccagatttttctttttctgatgacattttggcttataactcgaagttttcttaagtttctgaagatcaaggcctatataattcatacatttcatattataagaaggcaagagacaaggtgcttcaaatattccatcaggtagttgtgagtgcactgaatttttagtaatatgttcattcagtttttttccacaactatttgctcttttccaatttcaaaatgctattgtggaaaatatgtaaagattttgtaatctatagtccatcttatttttccctcagggcaagcttgtgcatatcatatttttaaaggctttttaaaaatctgacaaacaaaatctcatatttgaaaattgtactttactactacagcattacacattttgcaagcacatcttatagagtgtttacttttagttcagttgatatgtattgcatacctactatgtgtaagagcaaatggatgggatttttaaatgaaatttttaggccccaataccttatttctttatgttttctgtgttctgcttaacagtacatatacattcccaattacatttttgtgaaatgtttatttgtaataagataaaatgttgttgctctttctgctt

SEQ ID NO: 1022 - DNA, 2021 bp, Homo sapiens
gaagaaaaattacatcttcattttcgctaacctctcactgaaatcctttaatagacgtaggaaacaaaccacagtgatattggcaggagctgtgactttgtcgccaacagaaatcacagatatttccatattatgttacagttactgcaggtatctcaaataccaattacactcatcattgttttgaaattacagcagttattttacctagttatttaattcattaaataagtacgtatatgactacatcaccaaatattttcatgcttatttcaatataattggtttgctttgcaattccatggtattttattgtatgcacttaaagtattattctgagaaggctccaaaggggccacagggcaaaaacaattacgaccctattgggctcggaacacaataccccaaagtatggcactttggcatgctgagtgctttaaaccaaaggagattggagggcctcagacgcaaagtctctctgaacctctcctactctcctgtctctgacttctttttcccctacaaaggaagtcatagaaaccaaaattcctcctcagtctattaccatgagatcatacccttttgtccagtcacatttctacaaggctgcccattcttcatggaatgtaagcataaaaatagacagttttggctgggcggggtggctcgggcctgtaatcccagcactttgggtggctgaggcaggaggatcacctgaggtcaggagtttgagaccagcctggctaacatggtgaaaacccatctttactaaaaatacaaaaattagccaagcgtggtggtacacacctgtaattccagctacttgggaggctgaggcaggagaatcacttgtacccggaaggcggaggttgcagtgagccgagatcacaccactgcattccagcctgggcgacagagcgagactccatctgaaacaaacaaacaaacgaacaaacaaacaaacaaacttcgattaaatagatttgttatgcttttctcttgctaacctgtcttttgtcataggagtgttggctgtgacacttatgatgactgagaaaaggtatcacattccgcccctacaaccccttcttaaggactggtttccataaaacacgcaggacatcttctgctacagtctcagcatgatggatggttagagctcagcctgggtgacaccagggctgagttcccttctcaattgttactcaatctctccgaactcagcttccttgttcataaaatagggataataatagtccctacatttcagagttgcgaggatgagaatgcacatacaaggtttgttccagggcttggccaagggtacaagttcaatccataccaatggtagcggtcacatgccaatttcttggggtactagttggcaagaaccatttatttgtccaattcaaaaagaagaaaaaaaaatctttgctaacttgtcaaacgttttcaaacctcagttcccaggtatcaaaaacgattgtctgagaccagatggcctaaaatgatgttttcaattatattaaaatatttttttaaaattgaagtgtagcttatatatcataaagtgcactagtcttaagtgtacaactcaataaaattttacatatgtctagattcatgcaatcagccccagatcaaaacatagaacatttccagccatctagaaggttccctcttgccccttctcagtcaatactaccccctgcctccttaaccacgatcctgagttctgtcgtcattgattggttctgtctgctctagaagttcatgtaaattcaatcagaacatacgtactcatatgtgcctggcctttttttcagtcagtatatctgtgaagtacctctacattgttgcgtgtatcagtagttcttttttttttttctcattgctaggtagtattccattgtataaatacaccacaatttacttatccattctacctttgatggaaatttgtgttgtttccttttttttttttttgtctcttatgaataaagttgctgcaaatgtttatg

SEQ ID NO: 1023 - DNA, 2375 bp, Homo sapiens
ggcgggggtgcgcggggcggtcagcgatctgcagcttcgcggggacagagatgtaacccaactcgttcacggatgttccgcgcgccgtgtcaccggctgcgggccaggggtactcggaaggcgcgggcaggagcctggcgaggatgcaccttcccctgccttggaaagagcgtttttgcgggaggaatatggtaaaacaaactcaagatacgaaatgagacttttgaagtgcctttgatttctggtgacggacaccagattgcccccaacttcccatcctcaggaataaaactgcaacgagcaccctgcgcagtgtgagacccaagtgacaggccacagtagggcactcgctggccatggggcatgcaacatacagctctgaatttgctgctttccagaatagccttagtagcttcacagtcttgcctacgcgcccatattcactgggccccacctgcctagcggacgggtgcaatccccggcaagcccgcagggggcgcgcagagcacgtcgtccggggagaactaaaactacatttcccagcatcccgcgcgccgcagacccacttccggagacctcacacaagatggcggcacccgaggaacacgattctccgaccgaagcgtcccagccgattgtggaagaggaggaaactaaaacatttaaagacctgggtgtgacagatgtgttgtgtgaagcttgtgaccagttgggatggacaaaacccaccaagatccagattgaagctattcctttggccttacaaggtcgtgatatcattgggcttgcagaaactggctctggaaagacaggcgcctttgctttgcccattctaaacgcactgctggagaccccgcagcgtttgtttgccctagttcttaccccgactcgggagctggcctttcagatctcagagcagtttgaagccctggggtcctctattggagtgcagagtgctgtgattgtaggtggaattgattcaatgtctcaatctttggcccttgcaaaaaaaccacatataataatagcaactcctggtcgactgattgaccacttggaaaatacgaaaggtttcaacttgagagctctcaaatacttggtcatggatgaagccgaccgaatactgaatatggattttgagacagaggttgacaagatcctcaaagtgattcctcgagatcggaaaacattcctcttctctgccaccatgaccaagaaggttcaaaaacttcagcgagcagctctgaagaatcctgtgaaatgtgccgtttcctctaaataccagacagttgaaaaattacagcaatattatatttttattccctctaaattcaaggatacctacctggtttatattctaaatgaattggctggaaactcctttatgatattctgcagcacctgtaataatacccagagaacagctttgctactgcgaaatcttggcttcactgccatccccctccatggacaaatgagtcagagtaagcgcctaggatcccttaataagtttaaggccaaggcccgttccattcttctagcaactgacgttgccagccgaggtttggacatacctcatgtagatgtggttgtcaactttgacattcctacccattccaaggattacatccatcgagtaggtcgaacagctagagctgggcgctccggaaaggctattacttttgtcacacagtatgatgtggaactcttccagcgcatagaacacttaattgggaagaaactaccaggttttccaacacaggatgatgaggttatgatgctgacagaacgcgtcgctgaagcccaaaggtttgcccgaatggagttaagggagcatggagaaaagaagaaacgctcgcgagaggatgctggagataatgatgacacagagggtgctattggtgtcaggaacaaggtggctggaggaaaaatgaagaagcggaaaggccgttaatcacttttatgaaggctcgagttctgctgttctgtaaaagagaattggagaatgaaacctgctccaacagagatcatgagactgaaattggtcagaattgtgtccagaatgtgctcagctaattcagtattcttccccattctgggttggagtttactgcagagtaattcttacagtgctgatgtcaagactgttactgttcttcgactttgattccttgctcatgacatgagtagggtgtgctcttctgtcacttcacacagaccttttgccttttttagctgcaagtcaaggactaggttgatgatgcccatgacctgtaattgtaaagaagcttggacatctgcaaatgatatttaaaccatcttggcttgtgctttattcaaactaatgtgaaacaataaatttaaatattattttt

SEQ ID NO: 1024 - DNA, 2292 bp, Homo sapiens
gaaaaagaaaaagaaacacaaagagaatgaaaaacggaagcgtccgaaaatgtatagcaaatctattcagaccatctgctcaggattgctaactgatgttgaagatcaagcagccaaaggcatcctaaatgataacataaaagattacgttgggaagaatttggataccaagaactatgattccaaaattccagagaacagtgagtttccatttgtctcattaaaggagccacgagttcagaataacctcaaaaggttggacactttggaatttaaacaactcattcatatagagcaccagcctaatggaggtgcatcggttatccatgcctacagtaacgaactctcccacctgtctcctgtggagatggagaggtttgcagaagagtttgtgggtctagtgttcagtgaaaatgaaaactctgcagctttctacgtgatgggtattgttcatggggcagctacttatttacctgactttttagactatttttcatttaattttcccaattcaccagtgaaaatggagatattgggaaagaaagatatagagacaacgactatgtccaattttcatgctcaggtaaaaagaacgtattctcatggtacttacagagctggcccaatgagacaaataagcttggtgggagcagttgatgaagaagtaggagattatttccctgagttccttgacatgttggaagagtcaccatttttaaaatgtacactgccatgggggacgctatctagtctaaaattacagagtcgaaaagatagtgatgatggtcccatcatgtgggttcgtccaggagaacaaatgatccctgtggctgatatgccaaagtcacctttcaaaaggaaaagaactaccaatgaaataaaaaatcttcagtacctacctcgaacaagtgagccccgtgagatgctctttgaagacaggacaagagctcatgcagatcatataggacaaggttttgaacgacagactacagctgctgttggagtgctgaaggctgtgcactgtggagagtggcctgatcaaccccgtataaccaaagatgtaatttgttttcatgctgaagatttcttagaagtagttcaacgaatgcagttagatttacatgaacctccactgtcccagtgtgtccaatgggttgatgatgcaaaactgaatcaactgaggagggaaggcattcgctatgccaggattcagctatatgataatgacatttattttattccaaggaatgttgttcatcagttcaagacagtttcagctgtatgcagtttagcatggcatattcggctcaaattatatcactcagaggaggacacttctcagaatacagctactcatgaaacaggcacatcatcagattccacatcatctgttcttggacctcacactgacaacatgatttgtgctgtaagcaaagcctccttggattctgttttttcagataaacttcattctaaatatgaattacagcagattaaacatgaacctattgcatctgtaagaatcaaggaagaacctgtgaatgttaatattcctgaaaagactacagcactgaataacatggatggcaagaatgttaaagcaaaattggatcatgttcaatttgcagaatttaagattgacatggattctaaatttgaaaatagcaacaaagatttaaaggaagaattgtgccctggaaatctaagtctagttgatacaaggcaacacagttcagcacattcaaatcaagataaaaaagacgatgacattttgtgctaaatttgcatataccatctaaaatccttttttaaaaaaatttaatgtaataaagattcatgaattctgaaagcaagccaaggacttgctcctatgtctgttacaaaacatagtttatgtagctttgtaacattcctcagtgcctgtccataactgtgaagtattaagcacttagggccagatgcactgtaaacactgcaggtttaaacataaaggagtctttaaaaaaaaatcatttacgttggaattttaggttttagaatagagctgacattaacatatatatatatataaatatatatatatattttgtaatatgagccagaattctttttcaacaatttaaagcttttccatagagcttatttatatccttttttttcattttaaatgtgtcagcactgtagtgtaaatagcttttaaatatctttttagtgtgatttatactgaaatgtgagccacttaataaaggttcatatgttcatattaataaatatgttttctgttgagtctgt

SEQ ID NO: 1025 - DNA, 2207 bp, Homo sapiens
agaacggcttccggcgggagctgtgcagctccttatcatggggacaattcatctctttcgaaaaccacaaagatccttttttggcaagttgttacgggaatttagacttgtagcagctgaccgaagggtttgaaagattagaagtcctggctgtatttgcctccacagtcttggcacagttgggagctctctttatattaaaagaaagtgcagaacgctttttggaacagcccgagatacacacgggaagattattagttggtacttttgtggctctttgtttcaacctgttcacgatgctttctattcggaataaaccttttgcttatgtctcagaagcttgtgtggaattattccgggacttagcagtatcttccttccccgaatgaatccatttgttttgattgatcttgctggagcatttgctctttgtattacatatatgctcattgaaattaataattattttgccgtagacactgcctctgctatagctattgccttgatgacatttggcactatgtatcccatgagtgtgtacagtgggaaagtcttactccagacaacaccaccccatgttattggtcagttggacaaactcatcagagaggtatctaccttagatggagttttagaagtccgaaatgaacatttttggaccctaggttttggctcattggctggatcagtgcatgtaagaattcgacgagatgccaatgaacaaatggttcttgctcatgtgaccaacaggctgtacactctagtgtctactctaactgttcaaattttcaaggatgactggattaggcctgccttattgtctgggccggttgcagccaatgtcctaaacttttcagatcatcacgtaatcccaatgcctcttttaaagggtactgatgatttgaacccagttacatcaactccagctaaacctagtagtccacctccagaattttcatttaacactcctgggaaaaatgtgaacccagttattcttctaaacacacaaacaaggccttatggttttggtctcaatcatggacacacaccttacagcagcatgcttaatcaaggacttggagttccaggaattggagcaactcaaggattgaggactggttttacaaatataccaagtagatatggaactaataatagaattggacaaccaagaccatgatagactctaacttatttttataaggaatattgactccttggcctccaatttatttagtaatccaactttgcattgactgtttaatcatttactctaaatgttagataatagtagtcttgttcacatttcatgaaacctatgaaactatatttttgtaaaatgtatttgtgacagtgaaatcctcgtaaatgttaaaggctttaaataggcttcctttagaaaatgtgtttctttaaatttggattttggtatctttggttttgtagttgactgcagtgtgatgtgaccttacctttataagagccacttgatggagtagatctgtcacattactaagatacgatatttctttttttttccgagacggagtcttgctctgccactgtgcccggccaatacattattattaacttaaggctgtactttattaaggcttccttagtttttgttttgttttgttttttgagatggagtctcactctgtcgcccaggctggaatgcagtggcatgatctcagctcactgcaacctctgcctcctgagttcaaatgattctcctgcctcagcctcccgagtagctgggattacaggcacctgccaccacgcccagctaatttttgtatttttagtaaagacgggggatttcaccatgttggccaggctggtcttgaactcctgacctcatgatccacccaccttagcctcccaaagtgctgggattaggtgtgagccaccgcacctggccgatattttctttaatgaaatttataaatatgcttcttgaataatacacattttgggaaagggaaaaatgtctgttcaaaaagtaaaagtctcttttatagcttttccaaacttaattgctaaatttttctttgaggttctcctgaattatgtcttacaaactaaaagcaaaaatttttagcagaaattttggaatacattctatctagcacaatttgaatttttaattatcaagatttttgttaaagtttctctcctttaaaaattttagtacatttgtaaat

SEQ ID NO: 1026 - DNA, 2548 bp, Homo sapiens
ttcaagtggagcagccctttcaggtagagcagcatgcgcttcatagtcttaatgcagaagatacttcatcagagacggccggggccgccagggatcacctgctaggtgatgggcgggtccgccctcgggcgcggatgaacaggtagggattgcactgtgggcagtaggaaggaaaggacgcaggcgctgtaactcctctaggccaaacctccaaaccctgggaaccaaagtgcccccgacccccaccccaggaaaatgggcctgttgggaggcaagcagatcggtgcaggagaacccgcagaaacggcaccatgcactgttctccgggtgagacttaagcacacacagacctcgggggtggccaggtcttgctgcgtcccggagccattggggcctgtggctgccacaaggggcatacctaccagagaggacctttccatcgtgctgaagggacggttccggtggcgcaggccagagaaccgccttgagtgctgcctgcgggcagtgctgccggccggccctgagcctgcacagacgttcacactgactcctgcttgccgaagacactgctgcttggtgatgctgcgctctggcctgagcagcccctcactgacacgtcagctccagtccccaccttatctccccacagcagagaatggagcatgcatcaagccatccagagaaacccagtggggcatggacccaaaacacgggcgctgcactcactttgcatttttatagcaacacacattggggtaatttctacttccattgcacagagagctttgcgagatgttgaggacataaagatggccagatgtccattctcgctctggtttctgacagcctgagagacacggtgagtgagagagtctgatcccctgaacccaggcctggttcccttccagccacaccactgtcgccttgctaggaatgaagaaacaaggtgtctgcttttgataaattgactgaggaggagttggctaagggaggaaggacaggagctacccataggacatatgggcaggaacacaaggacagggtaaggccgtgatcagcatcaaggacacctgaccagttgtgcacaccattgtgctggcatgggctgccctcacctgcctgctacacgcccatgcccactcctgctcctctaatggcatccaacctccccgctgtgatcagcaatcataccatccgcccccattcttctctccccacaacccgcaccttctggcagcccatgaacatgtcacactcagactgtcctgccccaaatactatcttgtttgtcccacatctggaatgtgctttttcctctgactccccaaggagaaccctcccaggccccctcctctgcaacggcctctcctccaacctcagcaccgtcctgccccctcctctaccgcctgtccagtggagcaggcccggcccaagtctccatgcctggagggcagcccattctggacatagcgcatgcccagaactgcctccacagccggcttcctctgcggctctctcttcacaagacacggaagagttttggggcctgctggtgtggcattgcttctatgatggctaaaaacagctgggaagctagaagacacgcctgaaccaagcgcaggacaacgatttgttagccaaaagcttaaattcaggccccaaatccaagtgtggcattgtgtcaaatgaggctgagactccgcgtcacctcagctcaccaggcacttctgaggcaaaccctgacaggtacatttcagtcccctgcccaggatgcaccccagccccgcttggcgtgcggcatctttcacagcagatgccctctgcttctgagatcatccttccatcatctcctcacaaaactcagtggaaacagacatcctgcaatcaaaatgaagagctagtcacccagacactttcaacacctacagctggggaggctgagtaaattaatgcaaaattagggtgacaatttttgaatatatttcccaccttttatttccatcggtatcatccgtttaaaaagaatgacaagaagattcccatcagtccaaactggaccacccacactttgaaaaagttggagcatttcagccggctccgcatgatccatcctgtcttcagtcagtgccttctggaagggagggaaagtcttggatgcacctggcactcaatccactcggcacctggctgctgctgcggtcctggggctggaaggaactcccactgggcacacatctacagaggagtgcgtggcgcagtgaggacggttactgctggagccgacacacagcgaactacatacttttagaaagagcctctgtcacatggctagaacaacaacaacaacaaagaaaacccacaaaaaacctggagaaaatatatctaaatctctgataggtctcttagctagcagtgagttcagtatgacagcacagagtctaaaaatattaattaaaaataaattgctttggttagcatttaaacctttcccattcaatagaagatttctgtaatgaggaatgctgaatatatataaagcctgacactc

SEQ ID NO: 1027 - DNA, 3309 bp, Homo sapiens
aagtttcctgaggcctccctagaagccagtatgcttcctatacagcctgcagaaccctcaggattctcacggtgtggctgctgcagggaagtcagatcacctacgtggaggcccaggggcctggctctggaaacaggaggcagaagctgccagtctctagtcttgggcctggcaactggcatagcattacttccgccctattccatcgctcaagcagtcacagaacccacctggcttcagcaggaaggggcaaggaccccgcctcctaatgggagcagtggtgaagaatttacagtcatctttaatctgtcatacccgctgagaagaaatagattttctgccacctgaaaagttgaaagtcacatgtgtttttctcttacatcatggctttcctgaggtgatggcagcagctcagtccagctgccgtctgattgggcgaagggtcctagaagaaggaaatacaggaggggaggaatcttggctatttcaaaatgtcattccttgcatttatgcaaccaaggaatccacgaagtcaaatcatacgtaacaattcaaaagatcttcagaaagatctttttaaaattttttcttttttaaaaaatatgttttttcttttgagacaatctcactttgtcgccccgcctagctagttttgcatgtagctatcaatacttacgtattcatgtttttaaaagtaatatcgtattgtaaacagaatttgtaacctggtttttatgcttaccattttatcttcaaaagatcttggctcgctgcaatttctgcctcctgggttcaggcgattctctgtctcggcctcccaggtagctgggattacatgtgtgcaccaccacacctggctaattttttgtattagtagagaccaggtttcgctatgttggccgggctggtctcaaattcttggcctcaaatgatcctcctgtcttggcctcccacagtgctgggattacaggcatgagccactgcacccagcacataaagatcttttgattctaacacattttaatgttttctgtttgtgtgttttttttgatattttataacaagaatacatgtcttttttatttcaggagaaaagagattataaaacaaaaagaaaatactgttacaatgaactgaatgtttgtgtccctataaaatgtttatgttgaagctctaatcccaaagtgatggtattaggaggtagggactttgggaagtaattaggtcatgatggtggagccctcataaacaggatgagtactcttataaaagggaccccaggctgggcatggtggctcatccctgtaatcccagcacttgggaggctgatgtgggcagattgcttgagtccaggagttcgagactagcctgggcaacatggcgaaacctcatctctactaaaaatacaaaaattagctgggcatgggtggtgcatgcctatagtcccagctactctggaggctgaggtgggaagatcacttgagcccaggaggcagaggcagcagtgagctgtgatggcaccactgtactccagcctgggtgacaaagtgagaacctgtctcaaaaacaaaaaacaaaaaagccaccccagagagctcctgtgctttctttccaataagaagttggcagtctgcaagccatagagggcccacaccagaaccatgctggcaccctgatcttggacttccagcttccaaaattgagaaataggcggggtgcagtggctcacgcctgtaatcccaacactttgggaggctgaagcaggcagatcacttgaggtcaggagtttgagaccagcctggccaacatggcgaaaccccgtctctactaaaaatacagaaattagccgggtgtggtgtcatatgcctgtaatcccagctactcgggaggctgaggcaggagaatcgcttgaaccccggaggtggaggttgcagcgagccaagatcacaccactgcaatccagcctgggctacaaagacagattccatctctaaataaataaatgctgttgtttttaacccacccaatttatgatattttgctatagcagcctcaacaggctaaggcaactgtcctgtggattattaactagttggctctttatacaaattctattgagcacctagcacgtaccaattaccagtctattcactgcaataagcaagccagacagggtccctgtcctcctggagctcatggtctggagaagcacctggactgttctttggtagtggcatctgaatccagagcttcctgagttttgctcctagaggaccttgtgcagagctgcctgctgagggggaacagcccaatggcttcctagcgcacttgccaaatacctgcctccaagccgtctgcttcttccatcaggtccttgcttttggatcccagagacttcatttcctgccctacttttccttccaagagctcagtggagagttctcttcctaaaaaaagagaagcttacttcttcagcagtgttatctctgggtctcaaccataaggctggaattttcccactcagccatggagtagtgttgccctttccatcttcctgaagccagagcatgccacatgtggtagaagccattagtaagagatgggtagcagtcaagggcatggccccaagtctggactcgtggctactggggagaaagggaaattgatgaagctcctatagtgtgactgctattgtgtgctacattcacagaatccccaactgccctatgatgcagaccaggctctccaaggctgggtcctgagaaatggtactttcttcagatgttaatagattctgtgtgcaattttgggaaattctatagttctttgttcagtgcctttaatagcctaatgtgcatggtgaaactcaaagggggaggttatgacaggcagtctcccccaaatttatttcacccaaatgccccatactagattgaatagtgtccccccaaaattcaagtccacccacaacctcggaatgtggccttatttggagatagtctttgcaggcataattaatcaaggtgatgccacgctggagtagagggagccctaacccaatgacggatgtccttagaagacgagaaaacagagacacatggcgaagaaggccatgtgatgagagggtcagagactggagagattcatccacaaaccaaggaacgtcaaggggtgccggaaacccccgaagctaagaagaagcaaaaaaggagctttcccctcagggttcagagggagcatggcctggctgacacctcgattttggacatctagctccagaactgtgagaaaataaatttctgttgtttt

SEQ ID NO: 1028 - DNA, 3340 bp, Homo sapiens
gagcagcgagcagcgcctgcgggagcggccggtcggtcgggtccccgcgccccgcacgcccgcacgcccagcggggcccgcattgagcatgggcgcggcggccgtgcgctggcacttgtgcgtgctgctggccctgggcacacgcgggcggctggccgggggcagcgggctcccagggtcagtcgacgtggatgagtgctcagagggcacagatgactgccacatcgatgccatctgtcagaacacgcccaagtcctacaaatgcctctgcaagccaggctacaagggggaaggcaagcagtgtgaagacattgacgagtgtgagaatgactactacaatgggggctgtgtccacgagtgcatcaacatcccggggaactacaggtgtacctgctttgatggcttcatgctggcacacgatggacacaactgcctggatgtggacgagtgtcaggacaataatggtggctgccagcagatctgcgtcaatgccatgggcagctacgagtgtcagtgccacagtggcttcttccttagtgacaaccagcatacctgcatccaccgctccaatgagggtatgaactgcatgaacaaagaccatggctgtgcccacatctgccgggagacgcccaaaggtggggtggcctgcgactgcaggcccggctttgaccttgcccaaaaccagaaggactgcacactaacctgtaattatggaaacggaggctgccagcacagctgtgaggacacagacacaggccccacgtgtggttgccaccagaagtacgccctccactcagacggtcgcacgtgcatcgagacgtgcgcagtcaataacggaggctgcgaccggacatgcaaggacacagccactggcgtgcgatgcagctgccccgttggattcacactgcagccggacgggaagacatgcaaagacatcaacgagtgcctggtcaacaacggaggctgcgaccacttctgccgcaacaccgtgggcagcttcgagtgcggctgccggaagggctacaagctgctcaccgacgagcgcacctgccaggacatcgacgagtgctccttcgagcggacctgtgaccacatctgcatcaactccccaggcacgagcaaaggagaccgccaggcagccgctgctggaccactgccatgtgactttcgtgaccctcaagtgtgactcctccaagaagaggcgccgtggccgcaagtccccatccaaggaggtgtcccacatcacagcagagtttgagatcgagacaaagatggaagaggcctcagacacatgcgaagcggactgcttgcggaagcgagcagaacagagcctgcaggccgccatcaagaccctgcgcaagtccatcggccggcagcagttctatgtccaggtctcaggcactgagtacgaggtagcccagaggccagccaaggcgctggaggggcagggggcatgtggcgcaggccaggtgctacaggacagcaaatgcgttgcctgtgggcctggcacccacttcggtggtgagctcggccagtgtgtgccatgtatgccaggaacataccaggacatggaaggccagctcagttgcacaccgtgccccagcagcgacgggcttggtctgcctggtgcccgcaacgtgtcggaatgtggaggccagtgttctccaggcttcttctcggccgatggcttcaagccctgccaggcctgccccgtgggcacgtaccagcctgagcccgggcgcaccggctgcttcccctgtggagggggtttgctcaccaaacacgaaggcaccacctccttccaggactgcgaggctaaagtgcactgctcccccggccaccactacaacaccaccacccaccgctgcatccgctgccccgtcggcacctaccagcccgagtttggccagaaccactgcatcacctgtccgggcaacaccagcacagacttcgatggctccaccaacgtcacacactgcaaaaaccagcactgcggcggcgagcttggtgactacaccggctacatcgagtcccccaactaccctggcgactacccagccaacgctgaatgcgtctggcacatcgcacctcccccaaagcgcaggatcctcatcgtggtccctgagatcttcctgcccatcgaggatgagtgcggcgatgttctggtcatgaggaagagtgcctctcccacgtccatcaccacctatgagacctgccagacctacgagaggcccatcgccttcacctcccgctcccgcaagctctggatccagttcaaatccaatgaaggcaacagcggcaaaggcttccaagtgccctatgtcacctacgatgaggactaccagcaactcatagaggacatcgtgcgcgatgggcgcctgtacgcctcggagaaccaccaggaaattttgaaagacaagaagctgatcaaggccctcttcgacgtgctggcgcatccccagaactacttcaagtacacagcccaggaatccaaggagatgttcccacggtccttcatcaaactgctgcgctccaaagtgtctcggttcctgcggccctacaaataaccggggggagcggccctgcctgggggtggcctggtccgcggagggtgcacctgccctccacagtgggagctgcatgggcctccacaccaccttgggaaccccatggcactgcccttcagggaagccgaccagcccatggagaccgagcccaggcacccttcggacccgctgcccctgtgggagcaccctgcttcaggaagcctccctccctccctctgcctcccttccccaggacaccaagagcgccctctcctgagccctggcagaccgactgcaggtagcaggattgcaggaccctctgcctggcctggcgtttcaggagagaggggaagtggggcctgtgctctgggaggcgtggtcatccgagacaggagtccaggggagagaggaggggacaaaggcgccgtctgggggaggtcgatgagcctgtgctggcatccgcgggccccacgctttgccaactcctccagccacaggcaaggccacggctccgggctgttgcgctctaagggttctgtgattggatggaacagagctgctggggaggagactggaagtttctgcattccttcaacagaacatttaatgaagtactctatatatatatataaatatatatataaatatatatatatacttctatttgtgggtactttaggaaaatgccctttggtcactgtaaatatgaattgtgaccccatcccttcccgcatgagcccagtgagtcccagcagctatcagcctccctgaacgattaaacagctcctcccagc

SEQ ID NO: 1029 - DNA, 3319 bp, Homo sapiens
acaactgccatgtgaccttaggcacgttacttcagctgcctgagcctctgttcccttcatttgcaggaagggctgctgtgaatctcaagagacacattgcagtgagtgaatggcttgatagagcggaaaaaggtgtcctaggggaagggtggagagaaaggatgaattttggttctgttttgttgaaggccagggagaagccacacgcgcccgtgcacacaaacagacacttctgccctgatttatgcctaaaccaggcgtggacgcaccttgctgtagacctgctctccccttctcgccttctcctctgctgggcttcgcgccaacgcatgcgaggggaaggtgggaagggtggattggaaaggagcgctcatttctcagtcttggaactgggaaaaatttttaacgtgccagttacgggtgtctcaggactcgcccgcaaagccagccctctgccggagcgcgttttagcagcagatgctgagcagcagctccgcgaggtgagcgcccagggttctagtccgctaacaacactgcctcagatccggaccggaatcccgggaaggctcaccagggaggcgcctcagaggaaagctcagggttccgacctcccgggaacgaaacatgctcccgaaggacaaagacggcgcagggcgctcccggacccaactctgcagaatcctgcgctcagccaggccccaacgccagggctgcagacccgcctacctccgctcgctgcgcttccagcgcccacgctgagccatggggatgcttgggctcctctcgcactggtaggagaaactgccaggacaaccctaaccgctcgccttctacggggcctggaagagagctaggaccaccgctgtaaggtaggaccagatggcggcggagaggcagacaggcagatggagcaaactggatgaactagtcgaagaagcaggttattcgagtgagcggaatggggaatgggaagttcctcacctggcgactagagtttcagggcagcgcgagcggccggtcgacccgggatgaacaccacacctgctgtgggcgccttcccagcggagaccccgctcttattacagagatagctggagggggggggtccccaccagcccgcgcggccaatccaaagtggccaggactagccaatcaaaggaccgaccgagctccgattgcgtcatagctcgcactgccggcactggtactctggagcgggggcagtccgccccgctgtcatttttttcattgaggtcattgcttgggaagctggagagcctgggagaggacagagatttttcaactaagagtcggggcaagtcgaggagagtttggcgtcacctacagtgaggggccagagctgctctcacctccttggctcctaaattcctgcctcgcactccctcctgtcacgccagtgagggacccgaatccagccacccgaacccccagcgaggttgagcagtagtagtcctgggttctaaagggaccacagctgaaagagcccacggcagggaaggagggggggggagggaaaaggggagggaggggtcctcaaaatttgatctttttggaccacctggggtgcttccctggatatcctccgacccctcgagccctggcaacctgggcacccaaagaaggctgttttggtgccagtctggcagccagcccttctccacctcactcctctgggacgggcaggagccgaagagaggttggggagagggctaaactgacatagcctgcatacaaggctcagcatccacctcctccctcttcccctatatccccaaatcctcgaccgcgggtccagcatcccccacgccaagccaggaccctccactgctgcgccgaagttggcttacacagctgccctgcaactctgccacctgtttgccaagctgcctggcggagatggtctatgcccgggtctctatctctctcgttccacacccctaccccacttcgctgaagcgcctgagagctgagcgcgctggggtccagctgccacccacggaggggagcaggtgctgcagcccgagagtcagcctgagaattttcacacaagttccactcgcgactacagaccagccagtgcgcgcatcatcactcacatggcaggacccccaccacacgctctgccttctgcattcacagacagtccatcagacagccagcactcactggaacagatgcgccctcaccagctgctccgaaaagggagcgtgcgcaggaacccaaactaaccacacccatacccgaaagcaaccccgtgtgtttctgtttccaaaaacaggcgtgttttatgcaattgggggtacatactgtcccctaaacatgcacaccgacacatgcacgtccacgcacacaaactcggcctatccatcttttctgaaggaaagccgggttctgggagtcggcactgccagctcttcttgctcccgggttccaggagaagatcccagctttggcagaataggctaggaaggagctgggggtaggggcgatggcaagaaagaaaggggcgcctctcaccacagcccccagccccgggcctccggttcgctctctgacgcttggcagcagcgaccctaaataagtccgccagcgcccactgcactcctggagagcattcgggaaaacttgctggaggctgccgggcaggaagcaaagccagaggctggcggaacccctgcaggtaatgctcactgtttctgcgggtcagaaaaaagttcaggggatatctgtctaggccctctgggtccttttcttgtggcaggacccagctggtgggactagggcgggttggcctccagcacccgtgcaatggaaactccaggtaacacccacgaagaatcgggaccgctgactcgggtgactgccgcccggcctgcaactcagatgcgcagcgtgcactgaggcagggtgacctgcagtcgccccctcccctgggaaggcagtcagaactgttctagaagtagctccggcctgtggcggactcgaagtaaggcaggaggacttccaggacctttgtagtaccacaccaggaactgcagctctctaaggagtatttctatgtatgcgaaggttctctacgtctagactgttggatgcgcttttgtgtttttggttctgctttgttttttaatttttaatttgtgtaagttcatactaggtgtatatatttatggggttcatgagatgttttgatacaagcatacaatgtaataatcacatcatggagaatagggtatttgtcccctcaagcatgtatcctttgtgttacaaacaatccaattacactgttttagttatt

SEQ ID NO: 1030 - DNA, 3858 bp, Homo sapiens
gacgcctggccccgagcccctcctcggcctcccccgggccactcttcccttgcctcagccccgcagggtctccatgcccgtccgccccgtctccctcgcccgcggtctcgcccgcgcggagtggcggacactaaatgccacaacacacggagcgcctggctcgccgcccgcagaatccggcggtccgcagcggggaacaggggccgcccgcccctcctcaggcctccgctgcgcgtcccgcgccctcggcccccggccccaccctgcatcccggctgccggtctggccgcgggctctgctccttcgccttaagattgacgtcgtgttctgtcccccactcgcagcccgcgtcccttacatccgcccaccggcgcctggccccaggccttgacactcatccagttggtgttcagtgttcgatgagtggataagtgaatgactcctttcccaatcctatttgaaggcatgggaggcagaataggtagtaagtgttaaaggatggggtgtcctggagtcagagccgggcaggtcccagcggccccttcctagctctgtgctggggcaagtgccctacctcactccgctccagtttcatcaccagtggaatggagatgagaatagtttctacctctggcttgcccccaggtttccctagatgacaaataaacattccttttcctgcgtgaagatagtctgtggaaaccttggccatggcatcgatatcagagcctgttacattcagagagttctgcccgttgtactatctcctcaatgccattccgacaaagatccagaagggtttccgctctatcgtggtctatctcacggccctcgacaccaacggggactacatcgcggtgggcagcagcatcggcatgctctatctgtactgccggcacctcaaccagatgaggaagtacaactttgaggggaagacggaatctatcactgtggtgaagctgctgagctgctttgatgacctggtggcagcaggcacagcctctggcagggttgcagtttttcaacttgtatcttcattgccagggagaaataaacagcttcggagatttgatgtcactggtattcacaaaaatagcattacagctctggcttggagccccaatggaatgaaattgttctctggagatgacaaaggcaaaattgtttattcttctctggatctagaccaggggctctgtaactcccagctggtgttggaggagccatcttccattgtgcagctggattatagccagaaagtgctgctggtctctactctgcaaagaagtctgctcttttacactgaagaaaagtctgtaaggcaaattggaacacaaccaaggaaaagtactgggaaatttggtgcttgttttataccaggactctgtaagcaaagtgatctaaccttgtatgcgtcacggcccgggctccggctatggaaggctgatgtccacgggactgttcaagccacgtttatcttaaaagatgcttttgccgggggagtcaagccttttgaactgcacccgcgtctggaatcccccaacagtggaagttgcagcttacctgagaggcacctggggcttgtttcatgtttctttcaagaaggctgggtgctgagttggaatgaatatagtatctatctcctagacacagtcaaccaggccacaattgctggtttggaaggatccggtgatattgtgtctgtttcgtgcacagaaaatgaaatatttttcttgaaaggagataggaacattataagaatttcaagcaggcctgaaggattaacatcaacagtgagagatggtctggagatgtctggatgctcagagcgtgtccacgtgcagcaagcggagaagctgccaggggccacagtttctgagacgaggctcagaggctcttccatggccagctccgtggccagcgagccaaggagcaggagcagctcgctcaactccaccgacagcggctccgggctcctgccccctgggctccaggccacccctgagctgggcaagggcagccagcccctgtcacagagattcaacgccatcagctcagaggactttgaccaggagcttgccgtgaagcctatcaaagtgaaaaggaagaagaagaagaagaagacagaaggtggaagcaggagcacctgccacagctccctggaatcgacaccctgctccgaatttcctggggacagtccccagtccttgaacacagacttgctgtcgatgacctcaagtgtcctgggcagtagcgtggatcagttaagtgcagagtctccagaccaggaaagcagcttcaatggtgaagtgaacggtgtcccacaggaaaatactgaccccgaaacgtttaatgtcctggaggtgtcaggatcaatgcctgattctctggctgaggaagatgacattagaactgaaatgccacactgtcaccatgcacatgggcgggagctgctcaatggagcgagggaagatgtgggaggcagtgatgtcacgggactcggagatgagccgtgtcctgcagatgatggaccaaatagcacaccacaacacacaacacacctcacctcacaccacagcacacctcaccacaccacaccgcactgcaccatacctcaccacatctcaccacaccacagcacacctcaccacacaacacaccacaccccacaccgcactgcaccgcaccgcaccgcaccgtacctcgccacatctcaccacaccacaccacaccacacctcactgcccacacacggcgcaggctgcccgcctcctggagagcacacttcagctgaaacagtaaagcctgatgggtgcaaatggaacctggatgtgtgcacgtgtgtcccaggtagggacggcacaggagggtgcatggggcgtgggggagctgagcaagggtcgctcacttagaaatgtctttggaatggtgtttaactaatgctgctggcggacatcctaaaaccagatgcatcctcagaggacgagtctactaattattgcctttgttgttgtattacaaatctgcataaaatacctcatttcaaatcaaatcttacaaatttagaagagagatatgttttccgaaaacagtggaagccctttgttccttcccgggtttgtcctgagcctgcactgtcctcgcctgcagcctcagaggggcaggcatccccgcacagacttgactggcagggcggtcacgggacctgcgggctggctccgagtggcagcccatgccttctgcggggtatgggttgacacttgacaggttgaaaccagtgcctctatggacggctgctgtggccccttcagacaatgggcagtgcccaccccgcccactggcatctgcgtgtgagggctaggccgccctgccacacatcccgccccctcccggaggcagcttcaggacaggacaccaggctggctgctttttttagcctgcccctggcccaggcccagtccttggtgtcagggagcccccaggccgcaggtggagggtgataaaatatgttctctgacaggacccagccagccacataggtggaggttttccatgtccaaatgaggccaagatgccgaaatcccagatctgacttcacacttcccttttctagaaccttttgtaaaagttggtggcagcagaggcagccccaggcccggctgcatctctctgtgtctgttgtgccttgcccggcgcctcacggatggcaaagctctcctcacccatgggactgtagtgcaattaaacccgcgtctaggtgatgcttttaaagttgtagcttcgtgctttgtacagttttctttctggttttaatttttagttgtgctttgagtcagtgcaataaactagactttttcc

SEQ ID NO: 1031 - DNA, 4380 bp, Homo sapiens
tgagaggcagacaaacagcacaagagacagaaacaaagcaggcagcaccataggtagggaagtattttttttttaagtttgagaggcatttctgtagacagtccaacaactggacagacacgcaggcaccttggcaggtagacaggcaaacgacttgtcatctttgtcaggttcttcagagctgtgagttgctttctggatgcagctgatgggggttaatctatggttattgtgattctctttccagctgagtgtgggaattcagtcacagccactcagggtactttgctgtcccccaactttcctgtgaactacaataacaatcatgaatgcatctactccatccagacccagccagggaagggaattcagctgaaagccagggcattcgaactctccgaaggagatgtcctcaaggtttatgatggcaacaacaactccgcccgtttgctgggagtttttagccattctgagatgatgggggagactttgaacagcacatccagcagtctgtggcttgatttcatcactgatgctgaaaacaccagcaagggctttgaactgcacttttccagctttgaactcatcaaatgtgaggacccaggaacccccaagtttggctacaaggttcatgatgaaggtcattttgcagggagctccgtgtccttcagctgtgaccctggatacagcctgcggggtagtgaggagctgctgtgtctgagtggagagcgccggacctgggaccggcctctgcccacctgtgtcgccgagtgtggagggacagtgagaggagaggtgtcggggcaggtgctgtcacccgggtatccagctccctatgaacacaatctcaactgcatctggaccatcgaagcagaggccggctgcaccattgggctacacttcctggtgtttgacacagaggaggttcacgacgtgctgcgcatctgggatgggcctgtggagagcggggttctgctgaaggagctgagtggcccggccctgcccaaggacctgcatagcaccttcaactcggtcgtcctgcagttcagcactgacttcttcaccagcaagcagggctttgccattcaattttcagtgtccacagcaacgtcctgcaatgaccctgggatcccgcaaaatgggagtcggagtggtgacagttgggaagccggcgactccacagtgttccagtgtgaccctggctacgcgctgcagggaagtgcagagatcagctgtgtgaagatcgagaacaggttcttctggcagcccagcccgccaacatgcatcgctccctgcgggggagacctgacaggaccatctggagtcatcctctcaccaaattacccagaaccctacccgccaggcaaggagtgtgactggaaagtgaccgtctcaccagactacgtcatcgccctggtatttaacatctttaacctggagcctggctatgacttcctccatatctacgacggacgggactctctcagccctctcataggaagcttctatggctcccagctcccaggccgcattgaaagcagcagcaacagcctcttcctcgccttccgcagcgatgcatctgtgagcaatgctggcttcgtcattgactatacagaaaacccgcgggagtcatgttttgatcctggttccatcaagaacggcacacgggtggggtccgacctgaagctgggctcctccgtcacctactactgccacgggggctacgaagttgagggcacctcgaccctgagctgcatcctggggcctgatgggaagcccgtgtggaacaatccccggccagtctgcacagccccctgtgggggacagtatgtgggttcggacggagtggtcttgtcccccaactacccccagaactacaccagtggacagatctgcttgtattttgttactgtgcccaaggactatgtggtgtttggccagttcgccttctttcacacggccctcaacgacgtggtggaggttcacgacggccacagccagcactcgcggctcctcagctccctctcgggctcccatacaggaggatcactgcccttggccacctccaatcaagttctcattaagttcagcgccaaaggcctcgcaccagccagaggcttccactttgtctaccaagcggttcctcgaaccagcgccacgcagtgcagctctgtgccggaaccccgctatggcaagaggctgggcagtgacttctcggtgggggccatcgtccgcttcgaatgcaactccggctatgccctgcaggggtcgccagagatcgagtgcctccctgtgcctggggccttggcccaatggaatgtctcagcgcccacgtgtgtggtgccgtgtggaggcaacctcacagagcgcaggggcaccatcctgtcccctggcttcccagagccgtacctcaacagcctcaactgtgtgtggaagatcgtggtccccgaaggcgctggcatccagatccaagttgtcagttttgtgacagagcagaactgggactcgctggaagtatttgatggtgcagataacactgtaaccatgctggggagtttctcaggaacaaccgtgcctgcccttctgaacagcacctccaaccagctctaccttcatttctactcagatatcagcgtatctgcagctggcttccacttggagtacaaaacggtgggcctgagcagttgtccggaacctgctgtgcccagtaacggggtgaagactggcgagcgctacttggtgaatgatgtggtgtctttccagtgtgagccgggatatgccctccagggccacgcccacatctcctgcatgcccggaacagtgcggcgatggaactaccctcctccactctgtattgcacagtgtgggggaacagtggaggagatggagggggtgatcctgagccccggcttcccaggcaactaccccagtaacatggactgctcctggaaaatagcactgcccgtgggctttggagctcacatccagttcctgaacttctccaccgagcccaaccacgactacatagaaatccggaatggcccctatgagaccagccgcatgatgggaagattcagtggaagcgagcttccaagctccctcctctccacgtcccacgagaccaccgtgtatttccacagcgaccactcccagaatcggccaggattcaagctggagtatcaggcctatgaacttcaagagtgcccagacccagagccctttgccaatggcattgtgaggggagctggctacaacgtgggacaatcagtgaccttcgagtgcctcccggggtatcaattgactggccaccctgtcctcacgtgtcaacatggcaccaaccggaactgggaccaccccctgcccaagtgtgaagtcccttgtggcgggaacatcacttcttccaacggcactgtgtactccccggggttccctagcccgtactccagctcccaggactgtgtctggctgatcaccgtgcccattggccatggcgtccgcctcaacctcagcctgctgcagacagagccctccggagatttcatcaccatctgggatgggccacagcaaacagcaccacggctcggcgtcttcacccggagcatggccaagaaaacagtgcagagttcatccaaccaggtcctgctcaagttccaccgtgatgcagccacaggggggatcttcgccatagctttctccgggcacttggcagctgtttgtacattgtgacacccctccacgcacacatctgccccccagccacagaagcttggaccagaggtggacacctgagctgactgcagcaggggcaatcagatgttctctcttgggaagttggaataggacccaagagattctacttttgcctggacccatctcctgaaaagataaaaatccaagtgcaatggattgctgctcttctactttccatgtggaccaaaaagtagaacaatcctatgtgcagaaagagaatgattgagaagtggaaaaatttccttggtttctgatggcccttcagttcctcgtcctctacctttgtgaagtctggctgcaaacccacccttgggttctctcttctctgagaggcttttttgcttattctagcctgaattgatttatttacatccaaaggttcccaaggaatacaacaacctaggacccagcaatcctacttctgggaattatgcaaggatatgtgcatgaagatattgcttgatatgttataacagggaaattagaaataatctaaatgtaaaaatagtaagagattaggtattataaatttaaagtgtatactcagagagagagagatagggaaagatacagtcattacaaagcattcatgtatgaacctgggcaacatagtgagactctgcctctacc

SEQ ID NO: 1032 - DNA, 4554 bp, Homo sapiens
agagtcctgcatgcagaccgcagccactgactgttcccgagtcaccaggccactcttctctcctgcctcatcgtcttattcagggtccacgtcattctgccacctatttgaggacaccaggccttggctgtttctgcttcttgtacctcctgagtcaggtggcggtgggggagggcagacgccacacacacctgggtccactggccgcacggctcctggaaatgctagtgtgactttcctatgggttctttcaaaggacacttttagacctgccttttgtcccaaggattctagttgcttcatctttagtaccacagactggtggctaaacaacgaacatttactctgccaggacaacctcgctgccctcgtggttcctagcacccgcccggacctccacaccaggctactgtttccccaaacgagtgagtgtcctactcccttccggcagccctgaccttctcctgcctcggattctttcattctcttctcggctcctaaattcaagctccccttataaagctcagcccagattcccatgataacgtgctctgcgattatttgccgattccatcaacattttttgagtacctgttgtgtgcctgacacctacggcactcagagctggaagtggatccagctgtgagcagaacacagaccctcggggatcccccagcctgctggtagagacgacccccatccagggagatgcgggagcaccgaggagaagccccaaccctggggttcatggatggcttcctggaagaggaagcaaggtgaagtcagaggctaaaaatgcacacatttgcaggtgttgagcaagtagtgtggacgcgtgagcgatgaggcacaatagagcatgaaggcgcaggcggtggcaaagggaacttcgccatctggggaggcatcctctgcccagctttgatcactccctgggatgtgaataggagtttatcttgccagatatatgatcttccaaggtcacaggattttgcgaatttgtatcagatttctcagtttttaaatgttgccaacttgtaactttttaaaatagtcagtggaccatacaagacacaactgtaggccaggtgtgttctgcaggcccgtgttgcaacatcttgtctaagtggaattcagccaggcgctgtcatacgcagagcacctgccgagccatgtgacgtgctgctctctgccagccctgatcgccttcctttccagcaggacttgcgcttcacactggaccttgaggccccatggagatctgccattttgggcaggttctgctcacagtgccagtaacttcacctaggagaagagcgacaacttcaaggccgcatgacccatctgattgtcatcacacaggtccccgcaggagaatttccatggcgtttctcactctttgtttgcaaagaatttctttttttatcgttttctttttctttttctattttcttttttcttttttttttgagacagagtctctctctgttgcccaggctggagtgcagtggcatgacctcggctcactgcaacctcggcctcctgggttcaagcaattctcctgcctcagcctcccgagtagctgggattacgggcacacaccacaacgctcagctaatttttgtatttttagaaaagacagggttttaccatgttggccaggctggtctcgatcttctgagctcgtgatccacctgcctcggcctccaaagtgctgggattacaggcgtgagccaccacacccagcctaagaatttcttagaattaatatctgcacttggccccacatcctctgagtgataacttagaactgtcactttaattgttgagagaggatattcagagaatagtgggtgattttacaagcaaggatatgtttggggagcatgttcccggtgcattctcagggtctcgtgcattcttttagacattgaagacatcctgatctccagtggaagcagagccccagtcatacacttatccaccggggacgagttccaagacccccagggaatgcctgaaagctcgggtagtgcttacctctatggatgttgtgcacaaatttatttttccctctttacaacttcatagattgaaggttcgttcttaccaaagatcttagcaaccttagcttatcattccttttatttcctgattaagtggagaactttcaccttttcactaaaaaaaaaaagtgctttacggctgcctttgccacgtgcacatggtcttttgggaccatccttaagtcaaataagggtgacctggatgcaagcactgtgatacagagaaagtccagctcaccaccaagatggctgctgagccgctggtgggcgcggagtgtcgtgtctgcagcgtgaacatgccgggcaaaggaataatgcatgtcagggatagggtggagaaggactgtgccaggcttcatcacactactcagaatggcacacagtttagaacttataaatgatttatttctggagtgatccactgcatattttcagacggtggttgatcgtgggtaactgaaagcaaaacctgactgaaaggggctgctgtgttcatgtcagcaacgctgatgccctcgaggccagaagagtaaccaccaatctggtacctgagcacctggctgtaagtccaccctccatttctggccagggccgaggaattctctcttcttctctttattttcctcttgatttgagaaggtcaactctgagcatgctctaaacacaaatcagcatctctacacttcttcggcaccaggtgttgctactgtctttctgattagaaaaaaagaaatatccaggaattctggaagacggtgattgatttgcagctatgctgcgatggagctaagaatcattagcacaacccgtgctggtgttcgacaagacgcccaatcaattcatccgatgacaggtgcgctgtgtctgcgaagcgcgaagccgcggagtgaggtgctgaccaggctccaccaggagcaaggaacaagactccccaggggctcctggtccacagaaggcagggacgcccacaaacctaccatgagtaaatagttccaatgtgaagaagactgaaaatgccacagaagtgtgagccgagtgttttgaaattctttctgctgaagggattgagacgaactcttccataaaggagcatgaccgagccatgagttataatatatacatgcatatagaaagaggatgtgaatacagttgcagaagggcgtcaaagccgaaaacacacagggaatgacttgaggaagctgaggaccaagagcagtgctagccatgccagtgaccgtggtcgctgagaagctggatgatggatgtttgagtgaccatcaggaggatcagcatggtaccaggaggatcagcatgggaccaggaggatcaacatgggaccaggaggatcagcatgggaccaggaaacagcaggcgagtgaatgtgaactccactctcaacagggagatgacgtgggtctcggaaacctacagatctgagtgcttgctgtcaggtcatggcagggctgtgaccgcactgtggagggaacatctgtgtttttgtcctcctggaacctagtgcccctttcctggaggcagcatcctatttgacctgtgtgggtccaaccccacctctctcctgtagcagtggcatgggacccggggctgggccattcgcagcattgccacaggcagcaatggtgattgatctaggagttgatcattgatcctaactgggtgctcaggccaaggggattgattcttggtattttttaatctcttttttccactggaattatagctaatatgatgaagcctagatatactgcgtatctggcttttagacagggaaaacctgcctagaaatgaaaatgaagtcaccacctgtgaaagcagaaacaagagcttgagagagactgagtcctggtgagaatttctgaaccccttgatccagcgatgcctgaagccagaactacttgtaaacttttcagtcatgcaatcctgtcacttctgtttgttcttaagtgcattttgtatggtttctgccgctgaccacggaaacgtccttcactaacagggaagcagagttaccccatttgagagcctcagaaggaagatggcattcatgcaaaggaagcatgcgtttgctctcacttcccgagagaaagcctgaaaatgaagccaatctcattttctttcagagatgagtctcttgatcagagaatgcctcagttccctgtatctgaattttagcaagcgagagaatgcatttaggacaagcaacagcgatggctctagtgtgttcttggctgctctgtttctaaatgaaggttcacctggaggcagcctttgctgcagagacacccagatctcaccttgttcttgttcttttcaatcattttagcaaaggctcagcctactgatctgatttagagatgagctatgaaagcagatatttagataatattttcccaactgcctggagcattaggttagaactagtgagataaaaatataatgaaaataatagaaagctttgaccctcagattt

SEQ ID NO: 1033 - DNA, 3543 bp, Homo sapiens
agaagctgcaggatccgccccggcgaagcagggccgactcgcacccaggaccctgggcctctgccttccctcctagccttggagaagcaactggccctctcctcccgctgaggagcgacgcgggctggtaggacgtcccgggaaggccggcagctcgcgaccacgtcccggcccagcctgggcgcgccgaggagcagagccagcggccggctttcgctccggctccctccccggcgctccgaagccgagggcggctcctccggctgcagtctcgggggcgacgccttcccgggcagaagcttccagcagcgctccgcaacttctctctgctccagtcactgggagagagctcgcctaccaggtcctcccggcccggcccgaacatgctggacggcctaaagatggaggagaacttccaaagcgcgatcgacacctcggcctccttctcctcgctgctgggcagagcggtgagccccaagtctgtctgcgagggctgtcagcgggtcatcttggacaggtttctgctgcggctcaacgacagcttctggcatgagcagtgcgtgcagtgcgcctcctgcaaagagcccctggagaccacctgcttctaccgggacaagaagctgtactgcaagtatgactacgagaagctgtttgctgttaaatgtgggggctgcttcgaggccatcgctcccaatgagtttgttatgcgggcccagaagagtgtataccacctgagctgcttctgctgctgtgtctgcgagcgacagcttcagaagggtgatgagtttgtcctgaaggaggggcagctgctctgcaaaggggactatgagaaggagcgggagctgctcagcctggtgagcccagcagcctcagactcaggtaaaagtgatgatgaagaaagtctctgcaagtcagcccatggggcagggaaaggaactgctgaggaaggcaaggaccataagcgccccaaacgtccgagaaccatcttgacaactcaacagaggcgagcattcaaggcctcatttgaagtatcctccaagccctgcaggaaggtgagagagactctggctgcagagacagggctgagtgtccgtgtcgtccaggtgtggttccaaaaccagagagcgaagatgaagaagctggccaggcgacagcagcagcagcagcaagatcagcagaacacccagaggctgagctctgctcagacaaacggtggtgggagtgctgggatggaaggaatcatgaacccctacacggctctgcccaccccacagcagctcctggccatcgagcagagtgtctacagctcagatcccttccgacagggtctcaccccaccccagatgcctggagaccacatgcacccttatggtgccgagccccttttccatgacctggatagcgacgacacctccctcagtaacctgggtgactgtttcctagcaacctcagaagctgggcctctgcagtccagagtgggaaaccccattgaccatctgtactccatgcagaattcttacttcacatcttgagtcttcccctagagttctgtgactaggctcccatatggaacaaccatattctttgaggggtcactggctttaggacagggaggccagggaagaggtgggttggggagggagttttgttggggatgctgttgtataatgatatggtgtagctcagcatttccaaagactgaatacattatggattgcatagtttaatgtttctaataagagtcttagcattagatatgaagacgtgtttatcattaaggacagagacttttaatatagacattctcatgcaaactagatacttagggactcctaacaacttcccaccatgtcggggaagctcttgtcaagaggtgcatatgtctatccatctacacaccaatagacagaaggacagatagatagatgtgtgtgtgtgagtgtgtaacctttcgtattttaccctcaaagtttattcctaattataacagacaccaactgtacagcaaaagtaactttattttcagtgtgaactatatttaaggaaatgcttgatgcacttaagttataaaatgagataatttacttttataaactttatttttagcttgacaagacttgtcagcagggcagagagggctgctccacctagccccatagctttgagtgctggggttcattctgttttcagagtgtctttcagatctggaaagaaattctgtgtggctgatggtgttctctcttgcattcttgctctctttggggttgaatcactgggcaggggtgggacagaataatctctgatcatgttctgagaaaatgtaaagcccagactcctgggctttcttttaaattctgacaagtggttgttgggcagtgctaggatgattggttcagctcttgagcttcagcatctgcaaatgtggatgaggctaatagtatgtacctacctcactgggaaacaccaaggcttaattcattcccaggacacatgagcagggctgagactaatatctgatatttgtttaagatacaaccaggccactcacttggcaaaggagggtacatagggttgcagagcaggagggctcctgaactccagagggcagtctgcctgctgaagtccctctgcaaagcctgtgctgaaggagacaccagctcagagcagttcagagggatcccagagtcccagagtggggaggaggtgaaggctgaggggatagaggagggcctggtggtgttctagagcagggttgggcaaactcctgcttgcgggcctgctttctatggcttgccagcaaagaatggtttttactttttttttgaggtcattaaaaaaaaggagaagaagaatatataacaggctgtctgtggcctggaaagcctgaaatatttgctatctgtattgtctggcccttacagaaaaagtttggggccccttgttttagagggtctgtttctaaagaacctcatggcgctcatagaggcagaaggttccagtggaaacccttggctcttccttccaactcactcctctgatcctcggcacagaagacccagcagccattgtacatggggacagttccacaccctggtctccagttgcggtgctaggatggtattgttctgtgctaggaagtctcctgggaacccagaatgagttggtggggaagacagcgggtcactgtggacccatccaggaggggccaggataggcttggcctcatttctggggacatcattggagacttgaacacagagacacgtccctatcactctggcaaggccagagggaacatgtccccttatggtagagtctatgttgtgtgatttttgtgctcttgtttataatttatgcaaaccaccaagaaacccaaaccagtctgatgagtgaaaattatgcagatgctgtatggccccacaggtttctgtggtaaagaccagttggagaatgtaggagatactatgtgagtgaaaatgaatagagatccttattccactccttaatggcataccaagatgaaattaaaatctcttacaaatg

SEQ ID NO: 1034 - DNA, 3815 bp, Homo sapiens
agttagcccagggaggaaggggacagaatgacagcatggttatatcaatggtccaattcttggttccaacccttgattgtccttcgagagcaccacccattccttacaacacatctctccacttcattttgggagttttgaagttattaatgttattgatttcttttccttacaaccaaaataatctaaattaagattgtggccaagtttggattaaaacctgcctcccggctccaagacccatgtttttctatcatgctgactggcagcaaagacgtcttcccatggatttttcagaactctgttctttaaatgtgaccttagatgcaccagactcatgccatccaaaggttggaggtactgcccagttttagcaatgaaagtcccacgtcacgggaaacctctgagtcctggacaaatcaagatgacattttctatgcatatgcaagcatgtcaccaggagcagagcacagagggacaacacagcttttgcgcttccagctggctcccatcaagaagttagaagggagcctgcaaacacatttcctgctatcatctctccaccccagaatgactttccctggtagagctgggggaggggaggcgggcagcaggccccccaggaggccctgggcaggaatattaatactccaacttcccagcacaagaggagggaggaggagcggccacggcgcagtccggtcctgggggccctggaaggtggttgctgagcagcccgtgggaggcacggatccgccagctcacggcggcaggggccgcccaagtcctaatgaaaacacctagctcctggcagggcgcagccgacacatcgccctgccttctcggccacctgggagaggatgggcgccgcacgcggatacccaacctgccgggttgtgctcgcagtgacatcgcttttctcccggcaagtgcatccatctcgctgggtctggatagataacacaatctctctgcccacaccccatttgctgggagacagcctgggcttctccattttttatgggctcacttagcttggaggaaatccagaggtcaaagccggcgcagacgctccagtcaccttgcccgtccgggcgcgcagccattccgaaacgggctcacccacggggccctaaattacggcgattacactgcaattcgcagcgcgatattactttgatacactacctgctgcagcttggcccgggaggcgtgcattatttaccagggaggctgtccgtactgcgcaccagagctgacagcgctccgcggggtccctcctgtccctacagccccgccttcgcccgcggtgcggggtctggaggcagtggggcgggggcagggggtcattggagcagccccgctctctcggagtgaccgtttcctgaacgcaatatagcccggagaggacccagtggcggaagcggcagctggcgatgaggttgggggttagtaggtgggaacaagtgctgagcccgcagctcctcctggctcttaaggacacccagaccctccttagccggcctataagggcccttgttgcgcgcgcgcagggacccacacagggcctgcccaggggtgcaaggctggtccctggcccctggccaactgttaaaacggctagcagccggctaaccccaccggcaggctccaggatttagcctgtggcggctggtggcggagatggagggaactcaggctaccctcttcctcgggccctggaagctgcgtgcgcctcagctgaggcctgatttcgccgtggctgggggctggggccggagttgggcccggcttctctccggctcccccattacggtttggcatcagcatctagattgcaggttacttctgcttttatccaaagcggtccttaagggagatggagttctgattgaaatccagtcaattggcgccgtggctcagagggcccagcgtgagcacacttgtagggaaattgccctgggtctgagaggaggggcaggggtgggggagggaacaggacccgcaggcctgctctggagcctgtgaacgcgctgctgcgaggactttagcggatgcgctcaggtcggtatccgcgggagtcctggagggaaatccgctctccttctccagctccctgggattgatggaaccagaaacctcaagcaagggatccccagaggtcactgcgtccagtctccagcctcagacagtgtctgggtagtggaggaggggccgagtctgtgggaccgagctgtctgctttggtgggtgaaggagggtggacttctggggtctgggttgagatgtggattagttccaggactagttcctgttactcgtaggcggggagaggtcatggtccctgctgaacacatctggctgtgttcagtcctgaactgccctgggctcctcagcagtgtgcacaggggtctggcctccaaatttcttgctaacagcccatcaggagctggaggagctggcctggccttcaaggtgtggaggggttcctggaaggaagcagatgggcacagggaggagaagaatgacaaatccatgcttccccaatgctggggagagaatatggtggtggggaggaagcatggagaccagaagcattcccgggaatgcttctggaagtatcccagaaatgtcaagagctcattctgccagctcttccggggccagcaaagaacatacatatcatttctccatccactttgggacctgcctgagatgaacatatgttttaaaaggaatcccaattgctgcaggagcagatggtgctacaggggcaggcaagggcaggagaaaggatactggctggcagtagggtaggagtcctgggctctgcctcgccccttcctcttaccagccgtgtgagctgtgtggctgcgggcaagtcactccccggctctgtgctgccccattttccttgtgaagaatgagtgggtcccctgtagcatgcaggatgagctgaggcctcactcccctgcggtggagaggacagaacactctctccatcagcagggaagacagattttcctatttattagcctgttcagctggcagacacagggactgtcctctaggccatggggtggggaagagggggacagagccccacaccagcccccgctgtgtccatcctctgcctgtggctgtttgcctgattgatttgtttggtggcctccctggctgggattgggtccctgtgtcctcctgcacatttgcctctggtccctctctgtgtggtcaggagggggagctctaggtgtaggggcggaagagactggaacatctatccatcacggactgactcttgggcttggtaaggatcctaacaaccaccgggtccacctgccaccttgtgctccgggcccctccccagaagctccccctgcagtgggaggctcactgcctctcgctgagccactcccagaaagttcacccttttctggatcccaagttgagaggctgagacgggtggatcacctgaagtcagttcgagaccagcttggccaacatagtgaaaccccgtctctcctaaaaatactgtagtcccagctacgggaagctgaggcaggagaattgcttaagcccaggaggtggaggttgcaaggagccgagattgcgccactgcacaccagcctggctgacagagattccacctcaacaacaacaacgacaacaaaaagcagcggggaaaataatacaacacaaagctgctgtggtctgaagggcttaaaacagtacctggtgcatagttagtgcaagcttactgagtgttgagtgttattactgtcaatgataataatagaatgcctttgaaccctt

SEQ ID NO: 1035 - DNA, 5060 bp, Homo sapiens
gcgcacgccaagggggccttcttcaaccccaagtaccaacacgaaggcttctacttcggtgagacgcccctggccctggcagcatgcaccaaccagcccgagattgtgcagctgctgatggagcacgagcagacggacatcacctcgcgggactcacgaggcaacaacatccttcacgccctggtgaccgtggccgaggacttcaagacgcagaatgactttgtgaagcgcatgtacgacatgatcctactgcggagtggcaactgggagctggagaccactcgcaacaacgatggcctcacgccgctgcagctggccgccaagatgggcaaggcggagatcctgaagtacatcctcagtcgtgagatcaaggagaagcggctccggagcctgtccaggaagttcaccgactgggcgtacggacccgtgtcatcctccctctacgacctcaccaacgtggacaccaccacggacaactcagtgctggaaatcactgtctacaacaccaacatcgacaaccggcatgagatgctgaccctggagccgctgcacacgctgctgcatatgaagtggaagaagtttgccaagcacatgttctttctgtccttctgcttttatttcttctacaacatcaccctgaccctcgtctcgtactaccgcccccgggaggaggaggccatcccgcaccccttggccctgacgcacaagatggggtggctgcagctcctagggaggatgtttgtgctcatctgggccatgtgcatctctgtgaaagagggcattgccatcttcctgctgagaccctcggatctgcagtccatcctctcggatgcctggttccactttgtcttttttatccaagctgtgcttgtgatactgtctgtcttcttgtacttgtttgcctacaaagagtacctcgcctgcctcgtgctggccatggccctgggctgggcgaacatgctctactatacgcggggtttccagtccatgggcatgtacagcgtcatgatccagaaggtcattttgcatgatgttctgaagttcttgtttgtatatatcgtgtttttgcttggatttggagtagccttggcctcgctgatcgagaagtgtcccaaagacaacaaggactgcagctcctacggcagcttcagcgacgcagtgctggaactcttcaagctcaccataggcctgggtgacctgaacatccagcagaactccaagtatcccattctctttctgttcctgctcatcacctatgtcatcctcacctttgttctcctcctcaacatgctcattgctctgatgggcgagactgtggagaacgtctccaaggagagcgaacgcatctggcgcctgcagagagccaggaccatcttggagtttgagaaaatgttaccagaatggctgaggagcagattccggatgggagagctgtgcaaagtggccgaggatgatttccgactgtgtttgcggatcaatgaggtgaagtggactgaatggaagacgcacgtctccttccttaacgaagacccggggcctgtaagacgaacagatttcaacaaaatccaagattcttccaggaacaacagcaaaaccactctcaatgcatttgaagaagtcgaggaattcccggaaacctcggtgtagaagcggaacccagagctggtgtgcgcgtgcgctgtctggcgctgcaggcggagtcaccgactctgtgcagagaggctttgaaggatgatggagtccggctctgctggcctagaagcagagtgcaccctcgtgctcagtgctcagtgggtgtctgaactgaggggcagttgtcaatttgtctgagtgggaaacatcctggattttgttacttggcaaacagctggtgtaaacctacagccagcagcagtctggagcctgggagcctcctgaagtcccgggtgaagcctctggttttaccaattgcaggtcggcttggctgggagagatggatggcgggaaaggggcagcagtcttgaggagcagggagaggagtctttcctcctgccagcttcccccgtcagccccaaccccagcccacacattgtaccatctcttctgctgtgactgggttgcctgaatttgtgggagacccgtgatcccatcccagagtgtgcgggggacggaggtaagctggatatcctgggggaggaggggaatgcgctctggaaacacccttccggaacccttcggggaaaaggagaccatccttggagtgaacgtcccctgacaccccaaggttcaaactgtctcaagctgagagatgtttttagtagcataattaacacagggttttaacttgcaatacggaaaagacatttcagttgagaatgaaaattactacaatgaagtttgtgattttaaaagtggagacagactgggggctttggggctggatgtaagtattatatatttggcctcagggtgcccagagcaagacaaaaagcttttcttcacacacacaaaagtctgcatgagacactccgggcaagtcctgctgggccgccgcgatctgggtgaaagggcctggctcttttcctcgtcctgacctcacagtagcgcatgcctgtgagctgggatcgtggctttcgctgaagcagaaatagcagctgctcgatcgatatcatcttggaactcagcagttagtcgcatacctcagtatgtctcagtgggggaatttaacaaaatgcctcaactgctttggtacgaagtattttttttttaattttaactgtgaattttgaagctgaaggggaagcttgtgagagaaaagcatttgccaagactttgagcttatttttaggtcctcgtcctctgatgttctctttctgaaatgacacggagtcagtctcgggggcagaggtgaagtggagacggaaggattttccaggtgactggggccgaaaccaccagaaaatccactctgccgccgttatctggtgaaaggattcatgtaaaaatgttcgaggtggaattataaaaatagtaaccataaatgttaatcttaaatggcagaaatagaaatttggccttcagataacatggcgatagataagttcatctggcttgaggcaaactgaagagtcggggcctagcagtgcactctgggccagtttctctgccctgggccactctgtgtgccagactagctggacagatagagactttgtgcccctgatggggccgattggggagaggtgggctggggtgtgcaggcttcacaatccacagcagcccctgccctcccagctgacccagggagtaatcgcgtgctctaagccacagtggtcggggctgggcatgggcctctggagaagagaagatttgaggagaactgtcctagaggcaggaggagcagatgtgtttcagaatgggcagaattaggaaattgagaaagattttggctcaacagaatccagcaactgctccagatgttggagatgtttaagcagaagctggttgagcacttaatgaggaatgttgttgaaaatggtcattggaagaagtttaaggtcccttttagcctggagattgtacaaatcagcattccacatctggagttagctacccgcattaagcctgaacagacatcttggtctgaaaggaagtggtttggattcatgatgccaagctccacactatggagctgggaattccagaattgctttgactcagatattaatggagaaagtcatatccattaatggataaagccgtatctgttatggataaagccatatccagagttgctttgactcggatgttaatggataaagccaattattgatttctatttgcctaacctgccagcttttgtccaagtggggaatggagagccatagggatgtttgtcatctcacatgttttggtgatctgctgtctgtgggtctggacggaatttgttggcaagaccattttctgtattggatattcttcccaacagtgtccaccccaaaaggctttcagccaaaacatctgagcctaggtaggtttaccaagggaagccataagtcaagaagcatcagagtgaaaaggagcacttccttcattttacgcccggaggctaatgctccgagaggaatgtgtacttgggcaaagtcatgcaggaaggtcatatcagagctgtggaggctggagtgtcctgattcttggaccacagatgtctccctgagccattatttatttatttttaaaaagcacagttattccatcattttgagtctttgtatttcgcttatattggggggcaggactattttctcaggtgtctcatttggcagtcaacattgtcccctatgttccctatgactagttgaaaattcaagtgtgcccacaggggtgcacaaaaccacacccatgcacacacacaccctcagcccccacacacaccccgttgaacccgtgggtctatcaggacatcctaaaactccgtgattgacatttcagtaatttcaggggaaggtgttttccagggatggggtctcccaggttcagatagtgcctttggctgcaaatgctcctttagctaaacttttcctcaggaagaattcattattctagacattatgtgatatatctgttaggaataaaaggtgcttaaccttcctccctgggatgtgggagaaggtgctggaggttgtactgtgaagtcttcaggctcttagaaggctccagcctgagagagccctttattattgacattcctgtccttcctcaaggcctggtgacctgtgacctttcgctctgggcagggcccaggtagatgggccgtcatccgggcctgtaagccgtacttgatttctgcattgatttacatattttttactgtgatcttggttccaaacacaggatcgtcaccccattctcccttgaatgtgccggatccttgtaaattctcatttacctacttgttcttagtgtgtatgtgtgtgcgaaactctatgttcaagaaagaaatcatacaaagagtaagaacatgtttgtgccattgaagaaatggttttttgatttctaataaatatttgttttgcctcgtt

SEQ ID NO: 1036 - DNA, 4120 bp, Homo sapiens
gtgcatcttttaagtcttggcctaaatggaacctactcctggaagtcttatggaaccatggtctccagattcgttcagataccctattcaatgtgttttccctcttagagcccatgtcacagatgatggtaaaggctaatttcattagttcccttccctgccagccagtcagctcctaaagagactatacctgtctttcttgctattgtcttatcccagcacatattagacacgttttaaatattttctaataaatgaattgcaggcctgtaacaattttttaatcaaaaatgaaacaaatattctaatactttaaggtgcaagttcaacatggaggcaaatcactgctccctgggtgtgtatccatcttacccagacctggtcatcgatgtcggagaagtgactctgggagaagaaaacagaaaaaagctacagaaaactcagagagaccaagagagggcgagagttatacgggccgcgtgtgctttattaaactcaggaggaggagtgattcagatggaaatggccaacagggatgagcgtcccacagagatgggactggatttagaagaatccttgagaaagcttattcagtatccatatttgcaggctttctttgagactaagcaacacggaaggtgtttttatatttttgttaaatcttggagtggtgatcctttccttaaagatggttctttcaattcccgcatttgcagccttagttcttcattatactgtagatctggcacctctgtgcttcacatgaattcaagacaggcattcgatttcctgaagaccaaggaaagacagtccaaatataatctgattaatgaagggtctccacctagtaaaattatgaaagctgtataccagaacatatctgagtcaaatcctgcatatgaagttttccaaactgacactattgaatatggtgaaatcctatcttttcctgagtctccatccatagagtttaaacagttctctacaaaacatatccaacaatatgtagaaaatataattccagagtacatctctgcatttgcaaacactgagggaggctatctttttattggagtggatgataagagtaggaaagtcctgggatgtgccaagaacaggttgaccctgactctttgaaaaatgtaattgcaagagcaatttctaagttgcccattgttcatttttgctcttcaaaacctcgggtagagtacagcaccaaaatcgtagaagtgttttgtgggaaagagttgtatggctatctctgtgtgattaaagtgaaggcattctgttgtgtggtgttctcggaagctcccaagtcatggatggtgagggagaagtacatccgccccttgacaactgaggaatgggtagagaaaatgatggacgcagatccagagtttcctccagactttgctgaggcctttgagtctcagttgagtctatctgacagtccttcactttgcagaccagtgtattctaagaaaggtctggaacacaaagctgatctacaacaacatttatttccagttccaccaggacatttggaatgtactccagagtccctctggaaggagctgtctttacagcatgaaggactaaaggagttaatacacaagcaaatgcgacctttctcccagggaattgtgatcctctctagaagctgggctgtggacctgaacttgcaggagaagccaggagtcatctgtgatgctctgctgatagcacagaacagcacccccattctctacaccattctcagggagcaggatgcagagggccaggactactgcactcgcaccgcctttactttgaagcagaagctagtgaacatggggggctacaccgggaaggtgtgtgtcagggccaaggtcctctgcctgagtcctgagagcagcgcagaggccttggaggctgcagtgtctccgatggattaccctgcgtcctatagccttgcaggcacccagcacatggaagccctgctgcagtccctcgtgattgtcttactcggcttcaggtctctcttgagtgaccagctcggctgtgaggttttaaatctgctcacagcccagcagtatgagatattctccagaagcctccgcaagaacagagagttgtttgtccacggcttacctggctcagggaagaccatcatggccatgaagatcatggagaagatcaggaatgtgtttcactgtgaggcacacagaattctctacgtttgtgaaaaccagcctctgaggaactttatcagtgatagaaatatctgccgagcagagacccgggaaactttcctaagagaaaaatttgaacacattcaacacatcgtcattgacgaagctcagaatttccgtactgaagatggggactggtataggaaggcaaaaaccatcactcagagagaaaaggattgtccaggagttctctggatctttctggactactttcagaccagtcacttgggtcacagtggccttccccctctctcagcacagtatccaagagaagagctcaccagagtagttcgcaatgcagatgaaatagccgagtacatacaacaagaaatgcaactaattatagaaaatcctccaattaatatcccccatgggtatctggcaattctcagtgaagctaaatgggttccaggtgttccaggcaacacaaagattattaaaaactttactttggagcaaatagtgacctatgtggcagacacctgcaggtgcttctttgaaaggggctattctccaaaggatgttgctgtgcttgtcagcaccgtgacagaagtggagcagtatcagtctaagctcttgaaagcaatgaggaagaaaatggtggtgcagctcagtgatgcatgtgatatgttgggtgtgcacattgtgttggacagtgtccggcgattctcaggcctggaaaggagcatagtgtttgggatccatccaaggacagctgacccagctatcttacccaatattctgatctgtctggcttccagggcaaaacagcacctatatatttttctgtgaagtgactattaggaagaactccaaaccaaaatactgtgtaaatgtctatgggtgacagtctgctgatggtagaaacctttctttttagttcacaagtcagttagagatttggacagagctgacacaaagagtttggagctcccccatttctggctctcctttcaggggttcctcccccaactcttttcagcagtggtggctgccccccattctgacctctgactcttgcagccagaaagatggtggttttctaaaggaactttagctgtgctgcacaatgcagacctgtgtcttgctctctgggtaaaagccataaaaataagaaactcagcctgtggcctttcttccaaggctggagttctcgagttcttttatgtgacttcgtgtagtttgttgctttaaaaaatttgtccagaattgttttctgcagaagcatggtctgttaggagcttacaggccataggagaagcagttgtttcctgaatttatctttgctgtattcatttagggcttgggagagtcccaagataattcagtcactgtcagattaatcatttcggcagaacaaacaatattgttatgattatttaatccttaaaattgtgatctccagagtttgttatcagaataacccagaccaaggcttaattgtaatagtgaacattaatggtacctttacagagaaattataggccaagagaaaatgctggctttcagtagaagttaatattagaaacccaaatctggttctgaaagtgtgtatcagatgtacggtgaacaaacttgggaaagattttctttaaaaatcaatgagcgttggccaggcacggtggctcacacctgtaatcccagctgtttgggaggctgaggcaggtggatcacctgaggtcaggagttcaagaccagcctggccaacatggagaaaccccatctctactaaaaatacaaaaattagcagggcatggtggtgcatgcctgtatcccagctacttgggaggctgaagcatgagaatcacttgaatcctggaggcagaggttgcagtgagctgagatcatgtcactgtactccagcctgggcaacagagtgagactgtctc

SEQ ID NO: 1037 - DNA, 3470 bp, Homo sapiens
ttacatgagaagattggagatgaagatggccatttcccagctcatagggaagtgatgctctccatgctgatgcattcttcatcaaaggaagttttccaggcatctgcgaatgcattgtcaactctcttagaacaaaatgttaatttcagaaaaatactgttatcaaaaggaatacacctgaatgttttggagttaatgcagaagcatatacattctcctgaagtggctgaaagtggctgtaaaatgctaaatcatctttttgaaggaagcaacacttccctggatataatggcagcagtggtccccaaaatactaacagttatgaaacgtcatgagacatcattaccagtgcagctggaggcgcttcgagctattttacattttatagtgcctggcatgccagaagaatccagggaggatacagaatttcatcataagctaaatatggttaaaaaacagtgtttcaagaatgatattcacaaactggtcctagcagctttgaacaggttcattggaaatcctgggattcagaaatgtggattaaaagtaatttcttctattgtacattttcctgatgcattagagatgttatccctggaaggtgctatggattcagtgcttcacacactgcagatgtatccagatgaccaagaaattcagtgtctgggtttaagtcttataggatacttgattacaaagaagaatgtgttcataggaactggacatctgctggcaaaaattctggtttccagcttataccgatttaaggatgttgctgaaatacagactaaaggatttcagacaatcttagcaatcctcaaattgtcagcatctttttctaagctgctggtgcatcattcatttgacttagtaatattccatcaaatgtcttccaatatcatggaacaaaaggatcaacagtttctaaacctctgttgcaagtgttttgcaaaagtagctatggatgattacttaaaaaatgtgatgctagagagagcgtgtgatcagaataacagcatcatggttgaatgcttgcttctattgggagcagatgccaatcaagcaaaggagggatcttctttaatttgtcaggtatgtgagaaagagagcagtcccaaattggtggaactcttactgaatagtggatctcgtgaacaagatgtacgaaaagcgttgacgataagcattgggaaaggtgacagccagatcatcagcttgctcttaaggaggctggccctggatgtggccaacaatagcatttgccttggaggattttgtataggaaaagttgaaccttcttggcttggtcctttatttccagataagacttctaatttaaggaaacaaacaaatatagcatctacactagcaagaatggtgatcagatatcagatgaaaagtgctgtggaagaaggaacagcctcaggcagcgatggaaatttttctgaagatgtgctgtctaaatttgatgaatggacctttattcctgactcttctatggacagtgtgtttgctcaaagtgatgacctggatagtgaaggaagtgaaggctcatttcttgtgaaaaagaaatctaattcaattagtgtaggagaattttaccgagatgccgtattacagcgttgctcaccaaatttgcaaagacattccaattccttggggcccatttttgatcatgaagatttactgaagcgaaaaagaaaaatattatcttcagatgattcactcaggtcatcaaaacttcaatcccatatgaggcattcagacagcatttcttctctggcttctgagagagaatatattacatcactagacctttcagcaaatgaactaagagatattgatgccctaagccagaaatgctgtataagtgttcatttggagcatcttgaaaagctggagcttcaccagaatgcactcacgagctttccacaacagctatgtgaaactctgaagagtttgacacatttggacttgcacagtaataaatttacatcatttccttcttatttgttgaaaatgagttgtattgctaatcttgatgtctctcgaaatgacattggaccctcagtggttttagatcctacagtgaaatgtccaactctgaaacagtttaacctgtcatataaccagctgtcttttgtacctgagaacctcactgatgtggtagagaaactggagcagctcattttagaaggaaataaaatatcagggatatgctcccccttgagactgaaggaactgaagattttaaaccttagtaagaaccacatttcatccctatcagagaactttcttgaggcttgtcctaaagtggagagtttcagtgccagaatgaattttcttgctgctatgcctttcttgcctccttctatgacaatcctaaaattatctcagaacaaattttcctgtattccagaagcaattttaaatcttccacacttgcggtctttagatatgagcagcaatgatattcagtacctaccaggtcccgcacactggaaatctttgaacttaagggaactcttatttagccataatcagatcagcatcttggacttgagtgaaaaagcatatttatggtctagagtagagaaactgcatctttctcacaataaactgaaagaggtaagacgattattgccacttaaaaaatatactttatgatttgcatcattacaaattatcattttaagtgatatttagcttctaaataccaatttcatgaaactagaagcttcctgttaactataaattcctgtcaactataaatccagatttccattaaatttaaaaataagaacagctactaatgatgtgtcacttaatttaatttccattctcacaccgacaatttaaaaaaatctacttttaaaaataaggtagtagccttaatacttccactaaacaataaaacaatatgctatacttatcagaaccttttaatctgaaagctaaacagctagatataaatttgtctacccaacatttgtacaaagtaaaaattattagaatattcatttcaaattatgtgtgatgttatcatataacatattatagattaactcaaattattcttaactgttacttaactatgacaaaacaacttagaacgctttgctaatacacaagatagtataaggataaaaattctttatagtactagctcataaagagtgttctatggaatagtagtggatgtcatttaataactataaattcaaaataagcattgtaaatatcaataccattcaatttttttttgttttttaaacaagttgtaagcctaccctatggtaaatggatatggtaacacagcataatttcctcaaaaaattacttttgtgatatacttttaaaggattatatgaatatatacataattatagatgaatgtgatgctgtgtgtcattgtatcaccaaatctctgtccaatctgttaacagactcttaaataaaccatttttctc

SEQ ID NO: 1038 - DNA, 5015 bp, Homo sapiens
aatgcaggggagagggcctgggcctggccttgctgctggtcccctggggacttctgagggcccgcgggggtccctgggtcacagtgcagccacactggcctctgggctcctttcatccacaggccgcctggtgagccccgcagcctcacccacgtggggaggggctgctgaggcctccttgcccttcttggtggccgccctacgcctcgggggtcctaccctcctcttctgtgcagccccaacgtggctttgcccccttctccaaacttctgccttgggccatggggcgcaggccgtggggatgctgtctgcctgctttagagaaacctggggcaccgatgacaaatacaggctctgcttggcctgtgggacggttggtaagccccccacctctgagaccctgggtggccacattcccctcccaagctcccccggaatggggatgcagcctgccccttccttcctcctgggcactgtgcaggcttagggaggatgcaggtggcacagtaggctgtgcccacccggggtcccgggaccccagcccctaccgcctcctcctcctcctctgaattcttggagccctgtgggcctatgtggtgtgacgtggcttcccctccacccaccctcagctcccgatggcttggggggttctccgcagccagcgaggcccacagccggcctccccgggttctgtcctgcccccgacagcatcctgggccttccggtggtgtcaggagactccaggcccttgaaaggcagctgcgaccccgggtatgactcggagaagtccaggagcaggaaatgggctgcattccttcggggcccctccgtgcaccccagcccctccctgggagagctgccctgaggtcaggaaagtgccgtcctggcaagaccctcagcagctgccgcccacaggacagtcagcgttttcaagcatgggaaggaaaataaacacgaggttaaaaaggggtctgttggccccgggctggtttgtttttcctgtgtaagggaggcaacgggaatgagaaccatctgtgccctgagcgcagcgcaagctgcctgctgggcccacgtgccctcccccaaagaccacagaagccaggcagagccttgctcccttccagccggggccgtggctgctggccggcagggacagtggtgttggctggggcaccaccctcctttgccacagccctgggcctggctgcgggcagagaacaggccttcgattgaagctccaaccttccgggccacctcctttgggcttcgggcacctgagccagcatcccattgtaagggcaggggctgctgggggccctgcctgtgccaggcctcagctcagccctctttccccaggcgctgctgccatcaggaggcccacagagggtccacaccaacactgtgagccccttgtgggtcccctgggttagtggtgggaggctggtgaagagaagtggggacaaaagacattgcacaaatggtggagggagggagagatttgcagcctcgtagctgtcattgctgggggagcttctcctggtctccttccttgatgcagagagctgggagcttgtgtccgtgggccgggagagccccaacattatatcagaacttgtggggaaacctgcacccccgagggctctggctttgttaggccgagctgggctatgaggctgtgtgacctggcacaagttgctttccctctctgagcctcggttctgtcacctgagggctgcccgtcccgcaaggtgtggagggtcactgaggcgtggggtttctgcggtgcttgtccatgtgcctggcacacagtggggtttgtgcagtgcttgtccatgtgcctagtggctcacagtggggtttgtgcggtgcttgtccgtgtgcctggcacacggtggggtttgtgtggtgcgtgtccatgtgcctggcacacagcgagagctgctggggtcatgttgctctcacactcgtgcctgcccctgctgggcccctgcagtgggtcctggctggattgggggtacatccccaccacactgcacagaggggcgtctcctcctatccagggacctgattctcctgtcgagaaaacctatgaaggggacccagagatggagtgtgacaaggccaggtgacaggcctgacatgtggtgtccacatccagaagggagaccctggagggatgaccctccactgccaccccctcccatcaggctctggacaccctcgagcctcccaccatccaccttaccagatccccccaagagtccgggaagctcactcccccaggggaccaggagcacagccccttccattcctaacgggcctgactcccaaaggggggtgaggaaagaaaaagccatttcacatcgacttattcttctggccccaggcagcagcacagggcgcagggtgggcctctgcagacacgatggctccgtggtcagggaggggccacctcccatgtgcctggggaggggccctcccaagcccctgcgtggcagcgccaaggggttggagtcagccccagcacacacagggccctgctcactggtggccattgtcagcgccacctccaccttcaggagcctgccacgtgcctgccctcggtcacttagccctccctggcacgcaccactttgtccacacaccctgtgtgtaagtggtgacagcggtgacagctcaggcgtcacctgatcgggccgactctaagccttagtccttccttgtcctgttgcgccggacaagcctctgggaggcgacggtgggacagccacagggttcttggctcagcccccaggagtggggagctggggctctggacggaggtgggcactcgaggctggtgtggcctcctgggtgagggccaggctagggagaggcagccaggcggccccaagccaccccaggaacaaagcaccagcacacacctccactggtttgctagggctgggagaagttggagtgtttctgtggtggctgtggcagcccacggccccaagaccctggcttccttctgctcccaccttttcaggccccttccccaacaagcagctactgtaggacccagtgggggctagggcaccagcagctgccattacccatgctgggtcctgatggttcctgaccagcctcaaccgtggattccaagctggggaaggaagaagcaggccgggagtggggagggagacagtgaaggacacccaaacacacacacacacacacacacacacacacacacacacacagaaggaacagtttcagctttgtttcccagtaatctcacttaaaaagaacacttgggtttaccatgttcacataatctcgttgctctgagaatgaacttattcttcctcccagcttggccatgtgtccctccccattgcccaagtcccctcatgacatcatctcccactgccatgtcctttccttggggacctccaagtccctggagtttggggactgcagggtgggtggaggggcccacaagctctgcagggagccagaaggaaacggtctgtcccaccccagggctgagcacctcgctgggagatgatacccacacctggaaatagctcaagggccgcgtgaggccgcacgacacccacgccagtatgagacacctggccatgcggcattcctggccgactgctggcagctgcagactttgtcagccaggtgatgtccccgggatctctgggcaggcagggcacacaggaggcaactctcgctcactcatcatggcgaggcaggtcgtgtggaacttccttggtcttcctcatctgcgccccacccagcctggcagatggtgatgctgtgagtgccagggaaacacacacacgcacacacacacacatgcacacatgtacagacaggtgcacatgcctgggagagtctgtgctgctcagcttccgagggcagctccccaggtctccccccgggtctgcggtgggaggcgagtcttttaacatcggctcaaaccaaacaggacgaggagggcaaatcggccgtccccagtaaatcctagggagtccctccaaggcaaacagaaaatgcaccccagctttcgcttttaggggtttgagttgcgagtttccagtctgcggagtgcgatggccgggtgtaagtctgaaaccctctgggggagagaagccgcacagtgcaggggtacacatcccagatccactccccagctgtgaggcccaggcgcattccgcgttccccgcccatctccacctccgagggttgcgggaggctgagcagttagaaccgtggctggcatacagagagcactcggtaaacgtggctgtgctgagctgtgggcctcgaaggagtctcgcggggctgctgtaccaatgaccttgcactgggtggcctaaaacaacatgtgtttcctcacagctcgggggaccagagctcagaatctgggggtcacagaggagggtccatgctcatccaggtcagctctaggggctgcaggccacccctaatctaggatggtcttatgttgaggtccttaattacatccacaaagaccctttccccaaataagtccccacgcacagttcccagggacagcctctggggcagcatcaccacccactcagtcctccatgcacccccttgcgctatcacgtaacttggatcaggtccacgcgtgtggctttgcggctttcctttgtcacagcatgtcacaactgttttcccgggtgtcactgctgtggtttgagtttgtgtgtccccagccttcatatgttggaacctgagacccaagaagatcgttataagacgtggggcctttggaaggtgattaagtcaccagggtccccattgaagcgcttgggaaaccatcgaggccccctcccctttgtcctctcaccttccgccgggagaggacacagcaagaggcacccactgggaggcagagagcagcccccactcccaccgaggctgctggcaccgagaccctggacttccagcctccagaagcgtgagaaataaatgtctattgtgtgtcaatg

SEQ ID NO: 1039 - DNA, 3007 bp, Homo sapiens
aaaaaaaaaagccaaagctgaactcgaaatggagcatccacagaatggagatctcctgcacaagccagggattctttttcctcaaagagcacagctctggagtgagctctgtgaaggcagcacagatgcctggaaggaccctctacagaagcctttgctcctgtgtgtttccgctgcatagcccaaccagacctccatcgccggcatcagcccccaagggctttctcctgctctccccaactagcagcaacgcctccaagctcatgccttattatttattccaccgaagcagaggagttgacaacagcaaaatctctgttcttatcctacttggctgtgaactcgaacaaacaaagaaaaaaaaactgggaccagccactgccctggggaacagtggcagggtggagtgatctgaacatgaggcatgagaagaactgagtgactacagtgattgggctataatagactctgtcactggcccagctgtaatccctggcgcctgctgcttcactgtgttctgcaggagttccactgccctgaatctctgactctgtgcccgaggtctttttctggaattgtggaaggtgctctgctatgtgggaaacaagctggaagttccgggaatcacacttcccagaagctacacccaaccagtgattgacaggagttgaagtaaaaacatcatggctttcttaccccttaagtggaatattttatactatttttcagaatttccccaaggagttaagctgtaattgcccatcacggcagccgggttaataaggtatctgtatctgccagaattaaatgagacggcagaatcacatagtaatttgagcaggaaaagcttaatataaggaattatcatgtaattatagagttgttctataattatgtaatattatattctaagctcctcttatacaatataggagaggatttgcagtaacaagggattagatagcaagatgtaagagaactctgaagaatataggactagtggatataaggaacagccactacccctggggctgaggtggagcactccaagaattaaagaacctggaataagaacacctcacctcactcacggctcactggatggtggacaagtccctgagttgtgatgctgtagaactttctggaaatttgccctccatattttcaagggaagatgtcaaagagaagtttcatctctcagaaattatctcaaaaccttcttggggattaccagggaaaattgtcacaggagactccatgaggggtcatgtcactcctaggctgttcaagggagttctgggggaagctgggcactgctggtcacaacaggttgtaaaagctgggccctggagaagctgtccgcactgcaggagactgggtgctgctggagttgctggatgagcttaaggcatgtggggagaggagaacattagaactaggaaatgagacctctctctattctactgtccctccagcaccctctactgtaaacacttagcattgtgccacctggcacaggagaagtctttacagggcccgtctataacatagcaaagcaggcaacaaagggtgaacttggagtggctcacatgttgctctatgttgacttcttccctttcctttttcattcccctactccccttattggttttccttaaattctaaataaaatacagtcatcctcagtatccaagggggattggttccaggcttctcagagaataccaaaatctgtggatgctcaagtctcagttataaaatggcgtagtatttgcatataatctacacacgtcttcccatatactttaaatcatttccatgttacttacaatacctaaaaaaacgctacataaatagttgtcattgtcaattactttttatttttgtatcgttatttattattttttcaaattttttttactgcctgtttggttgaatcatggatgtagggttcatggatattgagggctgactaatcgcacttgacttttgactccgtgttggcttttgggtaaacccagactacattttgaaagtaaagccaataaaattttctaatgcattgtatttgggatatgagcaaaacagaggagtcaaggatgcttccaatgtttttggcctaaaccatggggaaaatttcatctttataatattaagtttcttagttttaatactgaatatgatgcctccttccaatttccctgtagagccctttgcatctttcattgaatttattcctaagcatttaatagttttgatgccattgtaaatgatatattttttctttttcttttttttaaaaatagggtctcactttgttatgcaggctggagtgcagtggcacgatcttggctcactgcagcctcgaactcctgggttcaagtgatcctcctgcctcagtcccccaagtagctgggactacagacatgcaccaccaggcctggctaatttttttgtattttttgtagagatggggttttgccatgttgcctaggctagtcttgaactcctgagctcaagtgatccaccggccgtggcctcccaaagtgctgggattataggcgtgagccaccacatccagcttgtaaatggtatatttttaaatgtcagtttctaaaatgttttgttagcataaagaaatacaattgactttttaataccaagccatcttgctaatttaataatttagttctagatctgatttagactttatagttgtgcaattgtactatctgtggaaaatgacaatttttctcttcctttataatctttagcttttttttcttttccttggctttttgcaagataatgggatgtccagtgtggtgttatatacaagtggtaattgtaagtgtccctgttctgttctttttgtttgtagttctcaagctcaaagaaaaacaactttgctatttcgtcattgagtatgataacacttaaactttacttactgtaggattattgtacataatctttattgtattaaagatgttcctattttgctaag

SEQ ID NO: 1040 - DNA, 3343 bp, Homo sapiens
atagatatctgcagagggccaactggaaacactgtatctgccctctaggaaaccagctaggagagttgtgtacttacggagggatggagttacaaaaggtaacccctgagactgcgggattctactctcgacgagaacgaccctcggatgagagagcagcccaggggcacgcaggccgacctgtcttagagatcacggatggcggcacgacttttggggagagtcaacccagccaacacggtccgggcaggcctgaggctgggatgctgtgctgcttttcccggactccgcctggggtttcctcatcctgtttggcgctttgcgactcctggcatctggagacgttcccgtcgaccccgtggagaggtcaggccggagcctcagaaccctgacacccatggactgccgcggagggctcctgcttttctaagcctcggggactggtttctaagacaaccgtggaaccactgtgatgggaaaagccactcgcgcctcgcccaggagcattggctgggcggactcgcgctccgctcctggcagtcaggctgcgtcccctttaaataatggcagcgctgcggggtggcagcgaggctcctgctgcagccgcggagtcggctgcatccggggtccaatttgaggcagcgtgggagaggggccccgggtatattgtcccagggcaaaagccccaggagtcctgtcctcaggacctccttgagccgacttccaccgatggagcgggagcttcaggaggcttgctgtgttctcaggactccccttcagatccattttggcctgctgaatgagataggatgggctcactacatctggtgaggccgtagggcctcgctgcagcacagaataatcccataagtctcaaggcctagtgtcagctgcactttcactgatccatcagccctctgcttccttcctcctttgaaagagcagtggcctgccccgcttctaaaagccctggggctccggaaagccgaccgcgctttatgggactggtagaaagaggatcaggggtgaatccgagatggagaccatgtgaccacgcgtggcactggtgtatcccacagcagatggtgtgaatgtgtgtcaccggaggcatacattgtgatggcgaaaccaacaatggtgtccaggaatgtgcccggtcgaaggggggaatgagtgacctttccatcaatgccaaggaaaatcaaagaacacctgggaacgaggagggtgcctgtgccttagtccaagccacattttgaaatgcctgccagaggattaaagaggttttggcaaaattcaccccacccccaaccctccatggcccaggtagccctgacccaacctcccctgcaaccagccgcagacccagccccagccccagcccagtccctttggttcctttccccgacattcgttatggtcaaaagatccagagactcagtccacccaggagcagaggagaggatgtctctcacgaatgagacatgaagtgcagaggaaatgcgacaccacctgtcctagaagacaaggtctgtcacggtcgactagcgctcattccaggcaatccacccacccatgaggtgaaacacggagaggaaggaagcttccctgtctgagagaagtatggaagccaagagctccagggtcgtctatcctgccccatcaagcagaaacaggttgaaagagataaacgatcacgacagggatctccagtaagtgtctacctgacggactgggttgtgatcattgttgaagacattcagcgagagcgagaggcatctaggcccctcagaaacaggggagacagagcaagaggcaggacaaagcagaggccaaagcccaggcaggatacagcactgtgccactgccacggccatgaggggaggggtaccaaaaaggtggcttttccagaaaggccagcgttccagtgactatctgtgaaaatgctttgtgatgcgtgggttatccctcagagttaaacatttgttttgacttagcagtttggaaacactcttttttaagaatcaatgaagggatattttgaagcccatggatgagtatattgagaaactaaatatcccaccatagaaactagcaagaaattattagtgaaaatgctctgtgatgtgtggattcatctcacagagttagacttttgtttttattctgcaggtttcaaacacttttttgtggaatctacaaaggaacatttcagagcccacagaggcctatagtgaaaactgaatatcttgtgataaaagctagaaacaagctatctgtgaaaatgtttgtgatgtgtggatttatctcatagagttatacctatgtttatatacagcaggttggaaacactcttttagtagaatttaaaataagaaatttctgagtccttgaggcctattataaagaaatgaatatccctgataaaaactgacaacaaattatctgtgaaaatgctttgagatatgtggattcatctcgcaaagttaaacccttgttttggttcagaaggttgaaaatactctttttgtaatatctatgaagggatattttggagcccatagaggcctatactaaaaaccaaatatcccaggataaaaactagaaacaaggtatgtgagaaaatgttttgcaatgtgtagaatcatctcacagagttaaaccttgttttgattgggcaggttggaaacattctttttgtagaataaaagaagggacattttggagctcattgaggcctatagtgaaaaaccacatatgccatgataaaaactagaacaagctatctgtaaaaatcttttgcaatgtgtggtttcatctcacagagtttaacctttattttgacttagcgctttggaaacactatttttctagaatctgcaagggtacatttcaaacccaatgaggcctgtagtaaaaaactgaatatcccacgatgaaaactagaaactagctatctgtgaaaatgctttgagatgtgtggattcatctaatggagttgaatgttagttttgattcagcaggttggaaacttagcagtttggaaacattcattttgtagaatcaaagaggggacttttcttagccccctgaggcctatagtgaaaaatcaaatatcccgtgataaaaactagaaacaagttatctgtaaaaatgctttgcaatttgtggatttgtctcacaatgttaaacctttgttttgatttagtaggttggaaactctctttttgtacaattgatgaggagatatttcaaagcccattgattgaggcttgtagtgaaaaacctaaaatcctaataaacactataaagaagctgtctctgaaaaaaaaaaaataaaaat

SEQ ID NO: 1041 - DNA, 4777 bp, Homo sapiens
gcagatttctcctggcaaaagaagatgacacagcttgagatggaaattcaagaggcatttttgcgctttatggcgtctattttaaaaggatatagaacatatctcagaccaatcacagaggctccttcaaataaagccacagctgctgattcattgtttgaccgacagggatttttaaaaagtcgagatcgtgcctatgcaaaattctatacccttttatccaaaacacagatttttattcgtttcattgaagaatgcagttttgtaagtgataaagatactggattagcattttttgatgactgcatagaaaagttgtttcctgataaaggcacagagaaaacagataaggttgattttgattcagcagaagataccagattgatagaactagatgattcacagaaaagtgagcatactgtatttataatgccgccagagccacctcctgatgatggaaaggacctgtcaccaaagtacagttacaaatactttccaagactggaccttaagctttttgacagaccgcaggagttgaaactttgttttagtagacaccctactgggaatagcattacaaagagtccacctctcatggctaagagaactaaacaggaaataaaaacagctcataaattggcgaagagatgttatacaaatccaccacagtgggccaagtgtctgtttagtcattgttacagtttatggtttatttgtcttccggcctatgttagagtttctcatcctaaagtcagagcacttcagcaggcatatgatgtacttattaagatgaggaaaacagatgtggatcccttagatgaggtgtgctatcgagtagtgatgcagctttgtggactttggggtcatcctgttttagcagtgagagtcttatttgaaatgaaaactgctaggataaagcctaatgctattacttatggttattataataaggtagtcttggagagcccgtggcctagcagtacccgcagtggtattttcttatggacgaaggtacggaatgtggtacgtggcttggcacagtttaggcagccgcttaaaaagactgtgcaaaggtcacaggtctcctcaatatcaggtggtcagtctgaccaaggatacgggtctaaggatgaacttataaaggatgatgcagaaattcatgtgcctgaagaacaggcagcaagagaattgataactaaaacaaaaatgcaaacagaagaggtgtgtgatgcctctgctattgtggcaaaacattcacaacctagtccagagcctcacagtcctactgaacctcctgcatggggcagcagtattgtgaaagttccgtctggtatatttgatgtcaacagcaggaaaagtagcactggtagtatatcaagtgtgctgttttctactcaagatccagttgaagatgcagtctttggcgaagctactaatctcaagaagaatggtgatagaggagaaaaaagacaaaagcattttcctgagaggagttgtagttttagttctgaaagtcgagcaggaatgttgcttaagaagagtagtttggattcgaattcaagtgaaatggctatcatgatgggagcagatgccaagattctcacagcagcattgacatgtcctaagacttctctacttcatattgcaagaacccatagctttgagaatgttagctgtcacctacctgatagtaggacttgtatgtctgaaagcacttggaatcctgagcacagatcatctccggtgccagagatgcttgaggaaagccaagaactccttgagcctgtggttgatgacgtacctaaaactactgcaacagtagatacatatgagagtctactaagtgatagtaacagtaatcagtccagagacttgaaaacagtatccaaagatctgaggaataagagaagtagtttatatggtattgctaaggtggttcagagggaagatgttgaaactggactagatcctttgtctcttttagccactgaatgtacaggaggaaaaactcctgattctgaagataagttgttttctccagttattgcacgtaatctggctgatgaaatagaaagctatatgaacctaaaaagtcccctaggtagtaaatcttctagtatggaattacacagagaggaaaacagagagtctggcatgactactgcatttattcatgctctagagaggagatcaagcctacctttagatcatggttcaccagcacaggaaaatcctgaaagtgaaaagagctcacctgcagtgtccaggtctaaaacttttactgggcgtttcaagcagcaaaccccctctcgaactcataaagaacgttcaacttctttgtcagcactggtgcgttcttcgccacatggctcgttgggttctgtagtaaattctttgtcagggctaaagctggataatatactctcagggcccaagatagatgtcctgaaatctggtatgaaacaagcagcgacagtagccagtaagatgtgggtagctgttgcgtctgcctacagctactcagatgatgaggaagaaactaatagagactacagcttcccagctggcctagaagaccatattttgggggagaatatatcgcctaacacaagtatctcagggttggtccccagtgaacttacccagagcaacacaagtcttggcagtagcagcagtagtggagatgtaggaaaactgcattatccaacaggtgaagttccatttccaagaggcatgaaagggcaagactttgaaaaatcagatcatggttcttctcaaaataccagcatgtctagcatctatcagaattgtgcaatggaggttttgatgtccagttgttcacagtgtagagcttgtggagctttagtttatgatgaagaaattatggctggatggacagcagatgactcaaatttgaatacagcttgtccattctgtaaaagcaacttcttgcctcttctcaatatagaattcaaagatttgagaggttctgcaagctttttcctgaaaccaagtacctctggtgacagtttacaaagtggaagcattccattggcaaatgaatccttggagcacaaacctgtatccagtttagcagaacctgacttgatcaactttatggacttcccaaaacataaccagatcataactgaagaaacaggctctgcagttgaaccaagtgatgaaataaagagagccagtggagatgtccaaactatgaaaatttcatctgtgcctaatagtttatcaaagcgaaatgtgtctttgactcgaagtcacagtgttggaggcccattgcagaatattgactttacccagcgaccgtttcatggcatctcaacagttagtcttccaaatagtctgtaggaagttgtggatcctttaggaaaaagacccaatcctccccctgtttctgtgccctacttgagtcctctagtactccgtaaagaacttgaatctttgctagaaaatgaaggtgatcaggtgattcatacatcttctttcatcaatcaacatccaatcattttctggaacctcgtttggtatttcagacgtttggaccttcctagtaacttgccaggacttatcctcacatctgaacattgtaatgaaggtgtacagcttcctctgtcatctctgtcccaggatagcaaacttgtgtatattcagctgttatgggataatatcaaccttcatcaggaaccaagagaacctctgtatgtctcatggaggaattttaattctgaaaagaaatcatctctcctgtcagaggaacaacaagaaacaagcactttagtagaaaccatcaggcagagtattcagcacaataatgttcttaaacccatcaacctactttcacagcaaatgaagccaggcatgaaaagacaaaggagtttatacagagaaatcctcttcttatcattagtgtctctaggaagagagaatattgatattgaggcatttgacaatgaatatggaattgcatacaatagtctgtcttcagagattcttgaaaggttgcagaaaattgatgctccaccaagtgccagtgtcgagtggtgcaggaagtgttttggagcgcctctcatttaaatagagattcactagaatgttgacacacaaggcttggggattagatttcatctggaaacattcaagtttttttttccaaatcgtaagaactggtgaatacggaattgaagtaactcttggggacaatatataatgaattatgattcatattgcattaccttgaaatatgaagtgccatttgaatgtcccagggcttattaatattgaagattttcaacccctgaactgcttttctgcctctgtggaaaactactttgggattcttcagtatttgtagtagtttgatagaaataatgaggaaccatattcattctaggcattgtttatatttgaagttactgagtttgaggaatggcaaattaaatttgcctaacccccaaaacaaatgaaatatctcaattataaaagcaacatggccgggcacggtggctcaggcctgtaatcccagcactttgggaggctgagcaaggtgggtggatcacttgaggccaggagttcgagaccagcctggccaacacggtgagaccctgtctttactaaaaatacaaaaattagccaggcgcaccactgtagtcccagctactcaggctgaggcaggagaatcgcttgaactgaggcagaggctacagtgagtggagatcacgccactgcaactccagcttgggtgacagagtgagaccgtctc

SEQ ID NO: 1042 - DNA, 4232 bp, Homo sapiens
atcccgcccccactctcagtcccagcggccgccagacccgccggagttggacccgagcacgccgcggagcccggaccctccctcggacgctctgccccggccatggcgtcgctgctgccactgctctgtctctgtgtcgtcgctgcgcacctggcgggggcccgagacgccacccccaccgaggagccaatggcgactgcactgggcctggaaagacggtccgtgtacaccggccagccctcaccagccctggaggactgggaagcgcgtgcggtgcccgcagaggccagcgagtggacgtcctggttcaacgtggaccaccccggaggcgacggcgacttcgagagcctggctgccatccgcttctactacgggccagcgcgcgtgtgcccgcgaccgctggcgctggaagcgcgcaccacggactgggccctgccgtccgccgtcggcgagcgcgtgcacttgaaccccacgcgcggcttctggtgcctcaaccgcgagcaaccgcgtggccgccgctgctccaactaccacgtgcgcttccgctgcccactagaagcctcgtggggcgcgtggggcccgtggggtccctgctcggggagctgtgggccaggccgtcgcttgcgccgccgccactgcccaagccccgctggggatgcgtgtcccgggcgtcctctggaggcgcagaagtgcgtgcggcctcggtgtccagggtgcagccttgacacctgtgaatgcccggaccacatcctcctgggctcggtggtcaccccatctgggcaaccactgctaggagccagggtctccctgcgagaccagcctggcactgtggccaccagcgatgctcacggaaccttccgggtgcctggtgtctgtgctgacagccgcgccaacatcagggcccagatggatggcttctctgcaggggaggcccaggcccaggccaacggatccatctctgtggtcaccatcatccttgataagttggagaagccgtacctggtgaaacaccctgagtcccgagtgcgagaggctggccagaatgtgactttctgctgcaaagcctccgggacccccatgcccaagaaatactcctggttccacaatgggaccctgctggacaggcgagctcatgggtacggggcccacctggagctgcggggactgcgcccagaccaggctggcatctaccactgcaaggcatggaatgaggcgggtgccgtgcgctcgggcactgcccggctcactgtacttgccccaggccagccagcctgcgacccccggccccgagagtacctgatcaagctccctgaggactgtggtcagccaggtagtggccctgcctacctggatgtgggcctctgtcccgacacccgctgccccagcctggcaggctccagcccccgctgcggggacgccagctcccgctgctgctctgtgcgccgtctggagagaagggagattcactgccctggctacgtcctcccagtgaaggtggtggcagagtgtggctgccagaagtgtctgccccctcgggggctggtccggggccgtgttgtggctgctgactccggggagccgctacgcttcgccaggattctgctgggccaggagcccatcggcttcaccgcctaccagggcgactttaccattgaggtgccgccctccacccagcggctggtggtgacttttgtggaccccagcggtgagttcatggacgctgtccgggtcttgccttttgatcctcgaggtgccggcgtgtaccacgaggtcaaggccatgcggaagaaagccccggtcattttacataccagccagagcaacacgatccccctgggcgagctggaagatgaggcgcccctgggcgagctggtcctgccttctggcgctttccgcagagccgacggcaaaccctactcggggcctgtggaggcccgggtgacgttcgtggacccccgagacctcacctcggcggcgtctgcccccagtgacctgcgcttcgtggacagcgacggcgagctggctccactgcgcacctacggcatgttctccgtggacctccgtgcgcccggctccgcggagcagctgcaggtggggccggtggccgtgcgggtggccgccagccagatccacatgccaggccacgtggaggccctcaagctgtggtcgctgaaccccgagaccggcttgtgggaggaggagagcggcttccggcgcgaggggtcctcgggcccccgggtgcgccgggaggagcgcgtcttcctggtgggcaacgtggagatccgggagcggcgcctgttcaatctggacgtgcctgagcgccgccgctgcttcgtgaaggtgcgcgcctacgccaacgacaagttcacccccagcgagcaggtggagggcgtggtggtcacgctggtcaatctggagcccgcccccggcttctccgccaacccccgtgcctggggccgctttgacagcgcggtcaccggccccaatggcgcctgcctccccgccttctgcgacgccgacaggccagacgcctacaccgccctggtcaccgccaccctgggcggcgaggagctggagccggccccttccttgccccgcccactcccggccaccgtgggcgtcacccagccctacctggacaggctggggtaccgtcggacggaccacgacgatcccgccttcaagcgtaacggcttccgcatcaacctcgccaagcccaggccaggtgaccccgccgaggccaatgggcctgtgtacccgtggcgcagcctgcgggaatgccagggggccccggtgactgccagccacttccgcttcgccagggtggaggcggacaagtacgagtacaacgtggtccccttccgagagggcacacctgcctcctggactggcgatctcctggcctggtggcccaacccgcaggagttccgggcctgcttcctcaaggtgaagatccagggtccccaggagtatatggtccgctcccacaacgcagggggcagccacccacgcacccgcggccagctctacggacttcgggatgcccggagtgtgcgagaccccgagcgtccgggcacctcggcagcctgcgtggagttcaagtgcagcgggatgctgttcgaccagcggcaggtggacaggacgctggtgaccattatgccccagggcagctgccggcgcgtggccgtcaacggactccttcgggattacctgacccggcaccccccaccggtgcccgcggaggacccagctgccttctccatgctggcccccctagaccctctgggccacaactatggcgtctacactgtcactgaccagagcccacgcttggccaaggagatcgccattggccgctgctttgatggttcctctgacggcttctccagagagatgaaggctgatgccggcacagccgtcaccttccagtgccgggagccaccggccggacgacccagcctcttccagaggctgctggagtccccggcgacagcacttggtgacatccgcagggagatgagcgaggcggcgcaggcacaggcccgggcctcaggtcccctccgcacccgccggggtagggtccggcagtgacctgggcaggggcctcgctttcccacctccctccagactcctttgaccccaggaagttttgcccctccttcttctccagacagccccctccccaggtgtctgggtcccctttcccgcccctttccagaactcagagtcagacaagaacccagagcatccgatggtagaaacaccaggaagacaattgttgctgtgtggtatggaatggagtttgcggtgactctggggccagcacccaggggacgacgttcaaccctagcctgaagggacccgctcccagctcagaagccgtctctgacttctcgtgcgtattttgaccctgatttcaatcttctacccttgggagttctggcgtttggcacaaagtcccctctgcctgtttggagctcagtgctagaccaggtcccctgccccgagctttgtttttggggttatttattgaaacaaagtgtggggagctggttgtgggtgtgagtgggggtgtggggtccaggctgggcccagtgaaaaggaggaaggggttcccatgcgggggaggctctggggctgaggggaacaattctcacgtgtttggtgcttagagacctgcccggggcgttgggcaggccctccgggggctgaattaaaaatgctttatttcc

SEQ ID NO: 1043 - DNA, 3626 bp, Homo sapiens
ggctcctcccctttctcctgccatgtttcttctccccgccccctcgcctctggctcctcccccttttccctatcgcgttcctcctttgcagcccccatccccctcctctggctcctcttcttccctaccgcgatcctccttccagaccccggcccccagcccgcctctagctccttcccttatttcctgccgcgctcctccttcccgacaccgcccctccgcctctggctactcctcttctctcctgccgcactcctccttcccggccccacctccccgcctctggctcatccccttctcttctgccgccctcctccttcccggccccgcccccagtctttggctcctccccctaccctgccgcgctcctccttcccggcccctccccgctgccctcttctggctcctcccccccacccgcctctggctcctctccttcccacccctgccgtgctccggcaggaagaggtggtgccagggccgttgctaggatacgaccaacagctgagaacgcggcgagtatggaagctgcgtcttaggagcctgggaaagcacttcgacgagaatagtttggtttcgtacacaggaaaatgtctaatcaacaggagaagtatgaagctcagaatatagtcaattcaacagaagagagtgatgatgcttttgatactgtcactattccagttccctcagaagagcctcaagagtcagatcaaactgaagagcatgaatctggaatagaacaattcagtgagagccatgcaatacatgttgaggagcagagtgaccaaagcttttcaagcctggaaccagacaatgaacaactcatggaagaggttatatcaccaagacaagtttcatatactccgcaacatcatgaaaagcaatatgcaatgcagaggccaaatgatgatagtttggcatttctggataaaataaagtctgtaaaggaatctttgcaagaatcagtggaagattctctagcaacagtaaaagttgtacttattccagtgggccaggaaattgtaataccttttaaggttgataccattcttaaatatcttaaggaccatttttcacacttattaggtatcccacattctgtactgcagataagatactcaggaaaaattcttaaaaataatgagactctagtacaacatggagttaagccacaggaaattgtacaagtggaaatcttttctacaaatccagatctgtatccagtcagaagaatagatggattaactgatgtctctcaaatcataactgtcactgtccaaactggttcgttatttgatgtcttttagataaagtatttttgagtcccttcttggttgagctttcattgaatcttggtgttatctctcaggacttgatcaataccagcaggtacctgttgagattgtcaaatctgactttcacaaaccatttcttggtggattcagacataaagtaacaggagtagagtatcacaatgctggaacacaaactgtacctaaaaggattcccgaaagactcagtatattttgtagggatacgcaggtaatgtttttatttgtctctttaggtttttgaaggtatagactcaataattgtactgtatgactctctcaaatttctcttaagtaattatatggcaattaataaaagaaaatgaactcacatatgtagaaaaactcccttatgtatatatataggggatactgatttaaatttttaatgttttcttttagacagtttttcagaaaaaaagtctccaacaaactacaaatacaacatccacacagatgactaacattggtgtatatgtatcaaatatgactgataaactggtaacaccaggaaagtatttttcagcagcagaataccatgctcaaagactaaaggcggtgagataacttttattgtggatgaatactaaaaatttgatatataagccagttgttccgagtgtgtctctttctccaagccacatttgcttgagaaagaatgctcatgagtatgggtcatatttcactgctaacaaagcagtctttatctccagtattcccccatgtaaagaaccagcatcctaaatgctcctaatccttccttttctcttagggaaacccagcttctttgtgtattgcctttggccattattagccttctcaacactgctgtcccttggccttaaatcttgtcacagtagaatcaccaagggaactttcgagactaattgaaaccaaataggacagtagtcgattttctctgatattaacatagccgctccaactctgttttatttttttgcatagtctctcatttttcattcttttactttcaacctatttgatctacctcctaccatcaatttactgtgagtaaaaatgacctgaaagcagtgactttaagagattttgcttttcaaatgacaagaaatctggagctaggctattcagcccaagacctttagagacaaacttgtagtgaaaaaaagttaagtctgttgacttaattgccctgaaggagacagtataccaggggaaccatggggttaactttatagcaggctttatcagtgccagttattccagcctgataattttttactttttcagtccaaactaaatttcaccaaataaaggaatatatggagttattatataatttggggaagagtgaagtttgagtgggatttaggggaagcagtattctgattgtctcaatgcaaaacaagggtgtgtataaatgggccaacattaggtctggactgtgaagtagaccaaggtcacgttcctttggaaacaaagttaaaagagatgggaaatgtttcttagaagttctctgaagttcagcaccttggttgtataattgaggctgcttctctctgtcaaagtgacgtgcaacctctaggcaagagtggaatgtttgtttcttactgatctaatttcagacaggaaagtttctgatagtttctgaatttagagaacgaagtttctcagtgagtaagaagatagcagtcactaaaagaaggggattgttgaaatattttatagttgtagagtgtccttgggagaaatactgtttttgttaattttgtagctgacctgattagtgcctgttattccagcctgacaattttttactttctcagtcttaattaatttttactttcttactatactgggcatgggtggtgactctatgatgtcatcagaatcataaactcctttcatctttctactccattaagctcatcatgagcttgttactgtatgaagataaaatggttgactaactttcatcatgcctgcattccatgtgagaagaagggaaaagtcaaggcagcatgttccatgaatgccaccttcaaggatttccccggaaagccccacccagtgacttctacttgcatcccattggcttgaactatgtcatgtgactatccctactgcaaaagtgtgtgataaatgaatttttaaagtagcatttcattgctcctcaatgagattgcaatcttagtaagagaaagtagggcaaaatggatattaagtaaggaaatggaaatttctgtcattttccaaactccaaaaaatgatattgaaagaataaaagtataaatatacaaggacaaagaatacatg

SEQ ID NO: 1044 - DNA, 3708 bp, Homo sapiens
gcagtagcctaggttttctaactagcctaggtagagttctcatcccttccctcttgccccccactgcgttcttcagtggggtgggcggagacctccatcccgggaaacactggcccgggcaggcgccagatctgctcttctttccgcgtctctccaactctgcctccccgccacaccgtcactcgcctacccttgtcccgccagcttcctcggcatcaccatggagcgcctgacagctaaatgcagacccgagaccccgcgcaaacccggggttcacagatgacatatccccatgctgagcctgcaacagagcgcaaggcagatactcccacccacacaggagtcacactcaagccgagtgagccaagattccggattccacgttcctttgccctctgcaaggggtcctgctgctcacgtgtctctggcccccaaaagcgtgaccatgttgactgtttgtttcccgagctctgtggggacacagaaacctccagcgaagcatggaaacgcagcatcgtgtcttcgctctcctttcgtttccaaacaggccattttggagactccccatgtttcaggaaacaggaatccctcatcagtccgtgatgactcagtcccctgcccagactacaggcccaccaggcggcctcccttttgctgacactccaggccttcccccggctcgcgagctcccgagtttccaacacatcgggcaggctcaggacagggtgtgcttggaggcctcagggcccggggcccacagttctgggatcccctctggtcctccaccttgccgcggaaaaattgttttggatccctcaccacccctcctgcaaggccccctcttggcccacacacccagagccgtcagggttgcccaggggcgaacagccggcccagccccgcaggacctttttctcacaatgcccacaccatcatcgcttgtcccgacgaggacccgcccgtggccaacgggacaggaagggcctgctttgccccgcgctggcactaaagccccggcagcctgatcacgggaaaggggctgacggacacccagacacaccccaacactactacgagcaaacccaccccgacacacacacaggcacacatggacacacacacagacacacacacacacacggacacacaaagacacacacacggacacatggacacacgcacacggacacacacggacacacacacaaggacatacagacaaagacacagacacagcttgaaagagagctagggagaccgggatggagagatagaaatgcggggagagagagaaaagtagagggggagagagacagaaggtgacagaagagcgagagttggagggggatgtagagaaagggagagggtgaggaagttgtagagcgacagagacacagccttggagagggaggctctgctcaggtagacagggcactttgagcaggccggggtgaggtggagggtgcttgggccaggctagaacacggggtcagggccgcccacgcgggaaaaccaacggagccctgagacgtgtttttttttttttcttggattggttggtttctttggaggtgcgtttcatatggtccttcctttgtttgcttctttctgtctccttgatgcggtgggccccgagatttgtagagtgcacccgtccaactggtggaactatagcaccgagcttgtccacggggccaggtctgggtctctctcgtgtcctcgggactagagtttacacgacgttggtggcaatgggaaacagggtgcacagggacggatttcttcgtggctggcgaagacaatgtccttcccccggggaaagcagcccacgggttctggagccgaggtcttggctggcaactgtgggacctgctgccccaacttcgatggttgcggcggcgcttgatgaatgaattgaattgcctggggtccggggagcgggaagacaccccggagggcaggaaacccgcacctgcgccttccaggtctactacctgctgcagcgccctggctggagccgggctcctggtggggctgcagccaggcaaaagaggtgggatgctgccacctggcggtattgcagctgcagacccccacgaggaggtttcatctcgacataaatcgttttctttcttcagctgatctgtatccctaattttagattaatggtaactccacaaatttagaggcacaaaatatggttgcccacaccttataatcgcattaccacctcccattaccaccacctttcccgctcctccccaccctcatcccgtagactaggtctcgcgatgtttcccaggctggcctcaaactcctgcgcttaagttatttgcctgccttggcctctcaaagtgctgtgatcagccctgtgagtcaccatgcccagccaaccaccacgaagttttgattcagcagcactgggttgtggagctaaggacccacaaatttagaaaagtttttaaatatcataacgtttctgtgaggaaatagtatttggtattacatttttagactcttttataatgttctggttttttccactgagtacagtactaagtagtaattggaaaatcacagcataagtcatattactttttctaatacagagtacttggctgttctctaagctaaacctgatcacctacattgagtaaaagaaaaaaccccagagtgtgaggagacaggagatagtagccaaacatccaaataggtgggagtgaataaggcagatgacacagatgagatgaccaaaggtcaaggagaaagccagatcctaaagtgtggtttgcgaagctatgctccaatggaaatcttttccgagaagccctgatttctttctcttgctttcgttagagacagacatcttctgccccttgctcttcaattttctaggactggacttccccttcaacgatcattcttctaggttacaaagaaaatcaaagccctttgcatggcttacaagggactggaggacctggctgcttgctgttttattgcttttgaggacatggggtcgtttgtgatttttaaggaactctatgttaaacattttctaatttccattttgagtcttgtctaaaatgtgtgagagtagtggagatattgggatttggtttagaaatcccagaaacaccacatccagatgtcgtatgttttctgctttataatttcatatcctgtgaaggtttcaaatgtgattctacagaaattcatactcaataatttaatcagaacactaagcctctgccccatataataaaaccaaatattatcttacttcaaaattttaagtttttggtatgtattgaggctaacactgtaaacactctgtgccataattcctaaactgtaatacggtttaatgtatctactttctacatttaaaacatgtactttgccattgaggaacttagaatattgctgagcatgtattaaatacccatttttttcttgatttttaaatagttatcattttatagttttctcttgtttagtttgaagcttactaggatttttgtcattgatatgtatgtgtgtatatatatatatatatatacacacacacacacacacaagtatttacataacatatgtaattgatatatatgtatatgttttatatatgctttatgcacacttatggaaatatatgcatgtgtacataacattaattttttgaccaataaaaattacataattatg

SEQ ID NO: 1045 - DNA, 2366 bp, Homo sapiens
atcacagcagcggggagtctggaagggactgcagaaggcatggccagggctttggaatggtatgactgaccagcagagagacctcctcccctcccgggatcctctaggcacccctccccaagtaggaatctgttaaggatgaggtgtgtccacaaccagaagagatcataggaatgagggaagcagtgaagcctgtttccctgtcaaagccagagggccagtgtgatccaggagggaaggcactggaatgagcaacaagagacctgttttcgtcctggcctcataactgctgtgccacgttgggcccacctctccctttctctgagcctcagatgccccatctgccaaatcctggattgggccagctgccctccccagggacctttcatctgttatataaggtgattctggagcaccttgcatgtgggcctgtgacaagaaatgaactgccatgtagcacagaaggtgaaatgaatcagatattcatgcaagaaactggccaacaggctcacctgagagtctccacagggtcacgatgtcgctacctagagggaatctgtctttatttattggctctttcctgtgcagaatgcaagggagtctccctccggctgagacccccgggaaggaggccacatgtggaggtgacttgaaccaggacggcaggaacctggggtccccggggggctccggacagaggtcatggtggaaaccctgggaggtggggttgccgttaggattttctcctggccacgtggcgcatgtgtggctgagcctgggaccggacccttccctgcacaccgagctgcacttctacagagctctcagccttgctgcgggatccagcagccaccccctcctgagtaccccaatccccctcctctgaactcctctgtcccactcacatgggagcagccacctcatcttacagaggaaggaactgagggcagaggggtggcccaacttggccggagtccggcggggtgggagcagcagggctaggccttgaatgcaggtctctggattcccgacagggtgcccctggcccagctgccagtcccccttgcctctgctgagcccatccttgcagggcccaccacctgcctctctgagtctgcatcacatctcctggagggtagagagcaccgctagcatctttctggggccctgggcgtcccgcgtggcaatgggcataccatggtgcccagcaaccctcagcagacagaattagcgactggctttagagaccgaccatgtctccgagaagactctgatgaactgagggggcgacttggcagactcaggttggggagctgaagagtcaccgtgctacagtggaaagaaccctggcctgggagtcagggttgagtccatgcctggctgggctatacatcagtgaacctggagatgtgtccccttctctgggcttcaggttccccatgagtccaacaaggggctggaggaactccctgacctctggtgcccctgcagctctagcaacccatggctttaggcactaccagtgtccccagcaagaccacggacagagccgaaagtggcagtgcattaccccttgctcctgacagatctgcgtcagcctctccagctgctcgtcttggatgaccttggccttctcgtactgctggataaccatctccatctccagcttcactggcaggacgtaggctggaagacagagacagccctgtaaagaattcagcagtggcagggcttggactagggaagggcgggcccagcattcaggcagcagcaggttcgaggccctgggccatttctgtggatctagaaggggaaatgtccaggtacccgagagcatccagaaagtacagagggccacagccttcgctcatggtgtccagggtagctgttttcctgttttccatagtgctagaacccatacttttgggctgtgtgcacagctgcctggaataaagactattttccagcctcctttgcagctatgggtggccacaagaccaccttctggaccataggatgctagtggaggtggcatgcagcagctgcaggagccttcttcacaaaggagctggggccagtgaggatggggcggccctggagcctgcacacactggcggaaaggaaaacggggcaaccacttagggaaacggtttgtccgtttttcagagtgttaaacagagagtgaccatatgacccagaaactccattcctaggtaccttaggggaaggaaaacatgtgtctacacaaaactcgcacatgagcattcataacagcattattcctaacagtcaaaaagtagacataacccaaatgttcatcagccgatgaatgcgtgaataaactgtggtctagcaaaaaaaaaaag

SEQ ID NO: 1046 - DNA, 3895 bp, Homo sapiens
gagagcgcggccttcattcctctcgtggaagtgagtgagtcctgggaccccgcgacctgttttaacttttatggtttggtcgtaggatcagcagggctcgcacttcggtcagcaggaaaagacgctgcggcgagcagcggagggcggagttgaatggctgggcagctgattgccttactgtatccggagctgctgcgttcggggcggttcgggagtcccctggttggaagtggacctgaatggggaggcgtctgaggatctcctgggctctcagcggcccgacccgccttcccccacctcccacagctctgtcgcttcctagcggtgtaacgttgggaaaggaggctgttcttggactatgcctgacccgttttttaagaaagagtgcatcactcgacaggtggcgtctggagttatcctctgtggattttccaggatctcagacaagatcgtgcaatctcccagcctcctttccttcccctgccctgacttctgaaagaatgctgcgggagaggaggaaggagagcatcctggcttctggcagcagagccccactgtgacgggacctagcattcaccttcctcttctgttccgagtgcgagaagacttcagggacctctgtttcatggacattatcatattcttctcaagagtacccagcaagaggtttgcaaagaggagttattcagtgaaatcagaatcataccctgagagctacaagaactccatttttcactgtgcagaggctctctgctgaagggtcaagtggaatctggaatccagcccatgtttccccatcatcaagccatgtgaagctgcagactccaagcaacagagagacaagatttagaatactggctctggtatgaaagctggattcaggtactgttcctgcctcttgacctcaccaagcctcagcttcctcgcctgttaaatggatacaattgtcgtcattatcatctgttgagaactccctaaaatgccagctgagcataggcacagaagtttaggtgtttggaccaaggtcacacaactgatacaacagtagcttcttcacagacttggcacttctccagaaggaggaggacaaaatgacgaagtctaaggaggcagtgacattcaaggacgtggctgtggtcttctctgaggaggagctgcaactgctggaccttgcccagaggaagctgtaccgagatgtgatgctggagaactttaggaatgtggtctcagtggggcatcagtccacaccagatggcctaccacagttagagagagaagaaaagctgtggatgatgaagatggcaacccagagagataactcctcaggagccaagaatctaaaagagatggagactcttcaagaagtaggattaaggtacctgcctcatgaagagcttttctgctcccagatctggcaacagattacaagagagttaatcaagtatcaagattctgtggtaaatattcaaagaacaggctgccagttggaaaaacgagatgatttgcactataaagatgagggattcagtaatcagagttcccatcttcaagttcacagagtccacactggtgaaaaaccctacaaaggagaacattgtgtgaaaagtttcagctggagctctcatcttcaaattaaccaaagggctcacgcaggagagaagccctacaaatgtgaaaaatgtgataatgccttccgtcggttttcaagtcttcaagcccatcagagagtccacagtagagcaaaatcatacacaaatgatgcaagttacaggagttttagtcagaggtcacatcttccccatcatcagagagttcccactggagagaatccatacaaatatgaagagtgtgggaagaatgttgggaaaagctcacattgtcaagctcctctgatagttcatacgggagagaaaccctataaatgtgaggagtgtggggtgggcttcagtcagagatcatatcttcaagttcatctgaaagttcacgctggaaagaaacgatataagtgtgaagagtgtgggaagagcttcagttggcgttcacgactgcaggctcatgagcgaatccacactggcgagaaaccatacaaatgcaatgcatgtggcaagagctttagttacagctcacaccttaacattcattgtagaatccacacaggagagaaaccctataagtgtgaggagtgtgggaaaggtttcagtgtgggttcacaccttcaggcccatcagataagccacactggagagaagccatacaaatgtgaggagtgtgggaaaggcttctgccgggcctcaaatctgctggaccatcaaagaggccatactggagagaaaccatatcagtgtgatgcatgtggtaagggcttcagtcgtagctcagattttaacattcattttagagtccatacagggaaaaaccctataaatgtgaggagtgtggcaagggcttcagccaggcctcaaatcttctggcccatcaaagaggccacactggagagaaaccctacaaatgtggtacatgtgggaagggcttcagtcggagctcagatcttaatgtacactgtagaatccacacaggagagaaaccctataaatgcgagaagtgtggtaaggccttcagtcagttctccagccttcaggtgcatcagagagttcacactggagagaaaccatatcagtgtgcagagtgtgggaagggcttcagtgtaggttcacagcttcaagcccatcagaggtgccacactggagagaaaccctatcaatgtgaggagtgtgggaagggcttctgtcgggcctccaattttctggcacatcgtggagtccacacaggagaaaaaccataccgatgtgatgtgtgtggtaagcgcttcagacagagatcctaccttcaagcccaccagagggtccacacaggagagagaccatacaaatgtgaggaatgtgggaaagtcttcagctggagctcataccttcaagcccatcaaagagttcacaccggagaaaaaccatacaaatgtgaggagtgtgggaagggcttcagttggagctcaagtcttatcattcatcagcgagtccatgctgatgatgagggtgacaaggacttcccttcatcagaggattcacacaggaaaactcgataaaatatgttttactatctcagatgggtgctgaaatattttaataatcagagctatcatagacaaaacatttgttttatagagtcagtagttcagccaagtgattgggagaccacacagcagagaagcctcacaagagtggagacatatggactgcattcagaacattgaccattagctgatacatgcagacaagaggatcaggaaggatgagtctgatctggagtaaatcagaagtactaagatggaaatgctgaattctgttccactagaatataagatccaagagggcagggactttgttgactgccaaatctactctgccttttcagtgcctaatacgttgtaatttttcagtagtatttgaaattactgtcatatttgaaattcagtaatatttgacatttttatttatctctagaagtttctctaaaattgtactcagaagaattctgcaaggcttggaggatatataagttagtcatatggcctgattttcccatttttgcagatctcgtggacaagtgtttatcaaactgaaggttgcagcttgttagtgggttcagaaatcagtttctggctagcaactagaagttttgtatgttaacagtactttattgaggtgtaatctgcatgcagtaacatgcacaagtctcaagttcatggctttctgaattttgacaaatgtaatcatcaccaagatcaatgtatacaatatgtctattaaaccaaaaagttttcttgtgcccatttccagtc

SEQ ID NO: 1047 - DNA, 2952 bp, Homo sapiens
acccccgcgcgagcaccccgggcaggcacccccggataccttagggcggcggcgggagggcgggcgccgtcatctccgcgcttcccggcccgagaaggactcgaaagtatgtaggagaaaagtttcccctcccacatgggggggaggatgtcgagggagagagggcggaagatggagagcagcgctgggaagatgtttctggccggcggtgcgcgcaccatccgagtcccggcggtgctggttaaaaataaactcggcggcgcgggtcgggccggattcctgcgctcggacggctaatatggatgcgcatcaggtcctgctggcggggcgctgcggcggctcgcgctgggagctggttggcagagccggcggctcgggaaagggaaaagagcggaggaaggggaggaggaggaggaggaggaggaatggcccggcgcgcagcccgaggggagagggctgccccgctcatccctggccgccccgccggcccgagcgcacgctgcgcggagtggggcgtgcgggtccccggctccgggacacaccgagtttcaaaagtacaacgcgctctgcagacttcaccctccccatccccaaagttctttaaaaggtcgctccggctgtgccccagacttctcgctgccgccggcgtaccgcgagtcggaatccggggcacgtacttacggccgggcaggacgcttggctccctggcatgatgcgttggggaccggtgggcttcagggagagaccgaggagagatgcaaacttgttccggaaaaggaatcaaaatggcgtttctggatgtgcaaagttcatcaactccgcagtcacttcccctcctcctcttctcccacagggagggaggtgggcgaggagctggcgaccccggcgccccagccgtcgtcccggcccccgtctcggccccccgcccagcttcctcgcccgcacgctcggagtctcgctctccccctctcaccctgataagtagacacatcacgtgttgctcctgcgagtctcctggggacgtgttactgagcggccgcggcggcggcggcggcggcggcggcggcgctcggactggggggggtgagggggaggaccgccgcccccgccccgactttagcagggtgaccgcagttgccatcccgggatggatggaggtggagtcccctccccaccccccaccgcagccccaggtttgccctacgccctcccaaggcgccccgggccatgggagggccgggctgcccgaggggaagggtccgggaggccgcgactgggtgcgatcccaatcgtcccgttgctcgcgggccaccttattcggccaccgcgccccctcccctgcagcccctcgccgcgggcgactccccgcccccggctttccatcacttcactccgcagtttcactattttaacggaggcgggggagacacggtgatgcctcggaattgcgagaggggcacctcagaggcgctggagttggggggatggggggcgtagggctcggggccctggcctgacgccgcccctctgggtctccgaggcatctgcgagggggagccccgcccgcgccgtttcctttccacgcggtcctcgctctgcatccaggtggggcgagtggatgatggggcaggagattaaggagcaggcgcttcaccccgcccctagcttcgagccgtttctctcccggggccatccttcttactcgggctgccgccctgagtgtgctcgccgtctaacaaactcaactcccaaattgctgggattacaggtgtaagccattgtgcccagcctattacatgttatattttcaaaattggagtatcatgatgctgggccctgtgtttctcatttctagctaattaataaacttggcagtcaaaccagctgttcaggagtcatgctatctaaaccatgatgagatgccacttcacacccactaggatgtttataataaaaaaaacagacaataagtgttgaagagagtatggagaaattgaaaccttcatacattgctggtgagaatgtacaatgatgcagccactttgaaaaatagcttggcagttcctcgaaatgttaaacacagagttgccatatgacccagcaattccgctcttaggtacataaacaagaaatgaaaacatatgtccacataaaaacttgtactcaaatattcatagcagcactattcacaatagccaaaaagtggaaacaactcaaatattcatcagttggtggatggataaacaaaatgtgatacagccatacatagactgttattcagccatcaaaaggaatgaagtactgatgcacgatacaacatggatgaatcttgaaaacattatgctaaatgaaagaagtcagacccaacaggacaaataatggatgattccgtttatatgaaatgtccagaataggcaaattgatagagatggaaagtagattaatggttgcctagaactgaggactagggagaagtagggattgactgctaatgtgtggggtttctttttgggatgctaaaaatgtagtaggccagactacccctctccccacctcctccctcctccctcctctttccacctctccccttccccctccctgtctcccactctctcactccctctcactctgccatataagaagtatcttgcttcccattcacaaaacaacagcaacaacagtgtagaccaggcaaggtggctcctgcctgtaatcccagcactttgggaagtcaaggcagaggatcgcttgaggccagggatttgagaccagcctggccaacgtggtgaaaccctgtctctactaaaaatacaaaaaattagccgggcatggtggcgggtgcctgtaatcccagctacttgggagcctgaggcagaagaatcgcttgaacccaggaggtggaggttgcagtgagctgagatcgcgccattgcactcccgcgggactctgtct

SEQ ID NO: 1048 - DNA, 4100 bp, Homo sapiens
ctttgatgcatttggcaaaagacttgaacagccaggagaggtctataccaccgtcagagaatcagaattcccaggagagtaatggagagggaaactgtctgtcatcaagcgcatcctcagcccttgcgatctccagtttagcggatgcagccacagatagtagctgtacctctggtgctgaacaaaatgatggccaaagtattagaaagaaacgaagagccactggagatggatcttctcctgaactcccaagtcttgagagaaaaaaataaaagaaggaaaattaaaggaaaaaaagaacgttctcaggttgaccagctgctgaatatttctttaagggaggaagaacttagtaagtcattgcagtgcatggataacaatcttctgcaagcccgtgcagcccttcagacagcttatgtggaagttcagaggctacttatgctcaagcagcagataactatggagatgagtgcactgaggacccatagaatacagattctacagggattacaagaaacatatgaaccttctgagcacccagaccaggttccctgtagcctcacacgagaacgaaggaacagtagatctcaaacatccattgatgccgcactgctgcccactccctttttcccactttttctggagcctccatcttcccatgtgtctccatcacccaccggagcctctcttcaaataaccacgtctcctactttccaaacccatggcagtgtccctgctccagactcatcagttcagattaaacaagagcccatgtctcctgaacaagatgagaatgtgaatgctgtgccaccaagctctgcctgcaatgtgtccaaggaattactggaagctaataaaacccctttggagaaggaaccccactctccagctgaccagcctgaacaacaggcagaatccactttgacatcagctgagactaggggaagcaagaaaaagaagaaactccggaagaagaaaagtctacgggctgcccatgttcctgagaatagtgacactgaacaggatgttttgactgttaaacctgtaaggaaagtaaaagctggaaagttaattaaaggggggaaagtaacaacctccacttgggaagacagcaggactggtcgggagcaggagagtgtcagagatgagccagatagtgactcgtctctggaagtcctagaaattcctaatcctcagttagaagtagtagccattgattcttcagaatcaggagaagagaaaccagacagcccatctaaaaaggatatttggaactctacagagcaaaacccactagaaacgtctcgttctgggtgtgatgaagttagctctaccagtgaaattggcactcgctataaagatggcatccctgtaagtgtggcagaaactcagactgtgatctcctccataaaaggatcaaagaattcttcagaaatatcttcagagccaggagatgatgatgaacccacagaaggaagctttgagggacaccaagctgccgtaaatgcaattcagatatttgggaacttgctatatacctgttcagcagataaaactgttcgggtttataatctggtgagtcggaaatgtattggtgtctttgagggtcatacctccaaagttaactgcctcctggttactcagacctccgggaagaatgctgccctttacaccgggtccagtgaccataccatccgctgctataatgttaagagccgagagtgtgtggagcagttacagctggaagaccgggtcctctgcctccacagtagatggcgaatcctctatgcgggactggcaaatggcactgtggtcaccttcaacataaagaacaacaaacgacttgagatctttgaatgccatggccctcgggcagtcagctgtcttgctacagctcaggaaggtgcccgaaaactgctggtcgtggggtcttatgactgcacaattagtgtacgcgatgcccggaatggactgctcctcagaactctggagggccatagtaaaaccattctttgcatgaaggtggtgaatgatctcgtgttcagtggctccagtgatcagtcagtccatgctcacaacattcacactggtgagctcgtgcggatctataaaggtcacaatcatgcagtgactgtggtgaatatcctaggaaaagtgatggtgactgcttgcctggataaatttgttcgtgtctatgaattacagtctcatgatcgattacaagtttatggaggacacaaagacatgattatgtgtatgaccatccataaaagcatgatttacactggctgttatgatggcagtattcaggccgtgaggcttaatctgatgcagaattaccgctgttggtggcatggttgctctctgatatttggcgttgtagatcatttaaaacaacacttgctgaccgaccacactaatcccaacttccagactctgaaatgtcgctggaagaactgcgatgcttttttcactgctaggaaaggatccaaacaggatgctgcaggacatattgaacgacatgctgaagatgacagcaaaattgattcatgaagttttttgcctcccacgttgggaagtcattagttgaactattttcacattggccccccacacaggccactctcttccctttcttggtgaagtaaggaaggagaaagtggttactagccaggcatacccctagcataagtctgggcagctctatgggatgataaattacacttttaagttcttgctggaggttttaaatagatttagacaaatgttaaggaaccatacttctctgggacagcatggcatatagtgatatatgctatttgcgttctccagatgtttattgaagatacagatcctaattggttacccagtttgaccctaatcatatgtatattttattgatttcagtttgcaatttttaatttatgttcttatgatggtttaaacctatagtcaggcttttaagtacaagtttgtttaagtgccagactttgaggatcagttttaatttctccatttgtaatagctgggtatttaaactggaagcaaatagttttctttcttaacaattatgtgcagtgtgtgtcactgttttcttgctttatagatagagctggctttaagtgctaaaggacacagtagatttttgacaaacagtggctgctctgctgactatcttttaggaattcaggaagcaaatcacatagtgacaagtccttacagacaccacttctagtaaatctctgtaaatgtggatagaaagctcagtgtgaggcagtgcgtagacctaacgtctacctttacatctgctgttgaacctgggcactacctgttacagatcctgtcaggctgttgaactggaggtgtacctttatcttcctttctagtgtctgaccctgcaagcctaatgttggtttgaacccttttggtttgttcagttgccagcctccatctctcccactgtatggccgtgcctagaccgatggcagccatcgaatattcctctgggctcacggggtgttttccacccccctgcagcaactaagatggtgggggagagggggttagaataaagcatctgaatacagttttcaggacctcaagcagacttcctagagacttgtttctgagacagttctttgccttcacttccctgctagctgggaaagaagagtggagcagagactctgcctggccactgagaacagccaaattcacaaaccctcagtggggctttgtttttggattttctccggactcatcagtaaacctgtagaagtgtcgctttccagccttttgtttctggatcctcaaaactcagaacgtggccgggcgtggtggctcacgcctgtaatcccagcactttgggaggctgaggcaggcagatcacctgaggctgggagttgcagaccagcctggccaacatggcaaaaccccgtctctactaaaaatacaaaaagccgggcgtggtgggcgcctgtaatcccagctgctcaggaggctgaggcaggagaatcgcttgaacccgggaggcagagattgcagtaagctgagatcgtgccactgcactccagcctggtgacagagtgagactccgtctc

SEQ ID NO: 1049 - DNA, 2930 bp, Homo sapiens
aaggctgctgctatggggccgggcggccgtgtggcgcggctgctcgccccactaatgtggcgcagggcggtttcctcggtggcggggtccgcggttggagccgagcccgggcttcggctgctggccgtgcagcggcttcccgtaggagcagcgttctgccgggcttgccagaccccaaactttgtccgcggcctgcacagcgagcctgggctggaggagcgggcggaggggacggtcaacgagggacgcccagaatcggacgcggcagatcatactggtcccaagtttgacatcgatatgatggtttcacttctgaggcaagaaaatgcaagagacatttgtgtgatccaggttcctccagaaatgagatatacagattactttgtgattgttagtggaacttctacccgacacttacatgccatggccttctacgttgtgaaaatgtacaaacacctgaaatgtaaacgtgaccctcatgttaagatagaagggaaggacactgatgactggctgtgcgtggattttggcagcatggtgattcatttgatgcttccagaaaccagagaaatctatgaattagagaaattatggaccctacgttcttatgatgaccagttagctcagatagcacctgagacagtacctgaagacttcattcttggaatagaagatgatacttcatctgtgactccagtggagttaaaatgtgaataaaatattttatgcactgcgttagtcatttcagatttggattgagtcacttattggaaaatacagctcctaaagtccgtctccttggttaggctgctcttaggacaaggcttgtgtacctcatgggcactcctgctaactggcatgcagagactgtcgataagtgagctatacctgcaaccaaaaatcagtacattctacccaaaacttatgacacgctgcctttatcctggaaatgtcatcagaatttcctggagttagcactggctcctgtgcttgacttctctgctcagatttttattaatttaatttagcttaaatgtaaatcttaaccctgtttgtttaatggaatggcaaaaattttaaaaaataatataaaacatagcccactggtcttatttttatactttgaggtgataatattcttctaggaggacttctgtaacccttccagaatactccagtaacacaagaaagtaaacaaagtgtttgttaggaaaaactctgaacgctctagttcttagttcatatgcaagagtattatcaaggttcacattaagtaccatggctggacatggtataacagaaatctgcgtagagtttgaaaaaaaattcagaacattcccattcaattgaaaaccaaaaataaaacatactacacaacaagctgcacctaaatgatgaaaaaatttattctgcgtcaaggtatctggaaaatgaagctgcatttggggcacattatacatgaggaatgatccatatatggtgagtacaaaactcaattatagaattatttcttagctagtaccagatactccaaattacaaatgcttaagtaaaagtaaaatatgatttgccatactaaaaggctagaagtgaaatatgacagaatttaaaccagcagatataaatgcagcacctatgtgtatatttttaaaaaatcaaatattggggaaaaaaatcaaatactgagaaaagctctggccttaaacacatcttacctgaaatccaaccagaaagccagtccatgattttagcaattttaattcattgtatgaaaaaaaaatcatgaatgctaggagaatccagtgacaaaaagggcacttttttggttaaaactacaaaagaaacttgttttcagagaacattaaggaaaacactttaaatcattttcaaaatgtctaattgatcttcagaaaaacatctagtctgtatagaaattcatcttgaaataagaatgaggcagtgatttttttttttaaagggttatatatatgtcctttagatcagtgtaacatgactgtgatcatcttacaaacaaaactcaaaaaatcaattcagagagcagcgtggccttggagaccacccacacccaacacaattgtacgtactgggctttgctgtcaaggagtgagcaaatgagttcgttatcaaaggtcatatgttttcacagtcattcaaattatatcccaaaaacttttcttgtattctctatcttttgacttttttttcaaagaactgattgcacagtatacagaaatcctgttatactttactacttaaggtggagtctaatttttttttttaatttatcagtgcttaaaaatcttcaaaatagcttagtgaggctcatgacagtgctggccccatggaaatgtagccttttgttgcgtttaaacactgtcacaccatctatgactgtcccattggtctgaagtgtagtggcaaactaagcatcctataagacaagctaaagcttgctttttgccagtcagttgaaagtcttgcatctcttcactgatgcactttctttaggtattgatagtcagaagcacaaagcatttattatgcattcaatcatgtagctaaacaaaaaactgaagtctcctgaagccatttaaaccagccgttccaaaatctcctgcgaccactttgttagtaccgtcaaaaactttcccaactataaatgaaagaataaatggtagtgctgctctccagatactaggcactgctccgtatttttgaacatttgatttaactaataactgtgtcaaaagcctcaaaaaaccctgaaattaattttccagctttactgtcaccagccagaagtaaaaatcttaatttgcctgttagctgattgctgttaaattttaaatttattttttaaaaaacggttggacttctatcataaagtatataaaattttcaaaaaaaag

SEQ ID NO: 1050 - DNA, 3412 bp, Homo sapiens
acagaggcgccagcagcctgcctgtgacaggcatcaggttagctggctcccactcgggtggcgcgcccaggatataaattcgggcgcgggcccctgctgtggctcctctccctgcacactcaggagagggagcttccttctaaagacctttcttttatctgaagccgcacagcccggcaggctgtgctgacttggtggaggcagcagcggcagagcagcctgagcagcagcctgagcaggaaacctgctggggtggggagggcaggtgtctgcagcccctgagaagaaggccctggtgggccccaaaccctggcatcgtttcaggggaggtctctagccgccccagcctgcaccatgtgggccccaaggtgtcgccggttctggtctcgctgggagcaggtggcagcactgctgctgctgctgctactgctcggggtgcccccgcgaagcctggcgctgccgcccatccgctattcccacgccggcatctgccccaacgacatgaatcccaacctctgggtggacgcacagagcacctgcaggcgggagtgtgagacggaccaggagtgtgagacctatgagaagtgctgccccaacgtatgtgggaccaagagctgcgtggcggcccgctacatggacgtgaaagggaagaagggcccagtgggcatgcccaaggaggccacatgtgaccacttcatgtgtctgcagcagggctctgagtgtgacatctgggatggccagcccgtgtgtaagtgcaaagaccgctgtgagaaggagcccagctttacctgcgcctcggacggcctcacctactataaccgctgctacatggatgccgaggcctgctccaaaggcatcacactggccgttgtaacctgccgctatcacttcacctggcccaacaccagccccccaccacctgagaccaccatgcaccccaccacagcctccccagagacccctgagctggacatggcggcccctgcgctgctcaacaaccctgtgcaccagtcggtcaccatgggtgagacagtgagcttcctctgtgatgtggtgggccggccccggcctgagatcacctgggagaagcagttggaggatcgggagaatgtggtcatgcggcccaaccatgtgcgtggcaacgtggtggtcaccaacattgcccagctggtcatctataacgcccagctgcaggatgctgggatctacacctgcacggcccggaacgtggctggggtcctgagggctgatttcccgctgtcggtggtcaggggtcatcaggctgcagccacctcagagagcagccccaatggtacggctttcccggcggccgagtgcctgaagcccccagacagtgaggactgtggcgaagagcagacccgctggcacttcgatgcccaggccaacaactgcctgaccttcaccttcggccactgccaccgtaacctcaaccactttgagacctatgaggcctgcatgctggcctgcatgagcgggccgctggccgcgtgcagcctgcccgccctgcaggggccctgcaaagcctacgcgcctcgctgggcttacaacagccagacgggccagtgccagtcctttgtctatggtggctgcgagggcaatggcaacaactttgagagccgtgaggcctgtgaggagtcgtgccccttccccagggggaaccagcgctgtcgggcctgcaagcctcggcagaagctcgttaccagcttctgtcgcagcgactttgtcatcctgggccgagtctctgagctgaccgaggagcctgactcgggccgcgccctggtgactgtggatgaggtcctaaaggatgagaaaatgggcctcaagttcctgggccaggagccattggaggtcactctgcttcacgtggactgggcatgcccctgccccaacgtgaccgtgagcgagatgccgctcatcatcatgggggaggtggacggcggcatggccatgctgcgccccgatagctttgtgggcgcatcgagtgcccgccgggtcaggaagcttcgtgaggtcatgcacaagaagacctgtgacgtcctcaaggagtttcttggcttgcactgaagccccccacccctccctgccccctccctggccttcttccacctatccaccccaatgcctctcagcaaactgggcgaggtcagattagacaggcttgggacagcagggaaacatcaaccgacgtgtcacagaaaaagccacagaaggtctcagatcagcatctattctttgggttcaataaggggttcatatcttttttagctgagggggacaagaggagaagtcagtggacacatggaagttactcgtgcccaccagcttgctcagatattctcctcctcccctcactggccccacacccctggctctcccagtcaccctcccctagccagtctcccagcaagggtttaagagatggccgctgtgtgctggtcacaggaagtgttgaatggattggcttgcaaagggggtaggtggggagagataggagggcccagggactcatggggcacctttcccacagcctcctcgattgctgtgagcagaggccactcggagttaggggcatgggcaatagcaagctggcggcagagtccagcccagcatatgacttgccctgaatggaagctgctgaaacgggtgcctttgggtggtggtcggcttgcctctgaggccaccacggcaccagcagaatacgtatttcttctccttggctgcattggtttgtcgatctagttcagttcaactcagtggatgttctctgaatgcttactgggtgccaggaccacagagagatgttagtcactgcccagttcttagagccccaacacagataccctcatcccagggcccccagacacacccctccgctggactcacaactgtctggagtttctgtctgatggatggtgtgctttcatatgccactggcttccttggacatagatcagacaaaagccccgggatctgtttggtagcaggagaaatgaaggaagatgaaaaagcaggcagggaagggggtagtaaaggactgagagaggagggaggtggctggagaaggaaaaggaacattgctcgatgctcccatctggtggcggcctcaggaacccacgggaacctggaaggaggctctttgtgagacctgggcaaaggatggggcagctcgtcgatgatttttttgtgtttccaggcttcctgtgtgatcctggccctccggccgctagagagaggattgggaaaccccactgtcagctctgcatctgcccccactaccctcctctgccctattctgtccctgcccctccaagctgaagaaggtccttgtggggcgtcctcattccttcctcaaatataaggaggaagataccaattaaaagctcatagtatc

SEQ ID NO: 1051 - DNA, 2356 bp, Homo sapiens
gatttagaatcagaaaaatcgagagtcaatgagagattatctcaacttgaagaggaaagagcttttttgcgaagcaaaacccaaagtctggatgaagagcagaagcaacagattctagaactggagaagaaagtaaatgaagcaaagagaactcagcaagaatattatgaaagggaacttaaaaacctgcaaagtagattggaagaggaggtgactcaattaaacgaggcccattctaagactttggaagaattagcttggaagcaccatatggcaattgaagctgtccacagtaatgcaattagggataagaaaaaactgcaaatggatttggaagaacaacataacaaagataaactaaacctggaagaggataaaaatcagcttcaacaagagctagaaaacctaaaggaagtactggaagacaagttgaatacagccaatcaagagattggccacctccaagatatggtaaggaaaagtgaacaaggtcttggctctgcagaaggacttattgctagtcttcaggactcccaggaaaggcttcagaatgagcttgacttgactaaagacagcctaaaggagaccaaggatgctctattaaatgtggagggtgagctagaacaagaaaggcaacagcatgaagaaacaattgctgccatgaaagaagaagagaagctcaaagtggacaaaatggcccatgacttagaaattaagtggactgaaaatcttagacaagagtgttctaaacttcgtgaagagttaaggcttcaacatgaagaggataagaagtcagcaatgtctcaacttttgcagttgaaagatcgagagaaaaatgcagcaagagattcatggcagaagaaagtagaagatctcttaaaccagatttccttgctgaaacagaatctggagatacagctttcccagtctcagacttctttgcaacaactgcaagcccagtttacgcaagaacgacagcggcttacgcaagagcttgaagaattagaggagcaacatcagcaaagacacaaatcattaaaagaagcacatgtccttgcatttcaaactatggaagaggaaaaggaaaaggagcaaagagctcttgaaaatcatttacaacagaagcattctgcagagcttcaatcactaaaagatgcacacagagagtcaatggagggcttccggatagaaatggaacaggaacttcagactcttcggtttgaattagaagatgaaggaaaggctatgcttgctcccttgcgctcagaactcaaccatcaacatgcagctgcaattgatttgttacggcataatcatcatcaagaattggcagctgctaaaatggaattagagagaagcatagacatcagcagaagacagagtaaggagcacatatgtagaattacagatctacaagaggaattaagacacagagagcatcacatctctgaattggataaggaggttcagcaccttcatgagaatataagtgccctaaccaaagaactggaatttaaggggaaagaaattctcagaatacgaagtgaatctaaccaacagataagattagaagaaatggaagaaaaatatctaatgagagaatcaaaaccagaagatatacagatgattacagaattaaaagccatgcttacagaaagagaccagatcataaagaaactaattgaggataataagttttatcagctggaattagtcaatcgagaaactaacttcaacaaagtgtttaactcaagtcctactgttggtgttattaatccattggctaagcaaaagaagaagaatgataaatcaccaacaaacaggtttgtgagtgttcccaatctaagtgctctggaatctggtggagtgggcaatggacatcctaaccgcctggatcccattcctaattctccagtccacgatattgagttcaacagcagcaaaccacttccacagccggtgccacctaaagggcccaagacatttttgagtcctgctcagagtgaagcttctccagtggcttctccagatccccagcgccaggagtggtttgcccggtacttcacattctgaaagaattgtgttggcacagctctgtatagactgttactaagagcatgactttatacagattgttatgtaaataggctttcctatgtcaaacactgtgaatgagaaagtatttgtctctccaacttgaaaatgcactgtatttcctgtgatatttattggaatcattctataaggtactatattatgtgtgtaattataactgttatttttatttgagatggaagagtctttaacctttgtaattactgcataataaattttgttagaatcaaaaaaaaaaaag

SEQ ID NO: 1052 - DNA, 2801 bp, Homo sapiens
atggggagatcctgccactgaagacactgacatacgtcactctcttgcgtatcctgcgctccaaccaacacggcatccgacgtaacctgacagctgccctgggcctggctcagctggtcttcctcctgggaatcaaccaggctgacctccctgtaagatgctcctactgcccagaaactgtccccaccttctcaggccgcctccccagcccccactggcaacccctgctcctgcaccatgaactctaataaggtgcctagtgcagcacctggcccagggtttcctcttctgtggctcccccgggatcccccagcacctgcctctggcccaggcttccctggaagcagttcccagcacccaggccctcctccatgcctgacccgaagcagagcctgtgctctgggcgggccccggtcactgacctgccctggcctgggccctcagtttgcctgcacagtcattgccatcctgctgcacttcctgtacctctgcaccttttcctgggctctgctggaggccttgcacctgtaccgggcactcactgaggtgcgcgatgtcaacaccggccccatgcgcttctactacatgctgggctggggcgtgcctgccttcatcacaggtactcccacccattcccacatccctgggtccacctttgtgccatgttctctccacccacatacaggccctgaggccccacatccccatgccccaggccgccttattcacaggtgtccctctggtttaacccagactctgcagccgccacccaggcgtcactcccttatcctggggagatcggtaggggccgatggtgggcagaacccttttccatgcttcatgcctggccctgtgagcccacctgcccgcagccctacttcccaggcccctcatcacccctccactgctcccgtctgtctccatgctccagggctagccgtgggcctggaccccgagggctacgggaaccctgacttctgctggctctccatctatgacacgctcatctggagttttgctggcccggtggcctttgccgtctcgatgagtgtcttcctgtacatcctggcggcccgggcctcctgtgctgcccagcggcagggctttgagaagaaaggtcctgtctcgggcctgcagccctccttcgccgtcctcctgctgctgagcgccacgtggctgctggcactgctctctgtcaacagcgacaccctcctcttccactacctctttgctacctgcaattgcatccaggtacctggcccagcctgtggagaagggaggcacctgggctgtggatgcctgaatatgcacagaccgttgctgcctcttgcctgccagggccccttcatcttcctctcctatgtggtgcttagcaaggaggtccggaaagcactcaagcttgcctgcagccgcaagcccagccctgaccctgctctgaccaccaagtccaccctgacctcgtcctacaactgccccagcccctacgcagatgggcggctgtaccagccctacggagactcggccggctctctgcacagcaccagtcgctcgggcaagagtcagcccagctacatccccttcttgctgaggtgaatcccggagatgggagggtggaggaggggaggaggggcccacgcatgctggacccaggccagccagctgttgggagttgaggagcacacactgtggctgacgtgggggccagcttggattagaagctgtaagggacccacagcaggaaccaggatcccaggggagaggagagactgggaccctgggcaaggggccaggctgacccctccagcatggtctcatcttcctagggaggagtccgcactgaaccctggccaagggccccctggcctgggggatccaggcagcctgttcctggaaggtcaagaccagcagcatgatcctgacacggactccgacagtgacctgtccttagaagacgaccagagtggctcctatgcctctacccactcatcagacagtgaggaggaagaagaggaggaggaagaggaggccgccttccctggagagcagggctgggatagcctgctggggcctggagcagagagactgcccctgcacagtactcccaaggatgggggcccagggcctggcaaggccccctggccaggagactttgggaccacagcaaaagagagtagtggcaacggggcccctgaggagcggctgcgggagaatggagatgccctgtctcgagaggggtccctaggcccccttccaggctcttctgcccagcctcacaaaggcatccttaagaagaagtgtctgcccaccatcagcgagaagagcagcctcctgcggctccccctggagcaatgcacagggtcttcccggggctcctccgctagtgagggcagccggggcggcccccctccccgcccaccgccccggcagagcctccaggagcagctgaacggggtcatgcccatcgccatgagcatcaaggcaggcacggtggatgaggactcgtcaggctccgaatttctcttctttaacttcctgcattaaccctgggccgtggttcctacgcccgaggctcccttcccttccccagccgcactcatgccctgctcctgtcttgtgctttatcctgccccgctccccatcgcctgcccgcagcagcgacgaaacgtccatctgaggagcctgggccttgccgggaggggtactcaccccacctaaggccatctagtgccaactccccccccaccattcccctcactgcactttggacccctggggccaacatctccaagacaaagtttttc

SEQ ID NO: 1053 - DNA, 3287 bp, Homo sapiens
agtaataaccccggcgcggcggcggagtcgctgtggggaatcctcccgcgctctgcctgggtcgggtcctccctgcccgctcgcacgctgccggccggggaccctccggtggcccctagcccctcggagcgctcctggatgaagccccgcgcgcgcggatggcggggcttggcggcgctgtggatgctgctggcgcaggtggccgagcaggcacctgcgtgcgccatgggacccgcagcggcagcgcctgggagcccgagcgtcccgcgtcctcctccacccgcggagcggccgggctggatggaaaagggcgaatatgacctggtctctgcctacgaggttgaccacaggggcgattacgtgtcccatgaaatcatgcaccatcagcggcggagaagagcagtgcccgtgtccgaggttgagtctcttcaccttcggctgaaaggctccaggcacgacttccacgtggatctgaggacttccagcagcctagtggctcctggctttattgtgcagacgttgggaaagacaggcactaagtctgtgcagactttaccgccagaggacttctgtttctatcaaggctctttgcgatcacacagaaactcctcagtggccctttcaacctgccaaggcttgtcaggcatgatacgaacagaagaggcagattacttcctaaggccacttccttcacacctctcatggaaactcggcagagctgcccaaggcagctcgccatcccacgtactgtacaagagatccacagagccccatgctcctggggccagtgaggtcctggtgacctcaaggacatgggagctggcacatcaacccctgcacagcagcgaccttcgcctgggactgccacaaaagcagcatttctgtggaagacgcaagaaatacatgccccagcctcccaaggaagacctcttcatcttgccagatgagtataagtcttgcttacggcataagcgctctcttctgaggtcccatagaaatgaagaactgaacgtggagaccttggtggtggtcgacaaaaagatgatgcaaaaccatggccatgaaaatatcaccacctacgtgctcacgatactcaacatggtatctgctttattcaaagatggaacaataggaggaaacatcaacattgcaattgtaggtctgattcttctagaagatgaacagccagggctggtgataagtcaccacgcagaccacaccttaagtagcttctgccagtggcagtctggattgatggggaaagatgggactcgtcatgaccacgccatcttactgactggtctggatatatgttcctggaagaatgagccctgtgacactttgggatttgcacccataagtggaatgtgtagtaaatatcgcagctgcacgattaatgaagatacaggtcttggactggccttcaccattgcccatgagtctggacacaactttggcatgattcatgatggagaagggaacatgtgtaaaaagtccgagggcaacatcatgtcccctacattggcaggacgcaatggagtcttctcctggtcaccctgcagccgccagtatctacacaaatttctaagcaccgctcaagctatctgccttgctgatcagccaaagcctgtgaaggaatacaagtatcctgagaaattgccaggagaattatatgatgcaaacacacagtgcaagtggcagttcggagagaaagccaagctctgcatgctggactttaaaaaggacatctgtaaagccctgtggtgccatcgtattggaaggaaatgtgagactaaatttatgccagcagcagaaggcacaatttgtgggcatgacatgtggtgccggggaggacagtgtgtgaaatatggtgatgaaggccccaagcccacccatggccactggtcggactggtcttcttggtccccatgctccaggacctgcggagggggagtatctcataggagtcgcctctgcaccaaccccaagccatcgcatggagggaagttctgtgagggctccactcgcactctgaagctctgcaacagtcagaaatgtccccgggacagtgttgacttccgtgctgctcagtgtgccgagcacaacagcagacgattcagagggcggcactacaagtggaagccttacactcaagtagaagatcaggacttatgcaaactctactgtatcgcagaaggatttgatttcttcttttctttgtcaaataaagtcaaagatgggactccatgctcggaggatagccgtaatgtttgtatagatgggatatgtgagagagttggatgtgacaatgtccttggatctgatgctgttgaagacgtctgtggggtgtgtaacgggaataactcagcctgcacgattcacaggggtctctacaccaagcaccaccacaccaaccagtattatcacatggtcaccattccttctggagcccggagtatccgcatctatgaaatgaacgtctctacctcctacatttctgtgcgcaatgccctcagaaggtactacctgaatgggcactggaccgtggactggcccggccggtacaaattttcgggcactactttcgactacagacggtcctataatgagcccgagaacttaatcgctactggaccaaccaacgagacactgattgtggagctgctgtttcagggaaggaacccgggtgttgcctgggaatactccatgcctcgcttggggaccgagaagcagccccctgcccagcccagctacacttgggccatcgtgcgctctgagtgctccgtgtcctgcggagggggacagatgaccgtgagagagggctgctacagagattttttatactttatgttttatctttctcagttatttgcaagtgagtgtccttttaaaaacacacttcttcatgcttttctttgtaaatgacagatcgaagtataggttacatcaaaaccctaccatcctgagaagagttatggttctattatagcagacgtcagccacacagcctatgtgacaataaccttagagtcctgtgttttgtttttgtgtgttgtgagattttaatctttttttttttcggtgagtctggccatttctataatgccaggtgggaagccaggctgcgggtgttagggtgggaatctgcccggcgtctctggcaccctccctgccatcctcagtgcggctgctgttctcctgtccggtgctgtggctccattccaaaggggcacctggatatttatatttgctgaagttttataataaagtttatatggtacagtgtg

SEQ ID NO: 1054 - DNA, 2356 bp, Homo sapiens
acatgtgtgccgggcgcacggcggctgggggctccttccagcggcgggcgctgtgggtgctggccttctgtacatccttcggcttgctgctgtcctggtcctcgaaccgcttgctctactggctcagcttcccgtcacacacgcgggtgcaccgcgagtggagccgccagttacccttccccgccgtcaccgtgtgcaacaacaacccgctgcgcttcccgcgcctctccaagggggacctctactatgccggccactggctcgggctgctgctgcccaaccgcaccgcgcgcccgcttgtcagcgagctgctgcggggcgacgagccgcgccgccagtggttccgcaagctggcggacttccgcctcttcctgcctccgcgccacttcgagggaatcagcgccgccttcatggaccgcctgggccaccagctggaggacatgctgctctcctgcaagtaccgcggcgagctctgcgggccgcacaacttctcctccgtctttacaaaatatgggaagtgttacatgtttaactcaggcgaggatggcaaacctctgctcaccacggtcaagggggggacaggcaacgggctggagatcatgctggacattcagcaggatgagtacctgcccatctggggagagacagaggaaacgacatttgaagcaggagtgaaagttcagatccacagtcagtctgagccacctttcatccaagagctgggctttggggtggctccagggttccagacctttgtggccacacaggagcagaggctcacatacctgcccccaccgtggggtgagtgccgatcctcagagatgggcctcgacttttttcctgtttacagcatcaccgcctgtaggattgactgtgagacccgctacattgtggaaaactgcaactgccgcatggttcacatgccaggggatgcccctttttgtacccctgagcagcacaaggagtgtgcagagcctgccctaggtctgttggcggaaaaggacagcaattactgtctctgcaggacaccctgcaacctaacccgctacaacaaagagctctccatggtgaagatccccagcaagacatcagccaagtaccttgagaagaaatttaacaaatcagaaaaatatatctcagagaacatccttgttctggatatattttttgaagctctcaattatgagacaattgaacagaagaaggcgtatgaagttgctgccttacttggtgatattggtggtcagatgggattgttcattggtgctagtatccttacaatactagagctctttgattatatttatgagctgatcaaagagaagctattagacctgcttggcaaagaggaggacgaagggagccacgatgagaatgtgagtacttgtgacacaatgccaaaccactctgaaaccatcagtcacactgtgaacgtgcccctgcagacgaccctggggaccttggaggagattgcctgctgacacccctcgagtcacccagcactccctccaaacagaccttgaggcccaagacccaggacaaggaacagcaagctcaggtgggatggccccagtgctggaaagaagcaagagccccctatgcacacattgcagactagctgcctagacctcgctccggccacgtccaacacgacgcatccttgggccccgccgtgcgtccctcttaggagagatgagtcacactctggaactgtccaagaacgaacctgccatcacatctcactgccagatgtataaagcacctgcatgctcagacttcttgtggcgccacctccacgtctgtcttgtacatgacactcctccacgcggtttccagtgtccacactgctgcccgtgcagtgggaccagattccaggtccaaagtcaccatgaggccaccctggaatcagaactgcacaatcaagagggaacccatgggactctctgctacattcagttcttgtgtcgtttgtgaaagttcttaacctgcccaaaaacccccttttccccaagctgcccatggggcttcggcgccaaaggtgacccgcgccaacctccctcccccccagtgcctatgacggcggcacagcagccagcgggtgggggacgcctgtgttcacccatggtgcccatgtcgttcttctctccctgtgacacagcttgtacagtctgattctttttatctggggtaggggggcttttatgtttgtccgatggagatttgttttgttttgcttcattttatgcttttttattttagttttgatgttctgaggtttgctttggtttttccattttctttggcatttatttattcgtgcttcaaatcacagtcatattaaaagctggtcttgtgg

SEQ ID NO: 1055 - DNA, 2725 bp, Homo sapiens
ttgaaatgattgccaaggaagaactagaatctgtgttagaggaagaggttgatgatttcccaacttttggagactcccagagtgactatgatacggtagtccatcctttctacgcttattggcagagtttctgcactcaaaagaattttgcatggaaggaagaatatgatacacgacaggcttcaaaccgctgggaaaaacgagccatggaaaaagaaaacaaaaagattcgggacaaagcaaggaaagagaagaatgagcttgtccgtcagctggtagctttcattcgtaaaagggataaaagagtgcaggcgcatcgaaaacttgtggaagaacagaatgcagagaaggcgaggaaagccgaagagatgaggcggcagcagaagctaaagcaggccaaactggtggagcagtacagagaacagagctggatgactatggccaatttggagaaagagctccaggagatggaggcacggtacgagaaggagtttggagatggatcggatgaaaatgaaatggaagaacatgaactcaaagatgaggaggatggtaaagacagtgatgaggccgaggacgctgagctctatgatgacctttactgcccagcatgtgacaaatcgttcaagacagaaaaggccatgaagaatcacgagaagtcaaagaagcatcgggaaatggtggccttgctaaaacaacagctggaggaggaagaagaaaatttttcaagacctcaaattgatgaaaatccattagatgacaattctgaggaagaaatggaagatgcaccaaaacaaaagctttctaaaaaacagaagaaaaagaaacagaaaccagcacaggatgtacctggcaaagattcatatctgcctgcagctcactttcagatggcttggggaaaaaagtgtgtgttgggagagagaagagatggagagagcgagcacaaatgtgccaaaatgttgcttgaaaacagacagaattatgatgacaatttcaatgtaaatggacctggagaaggagtaaaggttgatccagaagatactaacttaaatcaagacagtgccaaagaattggaagatagtccccaggaaaatgtcagtgtcacagagatcattaaaccatgtgatgatccaaaaagtgaagctaaaagtgttcctaaacccaaaggaaagaaaaccaaagatatgaaaaaacctgtcagagtacctgctgaaccacaaacaatgagtgttcttatcagctgtacaacctgccatagtgaatttccatctcggaataaactttttgaccatctaaaggccacaggtcatgcaagagcaccttcatcatcgtctttaaacagcgcaacaagtagtcaaagcaagaaagagaaacgtaaaaacagatagagattctgcctgtgcttttgtttgactgtctctagattttgaaaccaaaaaactgaactgaaatcatctaaagagttaaaatttcagtgatctgcaattaattacattgtggaagattattttttatcttgtaaaaacacttttttggtttaatatatatttttaaaacatttcactagtgattgaattctacttttgccatctgaattgacttgaatgtcttaaaacaggtaaatactgtaaagtgtgtattcttgatgtttattggctcatgtggacagaaatgtacagggagaattacattattttaacacacagaagtgcaactttctgctttattttctgaatttcacattacttttacttaatgcttttgtgttttgttaatacttcataatatgtgaaaaactcggatcttttaaaaagcatcatagatcatttttccatatgacactggttccgattttaaaaattatttttaaataaccgattattgattactgtattttttttctcaagaacagtgataggtagaaactaattgaacatttggtagtctttcaagaatagtgtctcttcaaggtttcacttgatttaatttgatattttactggtttaccagtaaggtgtattgttcagttttttgctccgatttgaattgtggaggtggaagcaaattagtttacatggcatgtcctccctaggcacagtgacagctgtaaagtatgacggaacaaggtagcagatggtacagaatttatactatttaagaagagatgtggtgttcttcattgagtttttttcttcactattttcagaagtttttgttctttttttttttccatcactcagtggagaaaagctttgttaatgaaagattttgtgatagagctgatgcttatacatctattctataacagtgatgaatattaacacaaaggaaatatggagaactgttataactgagtgttagaacagtcgtgtacattgatcagtattgagtccatttttaggatggattagtcagttcttttcattggtcttgaaagtaattttggctggtcgcggtggctcacgcctgtaatcccagcactttgggaggccgaggcgggcggatcacgaggtcaggagatcgagaccatcccggctaaaacggtgaaaccccgtctctactaaaaatacaaaaaattagccgggcgtagtggcgggcgcctgtagtcccagctacttgggaggctgaggcaggagaatggcgtgaacccgggaggcggagcttgcagtgagccgagatcccgccactgcactccagcctgggcgacagagcgagactccgtctc

SEQ ID NO: 1056 - DNA, 2995 bp, Homo sapiens
acttccggcgttgggactgtcacttggctgctcgcgtcaggccacacgggtggtctgggctgtggcgcgcgggtcggggcccgaggcgggcggccaggaaggacctgatgaccttcgaggatgtggccgtgtacttctcccaggaggagtgggggctcctggacacagcgcagagggccctgtaccgccacgtgatgctggaaaacttcacacttgtgacctcacttggactctctacctcccgacctcgtgtggtcattcaacttgagcgtggcgaggagccctgggttcccagcggaaaggacatgaccctggccaggaacacctacgggaggctcaactctggttcctggagtttgacagaggatagagatgtttctggagaatggccacgagctttcccagataccccacctgggatgactactagcgtcttccctgttgccgatgcctgccacagtgtaaaaagcctgcagcgacaaccgggtgcctccccatctcaggagagaaaacccacgggggtgtcggtgatctactgggagaggctcctgctaggctcgcgcagtgaccaggccagcatcagcctgcgactgacctccccactcaggccccccaagagcagccggcccagggaaaagaccttcacagagtaccgggtgcctgggaggcagcccaggacgcctgagcggcagaagccatgtgcacaggaggtccctgggagagccttcgggaatgcctcggacctgaaggccgccagtggtggcagggatcgcagaatgggcgcagcttggcaggagcctcatagactcctcggtggccaggagccctcgacctgggacgagctgggcgaggctcttcacgctggggagaagtccttcgaatgcagggcgtgcagcaaagtgttcgtgaagagctccgacctcctcaagcacctacgcacccacaccggggagcggccctacgagtgcacccagtgcggcaaggccttcagccagacgtcgcacttgacgcagcaccagcgcatccacagcggcgagacgccctacgcgtgccccgtgtgcggcaaggccttccggcatagctcctcgctggtgcggcaccagcgcatccacacggccgagaagtccttccgctgctccgagtgcggcaaggccttcagccacggctccaacctcagccagcaccgcaagatccacgcgggtgggcgtccttatgcttgcgcacagtgtggccgccgcttctgccgcaactcgcacctgatccagcacgagcgtacgcacacaggcgagaagcccttcgtatgcgcgctctgcggtgctgccttcagccagggctcctcgctctttttgcaccagcgcgtgcacacaggcgagaagcccttcgcctgcgcccagtgcggccgctcctttagccgcagctccaacctcacccagcaccagctcctgcacacgggcgagcggcccttccgctgcgtgggctgtggcaagggtttcgccaagggcgccgtgctgctcagccaccggcgcattcacacgggcgagaagcccttcgtgtgcacgcagtgtggccgcgccttccgtgagcgccctgccctcttgcaccaccagaggatccacaccacagagaagaccaatgccgcagcaccagactgcaccccggggccaggtttccttcagggacatcatcggaaggtgcgccggggagggaagccaagcccagtcctgaagccagcgaaggtctgaggtcacaggtcgcagcccaaccctttcttggccttctgtgaatcccttccacagctaaagggtccgagtgctcttcagatccacgatggggaaaagctctgtgcctgagagtcagggacgagggagaccctttggctgtggttccatttgcaggtggggacaggatttgccagtttagtcatagctcacacctccatcctcaaagaggtaacactgcagaaacatcagagggaggacatgtcagctggaactctggtggggctgaggctgtagttggggccataggacgccgacaaaggcagcgctgcatggtggtgctacttcatgtgttatgagagtggatgctgaggtgagggggatgcggacatggggtaggatgacctagagaaacttatgatgtctgcacacaaactggccgctagacggacgctgaggacattttccccctgaggcctctattcaaggcttcctgggggccatctcagcaaacaggagactacaggggactggggatcagggtgtggcctgtgagtgtcagcctcctcctcggaaaaagaaaagctttgggtcaactcagcatcatgtttgcagatgctgacagacgggatcctaatgagagtcaatgtgtgctcactgccagctcctgggctgtgctctggtcagccaggtgtgagggcctggcctggggtcacacagctgactcaggagaggaatgcccatggttctcagcattggaaggacaaacctaggatgatggctttccagtggcactcgttcaggttttcgtccaagtctcagcttggccaaggcctgtcgctcactcatttacaaaagtcgatgtgaggaggagcctttacacctgtggagacagtgatagctttggagcagataaggtggagctgctcatttttgctggatttggtggccgctccccgcccccacccccaccccctccatctcacctttcccttgttatgcctcctcaattggaggctggacagagagctgaataggaaggacttgccattacctaaggccatgtgtgacagcctcctgaggacctccccaacccagtgtgatgggcctgcatggcagagacaaaagggtagactgggggtcatttgcttcctgtggccttaagcctactaggccccatccttacctgagacctcacctccaagaaattaatggtcttttcaatggagaaaaaaaaagactagtatttgcaacttaaaatagatgtagtttccttt

SEQ ID NO: 1057 - DNA, 3566 bp, Homo sapiens
ctggctcaggcacctgtgctgtacatgtctcttccacaacacctcactggcccagcctgcagtcactggtgtgcatgtaaggtacctacctcttacctgagctcctggtgaaaggctccgtaggatgttgacctatgtatccctcatcctggcctggcccagccttcatatgctgagtttgatattagtggaaatgtgctgggtttgatcttcaaccaaggaatgatctggatgggctccttctatgctccaggcctggtgggcattaatgtgctgcgcctgctgacctccatgtacttccagtgctgggcggtgatgagcagcaacgtaccccatgaacgcgtgttcaaagcctcccgatccaacaacttctacatgggcctcctgctgctggtgctcttcctcagcctcctgccggtggcctacaccatcatgtccctcccaccctcctttgactgcgggccgttcaggtgcagagtctcagttgcccgggagcacctcccctcccgaggcagtctgctcagagggcctcggcccagaattccagttctggtttcatgccagcctgtaaaaggccatggaactttgggtgaatcaccgatgccatttaagagggttttctgccaggatggaaatgttaggtcgttctgtgtctgcgctgttcatttcagtagccaccagccacctgtggccgttgagtgcttgaaatgaggaactgagaaaattaatttctcatgtatttttctcatttatttattaatttttaactgatagttgtacatatttgggggttcaatacataagtcaagctagttgggagactagatattgtataaaaagacaaataattatgtaaggaggtagatcaagagataatgtgcatctactgttctctttccaaatgcctgaccttctgaaaacaaagccctctgccaactccgtaaagagaggttctgtggttaaagcagtttaggacgtactgccccttctgtctgccattatctcacttagaaatgctcaatgcacactcctttgttaaaggctctgaagaatcatgcaatgaggtaacacctgtaagctagtgtctccgtccttattgaccacagaaccctttctgcatggatcactcatccagggctggaaatagggtgaggcaggtgagtgacgccctacactgcacatgagcaaccctgagggcattacttccttaaattgtgcactcagggcctcacccgcctcactctagtcccaaccctgcctgccaatgaggagaaaccctgtcccgtaaaagggtcgtatatgcaaaacagcccctaaatgcccaaagagcctagaatccaaaggaggaaggagacaaatgcagtttgtcggctttgggtgatttattaggggtaacttacagtcagatgcatggtcacaagcagccgtgagacaggtagatctccacacctcaatcccccaggcccagggcctctatcttggggaaagtatgcgtgctctggaaggaatgtataggtggttctgaacatcacagcctgtgatttctgcagcagcatcaagggttgttttggaggaaactttatgtaggaataagagttcctacataaagagtaatacatctgctagtcatgtgggaggcactctcagactcagggttagttagaagttacaaggcagattagcatgtaaaataaagtcactcatgtcccgcacaaacacactttgagaaatgctgatccggtctttctcagttcataaaggactttactagataaaggcctgtgatggttggagcccagggatgttagcaggagtgttccagcagggtgtgatctggaaaacagtgttcacacagaaggaggggatcagtctagaacagaaggaatgtgctgaagtgcagatggcctaagatttagccaggctgaaaggagaaccgaatggaagaagcctctgttggcttcttcctaagcaaggtttggagggctgggccctgggtgcaaatgccagccccctttttctcagcttcccatctgtcactgggtaggaggtcagcagggacaattatactatgataagaaccatctcctacagttgtatggaaaactgaacttataagaaaggaacttggctagccaggcatggtggtacgtgcctgtagtcccagctacttgggaggctgaggtgggaggattgcttgatcccaggaggtggaagttgcaataagccatgattgcaccactgcactccagcctgggcaacatagcaaggctctgcttcaaaaaagaaaaaaagaaaagagaagagaagaaaaaaacagaacttgggtatttagctgaagagattcccaagcaaagtattgaaggtacagcctggtttcttcatgctgcttatagaaaatgtgcaaggaaagaggtatgttgagtaagtaactgataaacaagaaagtaccaggatttgatgattctggaaattctcagccttatctagattgcaaaatatgctaaaactagattcactgtcatgagaatgtgctgtaaaaagaaagccaagagtgagtctggataaccttttgctagtgtttctgaaagatcaaaaggtctgaatatcattcacacagaaaactctgactaatcgtgtgactaatgcatcgcctcaaccatcacatcagaagtcaggaatagaaataggattatccagaaaagatcatgtgggactctcttctttaacagagtacattctcatgacatacatgaaaaactcacacagtttttgacaatattatatcagcggaaacattaccaacttggactgaaagaaacagaaagaagacaaaataaaggcagatcattggcctcccagaattctgtggcgggaaacagactgataaaatttactcagctgagacatgtgctatccttcaagaagaaggaagggtggaagtgttcttccaagggcagaactgtgaacccacaagggcaaagctatgggcacagtagggcagagtctgcagcccagaggattattctcaggactttaaaacttaatggagcttggctgattggatttcaaaattgcttggaactggtgattcctttcttccttccattttctcccttttggtaatggagtgtttacaacttttatcctatgcctgtcccaccattttatttttgagagtaaataactcattttctagttcctagaatcttgagatggggatatcatcatggattagccaggtgggccctaagtcacaagtgttcttataagaaggagggaggccgggtgcagtggctcacgcctgtaatcccacaactttgggaggctgaggcgggcagatcacgagatcaggagttcaagaccagcctggccaacgtggtgaagccccgtttctactaaagatacaaaaaattagccaggtgtggtggtgcgtgcctgtaatcccagctgctcgggaggctgaggcaggagaatcgcttgaacccgggaggtggaggttgcagtgagccaagatcatgccactgcactccagactgggcaacagggtgagactccatctcaacaac

SEQ ID NO: 1058 - DNA, 3405 bp, Homo sapiens
aacatgaggggattggactggatgccttatggcttagcgctgtgctatgaagaggaagaaggaggaaggaaaaggagcgcagagcgggttacactgccaggagatcctgggaagctaggtcacttccctgagcctcagcatccttatctgcaaaatagaaattgctaatagactaaaaggcaattctgaaagatggatgagaaaggaatataatgactcagggtagagcctgcaaaacaatatgggatgagaagatgcagggactggtttcatggagagagcagggttttaggattgggggagggtgccagggctaccgactgctttgggagatcccagagggggcattctgaagtcctgcagaagagatgctgtgccgtgaggggtgaggggtcgctggaggccagaccagggctcccaggagtcctgcattgagaagggagagagtggacacaggaaggatgcgcctctgtccagtcctgaggctgggcgcacacaccaggcccttcgaaaagctcacattttttccagcttttctcacccagtatcacttcctttgttaagaggagggggtgggggaggagacggaggatgaggagggaggggctggcgggtgccgccgccgcccccgccccctcccggtgtgcggagcccgattgtcactcagctcctgcgccgggggcgacagagccgcaggcgcccgagtcgagtcccagccagctaccatccctctggagcttaccggccggccttggcttccccaggaatccctggagctagcggctgctgaaggcgtcgaggtgtgggggcacttggacagaacagtcaggcagccgggagctctgccagttttggtgaccttgggtgcttgcctcgtgccccttggtgcccgtctgctgatgtgcccagcctgtgcccgccatgccgccctccatctcagctttccaggccgcctacatcggcatcgaggtgctcatcgccctggtctctgtgcccgggaacgtgctggtgatctgggcggtgaaggtgaaccaggcgctgcgggatgccaccttctgcttcatcgtgtcgctggcggtggctgatgtggccgtgggtgccctggtcatccccctcgccatcctcatcaacattgggccacagacctacttccacacctgcctcatggttgcctgtccggtcctcatcctcacccagagctccatcctggccctgctggcaattgctgtggaccgctacctccgggtcaagatccctctccggtacaagatggtggtgaccccccggagggcggcggtggccatagccggctgctggatcctctccttcgtggtgggactgacccctatgtttggctggaacaatctgagtgcggtggagcgggcctgggcagccaacggcagcatgggggagcccgtgatcaagtgcgagttcgagaaggtcatcagcatggagtacatggtctacttcaacttctttgtgtgggtgctgcccccgcttctcctcatggtcctcatctacctggaggtcttctacctaatccgcaagcagctcaacaagaaggtgtcggcctcctccggcgacccgcagaagtactatgggaaggagctgaagatcgccaagtcgctggccctcatcctcttcctctttgccctcagctggctgcctttgcacatcctcaactgcatcaccctcttctgcccgtcctgccacaagcccagcatccttacctacattgccatcttcctcacgcacggcaactcggccatgaaccccattgtctatgccttccgcatccagaagttccgcgtcaccttccttaagatttggaatgaccatttccgctgccagcctgcacctcccattgacgaggatctcccagaagagaggcctgatgactagaccccgccttccgctcccaccagcccacatccagtggggtctcagtccagtcctcacatgcccgctgtcccaggggtctccctgagcctgccccagctgggctgttggctgggggcatgggggaggctctgaagagatacccacagagtgtggtccctccactaggagttaactaccctacacctctgggccctgcaggaggcctgggagggcaagggtcctacggagggaccaggtgtctagaggcaacagtgttctgagcccccacctgcctgaccatcccatgagcagtccagcgcttcagggctgggcaggtcctggggaggctgagactgcagaggagccacctgggctgggagaaggtgcttgggcttctgcggtgaggcaggggagtctgcttgtcttagatgttggtggtgcagctccaggaccaagcttaaggagaggagagcatctgctctgagacggatggaaggagagaggttgaggatgcactggcctgttctgtaggagagactggccagaggcagctaaggggcaggaatcaaggagcctccgttcccacctctgaggactctggaccccaggccataccaggtgctagggtgcctgctctccttgccctgggccagcccaggattgtacgtgggagaggcagaaagggtaggttcagtaatcatttctgatatttgctggagtgctggctccacgccctggggagtgagcttggtgcggtaggtgctggcctcaaacagccacgaggtggtagctctgagccctccttcttgccctgagctttccggggaggagcctggagtgtaattacctgtcatctgggccaccagctccactggcctgcccgttgccgggcctggactgtcctaggtgaccccatccctgctgcttctgggcctgatggagaggagaacactagacatgccaactcgggagcattctgcctgcctgggaacggggtggacgagggagtgtctgtaaggactcagtgttgactgtaggcgcccctggggtgggtttagcaggctgcagcaggcagaggagagtacccccctgagagcatgtgggggaaggccttgctgtcatgtgaatccctcaatacccctagtatctggctgggttttcaggggctttggaagctctgttgcaggtgtccgggggtctaggactttaaggatctggggaaggaccaacccatgccctgccaagcctggagcccctgtgttggggggcaaggtgggggagcctggagcccctgtgtgggagggcgaggcgggggagcctggagcccctgtgtgggagggcgaggcgggggatcctggagcccctgtgtcggggggcgagggaggggaggtggccgtcgagttgaccttctgaacatgagtgtcaactccaggacttgcttccaagcccttccctctgttggaaattgggtgtgccctggctcccaagggaggcccatgtgactaataaaaaactgtgaaccct

SEQ ID NO: 1059 - DNA, 3051 bp, Homo sapiens
acgaggtcaggagatcgagaccatcctggctaacacgatgaaaccctgtctgtactaaaaatacaaaaaattagccgggcgtggtggcaggtgcctgtagtcccagctacttgggaggctgaggcaggagaatggtgtgaacccgggaggcggagcttgcagtgagcccagatcgcaccactgcactctagcccgggtgacagagcgagactccgtctcaaaaaaaaaaaaaaagaggtttaattgtacttacggttccacatggctggggaggcctcagaattatggtgggaggcaaaagtcatgtcttacatggtggcggcaagagaaaatgaggaggaaacaaaagcagaaacccctgataggcctatcagatctcatgagacttattcactatcacgagaatagcacgggaaagactggcccccatgattcagttacctctccctgggtcccacccatggcatgtgggaattctgggagatacaattcaagtggcgatttgggtggggacacagccaaaccatatcaagtgctaatattaattctgcaatattctctacttaggctgaaaatattttcagaagagagcgtaccactctttggccctcccttgccaactccaccagtgtttacagaccaccaggaattcagggactttttgctagtgaaatgtaagtttctgttttgaaacaattttgcaacttgttctatgtcagaatacatttcttcagattctcccagaatgctgtttaaggaaatgtcattgtttaagcattccatgttccgttaattctttgcacaacatgtgtttagtattctggtcatgttgtgcacgttttctcctatgttttcatccccaccttccatcctgtcacctgccttgaagcttctctacactcacccactaaggaccctcgggcctcaaatttgcctttctgccctgtgttctgatagagccattgctgaatctctgcttgtatatgtatctgtatctgtcagagagtgggatgtaggtgggggaaagagtggttgtgggtatatgcttagggatagggagagttgttggggaatgtgtgtgcacacttgcgtgagtgtatatgtgcacccatgcacatgtgtgggaaagagaaagacagaatgagaacataatgtgtgtagaccatgactgccaggcatcacttgctggtgagcacatattttcactctactggtaatacccaaatacccgactctgaggccacatctcttaaagcacaagagctctgcgcatccctcctcagggcacccctgggaattatttctggtagtcccatggtgggactgtgtcattgatcagaaacaagttactcgggttcatctgctgcagcttgctagccgcacgccctggcagggctgcttggtctatgccctccatgaagatactgctttccagcctcctgccaggtatgctgggcattgcagctgctttgctggctgcctcctgtccccacctgcaactcctccccactacagtctttgcctaagtctgtcactgttgccgtgcagctctgagacatctagaatgcccctctcttcactcggtccgtcctggtcacctggcctcaaggaagcattgactgagcccaaagcctcactgagtcctacgtggacaagtgttacccaacctccaatcttaatcctactccagtactggcccaagccagtccctcaggccagggcaagggacaggcacatgttgtttctcctctgtcttcctgtctccccagtcactccttcacagtcccaaacatgacttctcctgcacagaaacagtgccaagcatgagtgtcagttctagtcaccagaaacatccaagtcctggccaggctgtttggtagcctctcttccataggaaacccctcccttccctttcagagaccttggcatgattccacaactttgtcctggagaacagagacatgaaagacacctttgctgaggctccctctgctttccagctgggctgcctctcttcccaactggaccaccagcgttgttacctcccatactccaacctataccagggtccatgggtgatgtctccctcgacacattagaggcagcagacactgcaaaccatgtgcaacagatgatgattttgtctctccctttccagtatttatactcattatttcaaatgctacaacaaggtcccaaactcagatgcctggagagccaggcagggagcatgagcaagtgaggcgggctgagtggaggacagtcaggagtgctgggagctgtgacacacttgagagcatgtgctcactccatccagctgaggcctttcagagcatgcaccatggccagggttgccagatactctgagttttcaaatcaagccagaaagctgaaattgtatgtgaaattgtccgagtctcatgtgttcaagtccagaggatcagacagagagcaagaaacagatctgaaacagagtcagcaacagagtgggtgtagctactggaagctgaaagggtgttggcagcatggggctcaggaagacagcattcactgtagggggcctgtggcaaggaaggggccgctaaagacctgtaaccaccaattggagatcactcagcagcactagggacccggcttataagtggagccagtcaacagatggactttcatcagcgttgtcaaagacttgaggtgaaatgaaacgaagggctgggttgatttgacattgaagatttgaaagtagaaacagcagaagaatgcaggctcaaggtgatggagagggtgtgttgaggagatggagtgtggggccaggaaggaccaggaggggttggtgcgctgagaggacaggtagcagccggcggatcatagagtctcggaattccaaagtggattgagcagcgaggttgaaaactctgaattacaggagatggcatttcaacaaaaatcttgaccttttccttttcagccgaagcgaggctttaaaatggattgttccaaggtactaagcagaaaaaaaacctcaaacaaaaaaattcctagattcacagaact

SEQ ID NO: 1060 - DNA, 2797 bp, Homo sapiens
agccggggcagccgcgcgtgggcatccacgggcgccgagcctccgtccgtgtctctatccctcccggttccagcggccgggccgagggcgccagagggggccatgtcgtaccagggcaagaagagcatcccgcacatcacgagtgaccgactcctcatcaaaggtggacggatcatcaacgatgaccaatccctttatgctgacgtctacctggaggatggacttatcaaacaaataggagagaacttaatcgttcctggtggagtgaagaccattgaagccaacgggcggatggttattcccggaggtattgatgtcaacacgtacctgcagaagccctcccaggggatgactgcggctgatgacttcttccaagggaccagggcggcactggtgggcgggaccacgatgatcattgaccatgttgttcctgaacctgggtccagcctactgacctctttcgagaagtggcacgaagcagctgacaccaaatcctgctgtgattactccctccacgtggacatcacaagctggtacgatggcgttcgggaggagctggaggtgctggtgcaggacaaaggcgtcaattccttccaagtctacatggcctataaggatgtctaccaaatgtccgacagccagctctatgaagcctttaccttccttaagggcctgggagctgtgatcttggtccatacagaaaatggagatttgatagctcaggaacaaaagcggatcctggagatgggcatcacgggtcccgagggccatgccctgagcagacctgaagagctggaggccgaggcggtgttccgggccatcaccattgcgggccggatcaactgccctgtgtacatcaccaaggtcatgagcaagagtgcagccgacatcatcgctctggccaggaagaaagggcccctagtttttggagagcccattgccgccagcctggggaccgatggcacccactactggagcaagaactgggccaaggctgcggcgttcgtgacttcccctcccctgagcccggaccctaccacgcccgactacttgacctccctactggcctgtggggacttgcaggtcacaggcagcggccactgtccctacagcactgcccagaaggcggtgggcaaggacaactttaccctgatccccgagggtgtcaacgggatagaggagcggatgaccgtcgtctgggacaaggcggtggctactggcaaaatggatgagaaccagtttgtcgctgtcaccagcaccaatgcagccaagatctttaacctgtacccaaggaaagggcggattgccgtgggctcggatgccgacgtggtcatctgggaccccgacaagttgaagaccataacagccaaaagtcacaagtcggcggtggagtacaacatcttcgagggtatggagtgccacggctccccactagtggtcatcagccagggcaagatcgtctttgaagacggaaacatcaacgtcaacaagggcatgggccgcttcattccgcggaaggcgttcccggagcacctgtaccagcgcgtcaaaatcaggaataaggtttttggattgcaaggggtttccaggggcatgtatgacggtcctgtgtacgaggtaccagctacacccaaatatgcaactcccgctccttcagccaaatcttcgccttctaaacaccagcccccacccatcagaaacctccaccagtccaacttcagcttatcaggtgcccagatagatgacaacaatcccaggcgcaccggccaccgcatcgtggcgccccctggtggccgctccaacatcaccagcctcggttgaacgtggatgcgcggaggagctagcctgaaggattctgggaatcatgtccatcccttttcctgtcagtgtttttgaaacccacagttttagttggtgctgatggagggagggggaagtcgaaggatgctctttcccttttctgtttaggaagaagtggtactagtgtggtgtgtttgcttggaaattccttgccccacagttgtgttcatgctgaatccacctcggagcatggtgttttcattcccccttcctagtgaaccacaggttttagcattgtcttgttctgtcccttccacttctaactccactggctccatgattctctgagtggtggttcctttgcaccctgtagatgttctaggatagttgatgcatgttactaaattacgtatgcaagtctgtgagtgcgtctgaggggacatcgccaaggactgactgagacacgatgccgagacctcaagccctgaggggcagtcccaaaacccttacagtgaagatgtttactcattgcccccacctctggtccacactagaaagaagctcgccccacctccacctgtgagatccgtgaattctcggaatggcaggggaagccttgcactaggttgcagagaagcatcctccacatcctgtgtcagaaaccctggtctccgtggcacttgtaactcaccgtgctgtcttctggtctgtgtgtgttcttcaagccagctctaggcttcaggccgagccaggttcacactcagaaagaggtctccccatccccattcggggctgacgatggggggctgatggctgcccctgcgtggcctgagtcctggtccctctgaggcagttgacggggcagtcagatttttaaagttttgtacaaagttttcctttgtaatcactcccatttttacttaacaaccaacttgttgtggctcttatttctgaattcaaagcttgtgaaaaaataaagaaaatgaactgcccactg

SEQ ID NO: 1061 - DNA, 2602 bp, Homo sapiens
tgagtagctgggattggaggcatgtgccaccacacctggctaattttttttttttttttttttttttgtatttttaagagactgggtttcaccatgttggccagactggtctcaaactcctgacctcaggtgatccacctgccttggcctcccaaagtgctaggattacaggcatgagccactgcacctgacccacagacatctcttcattcagtagtctagcatgggggcttgctcccaagagtactgttccaggaagacatgccccattgtgcaagtactcattcaaacctctgctcgcataatgcttgctaacatgcctttggccaaattaggtcacatagctaacccaaagtcatgtgggtggccatcaacactgggatgtgtgtggctcgttggaggtcactgaagtgaaacctaccgtagttacacagtaagtcagtcaaattcttggtttattggacagctgacagctgttaagaaggaccctatgttaaaggaaatggatacaatctaataacattaacaatagataatggtttttaaccattaacttccattgataatggttctgattagagcgcaagataactagtgaaacgagaattcccttatcccccttgcggggcatgcgacatgggtatggctcactcttttggtttccctgttgctcaaacccctaggaggagcatgcagacgggcaggtgcagaggccgtggggagcgcttctgggctctgacctcacggcagcgtctagggatggctgtctgtgactcccgaatccctagtgggcgtctcttacagtgtgctctttcagctttgccgtctgcagaaggattatgttaatcagctcgatagaccctctgccttattgcaagggcagtggccagtttaacagctttctgtatcccaagttcttgcccagtgtacaagaagaatcggatgacacgtgggcttgaaggatgagtgcaaggttttattgagtggtggaggctctcagcgagatggatgcggaaccggaagtgggggatggagtgggaacgtgatcttcccctggagtcctgctgttctcggtagacggacgcctccttccttctctgccatgccgccctgccacccgctctttgtcactctctgccactctctttctctgctcctctcaatgtccagccacttgtgtctgaggattctgagatggagagatcaacctgaattatctggatgggctctaaatgtaatcacacgtgtccttataagaggaacccttgcttacagaagaacaagagatgtgatgatggaagcaacaggttagagagattcaagaaaagcatagccagccaagggaatgcaggcagcctccagaagctaaaaaaaaaaaaaaagaaaagaaaaaagaaaagcaagagaacgattccccctagagcttcctgaaagaactagccatgccaccacattgtcgttatcccagtgagacagatttcaaacttgtggcctcaagaactgtaagggtaagaactgtaaaataaatttatgctgttctaagccacaaaatttgtggcacttttttacagcagcaacaggaaattaataaaagtcttccagtggtagggggtgaatctcattacgtttctaaggcaagcattgcttagtatcttgcttatttaaaagataaatttagctagtatacacaatagtgaccaattagattgtatgctataatacttgtaagaaaaatgattgcatactctttgttttcttgtttgagacagagcctcactctgttgcccaggctagagtgcagtggcacaatcttggctcactgcaacctccacctcccggtttcaagctcttctcgtgcctcagtctcccaagtagctgggactacaggcacacaccaccacacccagctaacttttgtatttttagtagagacagggttttgccgttttggccagactagtctcgaactcctgacctcacggcagcgtctagggatagctgtctgtgactcccgaatccctagtgggcgtctcttacagtgtgctctttcagctttgccgtctgcagaaggattatgttaatcagctcgatagaccctctgccttattgcaagggcagtggccagtttaacagctttctgtatcccaagttcttgcccagtgtacaagaagaatcggatgacacgtgggcttgaaggatgagtgcaaggttttattgagtggtggaggctctcagcgagatggatgcggaaccggaagtgggggatggagtgggaacgtgatcttcccctggagtcctgctgttctcggtagacggacgcctccttccttctctgccatgccgccctgccacccgctctttgtcactctctgccactctctttctctgctcctctcaatgtccagccacttgtgtctgaggattctgagatggagagatcaacctgaattatctggatgggctctaaatgtaatcacacgtgtccttataagaggaacccttgcttacagaagaacaagagatgtgatgatggaagcaacaggttagagagattcaagaaaagcatagccagccaagggaatgcaggcagcctccagaagct

SEQ ID NO: 1062 - DNA, 3061 bp, Homo sapiens
gtgtgatgaggagctgggcagcatagtaggtggtcatgatcaccaggcgggcatggggcaggggctgggcgaaggtgtcccaggccagcacgccatcagagagcgtgaagagcagcgcgccccagccggcactcccgccctgggccaggccgcgccacagcatggccatcaggatcagcccataggctgccaccggcaggaccatatccggctcgaggtgctggagcacaaggctgaggtaggggccaggggccaggatgatgagcagcagcaggccgggctgcaggggagagaagccgaaggcccagacgtagaggaggtgggcggtggcaaaggcggccatgcctggcgggagaggggtggggtaccagtgaggaaggcccatcctgggaatggccccgaggtcacccctcagggcctaagagaaggaccatcccagagcaccaggccccaccctggccgagcctccttgcaggtctccccacatgcagtgtccatccttgctctgctcagaactgccaggaggccccaccttcccttggcctccaaagccccatggcctccagctctccagccactctgcgccagccaccctggcctgctgggctacaagcacctgacacgtccctgccccggagcctttacactcgcccttcctccacacaggcatacagcccttcagctctgcccaaatgtgacttcctcagtgaggccttcctcagcaaccctgcttcaaactgcagtacctccagcgggtcctcactgccctctgcgccacctcagctactgccctaacaccgcctgcccccacccctcgctggagcgtgagctgcctcggtcacggctgcgccccccactgtgcctttgaccactggagctctcacaggagccctctgcacccaggctcccatccaagtgctggggcctccctcacacgggcatctggaaagcgtcacagcaccttccactcaccagggacgaaggctgccggccagatgaggcaagcgtcccccacagccgagcacacaagggctccctggaggagctgggtgtagcccccgcttggggacatgacccacaggaacccagccaggcagaggacgggcaggcacttgaccagggcagcgaaccaggacagctggtcctcgggaatccagaggcagaagtacacgcagcaggagaggatgaaggggctcagccacctgcagacatctgggcgctttggggagtggggagctactgagccgaaacccagcccagcccccattcttgggactcagatctcatggctcctgtcccacccccacctgggaccccagctgtacaggctggacccattcagggaccaggctgccagaacccagcttcccagggcccaaccaactcaaggacagcagctcccagacccgccggctgctggggttccagggccctgtccccccagccccaggcacagctcagaaggctctcacctgggctgagcagtgagtcttcagggtctgccccgctttgccagcgtccatgctggcctgatagccccagagcgacctaatctgggagcgagtggcttcagggggtggaggggagggctcatggttacacgttaacccaaggagcgtcctgtggactctgtgactgataacagggcccagggagatgttgtcctcaccctggggatggccctgcctggcgcccgctgataaagcactgttggcactgggggtccctctgccctagcctgctgggacatggcttcctcctcctatctgcctggggaggttaggcccacaaatgcctgtccccttgtcctgggccccaacaatcagaagagatggggtgcagaattccaacagccaccccatcatgggaagcgggagaggggctggctggcaggagtgcccctggagggatgggaaggcgagtctgtccttcacttgctgccctagccgtctccctccctgctccatgaaacctttcctcattctgctcaaccccaccaagccctcaggggctccaccacaaacactgcttcaatgggtgaccaggagggaccaccacgaatgcggggaacaagcaccctctcctgttagctgagcgagcccccaggtgacctccaagccaactgccaccccagtgaggacgctgtcctcatggcccggtccacacgctccggtttcccagcgccgctcaccggtgccactcgctgcacacgcagcctacacttctaccttctacctgaaagactcagacctactgggcgccagtacccagcctcaatgctgggcttggttactgggggtaagcaggggcaggagcagggatttgagcctgtcggtggcttctatcctctgcccaaggccctgcccacaggtggggtagacctggcaggagccctcacagccagtgcctggcccagcctggggcctctgcagccacagggctccctctggcaggacagtgtgggggcagactgggtcaggagcacccccagcctctggggtgcagggataatacaggctccccaccccgcatcccagaacgtaaggtctgaccagcagaatcgtaaactgccttcctttatttatatttgcaatatgaaatagaagctcggcacaaacgcacgcacactcacaccagcctgggaggagggagctggggacaaggtcacttggcaacagggctgggacctcagaccctcaaggcccctggggctgttgccggggaggcccctgctccccagagccggactggcctggttgaaagtgcagggtctgggcaaaggcacggcccccactcgggaccctctggcacccccacccacgctgggccgtcccccatggtggacctgagctaaaaggccgggtgtgggcgtggccgtctgcgctgcagcgtgggacagctgggcacgtgggtggcaaccttgggacccctaacaccagctcccgctgggacggaacagggaaggctgtgctttggagccgccagcccagttcggtgtcctcactctctctcgctctcctccctctctctatataatatataatatatgtttctctctctc

SEQ ID NO: 1063 - DNA, 2782 bp, Homo sapiens
gttcgcattgtctgcgcgcacctgagcgcggccttcctggcacggcggcgtcgggggaagagcgcacctggcgcgcgcctccctcgtggccactcgcggtccgtcccgggcgagctggcggggttttgggaggggtgcggtcagcagtaatatcaacatgccccctttcctgttgctggaaaccgtctgtgttttcctgttttccagagtgcccccatctctccctctccaggaagtccatgtaagcaaagaaaccatcgggaagatttcagctgccagcaaaatgatgtggtgctcggctgcagtggacatcatgtttctgttagatgggtctaacagcgtcgggaaagggagctttgaaaggtccaagcactttgccatcgcagtctgtgacggtctggacatcagccccgagagggtcagagtgggagcattccagttcagttccactcctcatctggaattccccttggattcattttcaacccaacaggaagtgaaggcaagaatcaagaggatggttttcaaaggagggcgcacggagacgggacttgctctgaaataccttctgcacagagggttgcctggaggcagaaatgcttctgtgccccagatcctcatcatcgtcactgatgggaagtcccagggggatgtggcactgccatccaagcagctgaaggaaaggggtgtcactgtgtttgctgtgggggtcaggtttcccaggtgggaggagctgcatgcactggccagcgagcctagagggcagcacgtgctgttggctgagcaggtggaggatgccaccaacggcctcttcagcaccctcagcagctcggccatctgctccagcgccacgccagactgcagggtcgaggctcacccctgtgagcacaggacgctggagatggtccgggagttcgctggcaatgccccatgctggagaggatcgcggcggacccttgcggtgctggctgcacactgtcccttctacagctggaagagagtgttcctaacccaccctgccacctgctacaggaccacctgcccaggcccctgtgactcgcagccctgccagaatggaggcacatgtgttccagaaggactggacggctaccagtgcctctgcccgctggcctttggaggggaggctaactgtgccctgaagctgagcctggaatgcagggtcgacctcctcttcctgctggacagctctgcgggcaccactctggacggcttcctgcgggccaaagtcttcgtgaagcggtttgtgcgggccgtgctgagcgaggactctcgggcccgagtgggtgtggccacatacagcagggagctgctggtggcggtgcctgtgggggagtaccaggatgtgcctgacctggtctggagcctcgatggcattcccttccgtggtggccccaccctgacgggcagtgccttgcggcaggcggcagagcgtggcttcgggagcgccaccaggacaggccaggaccggccacgtagagtggtggttttgctcactgagtcacactccgaggatgaggttgcgggcccagcgcgtcacgcaagggcgcgagagctgctcctgctgggtgtaggcagtgaggccgtgcgggcagagctggaggagatcacaggcagcccaaagcatgtgatggtctactcggatcctcaggatctgttcaaccaaatccctgagctgcaggggaagctgtgcagccggcagcggccagggtgccggacacaagccctggacctcgtcttcatgttggacacctctgcctcagtagggcccgagaattttgctcagatgcagagctttgtgagaagctgtgccctccagtttgaggtgaaccctgacgtgacacaggtcggcctggtggtgtatggcagccaggtgcagactgccttcgggctggacaccaaacccacccgggctgcgatgctgcgggccattagccaggccccctacctaggtggggtgggctcagccggcaccgccctgctgcacatctatgacaaagtgatgaccgtccagaggggtgcccggcctggtgtccccaaagctgtggtggtgctcacaggcgggagaggcgcagaggatgcagccgttcctgcccagaagctgaggaacaatggcatctctgtcttggtcgtgggcgtggggcctgtcctaagtgagggtctgcggaggcttgcaggtccccgggattccctgatccacgtggcagcttacgccgacctgcggtaccaccaggacgtgctcattgagtggctgtgtggaggtgagtgggggaatccacaccctcagggctgcccccatggcaggccctcagcctgagccttcacatacatcatgacgaggatggcagctcttcccagctactgagcacttgcttcccaagtgccaggttctgtgctaaaccccatgctcacataaaatcctacagtaggcataaccatcctatttgacatttaaggtacagaaagtttaactaacatagataactccccccaaacttgagaatttatgcattccctttaaacagaacacacttttagaatatccacaagcttcctaagggtctaaagatcccacattcacactgacttgggcagtgacagagcccagagcaaacagggccaggccagcccaaatccagtgacctcctcttcaccttcttaaaagagacaggagaatcacttgaacccgggaggtggaggttgtggtgagccaagatcgtgccattgtactccagcctgggcaacaagagcaagattctgcctc

SEQ ID NO: 1064 - DNA, 3869 bp, Homo sapiens
gttgtctgaaggccgaggccaagatggcggtgctgtcagctcctggcctgcgcggcttccggatccttggtctgcgctccagcgtgggcccggctgtgcaggcacgaggtgtccatcagagcgtggccaccgatggcccaagcagcacccagcctgccctgccaaaggccagagccgtggctcccaaacccagcagccggggcgagtatgtggtggccaagctggatgacctcgtcaactgggcccgccgggtgagtactatgagctgtaggccctcctcgagcgccagggcctctctgcacactcacaggcacacacatacacacaccaacgtgcagacacgtacacacacaacacatgcatgcacactcacatgcgcacatgtgcatgcaagctcacatgtatggacagatgtgtacacggaccacacgcacactcacgcacacaatgcacatatgcacactcgcacacatgcacacttgcacacacatgcacacacaagcacatgtgcacacacgcttgcacacatacacacatgcacacttgcactcatgcacactcatgcgcacatatacacatgcacacgcacactcgcacacacgtgcacatatatgcacagtcatgcacacacatgcacactcacacacatgcacacacgtccttgtgtggacacatgcatgtgtgcctgttggcatgcatgcacacaggcacactcactgatgcacacacacccctgcggccgtggagcagggcggaccctcccggaggcccctgtgctggcctggtggcctgtggttccatctgaggattcggaccctgctggagatgacccctccgtttccgtcattctctttctggcgtccgtgtgttcctcttgtttctcttttaaggtgaaagcagtgttttaagttaaaaggagcgcgtgtgaaggcagtagatccttctcggtacccgtttaaagcctcccctgcctgtggcgccagcccccacgcagcccctgccatccccctgcagcgtgagcacgtgcagctccctccagctcctgcggcacttgctgcgacagcccgggttcaacaatcccccattgatggacgttcactgtttccttttgttttttgtttcctaaacaatgccacggcgaacgtcctgccagggccgcagtggtcgagacaaggatagtttttaatgcaggatagttcttttctttttcttttcttttcttttttttttttgagacggaggctcgctctgtcgcccaggctggagtgcagtggtgcgatctcggctcactgcatgctccgcttgccgggttctcctgcctcagcctcctaagtagctgggactacaggtgcccgccaccacgcccggctaattttttgtatttttatttttagtagagatggggtttcaccgtgttggccaggatggtctcgatctcctgacctcgtgatccgcccacctcggcctcccaaagtgctgggattacaggcgtgagccaccacgcccggctaatgcaggatagtttctaatggagggaacctgagacatggccagcggccgtcccaacacaggcttctggcgggcaggtggacctggccatttctgcccgggcagccctgcctcactctgtagcctgaccctgtcacccgccaacacatgcagcagggcccctgccaggtctcagagccgcgtgcagggagagcgggaacggtgggggaaatgagaagccacagggatggaggagaggggagggagtggccaaggagatctgagagggcttcctggaggcgtcgcacttggtatgtggacccagatctagttaacgcagagagttcccggttagacctgcgctactactcgcctgtagcccacgcgctcagagagtggctggagccccctgttgaaatggtgggacttaggatacactgggttcgaggaactatgtgatgaggacagatctcacccgtttctctctattttatgtatttgaatgtggctggtggggcgcgctttacaactcttggggcccggaggccacctgcaggagccgctgtgcctctcacctctgccggctgccgccccgggacatgagtcgggggttctgggtgctccacgtggagtctcacgctgggccacgcggggctccgggggtggcgtctgacccgagcccggcctccgcagagttctctgtggcccatgaccttcggcctggcctgctgcgccgtggagatgatgcacatggcagcaccccgctacgacatggaccgctctggcgtggtcttccgcgccagcccgcgccagtccgacgtcatgatcgtggccggcacactcaccaacaagatggccccagcgcttcgcaaggtctacgaccagatgccggagccgcgctacgtggtctccatggggagctgcgccaacggaggaggctactaccactattcctactcggtggtgaggggctgcgaccgcatcgtgcccgtggacatctacatcccaggtagggccgggaccgcaccgcccacgagggagctggagacagggccagcgccacacggagcccggcggcccctgtgagggagtcccacacccccagcagacggcgggctcccccatcctatggatgggccgactcggagcgctgcctcttagtggagcctgtcccctgtgagaagtcggcgatgtattcaggcatcagagggatcagagggagcaggggaagctgagtggaattcctgacacacgcctggtttacagcagtttcatatggtcctacctggcacaaaccaaagacctgcagttagaaataccaagcgagaaggttcctgggggccaaggacactgtcccgcgccctcagccttacagaagggcacgcaggactccctggggaccgcgcccctccctcccagcggaccgcgctcctccctccctggggacctcgctcctccctccctccctgcggactgtgctgctccctccctgcggactgtgcttctccctcccttggagcagcctggacttgccagagctctgccaggtggggtctggccgccctttcccaggccctgcagtggccttgtcctttctcacctgtttccactcctgctgtccccgttgggccctgggcttcgtcctcttgctcaagccctttgttctgaacctgcgtggcagccgggactgggggatccccagcaaagagctctggcttggggctcagaaagagggtcatcgggtcctcgtgggatgcccgggctctgggccacctcccctccctccgcccagcctccctgcctccatctccgtccagggcagccccgggccctgctccccactgctaagtgtgtctgctgagcgctggcccccattgagtcctgagggctggggccgggggccgggttagtgaggtcagcgtcttgtccgagaggtccctgtgacagcccgggatgagccacgggtggagggcagtggggccttgcccaggggaggaccccactcttcctgcagggacctcccctgcgccggctcccagtccctggcactgcgcccacccagggctgtcagcctccaccttcagaggccggcccgggaaacccttccaaagccgagccggctgcgctgtgcacgcggtcacgcgggctccggctgcgggaagcgagactgaggcaaggtccctgcaggctgcccacctacggccgaggccctgctctacggcatcctgcagctgcagaggaagatcaagcgggagcggaggctgcagatctggtaccgcaggtagcgccgccgccgccgccgccggagcctgtcgccgtcctgtccccagcctgcttgtgtcccgtgaggttgtcaataaacctgccctcgggctgccgcc

SEQ ID NO: 1065 - DNA, 3147 bp, Homo sapiens
agagggtatgagtcccaagccttggcagcttccatgtggtgttaagcctgtgggtgcacaggagtcggcaatgaggtttctgaacctctgcctagatttcagaggatatatggaaacgcctggatgtccaggcagaagtttgctgccagaggagagccctcatggagaacctcttctagggcaatgtggaaaggaaatgtgggggtggagccctcacacactgtccccactggggcactgcctagtggagctgtgcaaagaggattaccatcctccagaccccagaatggtagatccaatgacagcttgcaccatgagcctggaaaagctgcagacactcaacactagctcatgaaaacaggagggaggagggctgtaccctgccaagccacaggggcagagctgctcaaggtcatggaagcccacctcttacatcacgtgacctggatgtgagacatagtatcaaagaatattatttttgggctttaagatataattactgccctattggattttgtaattgcatagggcctgtagccccttcgtttgggctaatttcttccatttggaatgggtatatttaacctatgcctgtacccccattgtatctaggaggtagctaacttgcttttgattttacaggcttataggcagaagggacttgccttgtctcagatgagactttggacttggacgttttagttaatgctggaataagtttagactttgttgggaaggcatgattgtattttgaaatgtgaggacagaagatttgggagaggccaggggtggaatgatatgatttggctgtgtccccacctaaatctcatttgaattgtagttcccataatttccttgtgtcatggtagggacctggtgggagataattgaatcattgggggtggttacctccatgctgttctcatgatagtgacttagatctcatgagatctgatggttttataaggggcttctcccttttttgctcagcacttctccttgctactgccatgtgaagaaggatgtgtttgcttccccttccaccatgattgtaagtttcctgaggcctcctcagccatgctgaactgtgagtcagttaaacctctttcctttataaattacccagtctcaggtatgtctttattagcagcgtgagaatgaactaatacaaatagcctgatctgtttcccccaatgtgatggtcaaatactattattttctatgtattgcacagacataaaaagttgagaatcagtgcactagaaggtaacacttggttaattcagctttctaaatataatgcaaaatatttgaaatttcagacttataatattttttcttctggtttgaattactgaggtttgacaaagaaacatgaaaatgtggaatgtaataactttatctattttaaaaagtgcatttaatctatgcaaaatggttgttaacttatggcaagatagtttttattacatttatatgtttagataaatctcataccatcaagatctggccaatatcactatatgcttgttttctttattattgattttttaattttaaacaattttctcagtaatttttcacacctcagaatcacattactattaatcatattaatattcacttctgctgaagtatgtttattcatggttattatgcctgaatacctcactagaaatcaattttgtagaggccacaaatcaagacattttattccgtcaggattatggctctgtggaaactaccagggacacaggatctttaatccacgctcaagagaatcagtccaacatccatctagataatccattgagtatgtttgcctcacagttacttgattttcaaccactgttcacttcagccacctactttcatgcactcactatggactccacagtaattttgaactgctccatctctgaaataataataattaaaaaaacctctagtatctcattctctgaaccacaacttcctgtagttccagaacactttcatttattcaaaaatatttattgggtactttctaagtaaaagctgtttttctagaccctggaggcacagtgaataatagttacaactttcatacatgctatttaaaacgtacaggatgtaatcaaatcaggctggttacagaatataactacattctgatgagaacacattctgaataactgccaaatctgttccttccttttttgtctaaaagccatttccttagataagtctgtcattcattcttgcctagttgcagctttaataaccaacctggcttcctgccctgagttatctcattccttcttctttcatgttaattctaaagtgatctatttcaaacacaaatttgattcagccacgtttttgcttaacatccttaaaattactgttcatactttccagaatacagttcaactttcttaatttagcatataaaatattccatattttgactaatatctatttctgtgctctcatctcctgacatactccacatacaccctctcttaaatcaaacccatagcttctagactgcatcttgattcctgatgtcattgtgcttttatgtgtgaccttttaacttctcacagtgcctttcattcctcatttatatatcttgtgtctgttttttaaaatctataataagcatcaacatttctaaaaagtcatcctgattgcttcttccagtctgatttatatgcccattatctgcattcttacagcacttagaaaatatctttgttatagcacttgctgtatagggtttcttttggtgtgtgtattgtagcactttctctatattatactttttgatttcatgttcatttatctctccaagttgtgacttccatgagggctggaagtttgtttcacttgacattgtattttcagtacctggtacaaagtaggtgcttaaaaaatgttcatgggtatatagagaggaggagatgaagagaataaataaagggagagggagagaaagcaattaagctgaagagtagaaaaatgtagatgaaggtagggaggaaagaaggcaggaagaaaagcaggcaagaagaaggaaggaggagaggaaaaaagaaaggaaggaagggagggagaaaagaacaaataaattcctgttgaagcatagtttctgctggaatcttc

SEQ ID NO: 1066 - DNA, 3977 bp, Homo sapiens
gaagttgcaacattgccttgaaactgggggctcagccaagagtttctggattggcacttttcttgcccacccccctgtcctgccattcctctgatgaacatttccttggcatttgggaggagagctggcgagggctatgatggctcccagcacgctcctggctcagaagaggcatactctgcagatgggagaagaattggaatcaagaatgccctcttgctgcagggacaccctatctcccatggcacaccaaagaatccttctctttctttttgtccctgtggacaattgtttgagaatccttccctctcttgtcgtccctgtggacaattgtttgaatgggaagcagcgcagatgatgggcctcaacatgaccttgccctctcgttggcaggagtatggccctcccaaccgagatgccctcctcttcatctctggcccactccaggctatagagagctggccatgatgcctatactaatggctaatttttaccatagagataaattctagcctcagtttagggatcacgtggaagacatacaatggaatattatttagccttaaagaggaaggaaagtgaaacacgctatgacatgcataaaccttcgtgacattatgttaggtgaaataagtgagtcacaaatggacaaatactgtatgattctacctatgtgaggttcctagagtgttcaaattcatagagacagaaagtggaatggtggctgccaggggctgggacttgggggaatgaggagtcattgtttcatgggtacaaaatcttagttttgcaagataaagagttctggagctgggcggtggtgatggttgcatagcagtgtgaatgtagttcatgctactaagctgtacgcttaaacatggttaagacagtaaattttacattaagtgtattttattctgattttttaaaaaagaaagggaagctcagaggagttatttgcccaaggtcacacagctcctgggaagttgagcttgcatttgaacccaagcagggtgactccagagtttacactcttaagccctccacttttcacgttggtcactgcagtaaaaggtgggagaaagaccctggcaggcaaatgaggccagaggccagcatgacatggcaggctagagatggaactctgcaggcctgatccaggctcttaccttcgacatgaagcatgtctctcagcctccctgggtcaacggtgcaccagcgggatagagattgtagagatactacctcaaggagcaggtgtgaagatgaaaggagaacatacttgttaagctcctggcacagtgctgggctcaatgaagagagggttaaatactcacaaacatggtgcagcctcagctccattgccccgcgccccataacaaaggtccactcagtcagctctgggagcgtcaaagaggaaacatcttgaatgcagcatcctgggatgtgccttgaagtaggtgacatttgagtgaagggtagagtagcgttttaacaagagactgtgagactgggatggtattcctgggagaggttacagcccgagtaacaatctggagggggtggtgttcaatctgttctgagaacctgcaactaggctcatatggcgtgagtgtaggactaaaaataatcaagttttttttggtgggggggtgaaaattacagatattcagctgaaaggggattttttgctcgtgttttcagaagattccaagagatgagcttcaggtgcagctggatccaggtgctcaaactatgtcatttcgatttctcctttcttgtttcatttttcttgttctgctttctttggcactggcttttttctgagatagagcctagccacatcttaggggttccctgctccctgcttcagtctcaattgggaaaaaatattgatttcccagtcattccaaccacagtctcagtgctgacactggttgacccagcttctatgccaagccatccctgagtcaggccctgcactcagggctgtactccaggctgaggcttgggcccacctgtgaatctgaggggtggggtcggccctgcctgggctacatgggccaagagtggaggcagggtatttcctcaaagccaaatcaggatgacgtttccagaaggaaggaaataaatgttaagcagacaaaaacaccagatgtcctctacaggtagcaagagctaaggctgcaagagaaatcagaagccctgctctaattcacaccaccgcagcccccgctcccagcttctcccacctcccagcctccccctccttttctacaagatgtactcattcccacctccttggtttctcttgcacacgctcccaacctccctggatgctgggcataatctggtcctcatcagaggtgctagaaataccttctgtcaacacagcatctgccagctgccgccccccacccagccacagctacatcatttgagttagtgggaactggcggactggcggctggaggtgcgtgtgtctcaggctgactggctcctccctgcctccacctcctgtctgtgagatccttggccatctgggggagcatgcgactttcctgcccaaactgaccttaatcaggtttgcgtgcacgagcccagaagacgctcactggctccgctgatatgccagagccaaatataggacaggcccagccccacccccttaattctgtaatttgttcgaaatcagatgataacgctagcctggggagacataatttgtgataagccagtcctcctgggtttcgtccaagatgacatcaacgtagagtagcgtgcctgtggatcaggctccttccctgtgctcatcatcttccctttttagtccctactcccggtcccaatggccatctgccactgctgcctctctccctttcccccagtccctgacaaactgacacgatgtggaggaaatgtgctatttactcattcattcaccctaccgctaaccactgagctcgtgctaagtgcagacactgcgcgagcagctgaggacagaagatggacaggccctggctgcctatggctgtccagagattgtagcctcccggggcaggggagaccaatgtccctctcaaaagaatatgcagttttcagggacaagactcacagtaggcagagctgggggggtgagggtcagcattacttaggggagtagtagggcctcagagggcggtcgagggctgcccacagtgaacaatggcgggggtgcagagctgggatgtcagctcttggcctccctcacgagctctgtccccttgaccgtggccatgggctcctgtcctgcctggagacagaaggccaggtcagtggtttggtaaggatcctgttctctggggaagatgtgaggcaaccacatgggtgcttcagaccttccttatctgcctcctcccatttcctggaatagttcctgttcattcacacaataaaaatggccagagtacttgctaacgctgggtctgggcccaggcacagggtagcatgggaagccaaagatgtgtggaccaaaaccagagggtttcacaggtaaacagaatggtgtctgtatgcagccaaaggaaggttcagggctgtaagatacactaagaacaagggaactcgtctaggaggtcaagaaggtgaggactgaagtgagttctatctggcaggaaagttagaattaagtaggggagacagtgaaagaaatgtgctttggctgggcgtggtggcttgcgcctgtcatcccagcactttgggaagctgaggcaggcagatcacgaggtcaggacatcaagaccatcctggctaacacggtgaaacccgtctttactaaaaatacaaaaaattagccggcatggtggcaggcacctgtagtcccagctactcgggaggctgaggcaggagaatggtgtgaacccgggaggcagagcttgcagtgaactgagatggcaccactgcactccagcctgggcaacagagtgagactccatctc

SEQ ID NO: 1067 - DNA, 3860 bp, Homo sapiens
catatgaccgtgctcacaagcagaggctcaaggaactgaaacaaagggaatttgctcgaaatgtagcatctaaatccaggaaagatgaaagaaaacaggaaaaggcactccaacgcctgcacaagctggctgagctaagaaaggaaactgtatgtgctcctggaagtggccccatgttcaaatcaacaactgttactgtgagagaaaactgtaatgaaatttcccaacgagttgttgtggattcagttaataaccagcaagatttcaaatatactttgattcatagtgaagagaatactaaagatgctaccactgttgctgaagatccagaaagtgcaaataattatacagcaaaaaataaccaagttggggatcaagcccaggggattcacagacacaaaatcggcttttcttttgcatttccaaagaaagcgtccgtgaagctagagtcctcagctgcagccttctctgaatacagtgatgatgcctcagtgggaaaaggatttagcagaaaaagtagatttgtccccagtgcttgtcatcttcaactatcttcaccaacagatgtgcttttgagttctgaggagaaaactaactcttttcatccaccagaggcaatgtgcagagacaaagaaactgttcaaactcaagagataaaagaagtctctagtgaaaaagatgcattattattaccttcattttgcaagtttcaacttcagttatcttctgatgcagataattgtcaaaattcagtcccattagcagattaaataccactagagagtgttgttattaatgaagacatacctgttagtggtaacagttttgagttgttaggaaataaatccacagttcttgacatgtctaatgattgcatatctgtgcaagctaccacagaggaaaatgttaagcataacgaggcatccacaactgaggttgaaaataaaaatggtcccgagacattggccccttcaaatactgaagaggttaacataactatacataagaaaacaaatttctgcaaaagacaatgtgagccatttgtacctgtccttaacaaacacagatctacagttcttcagtggccatcagaaatgctggtttatacaactacgaaaccatcaatttcctatagctgtaatcctctatgttttgacttcaagtctactaaagtaaataataatctagataaaaataagccagacttaaaagatctttgttctcagcagaagcaggaagacatttgcatgggaccactttcagattacaaggatgtatctacagaaggactcactgattatgaaattggaagtagcaaaaataaatgcagccaagtcactcctcttttggctgatgatattctctccagtagttgtgattctggaaaaaataagaacacgggtcagaggtataaaaacatttcctgtaagatcagagaaacagaaaagtataattttactaaaagtcaaataaaacaggacactctagatgaaaaatacaacaaaataaggttgaaagagacccatgaatactggttccataaaagtagaagaaagaaaaagagaaaaaagttatgtcagcatcatcatatggagaaaaccaaagaatcagaaactcgctgcaaaatggaagcagagaatagttacactgaaaatgctgggaaatatctattggaaccaatttcagaaaagcagtatttagctgcagagcaattattagactcacatcagttacttgataaaaggcccaaatcagaatccatatccttaagtgacaatgaagaaatgtgtaaaacatggaatactgaatacaacacttatgatactatcagttctaaaaaccactgtaaaaagaacacaacaatacttttaaatggacaatcaaatgcaaaaatgatacattctgggaaacataatttaacatattctagaacttactgttgttggaaaaccaaaatgtcaagctgtagtcaggatcacagaagcttagttcttcaaaatgatatgaaacgcatgagtcagaatcaggctgttaaaagaggttacaattctgtcatgaatgaatcagaaagattctatcgaaaacgtagacaacattcacattcttattcttcagatgaaagtttaaatcgacagaatcatttaccagaagaatttttgaggccaccaagtacttcagttgctccctgcaagcctaaaaagaaacggaggcgaaaaagaggcagattccaccccggatttgaaactttagaactcaaagaaaatacagattatcccgtgaaagacaattcttccttaaatcctctggataggttaataagtgaagacaaaaaagagaaaatgaaaccacaagaagttgcaaaaatcgaaaggaactcagaacaaacaaaccaattaagagacaaactgtctttccaccctaacaatctccttccttctgaaaccaatggtgaaactgagcatttagaaatggagaccacttctggtgaattgtcagatgtttccaatgatcccaccacatctgtctgtgtagctagtgccccaacaaaagaagcaattgacaataccctgcttgaacacaaagaaagaagtgagaatataaatcttaatgaaaagcaaattccttttcaggtgcctaatattgaaaggaactttagacagtcacagcctaaatcctatctttgccattatgaactggctgaggcccttccacaaggaaagatgaatgagacaccaactgagtggctgcgttataattcaggaatccttaacacacaaccaccattaccattcaaagaagcacatgtcagtggtcatacttttgtaacagctgagcaaatcctggctccattagctttaccagagcaagcattattgatcccactagaaaaccatgacaaattcaaaaatgtaccatgtgaggtctaccagcacattctgcagccaaacatgctggccaacaaggttaaatttacctttcctccagctgccctcccaccccctagcacacctgtgcagcctttgcctttgcagcagtccttatgttctacctctgtaaccactatccatcacactgttttgcagcagcacgctgcagctgctgcagctgcagctgcagccgcagctgcaggaacctttaaagtgcttcagccacaccaacagtttctttcccaaatcccagctctcaccagaacctcattacctcagctctcagtaggaccagtaggaccgaggctttgtcctgggaaccagccaacttttgttgctcctcctcagatgccaatcattccagcttccgttcttcatcctagccatctggctttcccatctttaccccatgcactctttccttcactgctttccccacaccctactgtcatccctttgcaacctctcttctagtcatcaccataatgggaaaaaaatactcttgtgaaaactattgctatatgcgttaagtgttcatctatgtgggtacatggctatttaactggtggaaataaactggccgatacatggcgtcattggtttgaaatcatttactgtaagtgcaatgatgcaaataaatccctaagtttctgatatataatattattaaagcactgaatagtttgaaaatcaatacaatatatgctatatattaaaatgatgtcttaagagtatgtataatgtacataaaatatatttatagtactctaatttatgttgtaaagtatgctcccttggtttttcttaatctttgtgtatttgcacctatttaatgtttagacaaagctgatggcactatgttttgtatcatgttccttgaaactgtaaattcagtgaaaaatatctcttgcaataaatttttgttaactattt

SEQ ID NO: 1068 - DNA, 3398 bp, Homo sapiens
ctttctgcctgcttcctgaggagtggggtctgagttcctctggggcgtaaggcacattcagacatctgtagaacaagtgtgggactcagtggcacccaggctcaatcctgctgctgagcagaggtgctggagtgagtcctgctctgcagcaggaaaatagggaaaggggtgcagagagggctgtgttctgagttccccagggacctgttcaccccacggattctgccaccaggattgagctaggactgacccggcccatggtgttactctattttagaaaatgtgtgtgttggaggggtgggggcaggagatacagcttgtggaaaggagtgccactcaacatcttcaagggcagggattctgttttggacttttctgagattttctggtaatgccaatacaatgcccgctgccagagattttagaactagtcctgagaagcaagaactcccctcacccccaccctttggcccagactccttccaagcctttcacacctcccctgtgtcacagcaggagagtttgttccaaaaggggagtgttgatggttctctttttgctgagatcagcggtagagggaatagacactacagtaggagagtcatcgaacagatcattactgaacacttcctccttgctaatcactgttccgttccgaggttgcctcagtgaacaacacaaaaccctgccctaaaagacttgttgaacggcatcgtaggagatctgcccaaggagaatccatatgaggatgtggacttaaagagccgaagagcaggacgaaaatcccagcaactgtctgagaactccttggactctttgcacaggatgtggagtcctcaggacaggaagtacaacagcccgcccacacagctttccctgaaacccaacagccagtccctgcgcagtgggaactggtcagaaaggaagagccaccggctgccacgattacccaagaggcacagccatgacgacatgctgctgctggctcagctgagtctgccgtcctcaccctccagcctcaatgaagacagcctcagcaccaccagcgagctgctgtccagccgccgggcccgccgcattcccaagcttgtccaaagaattaactccatctacaatgccaagagaggaaagaagagattaaaaaagttgtctatgtccagcattgaaacagcatcactgagagatgaaaacagtgagagcgagagcgactctgatgacaggttcaaagcccacacacagcgcctggtccacatccagtcgatgctgaagcgcgcccccagctatcgcacgctggagctggagctgctggagtggcaggagcgggagctttttgagtactttgtggtggtgtccctcaagaagaagccatcgcgaaacacctacctccccgaagtctcctaccagtttcccaagctggaccgacccaccaagcagatgcgagaggcagaggaaaggctcaaagccattccccagttttgcttccctgatgccaaggactggcttcctgtgtcagagtatagcagtgagaccttttctttcatgctgactggggaagatggcagcagacgctttggctactgcaggcgcttactgccaagtgggaaagggccccggttgccagaggtgtactgtgtcatcagccgccttggctgcttcggcttgttttccaaggtcctagatgaggtggagcgccggcgtgggatctccgctgcattggtctatcctttcatgagaagtctcatggagtcgcccttcccagccccagggaagaccatcaaagtgaagacattcctgccaggtgctggcaatgaggtgttagagctgcggcggcccatggactcaaggctggagcacgtggactttgagtgcctttttacctgcctcagtgtgcgccagctcatccgaatctttgcctcactgctgctggagcgccgggtcatttttgtggcagataagctcagtaccctctccagctgctcccacgcggtggtggccttgctctaccccttctcctggcagcacaccttcattcctgtcctcccggcctccatgattgacatcgtctgctgtcccacccccttcctggttggcctgctctccagctccctccccaaactgaaagagctgcctgtggaggaggcgctgatggtgaatctgggatctgaccgattcatccgacagatggacgacgaagacacgttgttacctaggaagttacaggcagctctggagcaggctctggagaggaagaatgagctgatctcccaggactctgacagcgactccgacgatgaatgtaataccctcaatgggctggtgtcggaggtgtttatccggttctttgtggagaccgttgggcactactccctctttctgacacagagtgagaagggagagagggcctttcagcgagaggccttccgcaaatctgtggcctccaaaagcatccgccgctttcttgaggtttttatggagtctcagatgtttgctggcttcatccaagacagggagctaagaaagtgtcgggcaaagggcctttttgagcagcgagtggagcagtacttagaagaactcccagacactgagcagagtggaatgaataagtttctccgaggtttgggcaacaaaatgaagtttctccacaagaagaattaagcctccttctcagtagcagagtccagtgccttgcagagcctgaagcctggggagaaggcccagcctgggaccctctgggctgctgtggctcctctgcccccacagatcctatcctccaagccagcccacctctgccttcatcatatcccaggatactgtttgtaaataatctgctgtaagctttcttaactgttttttgtaacaagcaaagagaatatggcaaatatttgtatattcccaaggggccgggtgctttcctgtcctgccagagcatggatgaagtttcgctgggtgctcgtgactggccagttttgtgcagctgactgtctcagccaaaccactgatcttccctggaggccttcggcctgcctgcctgcctgaggtccccgctgccagtcccgggccctggagagcagatgctgtcttgttatgtacaggaggaccttttaaaaaaatcaagtttctattttttgctggtagtccgcatacccataccctctgtttttgaaaggcaaaggccaatcagtccccatttgtagcatggcaccagggtcttaggcctagtcctctcattcctcccaccctccgagatggtcagtgtgtcatgggaagcccacccccagctctgccagtgctctctgggcctggctcccagtcagtggtggccacgatgcggtacagggcatccctccttcccatctacgggtgttctcaataaacaatgtacagttgtttgggcccag

SEQ ID NO: 1069 - DNA, 4934 bp, Homo sapiens
ttagtgaggctcagagatgcctttatcatgacgtgatgctggagaacctgacacttatatcttctctaggttgttggtatggagcaaaagacgagacaccttctaagcagaccctttctatacaacaggagtccccactcaggacacattggacaggtgtatgtaccaagaaggtccacctctggggaatgtgtggccctctcctgggagatatcttacaccagggaacacaacacaatcagaaattgaatgggtttggggcatatgaaaaaaaattggatgacgatgcaaaccatcatcaagaccagaagcagcacattggagagaaatcgtacagaagcaatgccaagggaacatcttttgtaaagaactgtaaattccatatgtcacatgagccatttatctttcatgaggttgggaaagactttttgtccagcttgagattactccaacaagaggacattcacacttcagggaagtcaaactttgaaactaagcatgggataccccttcagggtggaaaaactcattacatctgtggagagtccacaataccgtttagcaacaaacactcacttgtccttcaccagagacttctccctagagaaggaccttatgtatgcagtgattctgggaaattcactagcaaaagtaatagttttaataatcatcagggagttcgcactggaaaaagaccttatcagtgtggacaatgtgatgaatcattttggtataaggcccacctcactgaacaccagagagttcacactggagaaagaccttatgagtgtggagaatgtgataaatcttttagtcataagcacagtcttgttgaccatcagcgagttcacactggagaaagaccttatgaatgtgacgaatgtgggaaatcttttagccataagcgcagccttgttcaccaccagcgagttcacactggagaaagaccttatcagtgtggagaatgtgggaaatcgtttaatcacaagtgcaacctcattcagcatcagcgagttcacactggagaaagaccttttgagtgtacggcatgtgggaagttatttaggagcaactcccacctaaaggaacaccagagagttcacactggagaaagaccctatgagtgtaaagaatgtaggaaatcatttaggtacaagtcacacctcactgaacaccagagagttcacactggagaaaggccatatgagtgtagagaatgtgggaaatgttttcatcaaaagggcagtctcattcaacatcagcagatccactctggagaaaggccacatgagtgtggagaatgtgggaaatgttttcatcaaaagggcagtctcattcgacatcagcagattcactctggagaaaggccacatgagtgtggagaatgtggaaagtgttttcgtcaaaagggaaacctcattaaacatcaacgagttcacacgggagaaagacatcatgaatgttgaaaatttggcagatctgttggtaaaaagagcaccctcattcaacattcgtgagatcacactggaaagcacttatgagtatggagaatgtgcaaaatcatctagccaaaaggttggcctcattcaacaatagcaagattacactggggaaaggctttctgagtgtagagaatgtatgaaatcctgtacatagaagttttgcctcaccaaataccagaagggtcacactggagaaagaccctatagttatggggaatttgggaaattacctaacaagaagtcccacctcactgaacactactgagttcacagttgagaaaggccatatgactgtaaggaatttgtaaaattatttagccagaagagctgcattactattcatcagataatttacaatggagaaaggccacataataatttctcacataataaatgtgagaaatcatttccgtacagctctgcgctccatgttcgtaagagttcacactggacaaagccttatgagagcagcgagtagaaaatcctttgtgggaaaactctggtttcattaaacacaggagagttcatgctagagaaaggcctcaacagtgtagcaaatatggaaagacattcactagaagctctgccctgcaagttcacactagagaaagcccttctcagtgaagtaaatttggaaaattgattagtcaaacctctatgctccttcaaaatcagagttcacactggatcaaggctttatggtgtgacaaatatggcacattctttatctaaatgtctaacatattatgcacagacaagctcctgctgtggaagtgccttttgagtgcagagcatttgcgagggcttcactcttctttcactggataccagaatgttgacaggagaaaaataacatagatgtgtgggaatattacttcttgtccagtgtaactgtgggagagagcccttatgaggacaccatcaacctatattgaatgtcatatgtccagtagctgcataaattccaggtatatgggagctgtattgcatttcttatcctgcgtatgtccttgccagatttatttcattcttaggtctctggcaaaagccatttcatctctaccacttggcaggtacctacagtgcatcactcatgcactccatcatattccagaaaaaaagttcaagttgtctcccattcagcagtggtatttttgagtagcctctgcactcgttcctttctcatttctctatgaagagttaggccatggacctgactcagttctggcctagagcagaagtgtccaatcttttggctttcctggtccacattggaagaagaattgtcttgtgccgcatatgaaatacattaacactaatgatagctgatgaacttttttaaaaatcacacaaaaaccctcataatgttttaagaaagtttacaaatttgtgttgggctgcattcaaagctgtcctgagatacatgcggcccacaagctgcgggttggaccagcttggcctagagaatttttctgattacttgacaagatgggctgtctttcctaggaatctcatgattgtcatgattcttaaaatggaattttccagcctctaactcaccaacccaagtacaagctgcctctcattgttctggtttctgctatgatgaagtccttatttaagcttccttcaatcttgggaattgtattgactgtattgtgtgaattgtatactcactgcattgtgtggcttagatacaacatggttctggtaccatgaaggattctggtaccatgaaagtttgttggggttactaaactgtgtgactcttagggaacagtatgaaggcagaatatagctctgcatttgtggcctagtttggatggctgcctaaggcctccaaataaagacttcagggctttgtgatctttatttttagatgaaatagtgcaataatatgtgttttcataaatcaacctgagtaggggacagttttagtgacacactttggtgcttctgagaacagcacaaaattattctcttgtttataatggatattgcattctgctcagtactggtgagggaaatctgttctcaagtcctacagtgcattcatgtgtcctgaagtccagaattctgtaggatagtgtcctacgttataagcctggagaaagaaatcataattctttaatttttatttttttagggaaatgatgtcactctgaaactcaggctggaatacactggcatggtcatacctcactgcggcctcaaactcctgggctcaagtgatcctcctgcctcagcctcccgagtacctgagattagcccaggtaatttaagaattttttatagagatagggttttgctattttaccctgactgatgttcaactcctggcctcaagtaatcctctagcatacgcccttgaaagcactaggattacaggtgtgagccaccatgcccagcccaaaaataatttttgtagaattagcatttctaggtagtgaagcagactgcaacagaatagttgggatatactttttttaaaaaggcatccacaatgattcagtcactatgtctgtgatggacaagcaggtacagaaattttcaggacctccataattatgaatctagtgtagcttaggtcattgtcagactaaatctaaaggttttgtggatttctgtagcctatctgggctgcataccaaaaagccatccctgaattagtaggaggaagaggatagggagaaaggaaatctcttagtccagtgatgtggcctttgcaaccagccagcattccaatttaatcaggtggaaatgatcttcctggctcataagtatttggtatcacacaggctaattgccccccttagggcgtgatgagagttaggagagtcaatgtaaaatcacataacctatttgtcaaaaataatgttaaatccagatagttctttcaaattaaatttttaaagctgtaataagactgggcatggtgactcatgcctgttatcccaacactttgggagtccagggtgggagtattgcttgaggtaagaagtttgagactagcctgggtcccatagtaagaccctgtctcttaaaaaataaatactatctttctctctggcctctccatcctccagacaatcactgaattacaatatttgcttaacagtagattaatgtcaattttctggaattttatatgactgatataacatgtttcctcttttcatacctgagtactctcctgagccctatttatttagatgttcttcttttttctttattattatttttatttcacatagcagggatgcatattttgacattcatcaatcatgatatatgagtagttcattctttttatcttagaatatgacatgctatggaaatcactgtatacgaattcatctgcttatggatatgttattgcttcttatttttgtctgttaggaataaaactgcttgttaagcacatttgaatgc

SEQ ID NO: 1070 - DNA, 3363 bp, Homo sapiens
ctactaagcctccactataagatctgctaaaaggagatctaaatcttaaaacaaatactggaaacacatcaaaacagaacctctttaaagtataaatcacacaggacctatacaaaaatacatgttaaaaagcaaaaacaaaaacaaggaacacagacaacaaataacattacgaatgtaatggtacctcacatctcaacactaacattaaatgtaaatggcctaaatgttccgcttaaaacatatagaactggagaattgataagaactcaccaaccacctgctaccttcaggagactcacacataaggacccacataaacctaaagtaaaggggtgggaaaaggcatttcatgcaaatggacaccaaaagcaagcaggggtagctactcttatatcagacaaaacaaactttaaagcaacagcagttaaaagagacaaagagggacattatataatggtaaaaggccttgtccagcaggaagatatcacaatcctaaacatatatgcacttaacactggaggtcccaaatttactaattactaatagacctaagcaatgagatagacagcaacacaataatagtgggggacttcagttctccactgacagcactggacaggtcatcaagacaaaaagtcaacaaagaagcaatggatttaacctatatcttagaacaaatggacttaacagatacatacagaacatttcatccaacaactacagaatgcacattctattcaatagcacatggacctttctccaagatagaccatgataggccataaaacaagcttcaataaatttaagaaaattaatattacatcaagcagcctctcagaccacagtggaacaaaactgtaaatcaattccaaaaggaaccttcaaaaccatgcaagtatgtggaaattaaataaactgctcctgaatgagcattgcatcaaaaatgaaatcaagacggaaatttaaaaattctttgaactgaaagacaataatgatacaacctatcaaaacctctgagatacagcaaaggtggtgctaagaggaagttcatagccttaaacacctacatcaaaaagactgacagagcacaaactgacattctaaggtcacatctcaaggaactagagaaagaagaacaaaccaaacccaaacccagcagaagaaaggaaataaccaagaacagagcagaactaaatgaaattgaaacaaaaaaaatacaaaagataaatgaaacaataagatggttctttgaaaagataaataaaattgacagaccattagcaagattaaccaagaaaagaagagagaatattcaaataatctcattaagaaatgaaacaggagatattacagctgacaccaatgaaatacaaaagatcattcaaggctactatgaacacctttatacacacaaactagaaaacctagaagagatagataaattcctggaaagataaaaccctcctagcttaaatcaggaagaattagataccctaaatagaccaataataagcagtgaggttgaaatggtaatttaaaaattaccaacaaaaaaaagtccaggaccagacagattcacagcagaattcttccagacgttcaaagaagaattggtaccaatctttctgacactattccacaagatagagaaagaaggaaccctccctaattcattctatggatgaaccaggaaaggacataaccaaaaaagaaaactacagactgatatccttgatgaacatagatgccaaaatccttaacaaaaaactagctaactaaatccaacaacatatgaaaaagataatccaccatgatccagtgggtttcataccagggatgcagggatggcttatcatatgcaagtcaataaatgtgatacaccacataaacagaattaaaaacaaaaatcaaacaatcatctcaatagatgcagaaaaagcatttgaagaaatccagcatcgctttatgattaaaactgtcagcaaaatcagcatacaaggaacatacctcaatgtaataaaagctatctatgacaaacccacagccaacatgatattgaatggggaaaagttgaaagcattccctctgagaattggaacaagacaaggatgcccactctcaccactcctcttcaacatagcactggaagtcctaaccagagcaatcagacaagagaaagaaataaagggcatccaaatcagtaaagaggaagtcaaactgtcactgtttaccaatgagatgattgtttacctcgaaaaccctaaagactcttccaaaaagctcctagaactgataaaagaattcagcaaaccttctggatacaagtttaatgtacaaaatcagtagctctcctatacaccaacagcaactaagtggagaatcaaattaagaactcaaccccttttataatagcatgcaaaaaaaaaaaaaaaaaaaaacttaggaatatacataaccaagaaggcaaaaggcctctacaaggaaactacaaaacactgctgaaagaaatcacagatgaaacaaacaaatggaaacacatcccatgctcatggatgggtagaatcaatatttgtgaaaatgaccatgctgccaaaagcaatctacagattcaatgcaatccccatcaaaataccaccatcattcttcacagaattagaaaatacaattctaaaattcatatggaaccaaaaaagagcccgcatagccaaagcaagactaagcaaaaagaacaagtctggaggcatcacaccaccaaaacagcatgagagtcaccaaaacagcatgatactggtataaaaatcggcacatagaccaatggaacagaatagagaacccagaaataaacccaaatacagccaactgatctttgacaaaacaaaaacataaagtggggaaaggacacccttatcaacaaatggtgctgggataattgcctggccacatgtaggagaatgaaactggatcctcatctctcaccttggaaaaaccaactcttaaatctaagacctgaaaccataaaaattctagaagataacactggaaaaacccttctagacattggcttaggcaaggatttcatcaccaaaaacccaaaaacaaatgcaatgaaaacaaagataaatagttgggacttaattaaactaaagagcttttgcatggcaaaaggaacggttagcagaataaacagacaacctacagagagggagaaagtctttacaatctgtacatctgacaaaggactaatatccagaatctacaacgaactcaaacaaatcagtaagaaaaaaaacaaacaatcccatcaaaaagtgagctaaggacatgaatagataattctcaaaagaagatatacaattggcc

SEQ ID NO: 1071 - DNA, 3469 bp, Homo sapiens
aatgctgctacgaatatggatgtacaaatatctcttcaaggtccttctttctttttttggatatatgtgcagtagtgggattcttggatcatatggtttatggtggttttttgacattaagaatataagattcttttctgtatttttcattcattttagtttagtttttttaatcttggacagactaagcaatagaatattcagaattgttggttttgttttaaacaatagtttgacctgtgacatcagcatattaaactatcacaagacacacacaaggtcgaagcccaggaatgacttccctgtaagtcaatttagagcatcttattcctatgatcatcttacgctactgggagataaacatgttgctgtcaagggtcagataattctcttctgtgataagttttactagtttagaagcatacatccaagtaatgcctaatttagcttttttattgtgttgatacatctttggctacttaatttttatttttatcaaaataatccacatacgtgattttttaagtcaaggtttttatcttaacgtctaaaagattttaatgatgtttaatccacatacttgattttttaagtcaaggtttttatctttttaacatctaatagattttaatgatgcacaacagtgttctatacgtctcaccttaattcccttttcccaaaggcaacttttaatttttttttttttctttcttttttgagatggagtcttggtgtcacccaggctggagtgcagtggcatgatctcggctcactgcaacctccacctcctgggatcaagcagttctcccatctcagcctcctgagtagctgggactgcaggcacacaccaccacatctggctaattcttgtatttttagtagagacggggtttcaccatattggtcaggctggtctcaaactcctgacctcaggtgatccaccctcctcagcctcccaagtgctaggattacaggcgtgagccaccactcccagcttattttaattttttttttaagacagagtctcactctgtcatccaggctggagtgcagtggcacaatcaaggctcactgtagccttgacctcctgggctcaggtgatccatctcagcctcctgagtagctgggactacaggcacacgcctccacacccagctaattttttttttttttttctttttcggagatggggtctcactatgttgcccaggctggtcttgaactcctgggctcaagcagtcatcctgcctcagcctcccaaagtgctaggattgcagatgtgagctaccatgcctaggctgctttaattcattattttttattttcatgtttttaaataatattattatcttgatttttcttgacttttcagtcttacatattgtctgttgacttccaagaggaaagctgtgttaactctgctaagaattgtacaaaatacgcttaaagtagaaaggaggtcacatcctttatataggttagctcatttaccattctctgaaggtagtagactggtactcccttgttttatagacaaagaaactaaaattcagacaagttaaattacctccacatgctcacacagctctgtcatgttctagtgcatcaaactctagtctgagtccaaagcccgttgtctttctcaccaaaccaaattacctccaggacagagaaatcaggaaaatttctagaaaagggaaagaagtaataaataacagttgagccagaccttaaggatggactgaattttctgatgtatctgtttgattatatgatacatataaggaagttgtgggagaaaagtctgggaagatagtttaggcttatggcatggaaagctaaggtaagaagcttaaaattacatagaaaggcagcatgtcatcaaaggtttttggacagagtattagaattatctctgaggaagattaagttagaagtagtgggtagataaaatagattggaggtagaagcctaaagtcaaaatggtccaggaaaagtattagttgaagagattctttaaagtggctctatcttctctgtaatttgctcccttgccactttgatgactccagattctactcctattcccattgtcttttaactcccacttcagggcctttattcttgctgttaccatttcctagaacaatccttccagatacctacctgaaatgctgcatcatctgtccatctttgttcagataccaccttttctttgaggccttctcttaaacactgtcgtacatacaggtttgcacatacattttagttgtaggataaattgctaaaaattaagttatttgagaaaattatctgcatgcttaaaacgtgaatgactactgccaaatgacccttctagtacttgctaacgtttgccagtgtgagcatctaccatcactttttttttttttttgagacagagtttcactctcgttggccagactggagtgcaatggcatgatcttggctcacggcaacctctgcctcctgagttcaagcgattctcctgcctcagcctccccagtagctggaattacaggcatgcaccacgatgcccggctaattttgtgtatttttagtagagacggggtttctccatgttggtcaggctgatctcgaactcccgacctcaggttgcagtgagcagagatcgcgccactgaattccagcctgggcgatagagcgagtctgtctcagaatgaaatgacgtgacatgacatgacatgatgaaatgaataatgaaatgccgggtgtggtggcacactccagcctgggcaatagagcaagtctctgtctcgaaatgaaatggaatgaaatgaagagaataaatgaaataaatgaaatgaaataataaaatgaataatgaattgccaggtgaaatgaaatgaaatgatgaaatgaataatgaaatgccgggtgcagtggtgcactccaacctgggcaatagagcaggtctccgtctcgaaatgaaatgagatgacatgagatgaaatgggatgaaatgaaatactgaacaatgaaatgccgggtgaaatgaaatgaaatgaagaaataaatgaaatattgaaatgaataataaaattctgggtgcggtgatgcactccagcttgggtgatagagtgagactccgtcttgaaatgaaatgatgaaataatgaaacaaaattaaatatgaaatgaaatacgaaatactgggtgcggtggctcacgcctgtaatcctagcactttgggaggctgaggagggtggatcacctgaggtcgggagttcaagaccagcctggccaacatgatgaaaccccatctctactaaaatacaaaattagccaggtgtggtggcacatgcctgaaatcccagctactcggggggctgaggcaggagaattgcttgagcctgggaggtggaggttgcggtgaggcaggatcacgccactgcactctagcctgggcaataagagtgaaactctgtctc

SEQ ID NO: 1072 - DNA, 5157 bp, Homo sapiens
acatttccctccttcgtcgctgttgctgccgccatacgcgctctccctgtttaggtaagctttggccttcgctacaatccgtttccatctgcgcttctccgcacccatcccgtcacatgggttcctgatacccttttcacaggcgatggtctggtcgctggggcctagttggttcgctatttccttagcttgcatccctttcgagagcaaagagctcctgggggaaggaagggaagctaaggggggacccaatccaagatggtgtcctcggcgccattgtgttcgttttgctcccttcttccaatgggttcttctcatattggaggcctcagcatcaatgagaggcggtgctcggcgtcccttggtctcggtatttgcggagggcggggctcttctcaccttccttgttctttcttgagctctttttcggccctcggtgggactgggaggaggagctggtttctgggcccagttggatttttctcaccttgacttggccaacttaatttggagtgccttccaagtgtttacgatacgattggtgtcattgtatgtttctccaaaaggagtctcaccttcgtagcgtaacagtgatgtgagaccacttggtaaagatcctgttaaagcctgggcggggattgcctttctctgtcacctattagctttcttattgtagggtggagacatgaattttgtttttttgtggccgagccatttgtcttgcaccgcccctcccccccatgctaattacacaaggcttgcttaaacagcggaagggaggatactgagaagtgggaggctgagagctatgggaggtggacggcggccatatgatgttttcttttcgaaaggtgagcgctttgcgcagtgatgaccctcatctatcacccttgactgatggctgctgagttaggcatccataacggtgggattataatagggaaagcggagtcttcctttgaggacttttcaggactctacttgtcatctccattttccactttactaagttattagtcatattttaccttttattatctattctatttcctcactgttactttcagatcaagaatttataagttggtcttccccttccaacttttctggtttccgctactgtgattgctaatcttgttgggaacctctgtcctaaccactttccctggtactgctttttctgttctgttatatttgcttttcgtttttatgttttgtatctgtttttctttccaggtaaaagtttcctggtttagggaaagtgggaactggggatggaaaagaggtggtgaaggctgtgctcgtgattaagtcttgcttttttttttcccccctccagctcttctgttagaaatagtatctttgttttcctttgctgttcctcaatcccctactcttcaccccttgttttcacctattttgcgagaacccatccagatcccccttcccttcttcccctgccggcccagttatggcagagaacgatgtggacaatgagctcttggactatgaagatgatgaggtggagacagcagctgggggagatggggctgaggcccctgccaagaaggatgtcaagggctcctatgtctccatccacagctctggctttcgtgacttcctgctcaagccagagttgctccgggccattgtcgactgtggctttgagcatccgtcagaagtccagcatgagtgcatccctcaggccattctgggaatggatgtcctgtgccaggccaagtcgggcatgggaaagacagcagtgtttgtcttggccacactgcaacagctggagccagttactgggcaggtgtctgtgctggtgatgtgtcacactcgggagttggcttttcagatcagcaaggaatatgagcgcttctctaaatacatgcccaatgtcaaggttgctgttttttttggtggtctgtctatcaagaaggatgaagaggtgctgaagaagaactgcccgcatatcgtcgtggggactccaggccgtatcctagccctggctcgaaataagagcctcaacctcaaacacattaaacactttattttggatgaatgtgataagatgcttgaacagctcgacatgcgtcgggatgtccaggaaatttttcgcatgaccccccacgagaagcaggtcatgatgttcagtgctaccttgagcaaagagatccgtccagtctgccgcaagttcatgcaagatgtaaatacccttctaccttctctccctccactccccgcccgctgcctcctccccttcctcgccctcttcctcagactcccttgtcattcaagtgccaagaaggcggcttgtgcccaactgggagtaatgactccttgaagagacatacagaagcagagacagctagtgttagggcctgcgcgggtgccagggaaactccggaagacttggtcgggttaatgtgagagcgggtagtgttcgactttttcataaatcacatttttgaacctcttctcccttcgggggagggcaggatttttctgccctaccacccacccatccatcgtctcttacatgcaccctacagccacgcaccctcaaggtggcatcgagcatacagctggagccttctgctcaccaaaactcctacttcccggtggcaggagagcaagagagggacagacagatggcagggcatgtccaaaagaagagcatcagcacaaatgaatcctccccttccccacctccaggggtgggggcctttggcacctcaatccccgataccctactccttcccacccacatctccttgcacccatctggaacctcggttgatgtgagccggcaacagagaagcaccgtggcgcggcgagggaatgcagacggcacccagcggtggatggcggcagcggaggccgcggggaaacctgaccaggaagctgaggaccaaaccagcctctttttccgttcccggtttttttcctgaacccaacgcgtgccgtgccccgtttcccccaatatgtgttggggaggggtgtcctgaatggggtggtagattttttttcttaaaaaaatttttttgttttttttaatactcagaggagagggacataggaaaggtaaagtggatgtaatcgggtggttgttagggtttggggctaggtggggccaattgcataagcagtggagtgtgttcttcccctccctgcagtgttccttcccgtgggatgatcactctttagctgtatttggggctagaatgagatttgaaggaggccatggaacttctctttagaaagcctgccttggctgggcctggtggctcacctctaatcccagcactttgggaggccaaggtgggaggattgcttgagcccaggaatttgagactagctggggcagtgtagtgagactttgtctctaccagaaaaaccgggcgtggtggcgcatgcctgtagtcccagctacttgggaagctgaggcaggagggtttgcttgagcccgggacgtggaggtggcagtaagctgtaattgtgccactgtactccagcctgggtgatagagtgagaccctgtatcaaaacaaaacaaaaaacaaaacctgccttctgggattgggcttctggtttttttcccatgacacacacatcctttcctattttgtcctctgggtcttcatattaactatcttcccccaggatagtataaaaagtgttaggaaagttgggctttggagttgtggtaatttctgtctttgttactttcctccccttcagggggttttttaattttaaagatgaatgcagtgaggtacaatggtgtgtgcctgtagtcccagctattcaggagactgaagcaggaggatcacttgagcccaggaatttgaggctatagtgtgctatgattgtgccagtgaatagccactgcactccagcctgggcaacatggtgagatcctgtcccttaaaagcgtatctgctgctctgaatttggtattttaacaccacttactgatacctttcctgtaaacctgtagatggtttaattcttagtcaagagaccagtctcatctaaaactatcctgttgtggtctgacggcaagtaactcatcttgagtaatttttgtttctccttaagtggcattttgactgtccattgcagcattctgatcgtaaaagacatccactttgctaatgcacacgagattctcttagttgaagtaggagaatcaaatggagcagttgtcctccccccaccccatgttcttagaagcacctctgatggagttattctgaccttgagtcactgcctcccatcatttcccagatgtttggtccttgctctccctttgagaatcatctcccattttctttcctctcccacctctatttgaggtaatggcatctgtgccattgggtggtttcactgctccttgacttcatttgcagtttctttcccatgatagtttttagttgggcagtcttaaaactcatctgataggaaggaaattagatgtaatgtgagagagaccacagtaaaatgtgggtatttttgggagtggggtggggttttcaatcttctctttcctccccatccccccatggggtgtattggagatcaacttcctccacccccccaggtttaacccccccactctgccctcctcccgttccccacccccttcctcccccccagccaatggagatcttcgtggatgatgagacgaagttgacgctgcatgggttgcagcagtactacgtgaaactgaaggacaacgagaagaaccggaagctctttgaccttctggatgtccttgagttcaaccaggtcagttagacgtccagtagggggatgagcattggagcactccagctgtagcagaaacctggatattaagtacacttttattgaggaaatcacatgtgtgatgtgggagagaataatgagggtataaatatcttaggggctgagcatgagtaaggtgggagctgcttttctattctatggctggcacgggtatgtcctcaataacctcaaggaaaataaacttcaaaaattaagatccttggccaggcacggtggcttatgtgtgtaatcccagcacttggggaggctgagggaggtggatcacttgagtccaggagtttgagaccagtctgggcaacatggcgaaacttcatcactaccaaagaag

SEQ ID NO: 1073 - DNA, 3439 bp, Homo sapiens
cttgctcctgtgagcttgtctgtccaggacctcctgcagcccctccacccggccaggcccgcacctcctcctgcagcccctcccctccactgggcccgcacctcctcctgcagccccggccgcctcctccctcatggctgctgcccgcggaccccccaactgtggtgctccttgccctgaagtctgcatggcccacgggaaaatcccagcagcactgggaccctccgagggcggctctctatgccatctccatacctgccttcttccctctctactctcttctagaaccttcctgaacttcctggcccctcccagtccacctccagccccgcctcctccttggagccccccagttaccctgaaccagtgccccctacaccgccccccgtcccctgcctggagctgcgtcctgcgggtgttggttctgtttccatccgctccccctccttccctccagccggggccatgtccccaggcttggggattctctgacagtgaccaccggaaagtcccagcacccaagcttggctgagtccttgggagccctacccggctgcagccgtgtctgctttaataaaatgcaaaacacttcatttctttttcaatttaaaaggaaaatggttcatctcaagagttcatctcaggagacaaggacagtgccgagtgtcgcctcctgcctggagtgaccctgggcggggacccctgggtctgccgtcagccagcagagagagggagctgcaccagcctctcacatgagcaggagcacctatggagcacctgctgcatgcagtgggggcagggaaagaggtgaggccgcacctgctggagggggactgaagggcgagcagggtctgggggtggctctgagggtggagagcacacggcgcccggtctctccgcaatgccatccttcgtggccctggatgtgctccctgcctcggatgtcacctcgtgcctctctgcgtgccgggttggtccctgcagcctcatgaggagtggtcgcttggcctcggtttggcctgcactgtcctccggcctcacgtggccttgtcttcacacccagcgtggtcatgtcttgggagcccgtcacccacgcacgcctcagggtggagcccccgcctggactcaggaccccgggcaccacacccaggcggtggccccagaccctcccctgtccaaacaggagatctctcataatgcagccaggtggtgtccgggggactgaggcccaccagcgcctccgccttttcccggcctgatggcgaattctggtgctgcttcctcagccttggctcagatgccatcctgccgctgcaggatttgccttctgctctgcatcctggctctgtcatcagcagccctggtctcaaggggaggccccctgggcgcaccagctcccgcgtgtctcagaggctatgcagacaagagtccctggactgggctgtgtttgctggggctccttccctccagcgacgagtccccagatcatctcccgggtgtgcctcagttctcaaaggtcctggcagcccctctgcgccaggcagtggccgcacgccagcagcctcctcccacagcccaggagctggaggaaacagctcagccaagccgcgccaccagctagagccgggactccctccttgacattcagagctgctaagttttcctgcgcacggttggtttgacatttgcattggaatggatttatgttaacttcctccctgctgctggccggagaccaaatcctgctggttgctcaggcagtgatccccggatgggccacctgcctcattgcctgccctgccagagggaggctctgggacctgagaccacccaggcgcagacttggtgctgtgtagctcatggagcggccccgcctctgctcccaccgagccctccagcccccttgtcttggaaggacgcagctccccttcctggccctcccccaaccccaagtcctcgcccaagcgctgcttcctctatgaagcttccctgagcggccctcttggagggtcactgttccctggcaaattctgaccacacctggctcctccatcatttcatggacgcagccctggtcagctccacttgggtcggggctgacgtggctcattcccttgcaccccagcacagcgcaggacaggctattcagctggtgtccagtccgcctgtgctgtatgctccctgcagccgggagcagccaccacgcatccatccacccttccgtcctccctgagggctggcactgcctcccggatcctgccgcgtacacagcaggtgcagaatgggtgctcgctaactccatgggacgacggggtgtcaaacctgcagccaccagcttctgacgggagatttgctgagagcctgcaagtcccacgggcctactggggggctgtgcacagagagcctagggggccatggcccagccctggcactccccgcccacagcaattattgccccaggagccaggcccagcctgcacctccacaccggccctgctccttcctcctctaggtccaggccccaggagccaggcccagcctgcgcccccacaccggccctgctccttcctcctctgggcccaggccccaggagccaggcccagcctgcgcccccacaccggccctgctccttcctcctctaggtccaggccccaggagccaggcccagcctgcgcccccacaccggccctgctccttcctcctctgggcccaggccccaggagctgggcccaggccccaggagccaggcccagcctgcgcccccacaatggccctgctccttcctcctctaggcccaggcgcccgcctgacacatgtccaccatgttcaccttgcctgtgtcacacatgagaagactgagactcagtgagggcccagcagagcgggtggagctggtcagcccggctgtgccctgacatgtgggggtggggggtgtggaatcctaatgagggaaaaggagtcgggctggcaggacagagggaaggcaaaaagaagaagcaaagaagctttaagtctgcccttcttcactgtccaggacacacagccctcctgaagaaataactcacaatcttcctgtgcccggctatcgccagacccttggctgataggagaatggatgttagctgactgcaaccttggcgttatcagtactgcctgtggccctctccagcacacagcacaggcgccgtcctataacatccccagcaagccctcatttctttgcagtggctcctcccttgctgacctgccccttgcttcggctcctcccttgctgacctgccccttgcttcggctcctcccttgctgacctgccccttgcttcggctcctcccttgctgacctgccccttgcttcggctcctcccttgctgacctgcccgttgcttctgtgctatgcacattttctactttctctaataaatctgcctttctttacctac

SEQ ID NO: 1074 - DNA, 4215 bp, Homo sapiens
gaagcggaggctggggcggggggcagccggcgcggccggggcaggaggcgcagactcatgaaatggccacagatgataagacgtccccaacactggactctgctaatgatttgcctcgatctcctactagtccttctcatctcacacactttaaacctttgactcctgatcaagatgagcccccttttaaatcagcttatagttcttttgtaaatctctttcgttttaacaaagagagagcagaaggaggccagggagaacagcagcctttgagtggaagttggaccagccctcagctcccttcgaggacacagtctgttaggtcacccacaccttataaaaagcagcttaatgaggaactccagcggcgctcttcagcattagacacaagaaggaaagcagaacctacctttggaggtcatgaccctcgtacagctgttcagcttcgaagcctcagcacagtattaaaacgcctcaaggaaatcatggaggggaaaagccaggatagtgacctgaaacaatactggatgccagatagccaatgtaaagagtgctatgactgtagtgagaaatttacaacctttaggcgcagacaccattgccgactatgtgggcagattttctgcagtcgttgctgtaatcaagaaatccctggaaaatttatgggctatacaggagacctccgagcttgcacatattgtagaaaaatagccttaagttatgctcattccacagacagtaattctattggggaagacttgaatgctctttcagattctgcttgctctgtgtctgtgcttgatccaagtgaaccccgaacacctgttgggagtaggaaagccagccgtaacatatttttagaggatgatttggcctggcaaagtttgattcatccagattcctcaaatactcctctttcaacaagacttgtatctgtgcaagaggatgctgggaaatctcctgctcgaaatagatcagccagcattactaacctgtcactggatagatctggttctcctatggtaccttcatatgagacatctgtcagtccccaggctaaccgaacatatgttaggacagagaccactgaggatgaacgcaaaattcttctggacagtgtgcagttaaaagacctgtggaaaaaaaatctgccatcacagcagtggaatggagtttcaggatcaccgctactggttgagaacgcatcccaactgcattgtaggaaaggaattagtcaactggctaatccgaaatgggcatattgccacaagggcacaagctatagcaattggacaagcaatggttgatggacgttggctggattgtgttagtcatcacgaccagcttttcagagatgagtatgcgctgtatagaccactgcagagtacagaattttctgagacgccttctcccgacagtgactcagtgaactccgtggaaggacactctgagccatcctggtttaaagacataaagtttgatgacagtgacacagaacagatagctgaagaaggtgacgataatttggctaagtatttgatttctgacactggaggacaacagctctcaataagtgacgctttcatcaaagaatccttatttaatcgccgagtagaggaaaaatccaaagagctgcctttcacacctttgggctggcatcataacaacctggagctcctgagggaggagaatggggagaaacaagccatggagaggttgctttcagctaatcataaccacatgatggcactactccagcagttgctccatagtgactcactgtcatcatcttggagggacatcatcgtgtcattggtctgccaggttgttcagacagtccgacctgatgtcaagaaccaggatgatgacatggatatccgtcagtttgtccacatcaaaaaaatcccaggtggaaagaagtttgattctgtggttgtcaatggctttgtttgtaccaagaacattgcacataaaaagatgaattcttgtattaaaaaccctaaaattcttctgttgaagtgttccattgagtatctctacagagaagaaactaagtttacttgcattgatcctattgtgcttcaggaaagggaattcttgaagaattatgtccagcgaatagttgatgttcgacccaccttggttcttgttgagaaaacagtgtctcggattgcccaggacatgttattggaacatggcattactttggtcattaatgtaaagtcacaagttttggaacgaatcagtcgaatgacccaaggtgatttagtgatgtcaatggaccagctgcttacgaaaccacacctgggcacttgtcacaaattttatatgcagatatttcagttgcctaatgaacaaaccaagacactgatgttttttgaaggttgtccacagcacctaggctgtacaatcaagctaagaggaggctctgattatgagctggctcgagttaaggagatcctaatatttatgatctgtgttgcttatcattctcaactagaaatatcctttctcatggatgaatttgctatgcctcccacattaatgcaaaacccttcattccattccctgattgagggacgagggcatgagggggctgtccaagagcagtacggtggaggttccatcccctgggatcctgacatccctcctgagtctctgccctgtgatgatagcagtttgctggaatcgaggattgtgtttgagaagggtgagcaggaaaataaaaatcttccgcaggctgttgcctctgtgaagcatcaagaacatagcacaacagcttgcccggcgggtctcccttgtgctttctttgcacctgtaccggaatcattgttgccactccctgtggatgaccaacaagatgctttaggcagcgagctgccagagagtttgcagcaaacagttgtgctgcaggatcccaaaagccagataagagcctttagagaccctctacaggatgacactggattatatgttactggggaagtcacctcctctgaagataaacgaaagacttattctttggcctttaagcaggaattaaaagatgtgatcctctgtatctccccagtaatcacattccgagaaccctttcttttaactgaaaaggggatgagatgctctacccgagattattttgcagagcaggtttactggtctcctctcctcaataaagaattcaaagaaatggagaacaggaggaagaaacagctgctcagggatctctctggacttcagggcatgaatggaagtattcaggccaagtctattcaagtcttaccctcacatgagctagtgagcactagaattgctgagcatctgggcgatagccagagcttgggtagaatgctggccgattatcgagccagaggaggaagaattcagcccaaaaattcagacccttttgctcattcaaaggatgcatcaagtacttcaagtggcaaatcaggaagcaaaaacgagggtgatgaagagagagggcttattctgagtgatgctgtgtggtcaacaaaggtggactgtctgaatcccattaatcaccagagactttgtgtgctcttcagcagctcttctgcccagtccagcaatgctcctagtgcctgtgtcagtccttggattgtaacaatggaattttatggaaagaatgatcttacattaggaatatttttagagagatactgtttcaggccttcttatcagtgtccaagcatgttctgtgatacccccatggtacatcatattcggcgctttgttcatggccaaggctgtgtgcagataatcctgaaggagttggattctccagtacctggatatcagcatacaattcttacatattcctggtgtagaatctgcaaacaggtaacaccagttgttgctctttccaatgagtcctggtctatgtcatttgcaaaataccttgaacttaggttttatgggcaccagtatactcgcagagccaacgctgagccctgtggtcactccatccatcatgattatcaccagtatttctcctataaccagatggtggcgtctttcagttattctcccattcggcttcttgaagtatgtgttccactccccaaaatattcattaagcgtcaggccccattaaaagtgtcccttcttcaggatctgaaggacttctttcaaaaagtttcacaggtatatgttgccattgatgaaagacttgcatctttgaaaactgatacatttagt

SEQ ID NO: 1075 - DNA, 4143 bp, Homo sapiens
aattctttctgcctggtatcattaaaaaggaggtgacaatttggcctaagaaaattcacggaatccattttgaaagaaaattatgagtggaaaacacctgagttgaaaagtggggaagtttctcaatctgcttactccaaggaaattcttaaaggaattataaacacttaacctaataagttaatttttaattgtaaaatagaccatcttcaattttttgaagagccctcgtgtggaggaatgcgatctcatggaaacagtggcctaaagaaagttctcctattgctttttacttccctttgcttgaaaaaagataaacagcatagaaacctccaagaggctaccgagttctctttgaacttttttctctgcagctgcgcctggaactgctccctgctgcactttactgcctctgtttataagagcaacagtccctctcctgaaaattggactgaattccaacaagtcggcaacttgcatgaagacaagatgtactgcagtgccatgctgggtatcttaaagaacaaggcattgtcctctgcagacacccaggctgcagacttcaaggactggaagaagagctttgcgtcttctctcttctctatacagacacaatctgtagcagcaaatgtgttacagatggacagaagctggggaacatggatgaagctggaaaccatcattctcagcaaactaacacaggaacagaaaagcaaacaccgtatgttctcactcatgattgggagttgaacaatgagaacacatggacacagggaggggaatattacacaccggggcctatcagagcatgggaggctacgagagggatagcattaggagaaatacctaatgtagatgacgggttgatgggtgcagcaaaccaccatggctcatgtatacccatgtaacagacctacacattctgcacatgtatcccagaacttaaagtatgatttaaaaatatatatagagagagagagatataaattgctgagagtggattttaagtgttctcaccacacaacaaaataagtatgtgaagtaaacatatattagttagcttgatttagccatttcacactatataaatatttcaaaacaacatgttgcacactatagacaatttttattggtcaactaaaaataaaatttttaaagggagaaaataagagagaatgggcatcagggttgcaaaagaatgaataaatacatgggccatgaaaaactgatcaatataagggtttgagaggaaggtgaacagtttgcaaagttgtaactttgaaagatctcccttattaatttatttgctcgtttaaaagagtcagggtacaatggaatattcaacttaatctagaagaggtagagtggactgaaattaatttccctctaacatgcatttgttgctctaatcaactatctagagctacacaaaatacatacgattttctaaaattatttaaattcttgaaggtaaatgccatttcttctcttatagatgatagaccttcagactttcacatgactctttataaatagtccccatgctcaaaacgacaaacaccactctcttagatttcaacttagcaaggcatcccaaactaaacttcacatccaagggagaaggcaaatgaaggagagtaatgaccagctatttgtttgagacaataggtacattcatcagattacctccaaacatcagccaagggattttagtttggaacaaagatagttggaatattaattattttcaaatggtggaagtgctgccatagagaattagagaaaattttaaactagaagtttgcaaaaaatatattcaaataatagctttgtttttattctaaaatgtgaccttggctaagccacataatctctctgggtctctgtatgtgggagctactgataatacctgtatctctgtttcaggtgatgatcaaaatgcctattttgtgatttgtgaaatgaaatgtgctgtaggcatgtaaggtgatttttacaaataattattttcttgttgtttttgaagttccagagtacaggaaaggaaacaggaaaaacataactgaggaatagttgttaggtcagtgagacattgaaccttctaacatctgaaactgtccactaactggcaagagcatttcaataaaaagcaaacacctcatcatattgaatcatagtgaatatataaaaagacactgtacacatttcttcagatatacatactgtaattgtcattctaaattgttaaaaaattactatatatagtaattctaaaatatataatatataatacataaatatatattatatatataaattatatatatatacacacatatatattagaatggatttcacactgggttttactcccattatgtgatgcataaaaaagtaaacaacaataaaacagttaaattaatgagcttggttggttttcaaaacatgttaggcccaatatgttagagaattaatatagggattttaaaaatgtgttaaactcaacatgttcttactaataacaggggatttctgatatcaaggaccagttaatgtggttaatattttgtattagaaggaaagggaagagatgtgctgggcaaaagaggaaaatatagattttttaaaaataaatagaaatctgagctaatattaataagggtaaaaaaggaaaaagtgataacatcatgtggaacattccagaagttatgtgcagggctcagtatgggggcaacacatcaatagcatatatatacaaggccaacctcttcctctccattcccagaaatctagtagtggggcactgtatgtgtacaggtaacatgttaaatagataggctgtgctggatgctatggttgcagaatgtggttgaagaagaattgcgaagccaacaaagcaagggttggggcagagtttatgagttatatgaagtttgtgtggggactgagaattctggattttagacatcctgtgtcctgcatggcaactcctccacccccaccagtcatgtcaggtggaggccactatagcagacatagtacgcctacattaagggaaggaggtagttctacgtaatgaaaactcactttccaagttgacccttcttaatcctctgctggaaaaccagtgtactgtgatacccaagggcatggttttatcctttggtgccactattcatcatatcctcattgcattggaaaaattaattgattactcttgacttcacttttctgtcaaattaaaattccattaccattcatttgaaaagatctgatgtggtttaagtgagattatatagtgtgtggatcattgctcagcatgtgataagcactcagacattttagctaaatgaaaacaacactaataccagtactactaaaactgagccctaaagtaatcacctgagttttatttaaacaaaaacataattttcttccatctttctgtaaaattgttcaacaagaaaatattaacattcatagatgatttcagagtttataggaacttttgcatacagctcacttatcagagcaactcagttggatcctgttattaatttcctcactttagaaatgaagggactgagatcaagaaaaggaagtgacttgctcaaggatacatatacaacaagtaaccatgctaagaattctcatttgatgtgcgatttcccccaatcagtgactatagatatatatagatacatagatgtgtatatatatagatagatagatacgtagatggggatacagatactacacctgtgtataccatatctatgtatgtttatatgctatttgtatgttccacttcggatatcttctcacattcagatatctagtgtccacatgtttttttccctggattcctctcgaaacataatcatatggcaaataaagtgagttctgcaataaactttaagatttaatataatacattttcagggagggtgtgggcagaaaaattgtgtggctttaagttttcttagcaaataagtgacttccctcctaagatgcagctgcttttcttcattttttgtaactgttttatgtttcacgaaattgctctgtcctgattttaactgtgtcatattccagctctcagagggtagccaaaatttggaaacaaaatgttgttttgctaat

SEQ ID NO: 1076 - DNA, 4656 bp, Homo sapiens
tagttaggctttttttaaaagcaaaatttgaaaacggaaatactcttcataagcacagtagagctgttttaatgaaagacaatgataaaaatatgtcaactgaagataccaagaagaactctgatgaaaaaacagatgaggaaaaaatcacctcttttgcctcagctaatgtgtcttcggatcagtggagtttggaggatagacactctttagactcaaacacaccattatttccagaagatagctctgtgggagaattgtctttcaaatcagagaatcaagaggaattctggcatagtaacccttcacatttgagtttagacctcagtggaattgactcatgtgaaatgagtgatagtggaagtcaagtgccagacagtctgcctagcacaccatccccagtagagtctactaaatcgttttctgtgcactctgacagagaaagcagcatcacaaatgatatgggctttagtgatgacttctctttacttgaaagccaagagagatgtgaggaggagcttcttcaattactgacacatattttgaattatgtaatgtgtaagggactagaaaagtctgatgatgatacttggattgaacgaggacaagtgttttcagcactaagtaaaccaggaatatccagtgaactacttcgaccatcagatgaaataaaactaactttgctacaaaagatgttagaatgggcaatctcagaaaacagagaagcaaaaactaatccagtaactgctgaaaacgccttccgactagtgctgatcatacaggactttcttcagtcagagggactagttaattcaaacatgtggaccgagaagcttttagaggatatgatgctgctctttgactgtctgtcagtctgctattctgaaagtccagtatgggtaaaactctctcaaattcagatccagttgcttctaggattcattggaaggggtaatttgcaggtttgtgcaatggcatcagctaagctaaatacccttcttcagaccaaagtgattgaaaatcaggatgaagcatgttacattttagggaagctggaacatgttctaagtcaatcaatcaaggaacagactgaaatctactcatttctgattccccttgttcgtaccctggtttccaaaatttatgagcttctcttcatgaacttgcacctaccttctttaccttttaccaatggtagctcctcattttttgaagattttcaagaatattgtaattcaaatgaatggcaagtttacattgaaaaatatattgtaccttatatgaagcagtatgaagctcatacattttacgatggtcatgagaacatggcactttattggaaggattgttatgaagctttaatggtaaatatgcataaacgagaccgggaaggaggggaaagcaagctcaaatttcaggagctgtttgtggagccatttaatcgaaaagcacgccaagagaacctgaggtataataatatgcttaaacgacttagcagtcaacagttagccactcttagacgctggaaagcaatacagctctatcttacatgtgaaaggggaccttgggctaaaaggaaacagaatccaattcactggaagctagctaatgtagagaattattcccgcatgagacttaagctggtaccgaattataatttcaaaacccatgaggaagctagtgccttgagagataatctgggtatccaacactcacagccttccagtgatacattgcttttggaagtagtgaaacaagtaaaagttagtgatatggtggaggataaattagaccttcctgaagaggatataacagctagagtaaatgttgatgagaaagaagaacaggatcaaaaagaaaaattggtattgatggaagactgtgaactcattacaataattgatgtaattcctggcagattagaaatcactactcaacacatttacttctatgatggcagcattgaaaaagaagatggagtaggctttgatttcaagtggcctcattctcaaattcgagagattcatctccggcgttacaatttaagaagatcagcccttgagatttttcatgttgaccaatccaactactttctcaatttcaaaaaagaggttagaaacaaaatatatagccgactgttgtcacttcattccccaaatagttattatggaagcagatcaccacaggagttattcaaagcatcaggattgacacagaaatgggtaaacagagagatatcaaattttgactacctcattcaaataaatacaatggcaggacgaacctataatgaccttgcacagtatcctgtgtttccctggattttacaagattatacttcggaagagttggaccttaataaccctgctgtatttcgagatctttccaaaccaattggggtagttaatgaaaaaaacgccaaagctatgagagaaaaatatgaaaattttgaggatcctatgggaactattgataagtttcactatggtactcactattcaaattctgcgggggtcatgcactatctcattcgtgtagaaccgttcaccaccctccacatccaacttcagagtggaaggtttgactgtgcagatcgacagttccattctattcctgctacctggcaagctcttatggataatccatatgatgttaaagaacttattcctgaattcttctatttcccagagtttttggaaaatcaaaatcaatttaacttgggtcgtctacagatttccaaagaattagtaaatgatgtcattctcccgaaatgggctaaatcagctgaagatttcatctataaacataggaaagctttggagtctgaatatgtttcagctcatcttcatgaatggatagatctgatctttggctataaacagaggggaccagctgcagtagaggcactcaacgttttctattattgtagttatgaaggagctgtggatctggatgccttaacagatgagaaagaaagaaaagccttagaagggatgattaataattttgggcaaacaccctgtcaattattaaagataacaataagcatgaattatgttattggaacccatggatggttgccttatgacagaaacatttctaattactttacattcatcaaggatcaaactgtgacaaatccaaaaactcagcgcagtataaatggttcttttgctcccgggctagagatcacttctaagctatttgtagtatcacatgatgcaaagttgctcttcagtgctggatactgggataatagcattcaagtgatgtcacttacaaaaggcaaaattatctcacacatcatccggcatatggatattgtgacttgcttagctacagattactgtggaatacatttgatttctggttccagagatactacatgtatgatatggcaaataacacaacagggaggtgttcctgtgggcttagcatctaaaccttttcagattctttatggacacaccaacgaggtactgagtgtcggcatcagcactgagctagacatggcagtgtcaggatcaagggatggaacggtgattatacataccattcctaatttggctatatcttgggaaggacatattgttgtctactccagcactgaagaaaagaccaccctcaaggataagaatgcattacatctgttttctataaatggcaagtatctagggtctcaaatcctgaaggaacaagtatcagatatatgtataatcggagaacacattgtcacaggcagcatacaaggattcctgtctataagagatctccacagcttgaatctcagcatcaacccattagccatgcgactgcctatccattgtgtttgtgtcaccaaagaatacagccatattcttgtaggtttagaagatggcaaattgattgtagtgggtgttggcaagcctgctgagatgcgttcaggtcagctttctcgaaaattttggggatcgagcaagcggctcagccagatttcagctggagaaactgaatataatactcaagattccaagtgattgttatttccattttctgttatgattactgaaacctgatttattgctttgtcactttaaccacatctctcaactctctgcaatgttgcaaggcttttatccctgaaaatcatttacagataaccacaatttgctgtggtatataaactaattcttggtctatactaagatgtatttgagaaaatacatttgatttgattttgtggcccattcctaaaggtcattgtatccatttttaaaacaaactaaaatgagaacattaggttcaattttcttattattccaaatgataaaatttaagatttttctaataaaagagtacagataatgggacagttgagagagatggctttaaatacattcttaagtaatcattttcctatttactgaccactgtaatgaaaatatatcaatttatttatggaactcctgattggggataatattttaaaggtatctgttgcacacttggattttcaaaactcggtgaaagttacaagtttgcatggtaagaataaaataagaatattgaaactggtacattagctaattctattactacttagcgtgtttctaatgagaagttactgaaatctattactgtccttaataaaaattgagtagaaaaaagtggaactag

SEQ ID NO: 1077 - DNA, 3217 bp, Homo sapiens
agacccaaccccagagtcatccctgatcacccacaaaaccctggggccattccagcggcaattccatgcactccagcttcacatgtgccttcaggatctccttgctcctccactgctcccactgcctccagcctccactgcctcaaatctgggcatatgcacggcttcctcgctggccccagcagctagctgcctttgacctcctacagtctgttctcagccaaaaaccagagagaaccacttaaaatgtcaggccgatcaacacctaaattcaaaccttcaccagctccctatttcactcggagcctaaggctgaagctcttcctctcaggcctcgcctgccaccccctccttgttcagctttagccacatgggcctcctggctgctcctccaacgtaccaggcacacttctgcccaaggactatgccccgtggcctgcaacatcaccccagcaggccaccggcccctctcccctccttccagctctgctcacatagcactcactctgcaagtcctcctggaccatcttcaaacctgcacccccaccgcccacgcttgctttcctttgcgccttagcactcctgatcctctcaacgcccactatgactcactgctgtattttgtttaagtctgccccaactgggctgtacccatgggggcaggaattttcatctgctttgttcactgatactcaaaatcttgggcaggaggatgtgggtgctgccccattggaacagaatctgcagttggcacctgattgttccctcagactggaatgcactccctgctccctgagcctgacagcatgaggtgggcccaggtcaaagccctcctccaagtcttctccagccagcttgcttgctccgttccctccaggccctgcatccaacactctccactgttcctcctggtccatacctgggagtcccatgatgcagcctgcatttaaggtgctgtagtcaggtatggctgggcacctttaaactgtcctacagagcctggcacctgggctcgactcactggtggaagttctcacacatggagtctggcattctttcgccaagaaaatgcattaaaaaccaaggtggcattaaaaaccaccttgtcttggtaagagctcctcgtggcaagaaacgtatgcagctctagctgttccgtggagccattatctagccccagaaaaacctgctgttgacttttctgagaaatcagttcttggaagcccttagaataaatacgataaaatttgagacatgcctgccttcctcagggcccggtacataagtgtgttactttcctccttctgagtccaattctaaaagccaagtctctctccttcttggctccaaatagcaaaaagccatcaaccttttcctccttgccctctaggaaaccctgttaccatagcagaaagaacatgggtttcagatccacaggaactgggttcaaatcccaacttaccagctatggaattttcagtaagatcattaatgtctttgagccacaatttcctgttctgtaaaatggaattttgcagtgatgcaggattagttatgataacatatcaaaaaaagcatgctggcagcactcgatgaaaattagccatttatatttattgttacgatgggtattattcccccagaacctacctgcctgttaccatcccttgggccagcctgcagggtccaggcagagatgacattgaaggccttgaccactgtgcaagtggggaagagggaggccaggtactcagcattggactcacgatgctgaaggtgctcttgctctgtagggttgctcacatccaccaggatcttgcccgccagctggtcactgagactgcacagtgaagagtagtgctcccggaacacagccacaaagatgacctccggggagctcactgcctcctcttggaaagtcacttgggccgctgagggaaacagcctggctgtgcgtttggggttgcggctccccaccaccactttgaagccagagcccaccaggcgtgtggccagggagcgggcaaagtccccgctacccaggatgcccactttgggggcctcatcggggaccttggcaaggctactatcgctgtccaccaggtggaggctgatcagtggcttgtccatctcttctggcattttggtggctgcaagagaagtcaggaacctggtcagtggagggctcctggactgccccttctgccacctccctcctcttatacatcgtaactacacggcagtcagacattcacccagcaggtgttcaccgagtgctaccacgtgtcagcaccaggggaacaagctgaacacaacacagccccttccctggggagagcacagactcaggaagagcagggatgacttctgccctccaccctttgtccctcctgctgaatgatttcctcgggaaaaactggcagagtgagagtgctgggaaaggggactctggaatttccatgaccaatgtgatgcagtgccatacttcttttcaaaaggattaggcaatggacagtgtcactagccaggagtgaccatctaaccccaacctcaccatcgctgggtgtttgatgaccaggaagggtgagcatgtccctatgcttgtctacattttgcatcttggagcagttcttcttatgctctccctgaagcatggtgaacagcttgagggcaggacctcatctcatctgaccttggacctcactgtgtatcatagcctggcacggaggcagtgctcagtgtttgctgaatgaatgaatgaatgaacaccaaaccttgatctctgagggcaggactgagagacaagtgaatgggcccctaagatagggtgggtgccctgtgatcttctttgctgagcccaagatatgagtggatgtggaggaaaccctgaactcgggccatcggtctacagtaaacttggatggaaaaattattatatattaattgtcaccaacttctaactaaaatttgctatttcctttaagtatgaaggtaggcaacataatttttcattaatactgaccaagatcatatcataaatttacctgtaaataatttatcctaataccatttaaattgagcacaaatttaaaaccatgctagccaggtgcagtggctcacacctgtaatcttagcacttcaggaggtcaaggcaggagaatcgcttgaggtcaggagttcaagaccagcctgggccacatagggaggtcccatctct

SEQ ID NO: 1078 - DNA, 4095 bp, Homo sapiens
gggcttcgaggtcagctggtccgcagggaagcctttggcttccccaccggcaatggagcggttgacgttgcctctcggcggcgcggcggcggtggacgagtacctggagtaccggagaattgttggtgaggatgatggagggaaactttttactcctgaagaatatgaagaatacaaaagaaaagttttacctctgcgcttacaaaacagattatttgtgagctggcggtcaccaacagggatggattgtaaacttgtgggcccagagacactgtgtttttgtacacatagggtcttactctgtcactcaggttggagtgcagtggcacgatcttggctcattgcagcctcgacctcctgggctcaagcgatccttcgacctcggcctcccaagtagctgggaccacaggcgtctgccaccacatccagctaatttttgtatttttttgtagagaagtggtttggctttgttacccagactggtctggaactcctgggcttaagttatctgtctgcctcgggctttccaaagtactcagattacacgtgtgcgccaccatgctcagctgacccaactcaactttgatggagaagttattatatttagtactgatccactcagtgagatttcttccaaactttttcaccccactattaaagtggtatatgattatcaaggaaaatgggggatatatagaaacatagaatatattctatatacaatatatagaagcagctcactacccaaagccagctgctagttttttttttttttacaatatctgtatgactttttctttttttttttgagacggagtttcactcttgttgcccaggctggagtgcagtggcgcgacctcagctcactacaacctctgcctcgtgggttcaagcgattctcctgcctcagcctcctgagtagctgggattacaggcatgcaccaccatgccctgctaattttgtatttttagcagagacgggatttctccatgttggtcaggctgggctcgaactcccagcctcaggtgatccacctgccttggcctcccacagtgctgggattacaggcatgagccactgtgccatttaactgttgtgaagtatgtgtgtgcataaaatactgagccactttttaatgacagaatcatagaaatatgtttccacattgttatgtgctgatcaaaaacaagatttttaatacctgccagctagtccagctagtccagtggtgtttatctgtgttctccggagctgtgagggagccttgggggtgtgccaggtggaagggcaggttagaaggggaaactctattctgttcttcctttcgctttaaccaattctgcatttgttttatgtattctggttctataaaagattttatttgacaaaagggtttcactgctaaaatgtttgaaaactgttgtctagtaatttacttactggttctcttatgtcgtgtgggtgtgtgtataatgtagctgatgtaagtactattgctaatattattggtatgcataaagctttttctatatatggaattattttcttagggtatattttccaaaaatgaaatttctggttcaaagaatggaccttttcaagtttcttgaaacattattaaatagaatttgttcttttgtaacactcttttttttttttttttttttgagacagagcctcgcctgttgcccaggctggagtacagtggtgccatctcagctcactgcaacctctgcctcctgggttcaagggattctcctgcctcagcctcccgagtagctgggactacaggcatacaccaccatgctgggctaatttttgtatttttagtagagatggggttttcatcatgttgcccaggttggtcttgaactcctgagctcaagtgatccacctgccttggcctcccaaagtgctgggattacaggcatgtgccacaggctcctggccctttcgtaacactcttgatagcattgtgtattacatatagtttttaaaaactttgactctttttgctaagttaaaatggtatctcattttaatttgcatttcttttttttttcttttgagacggagtctttctctgttacccaggctggagtgcagtggcgtgatctcggctcactgcaagctccgcctcccgggttcacaccattctcctgcttcagcctcccaagtagctgggactacaggtgcccaccaccacgctcggctaattttttgtatttttagtagagacggagggtttcaccgtgttagccaggatggtctggatctcctgaccttgtgatctgcccgcctcagcctcccaaagtgctgggattacaggcgtgagccaccgcaactggcctttaatttgcatttctttgattaatattgagaataataaatttagtattattttactgaatatcacctatgagaagaaagtgagtgatctatttaagaaaattacaatactataagaaggagctttggctttcaaaaatattgataatttattttgaagtcaaaagtcatattaaaataaattacatcaacacatgtttattgaatatatttctattttaagtagcaaacatgcaaataaatttaagtaatgcactgtgacaaaaataacattagtaaagaactttttcttttcttttttttttttttgagatggagtttcgctcttgttgcccagggtggagtgcaatggtacgatctgggctcaccgcaacctctgcctcctgggttcaagcagttctcctgcctcagcctcctgagtagctggggttacaggcatgtgccacaacggccagctaattttttatttttagtagagacggggtttctctatattggtcaggctggtctcgaactcccgacctcaggtgatccgcccgcctcagcctcccaaagtgctgggattacaggcatgagccactgcgcccggcctgaactttttcatactcttaggctgtgcttctctattaaggaatctgtagaggtataaacaacataaaactgacttggaagcgattcctcagcagtgccccattgatctgccctgccaagtgactggctgccagtgcagggcttacctttatgtccccttgaatggtagccagcccattcgctgcaggtgcaaacactttgctgatcagcacagcgctgcgcctggctttacatgcaatacatgttccaagtgttcaggattccatagctgcttcacttgtgcttgtggtcagcctgcatatgcccatgacacagtagtggaaactaagcaagaaagattggctcaggaaaaaccagtgggacaggacattccttatgcagccatgggaggattaactggtttcagctcgctggcggaaggctacatgcggttagatgacagtgggattggtagatggatccttctgagagctgagcgggactggggagcagaatgtgttccctgtctacttgaaacacagtaggtacaagtagtcaagtttcttcattaaggagacctgaagaggatgatatggctttctttgaaagacgataccaggaaaggatgaaaatggaaaaggctgctaagtggaaaggaaaagctccattgccatcagctacaaaaccttcatgaagactattggagaaattaaaaccatcatccaagtatctttttcatgtttatttaaatgtaataatacagtttatttttcctgaaattatttactttttttttttttactgtataaatgtcttttgggatgtttccttaatttatttaaataactaaaaatgtctattacttttgtcaaaactcataatttactactttgtatgtacctttctttctcctgacaaatgaggttattttatatgagtctgtctgagagtacagtaaatgtttttagtacataataatttaactgtttcaggtatttaaaaaattaaagatattatcaagggttttggacaaacatatgagccatttttttgtcattcaaaatagtaagttaaaaacaagagaacaaaagaaaaaaatagttaaaatcattaatttttttatttttcaaactttgtaatgttatgttttcaaataaaaactatctcaaaatttt

SEQ ID NO: 1079 - DNA, 4348 bp, Homo sapiens
caatgctgcccccacaccgccccctgcagtttctgaggaccaacccactccctcccctcagcagcttgcctcctccaagccaatgaatagacctagtgctgccaacccttgttctccagtgcagttctcttccacgcccttggctgggttggcccctaagaggcgagcaggagaccctggagaaatgccacagagtcccacagggctgggacagcccaaacggagagggagacctcccaagatgtgctcaggctggtggtggatacgagatcctgagatgttggatgccatgctcaaggccctacacccccgaggtatccgggagaaggcacttcacaaacaccttaacaagcacagggacttcttgcaggaagtctgcctgcggccctcagctgaccccatctttgagcccaggcaactacctgcctttcaagaagggattatgagctggtcccccaaagagaagacatacgagacagacctagcagtgcttcaatgggtagaggagctggagcagcgggttatcatgtctgatctgcagattcggggctggacatgtcctagcccagactctacccgtgaagacttggcctactgtgagcacctctccgactcccaggaggatatcacctggcgaggtcggggcagggagggactggcacctcagcgtaaaactaccaaccctttggacctggctgtgatgcggctggctgccctggaacagaatgtagaacggcggtacctgcgggagcccctctggccaactcatgaggttgtgctggagaaggccctgcttagcacacctaatggtgcccctgagggcaccactacagagatatcatatgagatcacccctcgcattcgtgtctggcgccagaccctcgagcggtgccggagcgcagcccaggtgtgcttgtgcctgggccagctggagaggtccattgcctgggagaagtctgtcaacaaagtgacatgtctagtctgccggaagggtgacaatgatgagtttcttctgctttgtgatgggtgtgaccgtggctgccacatttactgccatcgtcccaagatggaggctgtcccagaaggagattggttctgtactgtctgtttggctcagcaggtggagggagaattcactcagaagcctggtttcccaaagcgtggccagaagcggaaaagtggttattcgctgaacttctcagagggtgatggccgccgacgccgggtactgttgaggggccgagaaagcccagcagcagggcctcggtactcggaagaagggctctccccctccaagcggcggcgactctctatgcggaaccaccacagtgatctcacattttgcgagattatcctgatggagatggagtcccatgatgcagcctggcctttcctagagcctgtgaacccacgtttggtgagtgggtaccggcgcatcatcaaaaatcctatggatttttccaccatgcgggagcggctgctcaggggagggtacaccagctcagaggagtttgcggctgatgccctcctggtatttgacaactgccagactttcaacgaggatgactctgaagtaggcaaggctgggcacatcatgcgccgcttcttcgagagccgctgggaggagttttatcagggaaaacaggccaatctgtgaggcaagggaggtggggagtcaccttgtggcatctccccccaccttccaaacaaaaacctgccattttcacctgctgatgctgccctgggtccagactcaagtcagatacaaccctgatttttgaccttgcccttggcagtgccccacatcctcttattcctacatccctttctcccttccctcctcttgctcctcaagtaagaggtgcagagatgaggtccttctggactaaaagccaaaaaaagaaagaaaaaaataatttttcttttctgttttatttgctaattaaaaatggggagggggaaagtcgtccctacttcctcctccctgcttcctctcctcccctgtacgtgccccagcattctggggttatttaacaatagcaatagttctagtgaatgtgtgaaaccaagaaacactctgtactgtgtgcggacccgcagtgacggccagtaaagtggacttaactcccaagtgtgtcgcgccggacaccgggccctggacatgctgcttccatgttcagtcccttccctgcttctcgctgtctttcttttcccacctcccaccccccagttttcagattttctctcatccaataatgtaaaactatcgtgtacgggttcctccctccttttctcttctcccaaatcttttcccttcaaaggaaaaaaaaatgttcagaggtccctgtcttctgtccccatcttcctgccgatagctatcccctgtatgatgttggatgctcctcacatgctgagtttccagccttttctgaaactcagtagctggggagagggcagggaggcttcctgggccttccagcctccttccccacctccttcccaaaccctcttgggaactcctcagggacaactactgctgagtttgggtgcaccctaagatggaggccaggtagcaatggggccggcctcagagagagcgctgtgtgtgtgtgtgtgtgtgtgtgtgtgtgtgtgtgtcggcctcagagcgcgctgtgtgtgtgtgtgtgtgtcagcctcagagcgcgcgctgtgtgtgtgtgtgtgtgtgtgtgtgtgtgcgtgcttgtgaccctgtattgtttgataggatccattcagtttccccaagtacctgttttcattcccatttttcccattgtttaaaaccatcacttttttgtctttgggaaaccacaggaacaatttctctggagacaaggctgtgtctctctcctggtcatttttgttccagcctcttcagactgtgcaatccttcagcaggaactccctctcttctcggtagctttgaatcttaagcttctacgggagagtggtagaactggatcatttcctaatcccatttagttgtgcttttcttcatttacttcataccccaggaccccttccccagcagcagagaccctggagcacaggagagtagggaggaggggttctgggtccatcactgccctacatgtgactatgtccaagttaagcccccaacacgagaggaaagctgctgactcccagctatagccatgggcacttggccccctgcttttcctgctcagcagagcccctcccttcagagattacgggtacttgcactggggaggtggctgctggctggcccaagcagagagctgaggcatccaagaaatgttccattggggggtgggggtgccaggtgaggtggagcattccttgtattctggcagcactgaagagccactgaagggggtaggggcagtgtaggtcctggggcagcccctttattcctttatgccccttctccctcatagcctatttctaaagtcgccttttctgtcagataaacctcaaaacttttaattttatttgagattttttttgcttttaagaggtggattgaagaatatttgaattgactttatattatgcataaatatttatattttatctaaataactgcgctgtaacaaactttgtgttagacagttgaaactgttagagttgggggctctgctttttccccctggcaattttcccctggtataagatgtgctagattaatttcattgtgaggtggatgggggagtgaaattgtgaggtggatgggggagtgaaatctccatggttcctgctttgtgttcctctcccagctccatctctctccctagggaccaggcactcatatggcggggtggggtcctagcctcagtttgaagaagtgggggctggagcggggttgggggtggtagggatagggcatgatcaaaggggccatttcttgcttttctttcctcatcttcactgcccccttgagctaggtggattttctcttcatgacaagagtatttggtagggaaagcaggtttaaaataaaaagacaacccaccccctgcccttttgcttccctcccatcagtctggttgacaggaagaaaccacaccatcaacaccaacaagtttctgtgttccttttacagcaaaagggactttttatataaccaaatgtggtgttttagtgactttttgataatgtacagttttttgtgaatttaaatttatttctttctatatttttaggaccaatctcatttttaataaggttaaaaagaaaaaaaaagtctagcgaaaaaactcctgtttttgccatgtgatgttccacaagtgcagctgtagaaaagtgcttgtcagttgttgaataaaaaaaccacatttgatag

SEQ ID NO: 1080 - DNA, 4791 bp, Homo sapiens
acctcaaatattgctttagggtcatcattttctaaagaatcaggaaaaaaacagagaatgaaaggagttcagcaaggtattgaacagagagttaaaagttttaatgttggtcgtggacgtggcttgccgaagaaaatcaaacgaaaagaacgtgggggaagaaccaataaagggcctaatgtgttttcagtatcggatgactttcaagagtataataaaccagggaaaaaatggaaggttatgactcaggaatttattaatcagcacacagtggaacacaaaggaaaacaaatctgtaaatacttcctggaagggaggtgtattaagggagatcagtgtaaatttgatcatgatgcagagttggagaaaagaaaagagatctgcaaattttatttacaaggatattgtaccaaaggagagaactgcatttatatgcataatgaatttccatgcaagttctatcatagtggagcaaaatgttaccagggagacaactgtaaattttcccatgatgatctaactaaagaaacaaagaaacttttggacaaagtgttgaatactgatgaagaactcataaatgaagatgaaagagaattagaggaacttagaaagcgtggcataactcctcttcccaaaccacctccaggggttgggcttctgccaacccctccagagcattttcccttttctgatcctgaagacgattttcagacagatttctctgatgattttaggaaaattccatctctttttgaaatagttgtaaaacctactgtggatttagcgcataaaattgggaggaagccaccagcattttataccagtgcctcaccaccaggaccacaatttcagggaagcagtccacaccctcaacatatctatagttctgggtcaagtccaggtcctggacctaacatgtctcagggacacagtagtcctgtgatgcacccaggctcccctggacatcacccatgtgcaggacctcctggtctaccagtgccacagagcccacctttaccacctggtccacctgaaattgtaggtcctcaaaatcaagctggagtgcttgttcaaccagacacatctttgacaccaccaagtatgggtggggcttaccactccccaggctttccaggacatgtgatgaaagtacccagagagaatcactgttctccaggctcatcataccagcaaagtcctggtgaaatgcagctcaacaccaattatgagtccctgcaaaacccagctgagttttacgataattactatgcacagcattctatacataattttcagccacccaataactctggtgatgggatgtggcatggtgaatttgcccagcagcagcctcctgttgttcaagactcacctaaccatgggagtgggtctgatggcagcagcactaggacaggccatggccctctgcctgtaccaggcctcctccctgcagtgcaaagagctctttttgtaagacttactcagagataccaagaagatgaagaacaaaccagcacccaacctcatagggcaccaagcaaggaagaagatgatacagttaactggtattccagtagtgaagaggaagaaggaagcagtgtcaaatcaatactgaaaacattacagaaacaaacagaaactttaaggaatcagcaacaaccttccacagaactcagcactcctactgatccaagacttgctaaagagaaaagtaaaggaaaccaagtggttgaccctaggcttaggactatcccaaggcaagacattagaaagccttctgagtctgccccactggatcttagacttgcgtgggatcccaggaaattgagagggaatggaagtggtcacataggctcttctgttggtggagcaaagtttgatttgcatcatgcaaatgctggcactaatgtcaaacacaaaagaggcgatgatgatgatgaagatacagaaagagaactgagagaaaaagctttcttaatacctttggatgcctcacctggcataatgctccaggatccaaggtcacaattgagacagttcagtcacattaaaatggacattactctaaccaaacccaactttgcaaaacacatcgtgtgggctcccgaagacttacttccagtacctttacctaaacctgatccagtgtcttcaatcaatttacctctgcccccacttatagctgaccagaggctaaatagattatggaatacaaaaagtgatcttcatcaaaacacagtgtccattgatccaaaattagcagccaaagccaaaattaacacaacaaacagagaaggctacctagaacaatttggagactcacacggttcaggagctaaattaggagatcctagactacaaaaaaattttgatcctaggcttcacagactgcccaatacagagtctcatcaagtggttatgaaggattcacatgcatcaaagggtgcccctcacttacccagatcaaaccctggttcatcacagccctcaggggcaggaactagcaattctggttccggggctctgcctccatatgcccctaaactctcttcctcagctggccttccactgggaacttccacttcagttcttagtggtattagtttgtatgaccctagggatcacggttcatcatccacatcagagctagcaacagcttcttcaggagaaaactcaaagaaccagaaaaaaagtggtggcttaaaaagtagtgacaaaactgaaccttctcctggagaagccatccttccacaaaaacccagtccaaacgtgggagtcactcttgaggggccagctgacccacaggcggacgtccccagagttctggtaaggttcaggtcccagcagtgcacagccttcctgttcaggcattaacaggcttaattaggccacagtacagtgatccaaggcaggcaaggcagccaggacaggggagcccgaccccagataatgatcccggtagagaaacagatgacaaatctctgaaagaggtttttaaaacttttgatccaaccgcttcaccattttgttagctattgtgtaactgagcaattcttttcactcttgtgactatctcagtcctctgctgttttgtaactggtttacctctatagtttatttatttttaaattataaacacttttcagctgctagtatcagaaccacatgaagttatagcctctaaagcctgtggtattttatataatatttttataactttaagagactgtagtaattgacctaaaaacttatgttagcttcagtaaaagtacttttattgtaaataaacaatcatgaactcaacactctgcctgaatatatgccagttgtctttcataatcaatgtttagataaatgattgccactttttatatggttgtttagtttcaagcaatatgatgtacattacttttgagaaacagtattttgactaggacctctcttatttgtcagcacagaactgattaatatgtaatgctacctgctaattaaaatgtaaaatcaagtaaagaaaacattttaaaattacaattagcagagcagttcatgtttaagggcatcacttttattagtattggcaatattatttgtgtaaatgaagcatttgaatgtcatatctttttaaagtattttattgtatactgtatcatagaagttggaggtatataaatagaacattttgctaaagtgaaaaatttccaagttctctagcataactttttacatttaatttttcatatgaaatagcaattagttactgctgtgttacattgtgatgtttatgtatgtcaatgtttttgtctttaacagcataatttatattgctttttcaaatgatgtagctgcattaattgtgttcatcatgactttggcgatttttaacaaaatttttaaagacccagtgagagtctgtagtgattattacacggataatgttttaaatgtctaggttctgtatttttttcttaaatagcaagaaaatacagattgctagtatagtcaacagtatttggctatcaataaagaatctctttaagatctcacccggctggcattctgtaacagaggggattacctggtgttttaagtatttaatgtcctcatagtgtggaaatcccctaaattgattagaaattgtattttatgaaaaataacttgtattcattcttgtgtatttattacaatatataaataatggcaactctttgttttatacatatataatttataactgaatctaagtattagactgctactcatattttgaactgcaggtgtaggacagtgtttgctggtaacaactccagtgtgtattaataacttgaaaaggagcatttcactataaaagataatgaagtaggtaatgaaatcagtccttgaatgaaagcagtgcccttgagaagggatttttttttaaatatacagtaaaatatttcgtgggaacctaacactcacatagcatatggtttattaataatgcatatcctttctaatcacttcttcaattctttttgctgcagttctgtgctaaaatggggttgtggttaagtgaacgagaactctgcctacctaagaagttcattgtgttctaagtggaaggagagttactgaagggaatgtgaatttttaccgtttgtacttaagatacattggttgtctaaaatggctctggataacatttttgggttaaaaaatgtaatttaaagccaccatagaaagtattttctgatttactgtccaaatgaattttgttgttaattgagaagtcaataaaatggattaaactgacag

SEQ ID NO: 1081 - DNA, 3955 bp, Homo sapiens
gaagagcatccggaagtatttgacttctaatactgcttatgggaaaactgggatccgagacgtccacctggaactgaaaaacctgaccatgtgtggacgcaaagggaacctgcacttcatccgctttcccagctgtgctatgcacaggttcattcagatgggcagcgagaagaacttctctagccttcacaccaccctctgtgccacaggaggcggggctttcaaattcgaagaggacttcagaatgattgctgacctgcagctgcataaactggatgaactggactgtctgattcagggcctgctttatgtcgactctgttggcttcaacggcaagccagaatgttactattttgaaaatcccacaaatcctgaattgtgtcaaaaaaagccgtactgccttgataacccataccctatgttgctggttaacatgggctcaggtgtcagcattctagccgtgtactccaaggacaactataaaagagttacagggaccagtcttggaggtggaacattcctaggcctatgttgcttgctgactggttgtgagacctttgaagaagctctggaaatggcagctaaaggcgacagcaccaatgttgataaactggtgaaggacatttacggaggagactatgaacgatttggccttcaaggatctgctgtagcatcaagctttggcaacatgatgagtaaagaaaagcgagattccatcagcaaggaagacctcgcccgggccacattggtcaccatcaccaacaacattggctccattgctcggatgtgtgcgttgaatgagaacatagacagagttgtgtttgttggaaattttctcagaatcaataaggtctccatgaagctgctggcatatgccatggatttttggtccaaaggacaactgaaagctctgtttttggaacatgagggttattttggagccgttggggcactgttggaactgttcaaaatgactgatgacaagtagagacgagcagtggaggaaacagcctcccaaaaggacagagaactaaaaaattgctgctggagaaggtgaaagtcgctttgggacggaagccaagccattatggcagatgaacctgctggatttgtaaataatttaaaatccttccagatgatcttttactcttaggttttgagctaatgattcaaaacgggggaatataaaaggttttttttctgtatactgtatttttttaaaaaaatggtgcagcgtggccaaacctaccaattgtatgcattaactttgaaaagttgtttgatgtttaagaaggacctgatatgtaagcgctggtcatttttcttctggggtttactgatcagtgtggtgattttaacttcatttagtaattactctaggagattttaccttgacttatatttttcatgacgtttcatgatttgctgttggtttcaaatgaaactacaaatctggcatgttttactgtgaacacttttgttatttgttttgtacccttttttgtcttgtttttctgttttagttgtcttctgaaaaaagagtcattccctctgtttctgtcctcagatgatgtccctccccctacctgtaacctttctttgacataattgttcatatcaatgaaggtgctgaccagctcaatacaaagttaagcacaagatctaaagctcttgaaaatgcccgtgaagagaagactgaatgtgttaatgaatttaatgagtctggcaaaagttgcaaattatatgcaagtttgtcctatcgcttataaatgtagtgtttcattggatttattttatgctaggttatattaagttgaaatagtctgtgattaaatgtcctcatccatgcacagaatatgaatggcagcaaatctttgtgcaagaaatttgaaacttattgggaaaagcctcccagtagattaattgttcatatcaggagatttagggtaagtcatgggttgaggtgtcagatagtaatatctatttgttttgtacatgtatatatctaggaactttgtaacaacacatctttaataatgttaaaggttttttcatttttaatattttaaactaaaaactgtacttcaatctcagtttctaaaattaaaaataatttatactgatctatatattttttctttttgaaagatttcattaagactgatgggtaactttcaaatgagggtcatgtacaaatattgggatgcatgagatcccatgatcttgtgtattgagcttattgttgaaagggatttttgaaggacagaacaattactccatgatgaatcttcctttctctgccttctgagcaccgtctttaatttccatatcttcaagtcttgaagaagttgatgttaattgaagaattcacttgtctggttgaaataaagcctgtttctgttgtgatgtttttagtgtatatgttattttcatttcttaattctcatgtttatagtatccgctttgtaccatgaaatgactgtctgttgtgtttttgctactctacatttcaaaattggaggctttcccatgagtgtggtatggtccaaaacactgtcttcaggtgaagctgtagccctatgcatagatttttaaaatagagctttattgtttctatacaagtgactccttaatgccaactacctctgctatatttggtaattccaaaggagtttcaaaatttggtcatcacagatacattttaccaacttctatctggctttaaaaaaattcagacagctaaagtgttcttgaaaaggataagttaaaaatctacatattatttataattagtgccttttgatggcctcttctattcctattctcatctatcaggtaacagcagaccttgattccgcagatcatggttctacaaaggaaatcagggcaagttagtgtgactgtattttttttaattatctgaaatcacttgatctctcattacaaacatttaaaatattggtgtagctgagaaaatacattattccattatacaaatatcagttaaatgttgactacatatagccagcctgttttttacaaaagagatcttgtagcctgagggttttcacattcacttgaattacagaaacttttcttagaatcaacatcacaaagaaactgggaagactaaagaattttgaccttgtgcaatatgaagtaagagcatggctttttatcgtgaggcagcttcagtctgggtccagcttagtcagttaccagttcaaagatatgctaagcctctttctaaaccatagtttcctcacctataaaatgggacaaataattgttttacatacatatttaaagagctcagcacaggggttgacacaaagtaaatgcttcattaatgatagctacaatgaaaaaataaattatttaaactaatttattaaatcagtaattcttaactttctggattgtgggaaacccatgttagtatggagatgtttcaccaatctccgtatgctaatacatatccacagctccttgtccacacttccaaaatcccatacttaagaaatctatcttgacagctcacttggcagcaaaagctgacttgagcattatttctcacatgtagtagggctcttcacatgttttgttgcaaagctcgtcatgagttagataacaggatactgactctgacaggggtgttaagtaataaacgattttgaattggctgggtgtggtggctcacgcctgtaatcccagcactttgggaggccgaggcaggcggatcatgaggtcaggagatcgagaccatcctggctaatacggtgaaaccccgtctctactgaaaatacaaaaagctaggcatggtggtgggcacctgtagtcccagctacttgggaggctgaggcgggagaatggcgtgaacctgggaggcagagcttgcggtgagctgagatcacaccaatgcactccagcctgggagacagagtgagactgtctc

SEQ ID NO: 1082 - DNA, 5272 bp, Homo sapiens
gcacacagcgactggagacggacggagagcaacgcgctgggagaggagagaccaccgacaacagacccgcgctctcacacatacactcacactcgactctttcctctccccccacctcctcctccttccacccccaccactaacaccatctcctcctccttctctctgcaacaagaaaaaaaagccatttacagttgtaacagttggaggataatgcaaaggaagacgctgcctgggaattcaccgtctgtggaaatgagccccagagaggaataaagcagccctcaccttgctctccccacccgaacccactttccccacccgcctcggcccccaccccaacaccaccatcactcccttccctcccccccacctttcccccttttccacccaggtgtcggaccaggcggtccccacttccaccctgcaccccttcttccccccctgcaccatgaacaccaatgtctgcgtggagcccgggccgagcccggaggccccgggcttgcccaaggaaagccacttgcccgagggggctctgaacagccttgtggattacaactcggaaatggagcgctaccgctcctttgccacctccttctacaagaccaacgggggcgccttcccacaggcggccaagatcgcgcgcatcaccacccccatcttccccagcagcgccgccgccgccgcggccgccgcgcgcatcggcatgtccccctggaactgcgacaacgcggcggcggcggcggcggcagcaggaccagcatgcaccaccgaaacgactcccagaggctggggaaagctggctgcccgccagagccgtcgttgcaaatggcaaatactaatttcctctccaccttatcccctgaacactgcagacctttggcgggggaatgcatgaacaagctcaaatgcggcgctgctgaagcagagataatgaatctccccgagcgcgtggggactttttccgctatcccggctttagggggcatctcattacctccaggggtcatcgtcatgacagcccttcactcccccgcagcagcctcagcagccgtcacagacagtgcgtttcaaattgccaatctggcagactgcccgcagaatcattcctcctcctcctcgtcctcctcagggggagctggcggagccaacccagccaagaagaagaggaaaaggtgtggggtctgcgtgccctgcaagaggctcatcaactgtggcgtctgcagcagttgcaggaaccgcaaaacgggacaccagatctgcaaatttagaaaatgtgaagagctaaagaaaaaacctggcacttcactagagagaacacctgttcccagcgctgaagcattccgatggttcttttaaagcagtagtatatcttattttcaaggcatttggaaatgaagggcaaactaatgtcttgttttaagaaactgcttagtccaccactgaagaaaatatccagaaattattttcattttatgtatagggctttcttcaaaaaaaaaaaaaaaagaggaaaagaaaagaaaaagacataaaaataatgtgagagcttggagaattggccagtctatttactttcaatacgctgattctttctttgatgtaatttagctatagtagtgaagttgttgtctattttgaaagtggctgtaaaaaataagtttgggtaaacccctgctgtaaaatcatgtatctttgcaaagtacatatctatacttcattttcaaatatatgtgtttcagtactgtaaactgtacagatagcagcttgtattttgtgtgtttagacacaaggagacaatcatgtctgagcatctatggagattaacagtttgtacacaacagtatggttctgcaagttaaatctggagcaataaattttagctttaactattttttgccagtggtttagaagcagcaacagcactggcaccattttgccatgcatctttccatagagacttgatgccaagttttacaagactaaaagattatgatgcatccaccaattaccttcagttttattgttataagaggggaagatgttatgaaagtttcaattaatcttttgagcactatattagagtagtggttatgcacttgcattgcttacaaacgagctgtacagaagggtatacctcccaaatacttagtgtagttgacttgtcttgggttgcactgtaaggcagagtactcagagtagttggaaaatgcagaatcagttgtataattttttttttataaaaacggtgttttttaggctaaagaataaagtatcatatcttaggaggggaaaatttataactgacattttttccccagcccaatatgggctgtatacgttttattgtttcttaatttttttcttattttttctgtaggaaaaaatcttaataaaaactaccccaatgttttaacttcatgtatgatattaaatgggtagttttaacacttgaatatgttgagggcttctgccttgaggcagggcttgatatatttttaatttacaaagaattaaacatattcataaaagtgaggcattttatctctttttattttcttttctcatagccacccagttggactagtggtcttcccctggtccttcagtaaaatgctccattgctgccatttccattgttgttacttgatgctttcattcctgagaaggcagggctacagtctctggaatttcataaatgcatgacatacccctccccccacaacctacacacaaaggatctaatgcttcatagaacctgtgctaccttttcatgttggagttggttttcttatcacagtcagggttcttaaggccgtcccatcaggacaaatatttaccttccattttatttctgtttgtcccaattataaagactattttcagtttcaggagtagaacagggtttagcaaaaatatgtagagtatcaaagttacctactgcaactttttgttctttgtccactagccaggtgatttaacccactaaatccattagcttgctgaaaaatgttagcaaagtaaatcacgagaagaaagataatttgagaagagaaatggtatggtacaatgaaagaagctgtaaagattaggaaagactagtaagtgaatatttttaaaaatttagttgtagatttcaatgggatacgataggacagaaaagattttttaaaaagcagaaagagtgtttcatggtgaaagtactgggggagggtggacaaagcatgcacacatgccaatttgaaaatcaagtgtgacttacctcacgtagagtatgaatacatggtccacagttatggtcaacaagcgttttcaagaaaaactcatgatgtgttacacccatccatatttagagatgagaattaaatgattacaagctaaaatgtgctgtatactgtattaattttgagatagctttctacttgatgtatatttctttgagggtttctatctagttagaatttcagcttctgctgtgggaccaatgagagctgtatgagtttttttttttttccttttccattattttattttttgttttttgtttaccaatttgctaattaattacaagtaagtgaaaacttactttcacacttgaatgataagcttgccttgctctttggaaaatgatgattgttattacagaagtgaaacaaacttctattcaggctacagtaggcatacaataacctaaagatctcatagaagtatactgagagtctaaaatacattctagtagtgcatgtcttggtgtgcttttgtttgtttgctttctaaaagaactaatgaatctgtatattgtaaactgtggtgttttacatgtcaattcatttttttaatgaaagaaaatttgttgattactgaaatgagaaagtgtagcttttcattaattctcttatgttttttattcttgatattgttcttttataccacccactttttaatgtttttggttaaactccatttatataatgtaggatgcatataaagttctcattggtgatgttgaagaaagagatgactcttctggcctttctctagttttcttcctcatatgtccctgtactgagaacttctaaagcttatcattataaacctaaggcagtgatttgaaagtttacatttttcatgattttcaaataccaatgaaatgtaacttttaaatattcctcactgtgtgttttatattcactgtcaagaaaattcagaatgtagattgtgtggacagctatacacaacttaataattatatatcagataaactgaataaaaaactttgtaagagtggtctacgcacacaggatcttgtcctccctaggcgtggatagagagatgccataatctgccagcatttggggagatcatggtaaatacttgaggcgttgatacatagtgcagtgagccaatttccttttcagttgtcactcagcaccataacatcacgaagaacatcattaatgcaaacctctcactaagccttcagaccaaagtggctttctgatggactctgcctgtctgtctacaagtggagtcagattcaaagtagaaatgtatccatccttgggaaagaaaataggaagtcttcccccactgtaggagtatataaaaatgtctcctggttgcttaattcccaacactcaatttccttcttctaaacacatttataaggagcaagagatggtgcacttattatgaattaatattaagcaatcactaaaagaaaggaatattctcttcctttcaatcagaaaccctgatatgtaagttgtgcaattaatgctaaagcatataaagtctttaagctgataagtatctgtaatcaaataatgaaaaaaggaaagcagttaaatgaacacactattcagggtcaaatatgttcagcaaaaagccgtagcgggtctttgatcatggttagattcacagtgatatcaaacagttggttctcatgtaacagctaaatgtttcagtttttttttttttattaaatttggcatttcacactgagatctgtattcctagtgaataaaagacagctactatattaggagggattccattttcacaattgcaaaacagatatttcaggaacatgggccacaaaatgtactcctttcacagtgttctcctcttctgaactgtgcagttatctattaaattttctaatagatatttgtgtaaggtgtatgtatgcttgtgcaattatttaaaaaacggttttggaaaacagtgtatttattaaagaaaattacttatggggcatgtacaaaactgt

SEQ ID NO: 1083 - DNA, 3916 bp, Homo sapiens
aaatatctgtccacctagggtgcagcgagctggagaggaaggggtggccttgagcgcaggggaaggattcctccccagccgcctgcacccctaccccggtagcggtccctgggatcgtccgtgtctccaggagaaccggaccgctctcccctccctccccgagcgagaaaggaggaccacagagatgcggcgccctccgccgtcctagagcaaccggagcggcccgagccccggcctcccggatgctggggcctggcgggagtcagtgaccttcgaggatgtggccgtctacttctctgagaacgaatggatcggcctgggccctgctcagagagccctgtacagggatgtgatgctggagaattatggggctgtggcttccctggcagcatttccatttcccaaaccggctctgatttcccagctggagcgaggggaaacaccctggtgctcggttcctcggggagctctggatggagaggccccaaggggcatctcctcaggatatccatttctaaagcctgctgggatttcccatcctgagcaggtggaagagccattaaacctgaaactgcaaggagagggtccaagcctgatttgtccggagggtgtgttgaagaggaagaaagaagattttattctgaaggaggaaattattgaggaagcacaggacctcatggtcctatcaagtggaccccagtggtgtggatcccaggaattatggtttgggaaaacctgtgaagagaaaagcaggttagggagatggcctggttacctcaatgggggacgtatggaaagttctacaaatgatattatagaagtgattgtcaaggatgagatgatctcagtagaagagagttcagggaatactgatgtcaataacctccttggtatacatcacaaaattctaaatgagcaaatattctatatatgtgaggaatgcggcaagtgttttgatcaaaatgaggactttgatcaacaccagaaaactcataatggagagaaggtctatggatgtaaggaatgtgggaaggctttcagttttcgatcacattgcatcgcacatcagagaattcacagtggggtgaaaccctatgaatgtcaagaatgtgctaaggcctttgtttggaagtcaaacctgattcgtcaccagagaatacatactggagagaaaccctttgaatgtaaggaatgtgggaagggctttagtcagaacacaagccttacgcaacatcaacggatccacactggtgagaaaccatacacatgtaaggaatgtgggaaaagctttactcgaaacccagcccttcttcgacatcagagaatgcacactggggagaagccttacgaatgtaaggactgtgggaagggcttcatgtggaactcagatctttctcagcaccagagggtccacactggggacaagcctcatgaatgtactgactgtgggaaaagcttcttttgcaaggcacatcttattcgacatcaaagaatccatactggggaaagaccctataaatgtaatgactgtgggaaggccttcagtcagaattctgtcttaattaagcaccagaggcgccatgctagagacaaaccctataactgtcagatctctcaccttcttgaacattagagagtgcataatggtgatacttgtttataattcttatgctgcaggaaccctagagacaaaatgagatgaccattcacaatttgctgtaacccttaacttaaatagccagtattatcttgcccttttgaacatttaccgtgtactctagcaagactggtccctctgttctatgatgttttaacaaggcgtcatttagttgggcagctactctgtatcaggtgctaaccactttacatacattaatttgcataacaatcctattaaggtaggtgctcttctccccattttacaaatgagaaatctgagttgaaagaggttataaaactcattcagggttgctcagttagtaagttatagagttgaaattggagccaggcctatctgactgcagagtttactgttctttacttaattgtacatatttatgtctctgcccatttttatttgcttattttcctgtgcttttagcttcccttcatcactcagatctagctccttcaactaagaagatctctcttcctcttctacttgtaatcagtaccacccaagttagtatttaattatgtgccatcttatatttttctaatagtctcatgtcttttaatcttaaccccagctaaatgactctgaggaccaacagtacatttcttttatgtttttcaaatcctgaaacattaatctttgactagatataacatgctcatgataaaaaagaattgaaatagttgaaaagggtgttcagtgaaaagtaaatttccttgtcattcctatctcttgagttctccccagaggcaatcactgctactggttgtgtatctctgtagatactctttgtatacaagtgtttattagtattgcttttcataattctgtctcactgaaaaccttatttgatggaagcaacattgcagttaaattgtgaactctaagaccttttcttcagaagttgctttccttttgaggccaccaaagtaatttagggaaacagcagagggtaatccaggtctttttttttttttttttttagacagagtctcactctgttgctctggctggagtgcagtggtgctatctcagctcactgcaagctccacctcctgggttcatgccattcttctgcctcagcctcccaagtagctgggactacaggtgcccgccaccatgcctggctaatattttttatttttagtagagacggggtttcaccatgttagccaggctggtctcgatctcctgaccttatgatccacctgtctcggcctcccaaagtgctgggattacaggcctcagctaccacgcctggccaatccaggtcttaagagacctcattgcctttgttttatgagatatcattctgggattgggaatatgtaaactcaactggagattttttttcataaaaatttatatagttccagccctctcattgcttcctatcctaaatcctcttccagtctgtccatccctcactaccatgatagtctacattctgataagctgtgaggccactgccaagggagggagaaatggtcactttctggtggtggttaatgctttgttagatagcttcatccagtcaatagttgaaaagttttcacataatccagtattggcatcagagccagaaatgccctccctaggtccaggaccaaagataaaacaaacacgaggaacatgtagcgtctacacaggaaagtaaagaattatagaattaactaattctacttgaaatcaggagttttataaaacaacatttttagacgtggtcatcttttattggtttccatcatctcttccccttctctctgggaacagttacccgggtattctttgggaagctatcctttctcagctatgtggtttggcaccaccaccatcttcatgagtggaccctgtttggcttgtgtcaatcagtttatcccatccccttggccacagagccattgtgatatgaggagatactggctcttctggaaaagagaggcttttcttcatcgagagctaccagaggagatattatctgtcctctgtgtggcacataggagaatgtgagacctagaattatagcaacttttttttttctgttaaaaggggagattctcaagcttccaggtgctaccatatggagcctaaggataaagccaataccaaagaaaacagtgactaaacagagagaaactaggtccttggtgacatcttttgagccactagaccaagctttacctgaagcagagctacctcagaacttttcagctatgtgagccaataaacatctgtcaaacg

SEQ ID NO: 1084 - DNA, 3934 bp, Homo sapiens
ggttcgggtagtcggtgacatggcggaggccgcggcgctggtgtggattcgcggccctggcttcgggtgcaaggcggtgcggtgtgcctcgggtcggtgcaccgtccgggattttatccaccggcactgccaagatcagaatgttccagtggaaaacttctttgtgaaatgcaatggagctgtttatagtttggaacccagactttgcggtggaaaaggaggttttggatctatgctccgagcacttggtgctcagattgagaagacaaccaatcgagaagcttgtcgggatctcagtggaaggagactacgcgatgtcaatcatgaaaaagcaatggctgaatgggtaaaacaacaagccgagcgagaggctgaaaaggagcagaagcggctggagcgactgcagcggaagcttgtagaacccaagcactgcttcaccagccccgactaccagcagcagtgccatgggatggctgagcgtctggaggattccgtcctcaaaggtatgcaggctgcctccagcaagatggtttcagcagaaatcagtgagaatcggaaacggcaatggcctactaaatctcaaacagacagaggagccagtgcgggaaagaggagatgcttctggttgggcatggagggactagagactgcagaagggtccaactctgagagttcagatgatgacagtgaagaagcaccaagcacttcaggaatgggtttccatgctccaaaaattggtagcaatggtgtcgagatggcagccaaatttcccagtggttctcagagggcgagagtagtgaatacagaccatggatcaccagaacaactgcagatcccggtgactgactctgggaggcatattttagaagactcatgtgctgagctgggggagtccaaagagcacatggaaagcaggatggttacagaaacagaagagacccaggagaagaaggcagagagtaaagaacccatagaagaggagcccactggggctggactgaataaggataaagagacagaagaaaggactgatggggaaagagttgctgaggtagcacctgaagaaagggaaaacgttgccgttgccaaactgcaggaaagccagccaggaaacgcagttattgataaggaaactatagatttattggcgttcacctctgttgcagaactggagttgctgggtttggagaagctcaaatgtgaactgatggcccttggactgaaatgtgggggcactctgcaggagcgggcagcaagactcttctctgtcagaggactggcaaaggagcaaattgacccggctttatttgccaagcctttgaaagggaagaaaaaatgagtatcatcagagctgattcctatttgtttatagtgtctaccatttacaacctgcataatgtggactcttgaccagtattcctgttgacattaaaagctaactttttagtaacccaattctaactatcccctttttccttgtcagggctgtagaattaatgtctgaaaccatctgggccttaaattttctttgtctggttttctatagtgtatttaataaatatagggctattcacattttttggtttgatcttggtgtcatttaggtaatgaatctatccaagaaatctatccttttgacccaggttatcaaatttgtagacataaggttatttataatggtcccttcttacccttttaatgtctttaggagctgtgttgataatttccttttcattatgatactggtaatttctgttctcactttcctaatcaggttgggtaggggtttatcagttttactgatctgactttttattttattttattttttttgagacagtcttacactgtctcccaggctggagtgcagtggcgcgatctcggcttactgcaagctctgccttccgggttcatgccattctcctgcctcagcctccccagtagctgggactacaggctcccaccaccacgcccggctaattttttatatttttagtggagactgggtttcactgtgttagccaggatggtctcgatctctttacctcgtggtccacccgcctcagcctcccagagtgctgggattacaggcgtgagccaccgtgcctggccgacgatataacttttaaagaaccaacctttggttttatttttctcaattgtttatataattaatttctgttattttctttcttctatttagcttgagtctcctttgatcttttttctttagttccttaagataagccttaggtcattgatcttagacgttatttaaaatacatatttaaagctatacattttcttttaagcattactttagttgcgactttacaattttattatgtcgtatttttattattcagttctaattttcttttttttttctttttgagatggaatttcgcttttgttgcccaggctagagtgcaatggtacgatctcagctcactgcaacctctgcctcctgggttcaagcgattctcctgcctcagcctcctcagtagctgggattacaggctccagccaccatacctggctaatttttgtatttttagtagagatggggtttcaccacattggccaggctggtctcgaactcctgacctcaggtgatccacccactttggcctcccaaagtgctgggattacaggtgtgagccaccatgcccagcctctgattattttctaatttcctccctcagttcttctttgacccatggattatcagaagtgggttgtctgatcagcaaacatttgttttttttcctcttaatatcttcttgttgctgatttctactttaattccattgaggtcagaaaatatcctctttatgatttcaatcctcttagttttattgagactcgttttatgacccaatatgttgtctgtcatggtgagtgtaccatacacagtttaaaagaatgcgtattttaggccaggtgtggtggctcatgcctgtaatccagcatgagattacatgctgagattacagctgtaatctgtaatttgagaggctgaggtgggaggatcatttcgagaccagcctgggcaatgtatagtgagaccatgtctctaagaaaaacaatatgtaatttgaattgttgggttaatatgttttgtaatatcgatgagattaagtggttgatagtattgttcagatcttctatgtctttactgatccttttgtttatttctatcaggtgctgagaaaggatgttaaaatcttcaattatgattgtggaattgtctatttcttaaattctaccagtttttgtatgaagctctaataacttatgtcttcctaatgtattgaccattttatcattatgaaatttccctctgtctctggtaatttgggtttgaaatctactttatcttatgtgaatatagccactgcagccttcttaagcttagtgtttgcacagtatacctctttctattaatttactttgtgcttctgtgcctatttaaagtagtttctttaaacaacatatacttgagacttgcatttttatctgttctctctgtatcttttaataagtttaacattaaatgtaattattaataggtttctaatttacatgtttcctgtttagataagattattttataattgtattttaatttattggctctttagctatactgttttaataatttttttaagttggatgttctagtgattacaatatacattcttaatttttcagtctacctagagttgatgtgccacttcacataaaatgtagaaatcttgtaagtatgtacatccatttatcatacctgtcttttatgctgtagttgtcatacatattaaatctacatatttaaatattgtaagtcctgtcataagttacaatttctgctttaaataatgatatgtattttaaagaaattaagaggaaaaaataaaatcttttgtatttattc

SEQ ID NO: 1085 - DNA, 3623 bp, Homo sapiens
agcagaatcaacaactgtagactcaccgccctcatctccgcctccaccgcctccacctgcccaagccacaacactctcatcaccagcaccagtaacagagccagtggccttgccacatacaccaataacagttctaatggcagcaccagtacccttaccagtagatgtagcagttagatctctgaaagaaccaccaattataattgtaccagaatctttagaagcagatactaagcaggacactatatctaatagtttagaagaacacgtaactcaaatattgaatgagcaagcagatatttcctcaaaaaaagaagattcccatattgggaaggatgaagaaattccagatagttctaagattagtctgagctgtaaaaaaacaggttctaagaagaaatcctcacaatctgaaggcatctttcttggttcagaatctgatgaagattctgtacggacttcttcaagtcaaagatcacatgatttaaaattttcagcaagcattgaaaaggaaagagattttaaaaagagctcagcacctttaaaaagtgaggatctagggaaaccttcacgatctaaaacagacagagatgataaatattttagctattcaaaacttgaaagagatactcggtatgtatcttcccgatgtagatcagaaagagagcgacggcggagcagatctcactctaggtctgagagaggctctagaactaatttatcctattccaggtcagaacgatctcattattatgactctgatcgtcgctaccataggagctccccttatcgagagaggacgcgctattctcggccatacacagataacagagcacgagagagttctgactcagaagaagagtataagaagacatactcaaggcgtacctcatctcattcctcttcttacagagacctaaggacatcatcctattctaaatctgatcgggactgtaaaactgagacctcttacttagagatggaaagaagaggcaagtattcttcaaaactagaaagagaatctaaaaggacttcagaaaatgaagcaattaaaagatgttgttctccccctaatgaactgggattccgacgagggtcatcatattctaagcatgacagtagtgcttcccgttataaatctaccctttcaaaacctatacccaagtctgataaatttaaaaattctttctgttgtacagaattaaatgaagaaatcaaacagtctcattcttttagtttacagacaccttgttcaaaaggtagtgaattaagaatgattaataaaaatcctgaaagagaaaaggctgggtctccagctccatcaaatcgattaaatgattcacctactttaaaaaagctagatgaattgcctatttttaagtccgaatttataacacatgatagccatgatagtattaaggaattagactctttatctaaagtgaagaatgatcaattaagaagtttttgtcccatagaattaaatataaatggatctcctggggcagaatctgatttggcaacattttgcacttctaaaactgatgctgttttaatgacttctgatgatagtgtgactggatcggaattatcccctttggtcaaagcatgcatgctttcatcaaatggatttcagaatattagtaggtgcaaagaaaaagacttggatgatacctgcatgctgcataagaagtcagaaagcccatttagagaaacagaacctctggtgtcaccacaccaagataaactcatgtctatgccagttatgactgtggattattccaaaacagtagttaaagaaccagttgatacgagggtttcttgctgcaaaaccaaagattcagacatatactgtactttgaacgatagcaacccttctttgtgtaactctgaagctgaaaatattgagccttcagttatgaagatttcttcaaatagctttatgaatgtgcatttggaatcaaaaccagttatatgtgatagtagaaatttgacagatcactcaaaatttgcatgtgaagaatataagcagagcatcggtagcactagttcagcttctgttaatcattttgatgatttatatcaacctattgggagttcaggtattgcttcatctcttcagagtcttccaccaggaataaaggtggacagtctaactctcttgaaatgcggagagaacacatctccagttctggatgcagtgctaaagagtaaaaaaagttcagagtttttaaagcatgcagggaaagaaacaatagtagaagtaggtagtgaccttcctgattcaggaaagggatttgcttccagggagaacaggcgtaataatgggttatctgggaaatgtttgcaagaggctcaagaagaagggaattccatattgcctgaaagaagaggaagaccagaaatctctttagatgaaagaggagaaggaggacatgtgcatacttctgatgactcagaagttgtattttcttcttgtgatttgaatttaaccatggaagacagtgatggtgtaacttatgcattaaagtgtgacagtagtggtcatgccccagaaattgtgtctacagttcatgaagattattctggctcttctgaaagttcaaatgatgaaagtgattcagaagatacagattcggatgatagcagtattccaagaaaccgtctccagtctgttgtggttgtgccaaagaattctactttgcccatagaagaaacaagtccttgttcttctcggagcagtcaaagttatagacactattctgaccattgggaagatgagagattggagtcaaggagacatttgtatgaggaaaaatttgaaagtatagcaagtaaagcctgtcctcaaactgataagtttttccttcataaaggaacagagaagaatccggaaatttcttttacacagtccagtagaaaacaaatagataaccgcctgcctgaactttctcatcctcagagtgatggggttgatagtacaagtcatacagatgtgaaatctgaccctctgggtcacccaaattcagaggaaaccgtgaaagccaaaataccttctaggcagcaagaagagctgccaatttattcttctgattttgaagatgtcccaaataagtcttggcaacagaccactttccaaaacaggccagatagtagactgggaaaaacagaattgagtttttcttcctcttgtgagataccacatgtggatggcttgcactcatcagaagagctcagaaacttaggttgggacttctctcaagaaaagccttctaccacgtatcagcaacctgacagtagctatggagcttgtggtggacacaagtatcagcaaaatgcagaacagtatggtgggacacgtgattactggcaaggcaatggttactgggatccaagatcaggtagacctcctggaactggggttgtgtatgatcgaactcaaggacaagtaccagattccctaacagatgatcgtgaagaagaggagaattgggatcaacaggatggatcccatttttcagaccagtccgataaatttcttctatcccttcagaaagacaaggggtcagtgcaagcacctgaaataagcagcaattccattaaggacactttagctgtgaatg

SEQ ID NO: 1086 - DNA, 4636 bp, Homo sapiens
ggtccagggctgagtcaaggctagaaccaagacggggcaaaggccggggcagatctagggcacaagcggggcagatctagggcacaagcatggcaggctagggcagggcaatggcaagaccaggtcatggcagggccagcccaggatagaacagggcacaggcagggcagggccagggccatggctggggcaggacaaggaccaggaccggggtccaggccagggcaagggtatggccagggcagaggtagggccagagccagggtctgggcaggaccaaggcaggtctattgcagggccagggttcagaccagggccagagcagggctgggacagggccagggccagaaccaggaaagggcaatgtcagaacaagggccatggcaggaccagcaatggggctggggccaggacagggacagggacagggtcagggatagggccagaatagcatgccaaggtagagccaggccaaattagggccaggacagggtcaggaccagggctggaccagggtatggccttaagtagcgaacggccagggccagggtccatgccagtgccagcgccggtccagggcagaggcagggccatggccaggtcaaggacaaggctggggcagggccaaggtctgggtcagggtaagcacaagaccaggacagagccaggggagggacagggccatggtagggccaggttaaatcagggacaagacacctgcaaatccacttcagggccaggtcagggcagggccagttcagggccagggccaagacagggccagggtcatggctgccagggtcattggcagggccagggccatggcaggaccagggtcaggagcaggggtcaatgccaggccaaggccacacataggaccaggtctgtgctagggccagtgtgagggccaaggcagggtcagggcagggacaaagggagggcagggccagggcagggtggagcaggcccagggttgcacagggttaaggtagggcatgaccaaccagggcaggtctatggctggggccggggcagggccagagccagggcagggccaagacagtggcagctccagggcagggccagggttaggaccacggacatgtccaaggccagtgccagggcaagggcaagggcaggggcagggccaggttcatctaagaaccagggacaaagccaggcccagagctgggccaggacaggtacctggcagggctagggtctgggacagggccatggcagggccagggccacaaccaggtctgtgctatggccaggtccaacacagtgcccaggtaaggctagggtgaatgccaaggtagggccagggcagggtcaaagctaggctagggccaaggcagggccagggccggcaaggcagggccaggaaagcatagggccaaggcagggcagggccaggccagtgccaagacctgggcagggccagggccaggacaggtccagggcagggccatgacagggccaggggctgcgttagggcaagggcagggccagggcaaggtaagggtcagggccaaggccagggtagggacagggcaagaaatatggcaggaccaggggcaatgccacggccaaggctgggccagggctgagccagggctgagtcagggcagggcagggcagggcatggtatggccagtacaggacaggacaagagctggtccacacagagagcagagctgatgccaaagaagagccaggctagtgccgaggctgaggcagtgtcagagcatgtccagggcagggccagggccagggccagaaccgagccagggcacagccaaggcagggtagggcagggaaatagcatggccaggtcagtactgggacagggcagagcagggcaaggcgatggtagtggcagggcagggacaggccaatgcagagccatgttacgccggggccagaacacctccaagttcacttcagggccagggctatggcaggacaaagaccagggccaggatcagggccaggtctgtgctagggccagctccagagcagggtctagcgaagactagggtgagggccaaggtaaggccagggcagggtcaaaggcagagtagggccagggcagggtgatgacacatccagagcacagcagggcagggtaatggcaagaccaggggcagaccactgccagctcagggccagggaaaggccagtgcagagccaggaaagggtctgggtctgggtcagggccaggaacaaggcagagcagggccagggccatggcagagtcagggcaggtccttgacaggaccaggttccaggccagggccagggcagcagcaggggcagggcctggataagggcagggccagggatatggcaggaccagggctagggccagggccaggccatagtgagggcacggcaaaagccaaggcatggtcaaggcaggtccagggcaggtccagggagcggccagcaccaagcagggccaaggcacaagcagctcagggtaaggcagggcaatggcaccactgggccatgacagggcaaggtcagtgccaggagagggcagaacaggcaggcccatggtggggccagggcagggatgggccaaagcagggccaggacatatccaaggccaggtcagggccagaacaagagcaggaccatgaccattggcagggcagtgccatgacaggaccagggtcaggacaaggggcagggccagagccaaggtcaggccagtgcaggttcacggcagggccagtgccagggcaagaccagggaagggacagggtagcacagggccaagacagggtcaggatgggaccagagcaggacagggccgagagtccaggtaacagtagggcaggtacagggcaaggcagggcagtacagggccagatccacggcaggcgcagggcaaagccaggcccattgccaatgcaccagccctccctacaaggctcctaccacctggtcactgctgcagcccgtccattgctgtaagcctgaccctggctgcagccgcctgccctcctagcgtggtcgctctcctaccgctctggtgcactgcagtctccgtcactgccacccacctgtagcgaggcgagccgtggtgtcgcaggctctaggtgtctcctcctcctcctggcatggagcagctgggcgggcaaagccagaaaagcctagaggaagatgtgaggggtggaagggttagagcctcaccttgtcatgccggccactgggtggcaggggccagtttcagcaaaggcactcacacccaccctccaaagtccagcctctccttttggcccaagctggccgggaactgaggtctggggtgggtgctggagacaccacagcacgcagctccccactccacaggaaccattgggcccactggggctgcactccttggggagcaggagaagcagaaaaattcagacccagccagccctctgcacccaggtgccaattcctgttccggacgcttccacgcacagggccctgtcccccgtggtgtccccaggggtgcctggcagcctctgaggcacagacccagagtgcacaggcccaggaaccacggtgggtgtgggggctctgccatgctcaggattcccatgcaaacgctgcgtgccctgccgcattccagtatgaccaagagtgggtcgccctctggagtgtggagtcagggagaggagaaccactccttccttggatgccaactctgttgaccgccaccagcagtgcagcctgatagcaccgaactcgtcccccactccacggctagtcctgccctcaatagcaccccccacctctgtcccccaatgccgccagtagcgtatacccgatagtgccctaacctgttctcctccatgggcattgcagccccagaaagcacccataacccaccttccctgccgtgggcagtgcagccctgtacagtgctaccaactagtacccctaatgcaggcaatgacaccctggatagcgcccccaacccaccccacactgcgaaaggtgcagccctggatagcccctgtcctaccactctggtcatgctgcagtctctgtcaccgccaccaccaaccacagtgaggcaagccagtgggccgcagactctagcacccagcagccaggcatggagcagctctcgctgatggccggctcctaccactctgaccacgctgctgtctgtctctgtggccatcttctttcactacaaaggaataaaaataggtatcaataagaaaagtaattttggaaataatacaatcacatggaagttaaacactaccctcctgaataaatgactagcgggtcaatgaagatactaagacagaaattcaaaaatttcatgaaacaaagggtaatgaacacacagtataccaaaacttgttatgcagaaagcagtacaaaggcagagatttacagctataagtgcctaccatccaaacaaaagaaaaacttcaagtaaacaatacatcttaaagaactagtaaagaacaaactaaaccgaaaataagaaaataaataagatcgtagcagaaacaaaattgaaataaaaacctcacaagattaaacgaaaagttggttttctggaaagctaaacaaaattgacaaacttttaaccaggctaagtaaagagacaagattc

SEQ ID NO: 1087 - DNA, 3838 bp, Homo sapiens
gatgaagtggtagagctggttcctgctcgccgcggtgccgcgcgcgccggccggccgctgggcgctccgcgctcccagcctcgagttgtgcaatcctttgtagcacgccagagtcctcctcctccgctgttgcctctcgccctctctcttttttttttttcaagctgtgagctcaaccgatgagtcagagccgtgcaatcctgacactgcatcgcaggactgggggtgacacggagggaggcagagcgctcgcgaggcggacggcacgggtgctgggcgcgccgaggctcctgcatcgcaagcggggggtgacagcccgcgcgtcccgcccgggccctgccagcaaacttctcagcctcgggaggcgcgggctggcggaagccccgcgagcgccgcggggaggcgacggcgcctgtttgtttttaaaatcgggagtgcgtgcaggcggctggagtcccggaggcgaccgaaggcggcgacccgcggcggaagggggacagccgagcccggagcccggagcccgggcaagagctgggtgccagaaccctgtggagcatcatgaactgggaagagtagctgagccccagagcctctctggaagagaaaggaagagccagcagttctttctcccagtgtccgacctcactgtccagcgtcttcctctgcccctgctctgccctccctggctcctggactagagcccggcttccagcaggacgtttccccaggggatgggcgactgttgaaggggatctcaccgccagggctcagttggccacatcatgaacctccaggcccagcccaaggctcagaacaagcggaagcgttgcctcttcgggggccaggaaccagctcccaaggagcagccccctcccctgcagcccccccagcagtccatcagagtgaaggaggagcagtacctcgggcacgagggtccaggaggggcagtctccacctctcagcctgtggaactgccccctcctagcagcctggccctgctgaactctgtggtgtatgggcctgagcggacctcagcagccatgctgtcccagcaggtggcctcagtaaagtggcccaactctgtgatggctccagggcggggcccggagcgtggaggaggtgggggtgtcagtgacagcagctggcagcagcagccaggccagcctccaccccattcaacatggaactgccacagtctgtccctctacagtgcaaccaaggggagcccgcatcctggagtgggagtcccgacttactataaccaccctgaggcactgaagcgggagaaagcggggggcccacagctggaccgctatgtgcgaccaatgatgccacagaaggtgcagctggaggtagggcggccccaggcacccctgaattctttccacgcagccaagaaacccccaaaccagtcactgcccctgcaacccttccagctggcattcggccaccaggtgaaccggcaggtcttccggcagggcccaccgcccccaaacccggtggctgccttccctccacagaagcagcagcagcagcagcaaccacagcagcagcagcagcagcagcaggcagccctaccccagatgccgctctttgagaacttctattccatgccgcagcaaccctcgcagcaaccccaggactttggcctgcagccagctgggccactgggacagtcccacctggctcaccacagcatggcaccctaccccttcccccccaacccagatatgaacccagaactgcgcaaggcccttctgcaggactcagccccgcagccagcgctacctcaggtccagatccccttcccccgccgctcccgccgcctctctaaggagggtatcctgcctcccagcgccctggatggggctggcacccagcctgggcaggaggccactggcaacctgttcctacatcactggcccctgcagcagccgccacctggctccctggggcagccccatcctgaagctctgggattcccgctggagctgagggagtcgcagctactgcctgatggggagagactagcacccaatggccgggagcgagaggctcctgccatgggcagcgaggagggcatgagggcagtgagcacaggggactgtgggcaggtgctacggggcggagtgatccagagcacgcgacggaggcgccgggcatcccaggaggccaatttgctgaccctggcccagaaggctgtggagctggcctcactgcagaatgcaaaggatggcagtggttctgaagagaagcggaaaagtgtattggcctcaactaccaagtgtggggtggagttttctgagccttccttagccaccaagcgagcacgagaagacagtgggatggtacccctcatcatcccagtgtctgtgcctgtgcgaactgtggacccaactgaggcagcccaggctggaggtcttgatgaggacgggaagggtcctgaacagaaccctgctgagcacaagccatcagtcatcgtcacccgcaggcggtccacccgaatccccgggacagatgctcaagctcaggcggaggacatgaatgtcaagttggagggggagccttccgtgcggaaaccaaagcagcggcccaggcccgagcccctcatcatccccaccaaggcgggcactttcatcgcccctcccgtctactccaacatcaccccataccagagccacctgcgctctcccgtgcgcctagctgaccacccctctgagcggagctttgagctacctccctacacgccgccccccatcctcagccctgtgcgggaaggctctggcctctacttcaatgccatcatatcaaccagcaccatccctgcccctcctcccatcacgcctaagagtgcccatcgcacgctgctccggactaacagtgctgaagtaaccccgcctgtcctctctgtgatgggggaggccaccccagtgagcatcgagccacggatcaacgtgggctcccggttccaggcagaaatccccttgatgagggaccgtgccctggcagctgcagatccccacaaggctgacttggtgtggcagccatgggaggacctagagagcagccgggagaagcagaggcaagtggaagacctgctgacagccgcctgctccagcattttccctggtgctggcaccaaccaggagctggccctgcactgtctgcacgaatccagaggagacatcctggaaacgctgaataagctgctgctgaagaagcccctgcggccccacaaccatccgctggcaacttatcactacacaggctctgaccagtggaagatggccgagaggaagctgttcaacaaaggcattgccatctacaagaaggatttcttcctggtgcagaagctgatccagaccaagaccgtggcccagtgcgtggagttctactacacctacaagaagcaggtgaaaatcggccgcaatgggactctaacctttggggatgtggatacgagcgatgagaagtcggcccaggaagaggttgaagtggatattaagacttcccaaaagttcccaagggtgcctcttcccagaagagagtccccaagtgaagagaggctggagcccaagagggaggtgaaggagcccaggaaggagggggaggaggaggtgccagagatccaagagaaggaggagcaggaagaggggcgagagcgcagcaggcgggcagcggcagtcaaagccacgcagacactacaggccaatgagtcggccagtgacatcctcatcctccggagccacgagtccaacgcccctgggtctgccggtggccaggcctcggagaagccaagggaagggacagggaagtcacgaagggcactacctttttc

SEQ ID NO: 1088 - DNA, 3828 bp, Homo sapiens
ttttttttttttttttacttcacttgtttctttttatttggtgttggatccaggacaagggcagtggggaatcgaagcaggggcttccctagcttcatatcccccaggcccctgcgtctctggaatgtaccaacaaggggcaggggtttcagggggctcagcctcttcatggggcaggcctcagtcctgggtttgtcacagtctggccttgaatttgcctttggccttgaccttccgacaggtgctaggaattgttccgacttcaaagggcagaggcaacaaggcacttccagctgggggcctcggaggcacaggagagcaggagcctcggtgtgaaaggaggggagaagagggagatgatcagaagtctgtggaggaaggggcttctgagggagaccagctcttcccttggggtgccagccagcctgggagctgccctctgcctgtgccctccagccctgaccccgtgctcagcactgtccactgggtgtgagtcacaggtcgaggcccacctttcttggcttcaggatgctgggtgccaccttgaaatcaaggttcggtgggagggaaatgaagaccttagccgtgggtagagtcctcaaggccttgcctgtggtcgacagggccttagtgcccaccagcttgctgtgctgtcgtctgaggacctggccctggtgtcggagtacatggggagaaggcagctgggccttggtgtggaggctggggaagtggtgacgggctgggtctgcatcccagctgtgccccttctgagctgtgcaaccttgggcaacttccttaaacttcctgatacctcggcttccccagagcctcgctgggtcagcagagggactgctgggcggacccccatccgccgatgacacatcgccatgggcttcttgatggtgaagccctctaccaggagccggatgcccacatattgaggcacctccacagcaggctgcttatagatgagctcaaaggctcctgtgtcacagttgcggtccagcctccggtcaatgaccacgcgcagggtgtcagcttgcacgccagcacagagccgggcagtgactgctgtggagggtgccatcgtggggctggcgttgatctcaatcagccagggctggaagtcctccccgaacacgaagtcagcgccatagagctcaaagctggccttccgacactgcacggtgtcctgggaggtctgaagtgcgtggatcacagcatccttcatgccaggcacgatgatggtggaccaagcatttggggcacccatctcctgcaggtgggcctggaacctctggctagaccacatgttgtctggcggaagcagtggatgccgatggcatgagttctccaggtgcttctggatggagttgttgcacaggtgcactgagttgtccaggttcttcagggagaagggttgccgtccttcatcaccacggggttgccgttcaccagcttcagcatctcctccaggtggtccatgcacatgatgcctcgtccacgggacttggctcctggcttcacgatccagatgttgcgatccccttccatgtctatctggggtaccacggcctgcagctgctgcaggatgtcctcacagcgctggacctgagtgtcgaggtgcctgagttctgccccttcgtggaccacttggtagtagcgctggaggaagagggaccagccctcgggggtgaggtacagcggggcctccaggtccttgtcgatgtccatgtgggccaagttgctaaggtactcctcgcacgcacacagagcttcatccacaaactctggggacaccaacactgggtttttctcctgtttcttgggctgcttgtctcctgcacatagggaggggcctgtcacgatcccatatcaaggcaggtaacctgacgcatgccacagcccccattgtcctaaggcctgtcacttacctgaggcccagcacgaacctagatagatcccctactgccctgggatgtgtcacttagctgaggctttgctctaaattcactgcaactctagcacttgcccttggctcccactgtcccaggacctgtcactcgaggctctgccctaaatgtccccaaggcctctgacagcacctatagcctctctgcccctgggacctctaacacacctgaggctctgcctaaaatgcacctgggagtcttggcctatgtgaacccagttatacatgaacgcccctcccccaagtctgacacagcttcttaagtccacacaccagaaatccagacccactcccagaatcctgatacagagctacaacccttagcccacagaaacactaacttctgtgtgcactgttaccgcacaaggccctgacacacctgaaagtgattacagaaactgacccttcagaagaccccgtgcacatctacagacctgactcacccctgaacatcgcagtgctctgaagattctgatatacaactgaggccctcaaacccctgcagcctgacctataccataaaagcttaagcatggggtctctggccacacccgaggcccttgtgccccttatcctggcacacaaccaagccttccttgtgcatgacacacacaagagacagcaatgggggagtctctctggaagaggcagggattttcctccttcctggagagctgcctctgcttccctgaatccctcgctgatgggtccctggattacaggactaggagcctggagacacgagctaaatccagaagggaaagggcaggcagtggttgggttggcatgcatgatagtgagggttcctctgtgtcccctccactccaagctgttccttatgttcaggcctaagctgttctcaggccatgtgtaaagcccagtttcactgcttcctcctcctcagagacctgaactcctcacaggcagggacggaccatgtcttcttagtctgccctctccagggtgctcggctacatgccaggcccatgggagggctgaatgaggagtggatcaactaacaaacggatgggaagacaagtgtctaggtacctgggacagaagaatggatgagtggatggcctgaagaacagataggtagtagatgggagaatggaatagcaggtagatagatgggtaggtggatctgtggaaggataggtaggcagggagtggatagatggatggggagtatggagctgacatcaggtagatgaatgaagagattaacaatgggtgacaggtgggaggatggaaggatgagtggaagggtgggtgggtgaatcggtagatcagagagtgggtgaatacgtgggtggatgagtggatggatggctggtggatggatggatagatgggtagatgtgaatcatacacagatgtgtggatgaaccagtaggtgcgtggatgaatagataggtagaagggcagataggtggaagggcggatgggtggaggataaatgggtgggagagtggaggtaaccacagtacttacctgaggccttttcctctactgcctgaatagggtatgacttccactcagacttcaccaccagcttgagaacgttgcgggcagcagtcagccagaagtcctctgctcccaggccaggggataccctgctcagcccctaggcttgaggcctgttctggttccagaacctgatcatgacttgccccattttggatccagaacctgactctaccttttctgactctagagcctgagtttagaacttgctcctgtttcaggctggtcacggtggctgacgcctgtaatcccagcactttgggaggctgaggtgagagtatcgcttaaagccaggagtttgagaccagcctgagctacaaagcaagacc

SEQ ID NO: 1089 - DNA, 697 bp, Homo sapiens
taccacccacacaaccatacctggggcctgtccggaggcctctgtgccagattccctgtaccgtgttatacctgggcccctgtgcgacattctaccattttaaagaccaagagaggcttcggttgaccaaatctttccatgtaaggagtcctcagggaaaacaaattctgaaccatgaagtcaggttgggagcccctagtggcctgggacccagccaagcccagaacccagactgggggaaaatgtgggtggatcccccgcagcaccacacacagaacctcagcctatcacagctccaatgggccttaagcgtctcctccagaggtggctttcaaagtgggaaggagagagggcagttccttctgtttccagagagccacccctccatgtccaggacccaccccacactcagcctgctgacccgctccagcggtgtccaccgtgcctgcaccttagcaccccctgagcggcttttacaacaggtccatgcccaggctccacgtgggccatcagaatcagaactcttggtctttaaaatgctagaatgttgcacccatggacctgggtgtgacctgggcatcagtatttttcaagagctcctcaggtgcttttacgcagcaggccagtctatgaacacttgatctcatccaaccaactcacctgtttaacagatggcggtactgttgtttatttgaac

SEQ ID NO: 1090 - DNA, 4072 bp, Homo sapiens
taacaaaggcaattcgttctgtaaaaatactctagattctttctgaggactgggcactacactgctcatagtgggcacctaaagtcagcattcagccaactcagcgggctttaagatggagactcttaaacctcctgcatcaaaaagacataagggaatgtccctgagaagagcctgtgtctcctttgaagagagagagagagattgattctgcctccttgcaattcgaaccggcattttccagaacactccaatttgaatcacagtggagggtcatgggagggatttggcacaggggagtcttgggtctttggttttccacattgatcaatgggattgattttttctgtttttgtttttgttttaaaagaagagaattagttcctttttctgtctccaggattgaaaacatgaaggcaaagaagagaaactcacaatatgtcattaactttgggttatcaatattagtggaaagaatcaatggtgcaaagaatcctaaaggactagataatccgcatattcgacttcctgattatgtgttactgacactaacatttcggagtgtggagaccctgccccatctggggagagggagagacaaagaccccctgcttctggtacttgattcacacataatgccctccatttactgctttcaagaaataacctgtttctaatcttaaatttcaatctactgatcacaaaatcatagagatcttagccttgaaagagacttcatgagaccatgtgaccaactttctgacgcaggattagaacatccgacattaaaatgtctcagtgcagcagaatttcccagcgacttcggtggcgggagagcagcacctctcaggcacagctgtgcgcatccctcgggccccaccgaccgcaccatctgaccgcgggaaacgaaatctgagctcaggaatttgaactgccccacgcacgttcgttcccggataaatctcctagaggaccgtgatttttccacttagagattatttagggagatgtcctggatgggacaggtagacaaatggcggcccgaggaaaatgcaggaaactccacattgtagacgcttaagcaccaactgtctgggccccggggcagggaacgggagacattatccaccggaaacatcacacccccggggctcctggcattttctacatcagtgaatgtgccagcgaagaagagtgtggggaaattttctgaacatagaattcatattcctgaaacgttaagtcgtgaagtgggtgcttcagctgtcccccagctttaggattttaacccagctttggttttgatcaccgagagttattccttataatcaaatcagcaaaagcgttcaattacctattactggttgagaaagattccgttcccccagctcattgtatcggttcttggacccaagatgttaattatcggccaggcattcacagggggttaatatggcccccctcgacaccttgcctcgtaccagagacaccaaaagctgccgctgagggataatagagaatgggaaaagctggtcatgaaaaacctcttttattcttacttgcaagctacccttttgacattctttttttaacactaaatggagattactgaattgataacttttgggttttctctgtcacactggggttttttttcccccgtttgtttgtaaggtttttttggttttggttttggttttggggggaggggaagggggaagtggatagggagatggaagagtgttctgttactggttttatcaaatcctgttaggtcttgttcttcagtgtaatgtagaatggagaagttgcataagtacatgattgacaaacaaggtctcttagaagagagttaaggagtaggaaatataatgtgtcctggagaaaaagaaagagaaaacccttagtatgacacactggcctttaaatagaggacacatgaatatgcaaaggagaggcacgtgtgaaataaggtgtgccttgctgagccctcccgcccccaccccccatgtatcaagaactttacttacattatctcatctaattctacccacaacccaagaggaagggcgatacttttaattcgggtttttacagacgagaaatttgtatctcagaggcccaaagtaaattgcctgagggcatatagctacttaggacagaattagaattgattaaagagtcaaaaattctttgagaattaatgttttaaactctcgattagttaccaagggaatctgagaaattaattaacttttggggggatctttagattagtggggaaattatgttaagcccaaagaaagacaagcccgtgaattttcttgttatctatgaagtggtttggtgaaaggtgtgacaatttgagaaaactgaaaagtgctgaaattcctttaataaggttctgtttaaactgatagagctaccagatataattaggcagatatccattttcttctggaagcttctattatttgagaagaaaactgaaaagctttagactgtttcaaattaaggacaatttgaattttagttggaaagcggataaactatctgtatgattgagtttaaaaggcatggaaagactattacgaagtattgatcccactcagtgagagcaagcacagctttcaaatgatacagatctggctatgaatttgaatggtgactgtgcctagctgtgtgaccaagggcaactttcttaacctctctgggcctctgagtcctcgtctttaaaatgagacaaataagcccttgcaagacgcttgtgatgataaaataaaagagtatgggtgaaagtccttaacagaatgcctgatatgtagcagatactcaacagagttagcaatgtttcatttaattaaagcatttgagagcaggatagggagcaccactaacttcagctcttcaacaattttgcctggggctggctctggggaatagacttggattctcacgagtatgtgaatcttcagttacttccttgaaaggacagacagttataaaagcaagcagtgaagtctgggaaggtggaggagaatggttatggaaagttatccccacatcataagtcttcctgatcttgagatcaaacaacaacactttcagaaacagcaagaaattaaggctgaagcaaaataccccctgtataatttttaagtcagttaataatgaaggtgtaaataaaacagaaatgtctctgttcttacttaaatcttgaacaaataagggatttttttctttagtgttttttaatagtttaatcattttttaagacacaatttttgcctagttactgtttactaactgccctgccaaaaattagttattacttcaggacttatgtttgaatagaactgcgaaatcctgctttaaaaagtactatgaaacaattcatcaaaatgttttcctctgatattttttaccaggtaaaggcaagattacttctggagattttctttgaaaataatgatttttttttcctgattatgaaagtaatacacgttcattatggacaatttagtataaaatgagagaacaagctataaaggagcaaacgagaacacccttattctcaccagtaagagttaaccacttttaatattttgatgatttctttcagtctttttaccctttatttttttagccttggtacgaacctatggagtataaaattgtgcattcttgtttttatatttattttctcccatgtaactaaaaaggatctgtaacatttttagtgactgtctaattttatatcataccaatatgatatattagtatcattttttaagaaacaatagagaattctctattgttgagtgtctgtgagtcccagtttttgctattgtaaattatgctaaacaaaaatctgtgtgcataaatctctgagtttaagattatttcattaagatagacttctataacaagaattactaggttcatataatacttctaatgcttttgaaatatattgtcgtattgattttagcagttttcagtccaagcagcaatagatgaagagagctgttctctcctaatgcctctagtcatagtgactgataccacagcc

SEQ ID NO: 1091 - DNA, 2914 bp, Homo sapiens
ggcctctttaatgaatggatctgtgattctgacttcgactgcgcccccatctccctctttgcgcctgtgtccagggagcagggatggggctgcgggagggctcgggcctacgcccccacctgccggctgcctggatgctgtcggactgggggaagtggaggcaggcggtgcaaggagaagctgaggcggggcagggacctgcgctgtcgaggaggagctgggtctggctcttgcatcttgccctgtccccagcccctgtaccccagaaaaaggggagccctctgcctctggacccctgccttggccctagttcatggctcctctctgttggactgggatggccgaggctatagcccaggcggggccccggggacccagggtcactcccagccacacccccacttctcactccgccccacacactccttccccagagacccatgctgcccccatctcacgctggcctcgcccggcctccaccacctgaacccatctctgtcccttcttgcctaatctctctctgtgtctccctctctgtctgtctctgtcccgggctctgcatctctctccacctctcccttggcctccctgtctctccccaacacccctctctgccttactgtctttgggagcccaaaccctacccctagcttgggttccccttgacccccccggggtcccagccagctgggagggcagccctgcccctcgggctccgaaaccctgggcccggtgcctgactctgcaccccccgcctgccctaggttaccacggcagcagctacagccccgaaggggtggagcccgtcagccctgtgagctcacccagtctgacccacgacaaggggctccccaagcacctggaagagctcgacaagagccacctggagggggagctgcggcccaagcagccaggccccgtgaagcttggcggggaggccgcccacctcccacacctgcggccgctgcctgagagccagccctcgtccagcccgctgctccagaccgccccaggggtcaaaggtcaccagcgggtggtcaccctggcccagcacatcagtgtaactacgcgttctctgctgctgcttgtcacctttgcacctgggggcaccaggcctggagaggggatggggaaccccacagcccttctgtcctggcggggtggctgggggatccagggcatggcgctggggggatccagggcgtgggtgagggtgagatcccaaagccccgagcaccggcaccatcaccgccccctaatccatgggaggagcctgtgatgcgagccgatggcatcttcacgggcaatgaggccttcctggtggcccaggtttctcagtgtcatgggctggtctcatcagccatctgccaactaccagcttgggaccgctgaccacagccccactcccatgcacactgggacacggaggcccagagggtggcgggcaggtccacagtcacccaggaagctggccccacccaggattctgccccgagctccgtctagcccctccccacccccagaaggttctgtcaggagagtgctgcctgactctgggcccccccacttgcctgcaggaggtcatcacacaggactacacccggcaccacccacagcagctcagcgcacccctgcccgcccccctctactccttccctggggccagctgccccgtcctggacctccgccgcccacccagtgacctctacctcccgcccccggaccatggtgccccggcccgtggctccccccacagcgaagggggcaagaggtctccagagccaaacaagacgtcggtcttgggtggtggtgaggacggtattgaacctgtgtccccaccggagggcatgacggagccagggcactcccggagtgctgtgtacccgctgctgtaccgggatggggaacagacggagcccagcaggatgggctccaagtctccaggcaacaccagccagccgccagccttcttcagcaagctgaccgagagcaactccgccatggtcaagtccaagaagcaagagatcaacaagaagctgaacacccacaaccggaatgagcctgaatacagtaaggggcctgcaggctcccggggaagcatggggccacaggtgggcgggtggcctgcctgggcagctggagccgcccagtggcagaaacccacggtgcaccttcgaaagctaagtggccctgctgaccacctccccccaggccctttgcctcacatttggggagccccagggcagtttcttgatttgctgggctttccataggagcttactggcacagaagaatagcacccagcacatagtaggtgcccagtgaatacctgcatgaatactgggaccaggggttggatccctcccacacaagggccgggcgcctcccacactcagcacctgtgtggctttgcacccattgacgtggttgctgggtatgaacgccccactctgcttcccagtccctagcacagcgcctggcagttagcagatccaccagggaatacgtgagtgggtgggcaaataaagaatctgtcacagtccccgaccccaagaagcctcatctgccagggaagtttggacaaatcacagatgcttttcccttcctggggctggagtagaaaccttgcagatagtcactgacttgccgggcacggtggctcatgcctataggcccagcactttgggaggatgaggcaggaggattgcttgaagccaggagttcgagaccagtctgtgcaacatagcaagaccccatctctacaaaaaactttaaaaacaggcacacacctatagtccaagctactggggaggctgagataggaggatttcttgagcctcggaggtcaaggctgcagtgagctatgatcacaccactgcactccagcctggacaacagagcaagacactgtctt

SEQ ID NO: 1092 - DNA, 3319 bp, Homo sapiens
aaaaaaaaaaaatcgggccaggcacgatggctcatgcatgtaatcccagcactttgggaggccaaggcaggcagatcacaaggtcatgagatcgagaccatcctggccaacatagtgaaacccgtctccaataaaaaaaaaaatacaaaaattagctgggcatggtggtgtgaaccggtagtcccaactactcgggaggctgagacaggagaatctctagaacctgggaggcggaggttgcagtgagctgagattgcaccactgcactcaagactggcaatagagggagactccatctcaaaaaaaaaaaaaaaaatccaatagtagaattcccagaatggaatttatggcattttctatggatcaagcaagttgcaaggcagccagattcaaggggaagggagctattcctcacctcttgagaagcaatgtgtgttgaggaagggaaagaattgatggtagctgtctttgacttctaccatacagagcaaggtctccacactcctttctcctgtaataattttccatttgaaaattttccttgcaattctcacacctttattatttcatataaattttacaatcaatttttttcttgtctagataaccatgccatttagattaaaattgcattacattgcaacttttgagaaactatgggaggagaattggcaaccttataatattgaatttgctcattaaggaacatagtttctctgtttatttaggtattatatttttcatgacatacatgttggtatttctacccaggcttttctctttgttttgtcatgtagcccatgaatgagactgcactgtctgtgtgattgggcagttgcccaaagtttaaggtgttaacatgcattaattcacttaatcactcctcatttcctccttccctcaacccctgacaaccatgaatctgctttctgtctctagatttgcctattctggacattttatataaatgtgtcatccaatatctggtcttttctgactggcttctttcacttagcaggattctacggtttattgaggttcattcattgtgtggcctgtatcagtatttcattcctgtttatggctgaataatgttccactgtatgtacatatgtatgtataccacactttgtatatccatttatttactggaggatatctgggttattgacagtatatttcaggagtccccaagatcatcctcccccttgatctactgctctttgtatcttatatgacctgtgcagaactatttatctggaaattaggtgatggttaactaaatatagttcttctaaagactcattttccgttggtattacatcctgaggagactttaactcaatctcccaatacatttgatcatcaatatcagtattaccacatgacttatttgcatgaggtaatcaaatctaaccagccatgccagtgttacccatattgcatgttgtggtagtagatgcagccccccaaaataaaagtcaaaagatgctggcacattcctgaggttcttctcagccactaacaattggtgtagttcatcatcacctggaatgaccaaaatgtctcccatggaaatgcggctcagctgtgtaggcttccatttaactttgtcaggttccgaggcagggctggcttgagtggtcttgtttccactttggctatgatgaataatgctgctgtgaacattcaggtatacgtttttgtgtggtttcatttcttttaagtatataccttggagtgtaattactggatcatatgataactctgttttaatttttgagaaactaccaaaatgttttccaaaacagacaaggttttacattccctcagcattgaatgaaggttattatccagtttcctgttcttgctgacactccttattgtttgtcttttgaatttagttatctcattggggtgacgtggtgtatcattgtgttttgatttgcatttccctaataatgaatgttattgagcaccttctcacatgcttattggccatttttcatgtttttgaagaaatgtctattcatcttttgcccatttttaaattgcgttgtctttttattgagttgtaagagtggttatatcgtctggaacatgtgttccttatcagatataggacttataagtttttgtcccattctgtggttgtccttattttcttatgtaacctttgtattagtctgttttcatgctgctgataaagacatacctgagactggtcaatttacaaaagaaggaggtttattggactcacagttccatgtggctggggagaccacacaatcatggcgaaagatgaaaggcaaggaggagcaagtcacgtcttacatggatggcagcaggcaaagtgagagcttgtgcagggaaactctcatttttaaaaccatcagatctcgtgagactcattcactatcatgagaacagcacaagaaagacctgcccccataattcagtcaccttccactgggttcctcccacaacacatgagaattctgggagttacaactcaagatgagatttgggtggggacacagccaaaccatgtcaactttgaaacacagaactttttaatgaaattgacctgatctattttttgttttgttgcttgagcttttggtgactgctatggtttgaaatatgttcccacaaaattcatgtttggaatgcttatattcctgttggtgggaatataaaaccgtacatctagtatggaaaacaatacggtgattcctcaagaaattagaaacagaattaccctatgatccagcatttccacttctgggtggaataccaaaataattgaaagcagggtctcaaagagatatctgtacacccgtgttcatagcagcattagacacaatagccaaaagggaaataatctaagcattcattgagggatgaatggaaaaacaaaatctgacatatacatacatacagtggaatattattcagcttccaaaaggaagaaaatgtctatatagcatatagacatatgctataacatggatgcaccttgagtacattatgctaggtgaaataagcctgtcacaaaaacaaatactgcatgattccatttaaatgaggggcctagaatattcaacttcatagacagaaggtagaatggtggttgccagaggctgggaagggggggtaggggttaggttttaataaatatcatttcagttttacaagatgaagagagttttgcagatgggttgtggggatacttgtacaacattatcaatgtatttaataccactgaattgtacacttaaaatggttaagatggtaaattttatgtgtgttttaacac

SEQ ID NO: 1093 - DNA, 4143 bp, Homo sapiens
agcccgcagccggccgcgtcatgccaggcgctgctcggcggtagggagtgcccggggccgccgcctccgcccgcccgaagccgcgcccactgcccagagccagagggatggtggtagtcacggggcgggagccagacagccgtcgtcaggacggtgccatgtccagctctgacgccgaagacgactttctggagccggccacgccgacggccacgcaggcggggcacgcgctgcccctgctgccacaggagagatgtgctgaatttcctgcgctcaggggacctcccacccagggagcgtgttcgagctgtgtacaaagaggcccagtactatgccatcgggcccctcctggagcagctggagaacatgcagccactgaagggcgagaaggtgcgccaagcgtttctgggactcatgccctattacaaagaccacttggagcggattgtggagatcgcccggctgcgtgcggtccagcggaaggcccgctttgccaagctcaagtggttagcaggaagaagatgagccttaagtctgaacgccgaggaattcatgtggatcaatcggatctcctgtgcaagaaaggatgtggttactacggcaaccctgcctggcagggtttctgctccaagtgctggagggaagagtaccacaaagccaggcagaagcagattcaggaggactgggagctggcggagcgggtcttgctctgttgccctggctggagtgcaatggtgcaatttcaacttactgcaacctctgcttcctgggctcaagtgatcctcctgcttcagcctcccaagtggctgggactacagaaactccagcgggaggaagaagaggcctttgccagcagtcagagcagccaaggggcccaatccctcacattctccaagtttgaagaaaagaaaaccaacgagaagacccgcaaggttaccacagtgaagaaattcttcagtgcatcttccagggtcggatcaaagaaggaaattcaggaagcaaaagctcccagtccttccataaaccggcaaaccagcattgaaacggatagagtgtctaaggagttcatagaatttctcaagaccttccacaagacaggccaagaaatctataaacagaccaagctgtttttggaaggaatgcattacaaaagggatctaagcattgaagaacagtcagagtgtgctcaggatttctaccacaatgtggccgaaaggatgcaaactcgtgggaaagagaggagatttcaccatgttggccaggctggtcttgaactcctgacctcaggcgatccacctgcctcagcctcccaaagtgctgggaatacaggagtagagccaccgcacccagctgtgcctccagaaagagtcgagaagataatggatcagattgaaaagtacatcatgactcgtctctataaatatgtattctgtccagaaactactgatgatgagaagaaagatcttgccattcaaaagagaatcagagccctgcgctgggttacgcctcagatgctgtgtgtccctgttaatgacgacatcccagaagtatctgatatggtggtgaaggcgatcacagatatcattgaaatggattccaagcgtgtgcctcgagacaagctggcctgcatcaccaagtgcagcaagcacatcttcaatgccatcaagatcaccaagaatgagccggcgtcagcggatgacttcctccccaccctcatctacattgttttgaagggcaaccccccacgccttcagtctaatatccagtatatcacgcgcttctgcaatccaagccgactgatgactggagaggatggctactatttcaccaatctgtgctgtgctgtggctttcattgagaagctagacgcccagtctttgaatctaagtcaggaggattttgatcgctacatgtctggccagacctctcccaggaagcaagaagctgagagttggtctcctgatgcttgcttaggcgtcaagcaaatgtataagaacttggatctcttgtctcagttgaatgaacgacaagaaaggatcatgaatgaagccaagaaactggaaaaagacctcatagattggacagatggaattgcaagagaagttcaagacatcgttgagaaatacccactggaaattaagcctccgaatcaaccgttagcagctattgactctgaaaacgttgaaaatgataaacttcctccaccactgcaacctcaagtttatgcaggatgatcacaatttagtggagagtatttatttgagcctaaattgtaggtagcccttactacactcaactgattgggatctagaatgtaactaaattgcttataaatgtcagagcattttttaaaggtacagtatatggggattgtttcgtttttcctagcaggggaaccttagttaataataaaatactacttatttgagttactgatacagattcatttaaggcttgtgtgcaaattttgtctcaatctttttttccctccatgattttcctatgtgcttcctctggcattcactgtggttttggtaaataattgccttttaaaggattaaacaaatgaatgctacaaagtgtatgttcaagaaaattaaatggtaccactcttccacagtttggaataattttataattgtaaagatagaaattatattgataagtaaatatgtaaaattgtaaatatgtaaaaaaaagaatggtgtctgctgtgcatggcattttatatgttaattttttagtttaaaatgaagtatattgaatgtttgcctttagcaccattttatttggtttgtcccactaaaatgactcgagaagtgtttagacaaactccccttaagatgtgcactccatctttaagaacgtgttagccttaactttgaggttctatatagtcagagactatgacaccactaagattcagaataaagtttaggccacataaaattgctgtttaatgtagtcgatggaagactttaaactatgcttctagcttatttttccctcattcattcagcaaatctctattgagttcttcagtgagaaggagcaggcactgggcctggaatggaaggcgggaatgaatgggcctctgatggtgagaggtgacggggtccctcagctgtgagatgcaaggggcgccttgcagcctccataatatacatttgactttgcaaacgtctagacatgttttctgaacctttttcaggacatttcaacctcgggactattcatattagtggcctgagaggtgtttgttgtggggccaccctgtgcatggtagaatgttcagcagcattcctgccatccatatccattaggtgccagtagcacccccgctagagctgtgaaaaattctctccagacatagtcagatgtctcctggggccatatcacccctccgttaagaaccactgatgtcttttacaaaccaggagttatcctcctggtggttaatatggtgtaaccaaagaatcttgcactcaatgcacagtgtgatgttaactaaaacgagttaaatatttaggaggcttgacagctacctgcattgtagaaccttttcttatctcagtggaaccttctataacctaaatataccattgatgattcttcttccattcagtgacatccacagattatgcagctatacttgtgaaatcgtgcatgaggccccagggcaccgttctagaacaacgtcacttcacacaggcagctgagaaaggttctcttgcttttccagtatcttcctaaggatggagcccaaaattgcagagcagtaactttggaataaaaccagggtgggtataaaacttcttattcttaaatttacatataagatctattaagcttgacacatctgtgtcatcacgcactgaagacaggaagcagttcactgagtcagctggttcccaagctcgcacagaaggtgataagttactatcaaatgccagtgagaatcttcttatagaataacctgggcccaagtgattttagtacaaaacttgcccttctttggtttaattttctatgtgcttttaggtgtgaatccagatatgcggtcttaattcctttggaaatacacagttcgtttagttactgtacactcttgtttgttcaataaactgcatatcaacttccccc

SEQ ID NO: 1094 - DNA, 5124 bp, Homo sapiens
caatgaaaatattatttttgtacataacacaattcacctcatttcccaaatggtagacaacatcatcattgcttgtggaggaattttacctttgctctctgctgctacatcaccaactggttctaagacggaattggaaaatattgaagtgacacaaggcatgtcagctgagacagcagtaactttcctcagccggctgatggctatggttgatgtacttgtgtttgcaagctctctaaattttagtgagattgaagctgagaaaaacatgtcttctggaggtttaatgcgacagtgcctaagattagtttgttgtgttgctgtgagaaactgtttagaatgtcggcaaagacagagagacaggggaaataaatcttcccatggaagcagtaaacctcaggaagttcctcaaagtgtgactgctacagcagcttcgaagactccattggaaaatgttccaggtaacctttctcctattaaggatccggatagacttcttcaggatgttgatatcaatcgccttcgtgctgttgtctttcgggatgtggatgatagcaaacaagcacagttcttagctctggctgttgtttacttcatttcggttctgatggtttccaagtatcgtgacatattagaaccccagagagagactacaagaactggaagccaaccaggtagaaacatcaggcaagaaataaattcaccaacaagtacagttgtggtcataccatctatccctcatccaagtttgaaccatggattccttgccaagttaattcctgagcagagctttggccactcattttacaaagaaacacctgctgcatttccagacaccataaaagaaaaagaaacaccaactcctggtgaagatattcaggtagaaagttcaattccccatacagattcaggaattggagaggagcaagtggctagcatcctgaatggggcagaattagaaacaagtacaggccctgatgccatgagtgaactcttatccactttgtcatccgaagtgaagaaatcacaagagagcttaactgaaaatcctagtgaaacgttgaagcctgcaacatccatatctagcattagtcaaaccaaaggcatcaatgtgaaggaaatactgaaaagtcttgtggctgctccagttgaaatagcagaatgtggccctgaacctatcccatacccagatccagcattgaagagagaaacacaagctattcttcctatgcagtttcattcctttgacaggagtgttgtggtgcctgtaaagaaaccacctccaggtagtttagctgtaaccactgtgggagccactactgctggaagtgggctgccaacaggcagtacctctaatatatttgctgctactggagctacaccaaaaagtatgattaatacaacaggtgccgtggattcagggtcctcctcctcttcctcctcttctagttttgtgaatggtgctactagcaaaaaccttccagctgtacaaactgttgctccaatgccagaagattcagctgaaaatatgagcatcactgcaaaacttgaaagagcgttagaaaaagttgctcctcttcttcgtgaaatttttgtagactttgccccattcctatctcgtacacttcttggcagtcatggacaagagctattgatagaaggccttgtttgtatgaagtccagcacatctgtggttgagcttgttatgctgctttgttctcaggaatggcaaaactctattcagaagaatgcaggacttgcatttattgagctcatcaatgaaggaagattactgtgccatgctatgaaggaccatatagtccgtgttgcaaatgaagctgagtttattttgaacagacaaagagccgaggatgtacataaacatgcagagtttgagtcacagtgtgcccaatatgctgctgatagaagagaggaagaaaagatgtgtgaccatcttatcagtgctgctaaacatcgagatcatgtaacagcaaatcagctgaaacagaagattctcaatattctcacaaataaacatggtgcttggggagcagtttctcatagccaattgcatgatttctggcgtttggattactgggaagatgatcttcgtcgaaggagacgatttgttcgcaatgcatttggctccactcatgctgaagcattgctgaaagctgcaatagaatatggcacggaagaagatgtagtaaagtcaaagaaaacattcagaagtcaagcaatagtgaaccaaaatgcagagacagaacttatgctggaaggagacgatgatgcagtcagtctgctacaggagaaagaaattgacaaccttgcaggcccagtggttctcagcacccctgcccagctcatcgctcccgtggtggtggccaaggggactctctccatcaccacgacagaaatctacttcgaggtagatgaggatgattctgccttcaagaagatcgacacgaaagttcttgcatacactgagggacttcacggaaaatggatgttcagcgagatacgagctgtattttcaagacgttaccttctacaaaacactgctttggaagtatttatggcaaaccgaacctcagttatgtttaatttccctggtcaagcaacagtaaaaaaagttgtctatagcttgcctcgggttggagtagggaccagctatggtctgccacaagccaggaggatatcattggccactcctcgacagctttataaatcttccaatatgactcagcgctggcaaagaagggaaatttcaaacttcgaatatttgatgttccttaatactattgcaggacggacatataatgatctgaaccaatatccagtgtttccgtgggtgttaaccaactatgaatcagaagagttggacctgactcttccaggaaacttcagggatctatcaaagccaattggtgctttgaaccccaagagagctgtgttttatgcagagcgttatgagacatgggaagatgatcaaagcccaccctaccattataatacccattattcaacagcaacatctactttatcctggcttgttcgaattgaacctttcacaaccttcttcctcaatgcaaatgatggaaaatttgatcatccagatcgaaccttctcatccgttgcaaggtcttggagaactagtcagagagatacttctgatgtaaaggaactaattccagagttctactacctaccagagatgtttgtcaacagtaatggatataatcttggagtcagagaagatgaagtagtggtaaatgatgttgatcttcccccttgggcaaaaaaacctgaagactttgtgcggatcaacaggatggccctagaaagtgaatttgtttcttgccaacttcatcagtggatcgaccttatatttggctataagcagcgaggaccagaagcagttcgtgctctgaatgtttttcactacttgacttatgaaggctctgtgaacctggatagtatcactgatcctgtgctcagggaggccatggaggcacagatacagaactttggacagacgccatctcagttgcttattgagccacatccgcctcggagctctgccatgcacctgtgtttccttccacagagtccgctcatgtttaaagatcagatgcaacaggatgtgataatggtgctgaagtttccttcaaattctccagtaacccatgtggcagccaacactctgccccacttgaccatccccgcagtggtgacagtgacttgcagccgactctttgcagtgaatagatggcacaacaccgtaggcctcagaggagctccaggatactccttggatcaagcccaccatcttcccattgaaatggatccattaatagccaataattcaggtgtaaacaaacggcagatcacagacctcgttgaccagagtatacaaatcaatgcacattgttttgtggtaacagcagataatcgctatattcttatctgtggattctgggataagagcttcagagtttattctacagaaacagggaaattgactcagattgtatttggccattgggatgtggtcacttgcttggccaggtccgagtcatacattggtggggactgctacatcgtgtccggatctcgagatgccaccctgctgctctggtactggagtgggcggcaccatatcataggagacaaccctaacagcagtgactatccggcaccaagagccgtcctcacaggctatgaccatgaagttgtctgtgtttctgtctgtgcagaacttgggcttgttatcagtggtgctaaagagggcccttgccttgtccacaccatcactggagatttgctgagagcccttgaaggaccagaaaactgcttattcccacgcttgatatctgtctccagcgaaggccactgtatcatatactatgaacgagggcgattcagtaatttcagcattaatgggaaacttttggctcaaatggagatcaatgattcaacacgggccattctcctgagcagtgacggccagaacctggtcaccggaggggacaatggggtagtagaggtctggcaggcctgtgacttcaagcaactgtacatttaccctggatgtgatgctggcattagagcaatggacttgtcccatgaccagaggactctgatcactggcatggcttctggtagcattgtagcttttaatatagattttaatcggtggcattatgagcatcagaacagatactgaagataaaggaagaaccaaaagccaagttaaagctgagagcacaagtgctgcatggaaaggcaatatctctggtggaaaaaactcgtctacatcgacctccgtttgtacattccatcacacccagcaatagctgtacattgtagtcagcaaccattttactttgtgtgttttttcacgactgaacaccagctgctatcaagcaagcttatatcatgtaaattatatgaattaggagatgttttggtaattatttcatatattgttatttattgagaaaaggttgtaggatgtgtcacaagagacttttgacaattctgaggaaccttgtgtccagttgttacaaagtttaagctttgaacctaacctgcatcccatttccagcctcttttcaagctgag

SEQ ID NO: 1095 - DNA, 4115 bp, Homo sapiens
ggcgcctgcggcggcgacagcggcagctgcggcgcgaccaggccgggcacctccgagcgcaaggacagcgcgaggtccgcgcagcccagcgcagccatggagccccgcgcggactcactctatgatgtccctgtcggtgcggccgcagcgccgtctgctcagcgcccgggtcaataggagccagtccttcgcaggcgtcctcggcagccacgagcgggggcccagcctctccttcaggagtttcccggtcttcagcccgccggggcccccacggaagccccccgcgctctcccgagtgtccaggatgttttccgtggctcacccagccgccaaggtgccgcagcccgagcggctggacctggtgtacacggcgctgaagcggggcctgacggcctacttggaagtgcaccagcaggagcaagagaaactccaggggcagataagggagtccaagaggaattcccgcttgggcttcctgtatgatctggacaagcaagtcaagtccattgaacgcttcctgcgacgactggagttccatgccagcaagatcgatgagctgtatgaggcatactgtgtccagcggcgtctccgggatggtgcctacaacatggtccgtgcctacaccactgggtccccgggaagccgagaggcccgggacagcctggcagaggccactcgggggcatcgcgagtacacggagagcatgtgtctgctggagagcgagctggaggcacagctgggcgagtttcatctccgaatgaaagggctggctggcttcgccaggctgtgtgtaggcgatcagtatgagatctgcatgaaatatgggcgtcagcgctggaaactacggggccgaattgagggtagtggaaagcaggtgtgggacagtgaagaaaccatctttctccctctactcacggaatttctgtctattaaggtgacagaactgaagggcctggccaaccatgtggttgtgggcagtgtctcctgtgagaccaaggacctgtttgccgccctgccccaggttgtggctgtggatatcaatgaccttggtaccatcaagctcagcctggaagtcacatggagccccttcgacaaggatgaccagccctcagctgcttcttctgtcaacaaggcctccacagtcaccaagcgcttctccacctatagccagagcccaccggacacaccctcacttcgggaacaggctttctataacatgctgcgacggcaggaggagctggagaatgggacagcatggtccctgtcatctgaatcttcagacgactcatccagcccacagctctcaggcactgcccgccactcaccagcccctaggcccctggtgcagcagcccgagccccttcccatccaagttgccttccgcaggcctgagacccccagctctgggcccttggatgaggagggggccgtggccccagtcctggcaaatgggcatgcaccctacagtcggactctgagccacatcagtgaggctagtgtagatgctgccttggctgaggcttcagtggaggccgttggcccagaaagcctagcctggggacctagcccacctacacacccagctcccacccatggagagcaccccagtcctgttcctcctgccctggaccctggccactctgccacaagctctaccctcggtacaacaggctctgtccccacatctacagaccctgccccatctgcacacctagactcagttcataagtccacagactctggcccttcagaactgccaggccccactcacaccactacaggctctacctatagtgccattaccactacccacagtgctccaagccccctcactcacactactacaggctccacccacaagcccataatctctacccttactactacaggccctaccctcaatatcataggcccagtccagactaccacaagccccacccacactatgccaagccctacccataccacagcaagccccactcatacttccacaagccccacccatacccccacaagtcccacccacaaaaccagtatgtcacctcccaccactacaagtcctacccccagtggtatgggcctagtccagactgccacaagtcccacccatcctaccacaagccccacccatcccaccacaagccccatccttataaatgtaagcccttccacttctctagaacttgctaccctctccagcccctccaaacactcagaccccaccctcccaggcactgactcccttccctgtagtcccccagtctccaattcctacactcaggcagaccctatggcccccagaactccccacccaagtcctgcccattccagtaggaaacccctcacaagccctgccccagatccctcagagtctacggttcagagtctaagccccactccctcacccccaacccctgcaccccagcattcagacctttgcctggccatggctgtccagaccccagtcccaacggcagccggagggtctggggacaggagcctggaggaggcactgggggccctaatggctgccctggatgactaccgtggccagtttcctgagctgcagggcctggagcaggaggtgacccgcctagaaagtctgctcatgcagagacaaggtctgactcgcagccgggcctccagtctcagcatcactgtggagcatgccttggagagcttcagcttcctcaatgaagacgaagatgaagacaatgatgttcctggggacaggcctccaagcagcccggaggctggggctgaggacagcatagactcacccagtgcccgccccctcagcacggggtgtccagctctggatgctgccttggtccggcacctgtaccactgcagtcgcctcctgctgaaactgggcacatttgggcccctgcgctgccaggaggcatgggccctggagcggctgctgcgggaagcccgagtactggaggcagtatgcgagttcagcaggcggtgggagatcccggccagctctgcccaggaagtggtgcagttctcggcctctcggcctggcttcctgaccttctgggaccagtgcacagagagactcagctgcttcctctgcccggtggagcgggtgcttctcaccttctgcaaccagtatggtgcccgcctctccctgcgccagccaggcttggctgaggctgtgtgtgtgaagttcctggaggatgccctggggcagaagctgcccagaaggccccagccagggcctggagagcagctcacagtcttccagttctggagttttgtggaaaccttggacagccccaccatggaggcctacgtgactgagaccgctgaggaggtgctactggtgcggaatctgaactcggatgatcaggctgttgtgctgaaggccctgagattggcgcccgaggggcgtctgcgaagggacgggctgcgggccctcagctccctgctcgtccatggcaacaacaaggtcatggctgctgtcagcacccagctccggagcctgtcactgggccctaccttccgggagagggccctcctgtgcttcctggaccagctggaggatgaggacgtgcagactcgagtggctggctgcctggccctaggctgcatcaaggctcccgagggcattgagcccctggtgtacctctgccaaactgacacagaagctgtgagggaagctgcccggcaaagcctacagcagtgtggagaagagggacagtctgcccatcgacggctggaggagtccctggacgccctgccccgcatctttgggcctggcagcatggccagcacagcattctaaactattcacccatgggttcctggtgcccctttccccccactttcagggctcaccaggcactggcagggagggtaagggctggctccagatacccctcccccacagattcctagcaatgaaaatctaatatattcttctgttgcccctggggttggagagtcagtgcctgcagtcaagtgcctcccagcctcggctcagcacatcccttgccacaaatcagtgtctggggcttggccaccctgccgctgcccagccacatcccttggttttgtattttatttacagagttttacagaaaataaaaaagcaaaatgtctttcct

SEQ ID NO: 1096 - DNA, 4340 bp, Homo sapiens
agactgctctagcaggcactcccaatgccagactaatcagctggatgtgtgcagtgagctctatagaggagcaatgcagagcatcagtttacaggtactatggaaagaacatctccttaactctgtatgatgaagcaaataccaatacaatgaaggccacggaaaggtatgatatatttgatccaagacagtccattccagtccgggaatctacagtggtgacaaggacatgggactcctcctgccagattacagatggttcactacagttgacatcctggctgacaactgtgaaaaagaaccttggattattttattttatttttgtgggacaccacaatcccaaatccaaaggacgcatcaggagaaaattcagatccagttaacacaatcatttgagaaagaagagaagccctcaaaagatgaagcagaaaaagaaaaggccagtgataagttgcccagaaaaatgttatcaagagattccagtcaagaatacactgattcaactggcatagatctacatgaatttttagtaaatacattaaaaaacaatcccagggacagaatgatgctgctgaaattggaacaagaaattttagatttcattggtaataatgagtctccacgtaaaaaattccccccaatgacatcttaccataggatgctattacacagagtagccgcttactttggattagaccacaatgttgatcagagtgggaagtctgtcatagtaaacaaaactagcaatacaagaatacctgatcagaaatttaatgaacatattaaggatgataaaggtgaagactttcagaaacgttatatcctcaagagagataactctagctttgacaaagatgataaccagatgagaatacgtttgaaagatgacagaagaagcaaatctatagaagaaagagaagaagagtaccagagagccagagaccgaatattttcccaagattccctgtgttcccaagagaattacattattgacaaaagactccaagacgaggatgccagtagtacccagcagaggcgccagatatttagagttaataaagatgcttcagggagatctacaaatagccatcaaagcagcactgagaatgagttgaagtactcggaaccacgaccctggagcagcacagattcagacagctctcttcgaaacctgaaacctgctgtaaccaaagccagcagcttcagtggaatctcagtcctgacaagaggtgatagttctggaagcagcaaaagcataggcaggctttcaaaaacaggttctgagtcttctggtagtgtagggtcatctacaggctctctttctcacatccagcagcctcttccaggtacagctctcagccagtcttctcatggcgcacctgtcgtctatccaactgtcagcactcatagttctctttcctttgatggtggcctaaatgggcaagtcgcatctcctagcactagcttctttttgcttcccttggaagcggcaggcataccacctggcagtattctgatcaacccacaaacaggtcagcccttcataaacccagatgggagtccagttgtgtataatcctcctatgactcaacaaccagttagatcccaagtgcctggacctccacagccacctctgccagccccacctcaacaaccagcagctaatcacattttctcacagcaggataacctagggtctcagtttagccacatgagtcttgctcgccagccatctgctgatggttctgaccctcatgccgccatgttccagtccactgtggttcttcagtctccacagcagtctggttatatcatgacagcagcccctccaccacatcctcctccaccgccaccaccaccacctcctcctcctcccctaccacctgggcagccagtccctactgctggatatcctgcctctggtcatcctgtcagccagcctgtgctccagcagccgggatatattcagcagccatcaccacagatgccagcctgttattgcgctccaggccactatcactccagccaacctcagtatcgcccagtcccttctgttcattacaattcacatctaaaccaaccactgccacaacctgcgcagcagacaggttatcaagttatacccaaccagcagcaaaactaccaaggaatagttggagttcagcaaccccagagtcagagcctagtcagtggccaacccaacagcattggaaatcagattcaaggagtggtcatcccctatacttcagtgccaacatatcaggtttcactgcctcaaggttctcaaggaattccccatcagacttatcaacagcctgttatgttccctaatcagtctaatcaaggatctatgcccacaacaggaatgcctgtttactatagtgtcattccacctggtcaacaaaacaatttaagctcttcagtaggttacctgcaacatccaggatcagaacaagtacaatttcctcgaaccacttcaccatgcagttcccagcagcttcaaggccaccaatgtacagctggaccaccaccgccacctggtggggggatggtgatgatgcagctcagtgtaccaaacaatccacaatcttgtgcccactcacccccgcagtggaaacaaaacaaatattactgtgatcaccagagaggacagaagtgtgtagaatttagcagtgtagacaatattgtccagcacagccctcaactcagtagccccattatttcaccagctcagtcgccagcaccagctcagctgtccaccctgaaaactgtacgtccctctggaccaccactttccatcatgccccaattttctagaccttttgtccccgggcaaggagattccaggtatccattacttggccagccactgcagtacaatcctcctgctgttctgcacggacacattccaaaccaacagggtcagcctggcagcaggcatggaaaccgaggaaggagacaagctaaaaaagctgcatccacagaccttggagcaggagaaacagttgttgggaaggtcttggaaattactgaactaccagatggaataactcgcatggaagctgaaaagctttttggggaactctttaaaattggcgccaagatccggtggctccgggacccccagtcccaaccacgtcgtcaccccctctgctgtggcagtggggacaacactgccaaccctgaacgctctaaacccagtgacttggcctccacctacaccgtcttagccacattcccctccatttcagctgcacagaatgcactgaagaaacaaattaactcagttaacaagtttaagctgagaacaagcaagaagcactatgactttcacattttggaaagggcaagttctcagtaacagccacctttggacccttcgcctttatggttcccctgccctctcccatctttgattggcttggtatttggagcttctgttaacattatagagactcctaggatgtgtgttcatggcattatagcttttgaagaaaggccagtgatccagcaaagggggaaaaatatgcatttcaccccacatgactaggaatccacatcagaatgatacagagttagcaggtttttctaaggaaatgccattcaaatgcctcctaacttttatagttattttgttttatatttctaaattcttgtatcagatccaaagctctattgtacagcaaattattcttcaaaatgattataaccagttgcaccctgtatttctttttgcagccagcacaatgtgacccaacttaaaatttgggggaaaaagaatgcaggagtgaaataaccaagtcaaaaccatgtactatctccttgggggttagggatgctaagaagagcccacaaatagaggattactcttcccctgaatctctaaactcagaaacaattaccaaaaaatacataactcttccttgtagggccctttccttattcatttaggtagtgtgaacattaagtataaaataaattatgttcttaatgcctcttaaaccacttacattcaaaggggaacagaaatcattctaagcaggaaaatacttccactttttttttttcaagtatctctctaataactaaatgccacttatttgcattctccttgtggattttttgtcacctaaggaaatgcatttgatgagtgctggaaacttcttaagtgctttacagtttgttttcattgtttgcagcggatcactggacatcaaagattcattgcacttatgaacaaggaaccttcttttcaatttctgtgtaatttgcaaggctgtacaatgtgtgctgatgcaagcctttttcagttcaagagaataaatgtttacaaatat

SEQ ID NO: 1097 - DNA, 3217 bp, Homo sapiens
ttttgcttcgtctttgggcccatacaccatccctgccacagtgtgtgtgtaacatagtcattttgccttaaccatgaagcttgttttgttttgttttgttttgttttgtgttttgagacagggtctcactctgtcacccaggctggagtgtagtggcatgatcacagctcaccacagccttgacctcctgggctcaggtgatactcccacctcagcctcccaagtagctgggactgcagtcacctgctaccacacccagctaatttttgtattttttgtagagacggggttcaccacattgcccgggctggttgcagactcctgggctcaaaccatctgcctggcttggcctcccagggtgctaggattgcaggcatgagccactgtgcctggcccataaagcattatactttgtacctatactaaaaggcatctgagatactttcagcatgtttgtccagtgtttccttttcatttataatgatttagtatgagctagctgcctacatgtaatattaaccacaacttaaaaaaatttccaacaatcaagggctctgcgttttcatattggatttttaaatacttccaatcacagcatcattacaaccacttgatttggttaaatatacatgttgaagtgtgcaatgttatgtatttgaggggcctttctaaagatcagttggagccaggcatggtggtatgtgcctgtagtcctaattactgggaaggctgaagtgggtagattgcttgaccccaggagttaaaggctgcggtgagctatgactgtgccactgtactccactgtggacaacacagcaagaccccatctcttaaaaaaaaaaaaaaaagaaagtaaagatcagtttgtgtgttctaaatctcctgttttgctatcatcagtccttaagatactaggtaatgttggcttttcaacctacagcttttgttttcatgtcctaaaattttttgataaaagtctgtattttatgtcttaggagccgtccttccatggagcttgttctctggaaacccctccctgaactcctttctgataagccaaagccatcctctaatactaagaactatacaggagagagccaagctaagcatgtagctgctggcactgccttccctcagagaactgaactgttttcggaacctcggccaacagggatgtctctttataatagtttggagacagctactagcacagaagaagagatggaactctagaaaccaatttctacactaaagttgtcaaatgttagaagaatcctgtgttcagttatgagactctttgcatagtatagggacttgaaagttttatgagacgggtgtaataatatctccacctgtgatttgggggtgggactcttattttgggtagccatttattgacttcacctttttgccaaggaagtttgtctcaagggaaaagcagttttctgtggggcttattaaaggaatgttggtttacattgtcttcaaagacaagtatagaagctgtatgtgtaagggtgacttaaatcatatgtcacattgtctaaactattcagacacttggagaatattctccttgaattaaaaaagatgattaagaaggatgctcctacaactgtatcctgacagttaagtcacagcttaatgtgtagatatgagctgtttacagtggtgactatatataattggggagaagaagggaagagagcagcagtagcttaagcctgttgctaagaaatttaatttcttagcaacttgtaatttagttatcaattcaatatagctctgttgattaaatagccgatagtattgtggctctcctctttgactatgaaaatatagagaaagttttttctttaaggcttttttgccttgtgccactgttgctccttggtttcccttgcgtaattgataagcccagttattcagtaatgtttacaaattaattgactttgatagttaaaagattatgaggtaacccatctgcaatttgcctgtgggagaagcatcctttagttcatcttaaggaagtgctttatcagctaaacccagcattgataactttggtaatttttttaaaaagttatacttgtattagcaagttttttttttttttcccccaccgcaacctccatctcccgggttcaagcaattctcctgcctcaccctcccaagtagctgggattacaggtgcccacctccacgcccagctaatttttgtatttttaatagagaccggttttgccatgttggccaggctggtctcgaactcctgacctcaggtgatctgcccaccccagcctcccaaaatgctgggattacaggcgtgagccacggcacgcagccagcaagttgtttttaaatgttaatatagaaaacagtgaaggattagctgaaaatatatgagcaggtgacattgaggtttactgaaatagccaatttgactggtgcttagactattgtgcagtaaacctaaaaggtagtggagaattgcttcctgctagcaggaagccttcatcttcttgagtacccaaaccaggcttcaggtgtcctttgaggatagccaggtttgaaatttttagtttctcaggaagagctcttctatgtggcaggggctgatagggcaaaataaaatgacaatttctttattgctacagagtatcctctataagttattaaacgagtgtaatggtataatgcccttccatcacacaacaggacaccaccccagttttgttttctgggtttcttccccctttgtaggaatcagataccttttgtagaaaaaaatggcttatgccacgtaaaggtgaatttttagaaaccaccttctaggcgtttttggaacccttactgaaatccctccccttgttacagatggcgtagaagtcacaagtctgttaattggactgttgcttctttgcctgttcctgctttctctttctgtctggatagtcaggaaaagatttaatgtttaatatttaaacaaaatatttaatgtctatacagtaaaattattcaaacttcaaaccagtattgaaagcagttggaaaccagctaatagtttcttaatctcagatttcgagatgaatgtaaactgtattcttttgaaatgtgcaagtgtttgattcatgccatttgataaacttctgccttgtagtcattgtttgatgggaccaacttgtaaagtatgagccttaaataaatctccatgctg

SEQ ID NO: 1098 - DNA, 3877 bp, Homo sapiens
ctatcacaagaacagcacggggaagaccggcccccatgattcaattacctcccctgccgggtcccttcccacaacacgtgggaagtctgggaggtacaactcaagttgagatttgggtgggggcacaactaaatcatatcaccagccttacctccgaccacttcattcctcacactacagtccagtcacaccaaattgtgatgattccttcaatgcaccatgccctttattgcattctgcctttgcacagtctctttcctctaccccaagtgacccttcttctttccagagggattcctcttcagcctaaatggcttagctcaagactcatcaatcagaatgctctctatagacctcctcaatccctttgaagttactttctcccttcccattgcccctgcagtattctatgcagcttctcacatcataatatctccatctgtgagccctttgaaagcagggggagtgtcctacttatgggcttagtatccccagcatctattaccatgcctggcacttgtttggtgcacattaaaaatgtatgaatgggccaggcacagtgactcacgcctgtaatcccatcactttgggaggccgaggcaggcagatcacaaggtcaggagttcgagcccaacctggccaacatggtgacaccctgtctctactaaaaatacaaaaattagccaggtgtggcggcgggcacctgtaatcccagctacttgggaggctgaggcaggagaattgcttgaacccaggaggcggaggttgcagtgagccaagatcgcgccactgcactccagcctgggtgacagagcaagactctgtctcaaaaaaaaaaaaaaaaagaaaaaaaatgtatgaatgaaagccaaattatttttttgttttttcttcctgcagaaacgatgaccatgggtaagaggactgcttgtgccaaggacaaaataggacaaccatctcacaaagatcttaagtgactttttccatccagcaacatccagacgatttcagtgaccaaatgctcagctgtaaccacagcactaactggccttctttccagattgggtttggtgaacctgaatggtccagccaccttctgcaggtggcccaaggtgatgtgctgcagggaagcatgtctctcatgccaagaaccaagatcggactatggacaaaaacaaatgatagatatagtgacagtaccaagagtaccaggactcagtgtttcatatgaagcccttggtgatgaggacatagcatctgccctggaaatcgttattccaacataatattattttctagaatgccctggaaggacagaatatttaaaaatatatccaggtgctaaataggcagcagatctcaattcacacatgactacctttgagctaatgactgtctccagaaaataactgtgccccaagaagtgctccagatttgcaaggaatagccccaagagaataccaagacaagcaggctgttccctggaaaaaatctaatgcaaggagggctagttcacagcaaattcactgcctcctcccatgcacgtggtagagagtaccagtatcaacatggccctgttttctgctaaaaccagattttgaggaatcagagacccccaacactactcactcagtagctagcagccccttcctttcaactgggagtgttattagaatgaaaagtaattagttagaagggcatacatctcagtggcatgagcattgtggaatatcctttcctaggcacatttgtccactaagggaacagcctcagaaactggtacagcaatgggtgagatgagatcctggagagagaacacagccatcccctatagaaaggcacagcttttgggcttctctggcctgaatgccttctggggtatttccatatgcaacagcccagagtcatagccttgggcaaccacacatagaggtttccttctcacttcagacacatacatcactttcacaccacttggggatggaaatacctacaagagtgaaggtcaagggccctccccaggcatctcattcattactcagcttccttcctgaccaagtctgccaaccaatggccagctatgcgcctcatcctcattgcttctgcctccacgtaaatgaaaccaaaggcctcagcatatcctgggaggactgggggctgttacctaatggtcctctctgtcccattataggtgcaaggcaccccatccacacatttgcaccactactccaagatagtatttttcttttcacacaatctctttacagcagaatccagagttggattgtagtttaccttcctggaaagctcattatctttgtttgaattaacatttcagcatggaactaactgggcggaggaaggatcgttatacgtcttcagaaagttctcattgccccagctgcctagtactatacaagaagctctactttgatggcagatctaagaaggctataggcctttgtttgtaggaagcagtgtcattacattcaagcttcacttctctgattggcttccaaccactgggattcaaagagaatccaaggttctgcctatgtctgatgacataaggaaaacttggcttcctctgctcaaggttcccctctgctcatccctcctcattcagacatcctccaccataccagtgtttagaagcaaaacatgaagggctagcgccaccaggatagttagcagaactattgtctgtaaagctaggcagatgagcccagaagaatggtcccagagaaagcagactggctccaatagatatcaggcagcaatcccaataaattctgacatgtccttggcaatggaagcctgggttggagatcctgaggcagctgtgcctactgttccccacctcagaagcttcctgcccagagagccagcagccttgggatactaatgaggatgcaactggcttattggtatgaaatagaaggtggctttgtaggggcaagcaggcaaagagtactatccacatggcaggcaggtggctttgtgtctggaaagctttgcctagccagtacagctgtgagcagaggctggttataaatttgaactccctcagcccatttgcaactctgcctctgttctcttgcattctgtttggttgccctttagtttcctagtaaatgctccttttgaaagactccaaccttgtcttatttaacttgggggaaggggattctccaatgtcttttccaggataaagaaggaaattaaaataccatgaaaaaatggacatggcagtagaaaggaaacattctgatcagaccttgggaaaagctggtgccgagagagggagaggccaggtgtcctcccacccaactggcactgattctcagccccttcctcttacttctgttggcttcaaggagacctgcccttgatgtgtgttgctgctgaagcaccctcccagccagggagttggacatatgcagcaggcactttgatgtccaggaagtacactggtacatgacaggagcaagggtcagggaggggaggggaaaggtttctacaatgcagatgttttcaaaattctccaacaatcatgactctaaatggtatgatttagggctgggtgcagtgactcacacctgtaatctcagcactttgggaggccaaggcgggaggatcacttgataccagaagttcaagaccagtctggcaacgtggagagaccaccatctaatttcaaaagagaccccccgcccccccggctaatttttaaaaaattagcaatgtacctgtagtcccagctacttaggaagctgagataggagaatcgcctgagtccaagagcttgaggctacagcgagccaagattgcaacactgcatttcagcctgggtgacagagcaaggccctgtctctct

SEQ ID NO: 1099 - DNA, 3499 bp, Homo sapiens
acgcggtctctgggctggttgagctgcgccgctgcaggtagtgctgagttgctccagtgccactgggttagggtctccacaaccgagctggtctcagcaagtggtgtccatacatggggctcgaacctgggttgaagggtcgccagagcgacggttggagaacatggaactaagctggaggacacctgagtactcttaagcaatccccgtggaccaaatcaactgccaatttggatatcatcgaggcacctgaaaccttatcatgagcctgatgctgaggaatagattctgggaggatcccgaggatcccctggttgcagccatgttgagactgacgctgagggggaccccaactgtcacgagcaacacccatcgaacgcagccacctacctggggacagatcaagaagctgtcacagatggcagaagaaaacctaaggaaagtgggacaaccagtcacaatgagtaatttaatgatagctatgatagtggtgatcaccattgccatgagtattccttcaacaagggctggcacagaggacaattatacttattgggcgtatttatcaatcttggctggcaataatgcctggatgtaatcactctatgacacagttacacatgctttctggtctccgtatttaccataataaatctgctcctgtaattgaggtatactgccctcaaaaacctatttgtaaacagaattggacctggctagaaataatgaatgtatttgtttgggaagattgcattgcaaaacaggcagaggtgctgtgcaacaattcctgtggaatcattattgattggtcccctaaggggatgtttagcttgaattgcacctgtcagtctgtgtgccacagccacactatgttcagctggtctgaacaaaatggtcaaatggtagaaatggtaagaagtatggcaagagttcctattatttgaaaacatggtggtatagtggcacctcaacctcaaatgatatggcccgctctaggagcttaacataaggatttgtggaaactattaatggctcttaataagatcaaaatttgggagagagtaaaaaaagcatctagaaggacactctacaaacttgtctttggatattgcaaattaaaagaacaaatatttaaagcatcccaggcacacctgaccttaatgccagaaataggagtgcttgaaggagtgtagacagattagcaggtagtaacccattaaaatagataaaaacacttggaagctctgtgatttcaatgatgatggtgcttttaatctgtgttgtttgtctttgtatagtctgcagctcccgactcctgcaagaagtagctcaccatgataaagccacctttgcatttatcatcttgcaaaaacaaaaagggggaacatgttgggaacaggcccccaaatctggccataaactggccccaaaactgaccataaacaaaatctctgcagcactgtgacatgttcgtgatggctatgacacccaccctgaaggttgtgggtttactgtaatgagggcaaggaacacctggcccacccagggcagaaaactgcttaaggcgttcctaagccacagacaatagcatgagtgatctatgcattaaggacatgttcctgctgcagataactagcccaacccatccttttgttttggcccatccctttgtttcctgtaaggaatgcttttagttaatctgtaatctatagaaacaatggttatcactggcttgctgtcagtaaatatgtgggttaaactctgtttggggctctcagatctgaaggctgtcagccccctggatttcccactccacactctatagttctgtgtgtgtgtgtgtgtgtgtgtgtgtgtgtgtgtgtttctttaattcctctagtgctgctgggttagggtctccacgactgagctagtctcagcagtatataaaatcagaatattaatttggcaacatttggtaatatcaaggcagaatatttatcagaaatcaaatgttatcaccaaaaatctactctactttgttatccaggagatgcaatacaaaatccattaattaaaacattaacagatactattaaaatactttgggataaggtcagaaatgctaaatgttacttattattttagacacattacctgatgcgaggcatatagtgcagatgattatggttagagttgtgattttctaaactcaaatacttctatatgtgaacatttttgggagatttttgtcacaactggagaaagattatttttaaattttagtaaactacttacaaaaactgaaccagacaaaaataattcaagaagctagaaatatgacaacatggtgcaataggaaatccttgaataaaaaatatatatatgtatatatacaccataaaatatagaatggtatattctgtatcattctatattccttttctaaagcatcattattattatttgagatgagggggagatctaaccatgttgcctgggctggtcttgaacccctgtcctcaagcaatcttccttcctcagcctcctgagtagttgggattacagacacataccactatgcccaccttaaagcttgcttgcttgcttgcttgctttttttttttttttttttttgagacaggatcttgctctgttgctcaggttggagtgaagtggcacgatctcagctcactgcaacactccagcctgagcaacagagcagactccatcttggggaaagaaagaaaaaaaaaagaactatacatctaccaaaagcttcagttaaatgtttgggtatattgaaaacacactggatataaatttgaaaccactgttaaacgtgtgacaggaaaatcgagttgagactgccatgcccgtgtcaactgaccatgggttcttgggctctcaatgcaatagaacattgacatgaggccaaaagagttttctcaaagcttcactggagcttttgtccagccataagggaggcagaacgagagagaaagagagatagagagagacagagagagagagagagagagtattccctgacagactccacctataaaagaacaggtaggacttttttattaggcaaagtacagaactgacatcagaagtagagtgtacacaggctgggcaaggcaaacaatgtgaggggtagggtagcaggtcagcatatccagttgtgatggttatcttgagtaatgggccacctggtagtctggcctgtgacaacaagactataaatcaattgtccagcagcattcctttctgaggtgggacactctgcaaccttggttagctcctaaagccagttcctggaattctttaagtaaaaagactattagcagcgaggtaatggtgtgggttttgtgatgtgtgggaatgctctaatgggggtgaaccaaagccaggctctgtctctactgtgtctcaccagtaaaaacacaattacaaacagcatgcaatgctcttttttgtgatgatggttaataaagaatacacattctaaaat

SEQ ID NO: 1100 - DNA, 3177 bp, Homo sapiens
ctcactcgtctcgcccgccagtctccctcccgcgcgatggcctcggcgctgagctatgtctccaagttcaagtccttcgtgatcttgttcgtcaccccgctcctgctgctgccactcgtcattctgatgcccgccaagtttgtcaggtgtgcctacgtcatcatcctcatggccatttactggtgcacagaagtcatccctctggctgtcacctctctcatgcctgtcttgcttttcccactcttccagattctggactccaggcaggtgtgtgtccagtacatgaaggacaccaacatgctgttcctgggcggcctcatcgtggccgtggctgtggagcgctggaacctgcacaagaggatcgccctgcgcacgctcctctgggtgggggccaagcctgcacgtaacacggcaaccacggccatgatggtgcccatcgtggaggccatattgcagcagatggaagccacaagcgcagccaccgaggccggcctggagctggtggacaagggcaaggccaaggagctgccagggagtcaagtgatttttgaaggccccactctggggcagcaggaagaccaagagcggaagaggttgtgtaaggccatgaccctgtgcatctgctacgcggccagcatcgggggcaccgccaccctgaccgggacgggacccaacgtggtgctcctgggccagatgaacgagttgtttcctgacagcaaggacctcgtgaactttgcttcctggtttgcatttgcctttcccaacatgctggtgatgctgctgttcgcctggctgtggctccagtttgtttacatgagattcaattttaaaaagtcctggggctgcgggctagagagcaagaaaaacgagaaggctgccctcaaggtgctgcaggaggagtaccggaagctggggcccttgtccttcgcggagatcaacgtgctgatctgcttcttcctgctggtcatcctgtggttctcccgagaccccggcttcatgcccggctggctgactgttgcctgggtggagggtgagacaaagtatgtctccgatgccactgtggccatctttgtggccaccctgctattcattgtgccttcacagaagcccaagtttaacttccgcagccagactgaggaagaaaggaaaactccattttatccccctcccctgctggattggaaggtaacccaggagaaagtgccctggggcatcgtgctgctactagggggcggatttgctctggctaaaggatccgaggcctcggggctgtccgtgtggatggggaagcagatggagcccttgcacgcagtgcccccggcagccatcaccttgatcttgtccttgctcgttgccgtgttcactgagtgcacaagcaacgtggccaccaccaccttgttcctgcccatctttgcctccatgtctcgctccatcggcctcaatccgctgtacatcatgctgccctgtaccctgagtgcctcctttgccttcatgttgcctgtggccacccctccaaatgccatcgtgttcacctatgggcacctcaaggttgctgacatggtgaaaacaggagtcataatgaacataattggagtcttctgtgtgtttttggctgtcaacacctggggacgggccatatttgacttggatcatttccctgactgggctaatgtgacacatattgagacttaggaagagccacaagaccacacacacagcccttaccctcctcaggactaccgaaccttctggcacaccttgtacagagttttggggttcacaccccaaaatgacccaacgatgtccacacaccaccaaaacccagccaatgggccacctcttcctccaagcccagatgcagagatggtcatgggcagctggagggtaggctcagaaatgaagggaacccctcagtgggctgctggacccatctttcccaagccttgccattatctctgtgagggaggccaggtagccgagggatcaggatgcaggctgctgtacccgctctgcctcaagcatcccccacacagggctctggttttcactcgcttcgtcctagatagtttaaatgggaatcagatcccctggttgagagctaagacaaccacctaccagtgcccatgtcccttccagctcaccttgagcagcctcagatcatctctgtcactctggaagggacaccccagccagggacggaatgcctggtcttgagcaacctcccactgctggagtgcgagtgggaatcagagcctcctgaagcctctgggaactcctcctgtggccaccaccaaaggatgaggaatctgagttgccaacttcaggacgacacctggcttgccacccacagtgcaccacaggccaacctacgcccttcatcacttggttctgttttaatcgactggccccctgtcccacctctccagtgagcctccttcaactccttggtcccctgttgtctgggtcaacatttgccgagacgccttggctggcaccctctggggtcccccttttctcccaggcaggtcatcttttctgggagatgcttcccctgccatccccaaatagctaggatcacactccaagtatgggcagtgatggcgctctgggggccacagtgggctatctaggccctccctcacctgaggcccagagtggacacagctgttaatttccactggctatgccacttcagagtctttcatgccagcgtttgagctcctctgggtaaaatcttccctttgttgactggccttcacagccatggctggtgacaacagaggatcgttgagattgagcagcgcttggtgatctctcagcaaacaacccctgcccgtgggccaatctacttgaagttactcggacaaagaccccaaagtggggcaacaactccagagaggctgtgggaatcttcagaagcccccctgtaagagacagacatgagagacaagcatcttctttcccccgcaagtccattttatttccttcttgtgctgctctggaagagaggcagtagcaaagagatgagctcctggatggcattttccagggcaggagaaagtatgagagcctcaggaaaccccatcaaggaccgagtatgtgtctggttccttgggtgggacgattcctgaccacactgtccagctcttgctctcattaaatgctctgtctcccgcg

SEQ ID NO: 1101 - DNA, 3738 bp, Homo sapiens
aaaaactatgtcaggaatggaggtttgctaacccagaaaattcgaaggaacacattaaactggtggatgcagcagatgtaagcgctgtgcaaacatctcaagccagttcagatgttgctgtttcctcaagttgcaggtctatggaaatgcaggatctaaccagcccgcatagccgtctgagtggtagtagtgaatcccccagtggccccaaactcggtaactctcatataaatagtaattccatgactcccaatggcaccgaagttaaaacagagccaatgagcagcagtgaaacagcttcaacgacagccgacgggtctttaaacaatttctcaggttcagcaattgggagcagtagtttcagcccacgaccaactcaccagttctctccaccacagatttacccttccaatttaccacaggaatgcaacaagctacagcctatgccacgtacccacagccaggacagccgtacggcatttcctcatatggcatcaagactgaaggtggattgtcacagtctcagtcacctggacagacaggatttctcagctatggcacaagcttcagtacccctcaacctggacaggcaccatacagctaccagatgcaaggtagcagttttacaacatcatcaggaatatatacaggaaataattcactcacaaattcctctggatttaatagttcacagcaggactatccgtcttatcccagttttggccagggtcagtacgcacagtattataacagctcaccgtatccagcacattatatgaccagcagcaacaccagcccaacgacaccatccaccaatgccacttaccagcttcaagaaccgccatctggcatcaccagccaagcagttacggatcccacagcagagtacagcacaatccacagcccatcaacacccattaaagattcagattctgatcgattgcgtcgaggttcagatgggaaatcacgtggacggggccgaagaagcaataatccttcacctcccccagattctgatcttgagagagtgttcatctgggacttggatgagacaatcattgttttccactccttgcttactgggtcctacgccaacagatatgggagggatccacccacttcagtttcccttggactgcgaatggaagaaatgattttcaacttggcagacacacatttattttttaatgacttagaagaatgtgaccaagtccatatagatgatgtttcttcagatgataacggacaggacctaagcacatataactttggaacagatggctttcctgctgcagcaaccagtgctaacttatgtttggcaactggtgtacggggtggtgtggactggatgagaaagttggccttccgctacagacgggtaaaagagatctacaacacctacaaaaataatgttggaggtctgcttggtccagctaagagggaagcctggctgcagttgagggccgaaattgaagccctgaccgactcctggttgacactggccctgaaagcactctcgctcattcactcccggacaaactgtgtgaatattttagtaacaactactcagctcatcccagcattggcgaaagtcctgctgtatgggttaggaattgtatttccaatagaaaatatttacagtgcaactaaaataggaaaagaaagctgttttgagagaataattcaaaggtttggaagaaaagtggtgtatgttgttataggagatggtgtagaagaagaacaaggagcaaaaaagcacgcgatgcccttctggaggatctccagccactcggacctcatggccctgcaccacgccttggaactggagtacctgtaacagcgctcggcactttgacagcgcacagctgctctgtgaccagggacagatccagcaggccccagtctcgcatcagcgccggcctccagaacttagcaatttccgcctggtgatgcgcagttgctgtcagtcttgacctctgcctttgtggtgaatggaggaccacgtctatttcatcagaacagctgttgactctagtactgtgaatccagtgaaaataagccatgagaatgttttagcacagcgttatgtgtctgccacattaactacacggttcaaacctgtgaagaaaggacctgcaaacgcttcagttgttagcattttcaatgtgatataaacagcttctccaatacagcaaacctaattgcacaacagagactgaaatgtgtttcctgaataccagtggaggaattttcttgtaaagaaggtttactttttggtgtctcatacccagggtaatctgtacatctctacttatttatgaacagactttttttaaaaaagataaacagctttattgaggtataattcacccaccagacttttttaaacatcaaataattgaagagacaatagcattagaaataagtgattaaaggcctctgcctcacaacatggcaagtacagtactttgaattttagcacattgcatagtagttttaagtatgtctaatttaaacgtataatatgtacatcactgagacaatcatgtacagaaagaatttttggtgtaaatttgtaataatggataattcttttacatattgtttagggaaatgatattgaaaggtagcaatgcctggatagtgaagcatgaggcagcacgtgcacaaattcatgtgccgtgccttatctgagttttcggtataaatatgtagataatggatttttttttttagataatgttgtcaagaccaaaagcatggatgtcaagtgtcagtaaggattttgttttctaaaattttttcctgcatcagttcttctgagggccttgatgaaataacacagcagtttcttaaacaatttgaaacaaaatgagctctcctaccacctcactttttcatttccacactaatgtattatacgtaactacttggaaaaaataattattcaaatgcttcttcccacaaagaatatagatgatagtagatatattttattaataaaatggttcatgaatcggagactaacaaagttttcatgtgctcagaattattaattatcgtgtctgcattttctttcgataaaggaagacacacgatgctaatccggaaatcagcaaactttgcattactccctatgtgcgtattttctctttcttcctgtcaccctgaggaaggttcattgccattgtcatcaccatggaaacaacgttcctctccacctgcattatgtactacatgacaggcatcaatctggggaaataataaaattatcacctttgtcagaccataagagtttctccaaaagtggtcagtttggctgggcaatattttctctcatctaacaaacacaatccattgtcatgaaattacccttaggatgagtcttctttaatcaatcatatattgggcggaaaaaacaccagctttgacccgaagtagttgaagagctacttcattcttttctgaagttgtgtgttgctgctagaaatagtcatttgtgaattatccaaattgtttaaattcacaattgaattagttttttcttcctttttgcttgaagcaaacagttgacaatttttaaccttttcattttatgtttttgtactctgcagactgaaaagacaaagtttatcttggccttactgtataaaggtgtgctgtgtccaccgttgtgtacagaatttttcttcattaattttgtgtttaagttaataaaatttatttgtgatgtactgt

SEQ ID NO: 1102 - DNA, 4401 bp, Homo sapiens
tttttgttgttgttaaatgataaccattctagtgggtgagaagtttacctcattgtggttttgactggcacttccataatgattagtgttgttaaccatcttttcatatgcttgttgaccatttgtatatcttatttggagaaatttgtgttcatgtcctttgcctgtttttaaattttgatgaagtccaatttttctgtttccttttgttagtcatgcctttggtgtcattgtcaaaatccaaggtcatgagcatttcccccaatgttgtcttctatgaagtgttttttttgttggtttttttttttttttttttgagatggagtctcactctgtcgctcaggctggagtgcagtggtgtgatctcggctcactgcaacttccacctcctgggttcaagcgattctcctgcctcagcctcctgagtggctgggattacaggcacatgccactacacctggctaatttttggatttttagtagagatggggtttcgccatgttggccaggctcgtctcaaactctgggcctcaagtgatccacctgcctggcctcccaaagtgctgggattaaaggcgtgagccactgtgcctggcctatgaagttttattcttctagctctttgatttaggtcgttgatccattttgatttaatttttttcagggaattttttaatcctagatgcttacagttcttcatatcctacttgaaaggaccttctatcttcagtcactgtattttgctaatttcttaaagaggaaataggtggtagtgagtggccgagtttcatttttcatttctgttctccaaagaacagaatggttcatgtaggaatcctttgcagcttcagtctgcaccaagaaaggccaagaggaaagaatagcgagtggcttttctcactctcagcctcaagactgaatttaaacacacttagctttgtgagggcaggacttggtcttcacatagtggaaagtgtgcacttggctactttttcctggggcaagggctctgctttcctgccactgtgagctgtggggtcagactgcatccttaagccagacattccactctcgctcccctggaagacttttaggcgaggttcatcctggaactgttgactcagaacaggtagagctggaggaagaacaagcggccaccctgctcccatgagccctcttccttggtggataggttgtggttctcctgtttgatggggaggccgctgcatctgactctccaactcagtgaaaagaatcacagcacagaccagcctcaattctttctgcaccactgctctgtcgagttgattcagtacctgtagtcccacatagttaaaatctgcttagctttgctctctgttgtgtggacaatgaaatggttgactaatataaccctggcagtgtcagaccttgtcatgactgaaatttgtccaaatagatattgtcatcaaatgtgcttctggtccttgctagtgagactgtagttaggatccctgtccaggtctcaaagggcacgagaaactatgaagaggcttggcatccctgttcagagtacagcctcatctgccaaattcttggggtcactagaactgtttgggtccctgctggaagctcttaacacccctgagcaactcacgttggaactgatgaaaataggtctcctaagacctccatctactgctaagtccattctggagtccaggtgctactaggagtcttttgcccctgggactgagatgtttttctgacttgaatgagggagtgaatggatgactgcccatgccgctgtcactgtaataaaggactaagaagacaagatttaagaggaagagataaccgtaggacttacaggtttctttgttttgtttttttaacttgtgatctagtactaagaactaaacgttaaatagaatagcatttatgaacagtatctggaaaggagccttcattaatgatctcaataagaataaatgaaagtaagttatttttctgccccccaaaatccctaaaacatgaatttgtcttccacacattagtgccagaaaagggaatttgtagtaaaatagtgagctaagaaaaaaaaaatctcataatgttttaagaaagtttatgaatttgtgttgggctgcattcaaagctgtcctgggccacatacaggctgtgggttggacaagcttgttctaaattatgtagggcacttttattttaaaaattacttttccgaggcttttctaaatatcagttaaacttttactgagtagtgcctgtgtgcaaaagcagtatgtccttctcagtgtgatatgtgaatacatattgatgtttccttagcattgtaatatcatggaaattataaaggattcaaaataattttttgtttgcatgtgcattggggggggtttcctcacagaatttccagaacaaaaattgtttgctgccctgttgattaaatgtgttgtgcagctggaactcatccagactatcgacaacattgtcttcttcccagccacaagtaagaaagaagatgcagaaaacttagctgcagcacagagagatgcggtggactttgatgttcgcgttgatactcaagaccaaggaatgtaccgctttttaacatcacaacaactttttaagctactggactgcttattagagtcacatagatttccaaaagcgtttaattccaacaacgaacagaggactgccctgtggaaagcaggattcaaaggcaaatccaagcccaaccttctgaagcaggagaccagcagcctggcctgtgggctgcgcattctcttccggatgtacatggatgagagccgcgttagtgcctgggaggaggtccagcagaggcttttgaatgtctgcagtgaagcactaagttacttcctcactctaacatcagaaagtcatcgagaagcctggactaacttactgcttttgtttctaactaaagttctaaagataagtgataataggtttaaagctcatgcatcattctactaccctctcttatgtgaaattatgcaatttgacttgattcctgaacttcgtgctgttcttagaagattttttctgcgaatcggagtagtttttcagatatcacaaccacctgaacaggaacttggaataaacaagcaatgatgggaacttaatatttttgttggcatttacatccctctgctctttaaaaggacgctggagctgaggtttcctacctgaaaaatgatttctctggattgcagtgtctgagttactggtaaagatgcttagaagtcttactcaaacttgcaacactccagtcccttttagtgctggtggattttgtgtgttatattggcctcatgttgagcagaaagcctgtttaaacagtgtcagctcatgctcacgggtccttccctgtcttccacggcaggaaaagccccacgtttttggcaggtgtggaagtgaaacttacccaaagaactatagatgtaaagattgaacttctacaagaagtacaactcaggagagctgtattttgaaggataaaatgtttataattggggagtggggagagaagaagaaattattgttcatggtaaaagatatttagcaactatggtattcttattctgaagatttttgcacactcaggctatctgagatactggtaatcatcctgtgaaaaatgtacagagatgcaggtctgtaatataaaaatcttaaaacattatatagttcttcctgcactgttttctttattttcttattcatttgctaaatacccataatattttgtcaaatgcactaaacatttgggtggaactttcttttttattttatagggatttttagttttgccctttttggtaggtggtgattttgaggctgtaacatgcccagaagctgttgtggccgacacttcaacaatagggaaaaaaaggtagaaaatatccctactgacagtaactacctgtcacatatttctcttaggacttttaaagatgagccattaaaatagaatgatcctttatggaccaaaacttgaatcactgcaaaatgaatccagattgctgtcattttcttttcttttgggtggtggggcttgatgtagattttactctatgtacagaatttaacgttgaatatattaaaataacaaatctggcatggtttgcggaggttagatttactggaaatgtattcatactgtgaattgtgctctgatggttaaaagacaagattgtcaagcattccgtattaacagtggatgtagaaaattttttcagatggacaaaatgtatatggtacagatgtaaagttttctatgtaaaaaattctgtacaactttctgtacaatattgattcccatctggcatattctaatcaggttataggtcaataaagtttttgaattatttcatc

SEQ ID NO: 1103 - DNA, 5255 bp, Homo sapiens
agaacacgagagatcatgctgtggcccaggcttaaagaattcttcaattcccatctgagttctgtcagttaccttgatgtttcatgttggtttttcctcattattttacccaggtgactgctcctgaccctacataggttaggggattaactgatgatggtgatgtgcttggcattctccatgcaaggaaggaggctgccccatcccctattttggcccagagcagatagctgagctggagtgtgctttagtcatgactctccatggtgtatattttggaaactgaagacccacctgctgacctgggccttgaaaacctcacaattccagcctccgttttgtctgatcccaaggaagatgaggcaaaaaagccactacacccctgcccccatctgctgctgaccattgctggggatctgcactcttccttctgcctggagcgagtgggaagtgaccctggaggaatacggtttgaagcattgatgagatttctgcagatcttcatctgggcagtggggagcgtgttccaaaatgtgagagactcatttaggcagttagtgagggtgatcccattctctctgctcaaagtagcagggagggaatgggaaaggcccttttatgcaatactggatagtggttcagagcccacatgaaggaaggaaccccactttctggtcagagtccaggtctgctgtttatcaaccctatgatttgaggcaagtaccttaacatctctatgccttagtttccttatgtgggaactggagacttaggcttgctatgtgaagcccagttcagaacactttactcatatttctccaattaatcctcacaaccatcccagtaggtagacactattattatccccatttacagatgagaaaactgagtcacagagctgggaaatggcagaggcagcattcaaatctaagcagcctggctccattatcaatgttcttagctgctcagtagactggggaacaatgtcacttttttcatagggttgttgtgagaattaaatgagttaatcatgttgagtgcctaccacaaacagtgcctcccccactgcttgctttaagcaagtgttcaccagatacatgctacctcttgttaagctatcatgtggggctggtgacaaagacactgaagtgagagagagcataggaataaagatgggacagcaggaagcagtgaggtacatctgagatgactttggtcttcttttccctggcagtcccctcttctcttcaagcagcaaggatgatattattggggtccaaaggtacacaattttatctctgcataaaatttcataaagaaattttgttctcagtttgcattcggtgatctgtgatcccattcccacacgtttgaagctctgagcacaggcaaaaaaatcaaattactcaggccatcctgccccaacaggctcttcctttctgtttcagcttcctaagaaacacccttttctctcagggactgacctgtgttctgctcactgtgtttgctgcacagccccaatggccagacgcattttttgccctgctttgccccttgctatgcaccaggaggctgactctaggaatctcctgccagctggcttcccatagggcttggtcagcagaaggcaccagcaggaaatacaggaggaaagaggtcagggcacttcttcctgtcttcactggtgtctgacaaagcctgtgatgctttgctgttgtagctcccatggaatgaggggagttcgttcacaactcctgtccccagggctctggtaacttggtaactctatttcctccttttgtccttttggccctaggagtgatcgtggcttcccagtgttgctggtgtctggtgccttgtcacccttgtttgctccttatccctttgcacagtactgtaagacacacctgatccacactcaatttgtgccatctagttgaactcagggccttgccacgaccatggctgacacatctacatgcccaagatcactctacccgtgaggcccagaggtggagccatatattttccattaactttcattgtaaaagttaatctcgctgaaaatgtcagatagtacatttttaatatttattgacactaagattagaattgataggtgagcatgaaaaagaaaacaagtatcatacatattcaccgcacacaaagataaccactattttactgtgtgcattttttcctattacaaaaaaatgcatatactattgtttattggctgaaatattgtgaacaatttccttcatcaataaatatacttcaacatcaatacatttctttctaatacctcatcaaaattcttaatgactacagagtcatatctaagcttgtaccatagtttaatgagtcccctattagcaagcattcgagtaggttccaatttttccttgttataaacagtgctgcaataaacatccttgtacgatataaaatacttgaaaatacaacacaatcaacttagtcttcctaaaccaaaagccacacatatacagcagcagcagcagggtcactccctctcaagagataataatatctgcctcccctgcctcccactgatgttgtgaggttcaactgagaaaatgtatatgtaagttcttcataaactgtaaagtgtatggggtggttattatagtatgagcttattctttcgtaataaccttgtaagacagcaccatggatatatcctcaaggcacattgtactgacaattttgccagacataaagaattgaaagcttacttttaggcttttatatatttatttctctttaacacaacaaagagttgtgtgttagaaaagcagccttcctgtacaagagtaaactaccagctggcagtgcattctatctgttctggtgcatgtcaactcattacatcccctcgagaggaccactgcaaacaattgaaggaatttgagttgcctaaaaggtccccatggctctgaaagtccctcctgtaatactggttaccccaactcctaaagcagattagtcataatgactactttccattcctttcctaatagtctcttccaaaaagcactttaggtaactctgcttgatgaaaaaaaaattgagcagcagttccgttttttttaatgggaacttttatgtcaagtatagaagctgcactgacatctcacatgaaaaccatcccatcactcagcaagaggcactccattttggatggattcttgatttactttctgtgaatctaagttcatggattttctgctcttgctaacgcaatactattaaaatgtcagaacacagtttcctggagcaagagtcttatatagttttcaactcttaatgagaggcatcagccaagtttttaaaatcttgacttgaatcatgcttaatgctatttgttaactagtgttaaaaggtttctatgtgttaaagtggtaatgttctaccaaggtaaatgatgttctggggcatgatattctatctggttgcttgctttctatccctattcgacttttttacaaaaattcaatggaggggacatagtcctactttataatgttaagaagcgtttttactttaagttcgctcaaattaagaaaagacacagggccgggtgctgtggcttatgcctgtaatcccagcactttgggaggctgaagcgggtggatcatgaggtcaggagatcgagaccatcctggctaacacagtgaaaccccgtctctactaaaaatacaaaaattagctgggcgtgctggcaggcacctgtaaacccagctactcaggaggctgaggcaggagaatcacttgaacccgggaggcaaaggctgcagtgagccgagataatgccactgcactccagcctgggcaacagagcgagactccgtttcaaaaaaaaaaaaaaggaaagaaaagaaagaaaagatacaaagcctcctcttgaactgttttctcaactacttgatcatctgtgatctgtgtctcttctgggaaggacggacaggcaaagcagggtccagtgttcatgtgctgaacgtaacttgccctaacagcacaagaagcccaagggcttgttttctgtgtgagtcaaggaaacacctgctacctcctgagacaagcccaatccacgggtattggcaaggaaaggtatgcaggccttgcacagagatactgaaattgcttttgtttccttccttcctaattttgtctctgtagatgtctcactgtttccatgggtttattcatttctatcaccaccactacccccacttttttttacagttgtgtattcaagcagagaaaatgagtttaaaaaaacaattatgatagtgaaaaaaagaacagattcaaaactgccatatatgtgaggcccatgggagtccctgattaattttcatttttatcatttagttctgagattggcctattttggtaaatgtgagagcaagtgtggttatggacttgattaccttgcaaccttaaaaacaaataaaccagcttgagtctttttcttaccatggtgggttcctgttaggcaagaactgcaactccatgagcaagttgtcccaacaccacaggggcagaccttcatcacatagcaactcccaaaatgggaattggagtggattttagaacacagtcagctaacattgagaacatcatggttgtaggcaaaactttccgttcctctatttgtctctctgctccgttcttgggtccatattctcctacacattttggatgcttgaaatactgattctgaaagaataatcaattagcaaatagttacaaggagtaggacactcaaggagtctagttgaaaacaaaggaccagcatgataattgtacaaaaagtacttgtagaaattcaaaagtggaaaaaacgctatatattgggaaagattaggaaaagttacacatagaacagcaaggtgagctgagccttaagtaggtaggaaggttggatgagactcagcagggtagacgggagaagccatggcatttgtggagtacaagttgacagaggcaaggaggtaggtttggtcaggtgtgttaaggagacagtgagtctggtcagaaaggagttttcaaggagtggaaatggcgcctaagggcagcatattgttaggaaccagtttattgaaagaaagcctccaagtgcagtggctcccacctgtaatcccagcaatttgggaggccaaggtgggcaaatcacttgagctcaagagtttgagaccagcctgggcaacacagcaaaacctcatctctac

SEQ ID NO: 1104 - DNA, 3429 bp, Homo sapiens
aatcccttccccttattttcagagagtagaccctctgctgcccatccttcccccactggatcttcggaggtctctagaccaccaacccacacttggctgttctgtgggaccgagactgtgcccgaggtgctgctcctgggacgagggaagactcctcgactcctctgcatgctgcagttaccactttgtgccctgaattgagaaggaggggccggaggacttcttggggcaggactggagttcacgttcattcccatcactgcccagcccgcatgctccctgtggctcctaggcatgccggtggcatctgcttgctcccccacacctctgcccccctgcatgtggttgcccctcgcagcactgcgtggggtctccgcggctccacatcacgctgtcctcacacggtgatgcttggggttgcagaggctggtcagtttggctttggctcttcatcttcagcacgatggttctcatgggggtggggagcgctggcagctgtgagacagttctggtcccagccaagtccagggaaccgccctagaatcatcagtatgaaaaataacatgcctgttgttatcaaaccactaaaaccacaggccagctagcagggtgctctctctccgcctgtcaggttccaccctcccggcctccatgcctctgatgcctttcccagctctcagggtccagtcgagttgcagctacaagctgcacgtcccctaactttaaatttactagctcagccaacagatctgcatctagaacctgaagctttagtggttgccagttccagcactccccaggagcttcagttcacaggctctcatgacaattaggaagtgggactggaagcagaaggcccccaattagttccccgacatgctgaagtggtcagtctcatccttgaactactcacagatcaaattccttccgcctggggccagaaagcggtcaggtctgtaaatccagaggcagctgctgcttaagatcctgcttgccactgtctgcccgcctcctcagctctcccctcgggccggagtttcacacacttcatgcctctggtggcgtccctgggttccgctgaagctgctgtgggaagtgccacctccagtttcacagtgtggctaggacagtgggcttgcaggctggtgacagctcccctgagcaagaggcctcctcctcctcccccagagctagggaagctggcagggcttggctggcttcacagcttggcaggagaaagaacaggcgcggctgtcagctcctctccatcacttcttcccaccttgtggtctcagagggaaaatgaacccaggctatagactgggctggctctgatagatcaggacccacccctccatttgaggtctgcagggctgtcttgactcctctggaaatggacatgactctagaggaaggtgctagtgtggtaaaacagggaaggggaggaggaggccaaggaaccccagctgtggggtagttctggttcttccatctgatgtatgcaagaaactacagacaatagacctgccagtgtgaatttccagctcaggctggaaatgcgtgctgactgtgaccaccaggagagggcgtcagagggacaagatcagacctgctgggttctcagtggtcccagggctggcagtgtgtcttggttcataaaagacgggcatgcagttggctccatctggaagcgtgcatcctagggtgccagtatcccccgaggggacaaaactcagccagcgggaatgggaaattatctagggtgataggaatattgtcagcacaaccacacaacccaagatcagaaaggcccttggcaactcaaatgcccaagttccttccttaagtaccctgcagaggctgaacagggtctgtgggctgccaggttctgtgcgggatcaaggggagctctgcaagctctggccagcttggcggcacagactgtcttgctgcaagcgatgagaagcaaatcagcagtggtttgagaaaccagagtctagcgcagcttctgcaattccaaacattctccttcctcgtccccatttccccctttccttgcccatggtgcaggatggaatgagtaaaataaattatctttttctccccatttctctttacagaactgaagaataacgaagttatccttagcgtcctcctaaaggcttttccttttggcatcttaaaagcttgagagataaaacggaaaccccagagaggagtctgggcaggctcccagggtgcatgctgcctccataaatctgctgagctctagaccctcaatcaggacttgtcccttggctagcaggatcctgggaacacctttggccctgccctgtgtagagatgttcatgtctgttcctgtgggtcactttgttaagctgaagagttttaagaggtagagctcagaccctggactgggatttttcttaccactcaaacttgctatccacacaccctgcacaccttagataaaaagaacattttaaaagcagagttcactttcactccagtctcccctcttttgccctcactgaagccaaaccacagaagactttgaggaatgagagacaaatgaggtagagctcacctgtgctcaccagctccgtcagggtggtcagccgacccctttccctgggaaccccacttctctctgtggctggcttggttgtcgggggtgagatgccatattgattacagggcagcaaagaaccagtaccaggaatttacttgaccattccccttatttttcatctagaggaatctcggattcagccctttcattgctaagacaccttttcactgaggttcttaccagctcagccaaatctccactctgctatagcagaagcaataatgtttgctttaaaaagatttcttgacctatgccttttcttagaaagtttgatagattagttagaacttcagatcatcagatcagtctcaaatgggtttcttggaattttatatttgacaatatttatactataccaaactcatttgcagttcttaggtttgttggttaaaacatttttttaaagcagtaagtttatagaaaatgttttcatttaatggaaggctggggaatgtccagcatcaacccctatggcatgcattcccagtggccttctcatctgggcctggaacctttggttcagggcttaggggagaacaggccacatggcaacagccacacagtcattgccttcaacacagagccacgtgtccccaaacagcaatagtcatgcccttgtccaggctgggatctaattgatacaataggtcgttgactccctcctagtagagctatctaggtttgtctggaaagtttccgaccctggcttataggcaccacacctcatgtactcctcatggcttggatctctgtattcagcctttgttcagtccaataaactttgagtagatgatctc

SEQ ID NO: 1105 - DNA, 4591 bp, Homo sapiens
ttttttagaagtttgttataaaatatacgtaacataaaatttacctctcgaccatttttaagtatacagttcagcagtgttaattacattcacattgttgtgcatctgatctctaaaactcttttcatcttagaagatggaaattctatcacattaaactgtgactccccattccactgttccccacagcagcccctggcaaccattattctactttctccctctatgaacttcactactctaggtacctcatataagtcttatacgtatttgttcagaactggatttattttgctaatattttatgcagcataacatcctcaaggttcattcatgttgtagcatatatcagacttgttcctttttaaggctgaataatattccattttatgtatattttgttcattcatctgttgatatccattcatatattgatagaacacaagataacttccaccttttggctactgcaaataatactgtcatgaactatgggtgtacaaatacccatatacaaatacccatggttcgtaacaggtctctgagaccctgctttcaattctttttgactatgtacccagatgtagaattgctggatcatatggtgattctatgtttaattttttgagcaactactgtactgctttccatagcagctgcaccatgttaccttaccaccagcagtgaacaagagttttaatttctccacatcctcatcaacacttgttatgttctgggagtttttattttattattataatcatcctaatgggtgtgaagtggtatctcattgcagttttaatttgcatttccctaatgattaatgatgctgaacatctttttgtgtgtttattggccatttgtatgttgtctttgtagaagtatctattcaagtgcttttgtccatttgtttgttttcttgttttctattatactctagatatatattctgctttgtcagatgtgtgatttgcacgtattttctccctgtatatggcttgtctttcatgctcctaacaggatcttttgcagaacaaaagtttcattttaatgaagtctaacatcaatttttccttttgtaaattgtgctttcgatgtcaagtataagaaacctttatgtagctccagatcctgaatattttctcctaagtttttttccctaaaagttttatagttttatgttttgcatttaagtccatgatcaattttgcattaacttttatgtaagtgtgaggcttaggttaggttgcctatggatgtccaattactccagcatcatttttgaaaggctatcagccaggcacagtggctcacgccatcaaatcctaatcccagcactttgggaggccgaggtgggcagatcatttgaggtcaggagttcgagaccagcctggccaacatggtgaaaccccatctctactaaaaatacaaaaattagtcagcgtggtggcgcatgccaatagtcccagctgctgggaggctgaggcaggaaaatcgcttgaacctgggaggtgaaggttgcagtgagccaagatcgcaccactgcactccagcctgggcaacaagagtaaaactccgtctcaaaaataataataaaaaaagaaaggctatctctccgctaattctttgcttctttgtgagaaatcagcattttctgttttgttccattgatcttgtatctttttccccaccaataccacacagttttactatatagctctataatatgtcttgaaatcaggtagactggttcttcccaatttatttactttttcaaaattgttttagctattctagttcccttgctttacaaataaattttagaatgaccttgtctatctctgcaaaaaaccctgctggaattttcataagaactgtgtgaaacctatacctcaacttgggaagaactgactttcttactaggttgagtctcccagtccatgaacacagcatatctttccattgattgagattttctttgatttctatcatcagtattgtgtagttttcagcatacaagttctgcacgttttgtaagacacccaggttttgagcatgtttgtaaatagaatttttaatttttggtgttcacatgtttattgctagcacatagaaatagatttttgtatgttgatcttatatcctgaaaacttgctaaactcacttgttggttctagtttttttgtaaattccttcagagtctatatgaacaaccatgtcatctacaaataaggacagttggatttcttccttttgatcatatgccttttgtttctttatcatgccttattgcactgactagaagtttcagcgctgtgttgaataagggtgataagagcagacttccttaccttgttcctaaggcaaaagtgttctgtaggaattttgtggatatactttatcaaactgaggcaggttccctctacttctggttttccaagagttagctttttttttttttaactatgtatgagtgtattttgtcaaatgccttttctgcatctatatgatcatgtgatttttattatttagcctgttaatatgatggattacattaattgattttgactattgcaccttctgttttaaccggctttttctgacaacactccagcagggaatgatgtaggggagtggtgccacctcattgctatctgatagaaatccaagttctccacttggcctccttcgacatctggtgggtgaggagctcctcattactgcggggcagtgatgagagttccagttccccatagtgagggtagcctcatatgtgctgggcaataatgaaagtcctggctctccactatgcctcctctgacaccacaccaagcagggagggagaagagtgcttcattactgctggcaggcatggaagtccaggctccccttgtggcctccactgataccactgggctgggagtgacctcagtggccaccagagatgaaagtttcagatccttacctggccttggtatcaatagaatgttggagcaccttgttacagcctttggagggtagaagtctaggattcccacttggcctttgctaatggagataaagccatagctttttctacagtatttggctggagtagaactgtctaaaagttttctgtcttactaggtcagacagaacattttcctggtcctttggttagagaaggcttttgttggggctggttttgtctgcatccattgttgtttccaggtggccagcttcttcaagtctaggatatttgagacaaaaataaaacccagagaactcaccaccctgtcattcctcaggtcctgaggtcactagcctatctggacatcttttcttcacctttcaaaattttcttgtgtttgttttatatataatatccaaggtttttagtaatacttaacaggaataatagggaaaagtaaatctcctccatctccccataggtagaactttctctgataaatatttaacaatgcactaaaatatgtttgtggtgtttctaaatgcataattaaggttttatatgctcacaggttggcttttaggacactagtaagaaaatatagttgtgatctgtgttacacaccaatgattgttgccgctgattttgtcaaatctataaaagccagagacagcgaatttaccacaaatcaaggtgggcaatggcagaaggttatggggcttgcttaataaacaagccagagcttgttcaagacatggtgaaacaagtaagaaatcaagtggaaacccctggattttcagtttctattaaaataaggatccatgatgaccttaaaagaactgtagatctttgtcaaaaggctgaagcaacaggagtttcatggattacagtccatggaagaactgctgaagaaagacatcagccagtgcactatgattccattaaaataattaaggaaaatatgtctatacctgtaattgctaatggagacatcagaagcttaaaggaagcagaaaatgtgtggcggattactgggacagatggtaagaaataagtacttgggttcttttaattgggggggaagaaatgagagtggggaagtaatgttaatttgattttcatttgttttgtttaacattaagccatattttcccattgtactgttttaagctaagcgatttattaaaatgatgttaagttttctacctagaaaaacatggattatcttaactgggataaattaattcagttacttttctgacaccatcatatctagtgaccagtgaagaattttccagatagcctactagtaaaataaagcacctagaaataagagtaagtgaactcgagaatgataagagctaaaggaatcccagaactgctatgcagtttcattattcccttaaattattggcatgccaagccctataattgctagatgggagaatatagataaactgaactttaagcagcccaatttatgacaatccagatttaccctaaagaaaaactaaagactaatggtttaatgtagaaatctttaaaaaataaagatttctgtacgtacatttaaactttcctggtttacaaaaggtaccaaaattaattcttttgtaatcggattaaacatattaatgcaat

SEQ ID NO: 1106 - DNA, 3475 bp, Homo sapiens
agggagggagggagagagagagagagggagagagacggatatctcaggtcatctgcagctgcagcgagtctgaggagccgaggaaggcagggaagatggcgatcctccattgctgagacccggcagaagcacatgagactcccaaacaacttccacaacaataacccgagcaggaagaggagaaagagaaagaggataaggaggcggtggggctggagaacccgaagcacctcccggcgccgggacgcttcttctgttcctaatgtgagaggctagacccagatcatggaggtgcttcagtgtgatggctgtgatttccgagccccgtcttatgaagatctcaaggcacacattcaggatgtccacacggcatttctgcagccaactgatgttgctgaggacaatgtgaatgagctacgatgtgggtccgtgaatgccagtaatcagacagaggtggagttttcttctataaaggatgaatttgccattgcagaagatttatcaggtcaaaatgcaacttcattggggaccggaggttactatggccacagtccaggatattatggtcagcatattgccgctaatcccaaaccaacaaacaagttttttcaatgcaagttctgtgtacgctacttcaggtcaaaaaacctcctcatagaacacactagaaaggtccatggagctcaagctgaagggagttcatcaggaccccctgtcccgggatccttaaattataatatcatgatgcacgagggatttggaaaggtcttctcttgccagttttgcacatacaagtcaccaagaagggcaagaataattaagcatcggaagatgtatcacaaaaacaatttgaaggagaccactgcttccccacctgctcctgctccaatgccagaccctgtggttccgcccgtatcactgcaggacccctgcaaggaactgccagcagaggttgtggagcgcagcatcttagagtctatggtcaagcctttgaccaaatctcgaggcaacttttgttgtgagtggtgcagctaccagaccccccgccgagaacgctggtgtgaccacatgatgaagaaacaccgcagtatggtcaagatcctttccagtctcagacagcaacaagaaggaactaatctacctgatgtgccgaacaagagtgcccccagccccacttccaactccacctatctgaccatgaatgctgcaagccgggagatacccaatactaccgtctccaacttcaggggctccatgggcaactccatcatgagacccaattcttcagcttccaagttttcgcccatgtcttaccctcagatgaagccgaagtcacctcacaattctggtctagttaacttgacagagagatcccgttatggaatgactgacatgaccaattcttctgctgacctggaaactaacagcatgctaaatgactctagttctgatgaagagttaaatgaaatagacagtgagaatggtttaagtgctatggatcaccagacatcaggcctgtctgcagagcagctgatgggctcagatggcaacaaattattggagaccaaggggattccatttagaagattcatgaataggttccagtgccccttttgtcctttcctcaccatgcatcgacgtagcatctctcgtcacatagaaaacatccacttatctggaaagacagctgtctacaaatgtgacgaatgtccgtttacttgcaagagctcgttgaaacttggggctcacaaacagtgtcacacgggtacaacgtcagattgggatgctgtgaattcccagagtgaaagcatttcttcctcactgaatgaaggtgtggtgtcttatgagagctcaagcatcaatggtagaaagtcaggagtcatgttggatcccttgcagcagcaacagccaccgcagccaccaccaccgccgccgccaccaccaccatcacagccacagccactgcagcagccacagccaccacagctgcagccaccacatcaggtgccaccccagccacaaacacagccaccaccaacgcagcagccacagccacccacacaagccgcacctctgcacccatacaaatgcaccatgtgtaattactccaccacaactctgaaagggctaagagtccatcagcagcataaacattcattctgtgacaacttgccaaaattcgaggggcagccctcaagcctaccattggaaaatgagacagacagccacccctcttccagcaacactgtgaagaaaagtcagacctcaattcttgggttgtcctccaagaacaattttgtagctaaagcctctaggaagctcgccaatgactttcctctagatttgtcacccgtgaagaagagaaccaggattgacgagatagcaagcaaccttcagagcaaaattaaccaaaccaaacagcaggaagatgcagtgatcaatgttgaggatgatgaagaggaagaggaagacaacgaagtcgagatagaggttgagttggacagggaggaagaaccgacagaacccatcatagaggttcccacttccttttctgcccaacagatatgggtaagagataccagtgagccccagaaagagcccaacttcagaaacatcacccacgattacaatgccaccaatggggctgagattgagctcaccctttctgaagatgaagaggattattatggctcctcaacaaacttgaaagatcaccaagtttccaatactgctctgctgaatacccaaactcccatctatgggactgagcacaatagtgaaaacacagactttggtgactctggaaggctttactattgtaaacactgtgactttaacaacaaatctgcccggagtgttagcacccactaccaacgaatgcacccatacattaaattcagctttaggtacatcttggaccccaatgatcacagtgcagtgtacaggtgcctggaatgctacatcgattacaccaacttcgaagatctccagcagcattatggcgagcaccacccagaagccatgaatgtactcaactttgatcactcggacctgatctaccggtgtcggttttgttcatacacgagcccgaatgttagaagcctgatgccacattaccaaagaatgcatcccacggtgaagatcaacaacgcgatgatattttcaagctatgtcgtggagcagcaggaagggctgaatacagaatcccagaccctgagggagattctgaattcggctcccaagaacatggcgacttccacacctgtggctcgtggtggtggtttgccagctacgttcaacaaaaacactcctaagacctttactcctgaatgtgaaaatcagaaggaccctttggtcaacactgttgttgtttatgattgtgatgtttgttcgtttgcaagccccaacatgcattctgtcttggttcattatcagaagaaacaccccgaagaaaaggcttcctactttaggatcc

SEQ ID NO: 1107 - DNA, 3329 bp, Homo sapiens
atatgcgagcgcagcacccggcgctgccgagccacctcccccgccgcccgctagcaagtttggcggctccaagccaggcgcgcctcaggatccaggctcatttgcttccacctagcttcggtgccccctgctaggcggggaccctcaagagcgatgccgatggatttgattttagttgtgtggttctgtgtgtgcactgccaggacagcagaagatatgaagccacccgtgttatcgctgatatggagaactagagttctgaagtctctgcttcagcaatcccttcagggagtggtgggctttgggatggaccctgaccttcagatggatatcgtcaccgagcttgaccttgtgaacaccacccttggagttgctcaggtgtctggaatgcacaatgccagcaaagcatttttatttcaagacatagaaagagagatccatgcagctcctcatgtgagtgagaaattaattcagctgttccagaacaagagtgaattcaccattttggccactgtacagcagaagccatccacttcaggagtgatactgtccattcgagaactggagcacagctattttgaaccggagagcagtggcctgagggatgagattcggtatcactacatacacaatgggaagccaaggacagaggcacttccttaccgcatggcagatggacaatggcacaaggttgcactgtcagttagcgcctctcatctcctgctccatgtcgactgtaacaggatttatgagcgtgtgatagaccctccagataccaaccttcccccaggaatcaatttatggcttggccagcgcaaccaaaagcatggcttattcaaagggatcatccaagatgggaagatcatctttatgccgaatggatatataacacagtgtccaaatctaaatcacacttgcccaacctgcagtgatttcttaagcctggtgcaaggaataatggatttacaagagcttttggccaagatgactgcaaaactaaattatgcagagacaagacttagtcaattggaaaactgtcattgtgagaagacttgtcaagtgagtggactgctctatcgagatcaagactcttgggtagatggtgaccattgcaggaactgcacttgcaaaagtggtgccgtggaatgccgaaggatgtcctgtccccctctcaattgctccccagactccctcccagtgcacattgctggccagtgctgtaaggtctgccgaccaaaatgtatctatggaggaaaagttcttgcagaaggccagcggattttaaccaagagctgtcgggaatgccgaggtggagttttagtaaaaattacagaaatgtgtcctcctttgaactgctcagaaaaggatcacattcttcctgagaatcagtgctgccgtgtctgtagaggtcataacttttgtgcagaaggacctaaatgtggtgaaaactcagagtgcaaaaactggaatacaaaagctacttgtgagtgcaagagtggttacatctctgtccagggagactctgcctactgtgaagatattgatgagtgtgcagctaagatgcattactgtcatgccaatactgtgtgtgtcaaccttcctgggttatatcgctgtgactgtgtcccaggatacattcgtgtggatgacttctcttgtacagaacacgatgaatgtggcagcggccagcacaactgtgatgagaatgccatctgcaccaacactgtccagggacacagctgcacctgcaaaccgggctacgtggggaacgggaccatctgcagagctttctgtgaagagggctgcagatacggtggaacgtgtgtggctcccaacaaatgtgtctgtccatctggattcacaggaagccactgcgagaaagatattgatgaatgttcagagggaatcattgagtgccacaaccattcccgctgcgttaacctgccggggtggtaccactgtgagtgcagaagcggtttccatgacgatgggacctattcactgtccggggagtcctgtattgacattgatgaatgtgccttaagaactcacacctgttggaacgattctgcctgcatcaacctggcagggggttttgactgtctctgcccctctgggccctcctgctctggtgactgtcctcatgaaggggggctgaagcacaatggccaggtgtggaccttgaaagaagacaggtgttctgtctgctcctgcaaggatggcaagatattctgccgacggacagcttgtgattgccagaatccaagtgctgacctattctgttgcccagaatgtgacaccagagtcacaagtcaatgtttagaccaaaatggtcacaagctgtatcgaagtggagacaattggacccatagctgtcagcagtgtcggtgtctggaaggagaggtagattgctggccactcacttgccccaacttgagctgtgagtatacagctatcttagaaggggaatgttgtccccgctgtgtcagtgacccctgcctagctgataacatcacctatgacatcagaaaaacttgcctggacagctatggtgtttcacggcttagtggctcagtgtggacgatggctggatctccctgcacaacctgtaaatgcaagaatggaagagtctgttgttctgtggattttgagtgtcttcaaaataattgaagtatttacagtggactcaacgcagaagaatggacgaaatgaccatccaacgtgattaaggataggaatcggtagtttggtttttttgtttgttttgtttttttaaccacagataattgccaaagtttccacctgaggacggtgtttggaggttgccttttggacctaccactttgctcattcttgctaacctagtctaggtgacctacagtgccgtgcatttaagtcaatggttgttaaaagaagtttcccgtgttgtaaatcatgtttcccttatcagatcatttgcaaatacatttaaatgatctcatggtaaatgttgatgtattttttggtttattttgtgtactaacataatagagagagactcagctccttttatttattttgttgatttatggatcaaattctaaaataaagttgcctgttgtgacttttgtcccatctactgcatacttagtgctgagatccctgtaaaatgttttgatgaaaatatgtatgtagagtccagtcgcattatacatacatttcatagtgctgaaccttcttaaatgcctactcattcagcttaaacaggctgaagccaagtatgacaaagaggggaagggccaaaaacataatcaaagaataattttaaagagaattcttgtctctcttgc

SEQ ID NO: 1108 - DNA, 3676 bp, Homo sapiens
acagatcaaagatctctgattctaagaggtggctattttaagctcctgctatcaatttcctattcacacacagcaactggtggcaactaaaaataatccgctttactaccagctaagaatctggtcatatgtggctgatggacagtgtgcacgaagaagatttaggatccttctatccgtggcttctctccagcccactcatcagcttagtttgctgccatttgaaagctattgaaaagccattaacaggcaggaccgggagagccgcactgcagcacacctccgtgcagcagaatgtggctgcatgtgaacaccaattagagctgactattcccgggattgtggtactcggggctgtgtcaatcaagggtgctacaatagcacgtgcaccagtggtgcctcaagacccaccggggagaggcttatcttaactccagctgccgaatgagaatgagtttgaagctttttgcaggatcatggaacagagcctccatgcaatagtgcatcctgaggtaaactgttacctgagtaagggctttaagtaatgcatttcctgggaacgacagttgtgacagaagagaatgctggaacccgtagcaagattcctgtctgagatggaaagatgtctcactatcattttatcaagtgctgttgctttcagctatgtaacgtttttcgatcccatgagatggaaatcgaccagtgcttgctagagtcccttccccttggccaacggcagcgtctagtgaagcgcatgcgctgtgagcaaatcaaagcctactatgagcgcgagaaggcttttcagaagcaggaagggttcctgaaaaggctgaagcatgcgaagaatccgaaagttcacttcaacctcacggacatgctacaggacgcgattatccaccacaatgacaaagaagtgcttcggctcctgaaggagggggcagacccccacaccctcgtctcctcgggagggtccctgctccatctgtgtgctcggtatgataatgccttcattgcagaaattctgattgacagaggagtcaacgtcaaccaccaggatgaagacttctggacgcccatgcacattgcctgtgcctgcgataaccctgatattgtcctgcttcttgtattagctggagccaatgtccttctccaggatgtgaatggaaatatcccattagattatgctgtagaagggacagaatccagctctatcctgttgacctatctggatgaaaatggagtggatttgacctcactgcgccagatgaagcttcagagaccaatgagtatgttaacagatgtcaaacacttcttatcatctggaggaaatgtcaatgagaaaaacgatgaaggagtaaccctgttacacatggcgtgtgcgagtggctacaaggaggtggtgtctcttatcctggaacatggtggagacctcaacatagtagatgatcagtactggactcccctccacttggcagccaaatatggccagacaaatctggtgaaacttctcctgatgcatcaggcaaacccacacctcgtgaactgtaatgaggagaaggcgtcagatattgctgcctctgagtttattgaggaaatgctgctgaaagccgaaattgcctgggaagaaaaaatgaaagagcctttatctgcttctaccttagctcaagaagagccctatgaagagatcattcacgatcttcccgtactgtcgagtaagctcagtcccctggtgttaccaattgccaagcaagacagtttgttggaaaaagacattatgttcaaagatgcaacaaaaggtctgtgtaagcagcagtctcaggacagcatccctgaaaaccccatgatgagcggttccaccaaacccgagcaggtcaagctaatgcctcctgccccaaacgatgacctggcaacgctcagcgagctcaatgatggcagcctgctctatgagattcagaagcgctttgggaacaatcagatctatacattcattggagacattcttttgcttgttaacccatacaaggagcttccaatttattcttccatggtgtcccagctgtatttcagctcctcagggaagctgtgttcctcgctgcctcctcacctcttctcctgtgtggagagagcctttcaccagctcttccgggaacagcggcctcagtgtttcatcctcagtggagaaaggggatcaggaaagtctgaagccagcaaacaaatcataagacacctcacctgcagggctggcgccagcagggccacactggattccagattcaaacatgtcgtgtgcatcttagaagcctttggacatgccaagaccacacttaatgatttgtccagttgcttcatcaagtattttgaactgcagttctgtgagaggaaacaacagctaaccggagccagaatttatacatatttgctagagaaatccagacttgtttcacaacctcttggccagagcaattttctcattttctacttgttgatggatgggttatctgctgaagaaaaatatggacttcatcttaataatttatgtgcacaccggtatttgaaccagaccatacaggatgatgcatccacaggggagcgttctctgaacagggagaaattggctgttttgaaacgagccctgaatgtagttggcttcagcagcttggaggtggagaatctgttcgtaattctagcagcaatattgcaccttggagacattcggtttactgccctgaatgaggggaactccgccttcgtttctgacctccagctcctggaacaagtggctggaatgttacaagtatcaacagatgaattggcatctgccttaacaactgatattcaatattttaaaggggatatgataatacgacgacataccatacagattgctgagtttttccgagacctcttggccaagtccctgtacagtcgtttgtttagctttttggtgaataccatgaattcttgcctccacagtcaagatgaacagaaaagcatgcagacattggatattggaatattggacatttttggttttgaagagtttcaaaagaatgaatttgaacaactttgtgtcaacatgaccaatgagaagatgcaccactatatcaatgaagtgctttttctccacgagcaagtggaatgtgtacaagagggagttaccatggaaacagcatattctgctggtaaccagaatggagttttggacttttttttccagaagccatctggatttctcaccttattggatgaagaaagtcaaatgatttggtcagtggaatcaaattttccaaaaaaaactacaaagtctcctagaatcctcaaacacaaatgcggtgtactcccccatgaaggatgggaatgggaatgttgccctcaaagaccacggtacagccttcaccatcatgcactacgcaggaagggtaatgtatgatgttgttggggcgattgaaaaaaataaagactccctttcacagaatcttctatttgtaatgaaaactagtgaaaatgtcgtgatcaatcatttgttccagtcgaaattgtcacaagcaggatccctcgtatctgcctatccttcctttaaattccgaggacataagtctgccctgctcagtaagaaaatgacagcttcttcaattattggagaaaacaagaattatctagaacttagtaagttatt

SEQ ID NO: 1109 - DNA, 5172 bp, Homo sapiens
ttggaaaatatgattaatgatctacacagagccattcagcgtacacagtctgcaatgtttaatcaagttttgattttaatatctacattactatgccttatcttcacctgcatttgtgggatccaacatctggaacgaataggaaagaagctgaatctctttgactccctttatttctgcattgtgacgttttctactgtgggcttcggggatgtcactcctgaaacatggtcctccaagctttttgtagttgctatgatttgtgttgctcttgtggttctacccatacagtttgaacagctggcttatttgtggatggagagacaaaagtcaggaggaaactatagtcgacatagagctcaaactgaaaagcatgtcgtcctgtgtgtcagctcactgaagattgatttacttatggattttttaaatgaattctatgctcatcctaggctccaggattattatgtggtgattttgtgtcctactgaaatggatgtacaggttcgaagggtactgcagattccaatgtggtcccaacgagttatctaccttcaaggttcagcccttaaagatcaagacctattgagagcaaagatggatgacgctgaggcctgttttattctcagtagccgttgtgaagtggataggacatcatctgatcaccaaacaattttgagagcatgggctgtgaaagattttgctccaaattgtcctttgtatgtccagatattaaagcctgaaaataaatttcacatcaaatttgctgatcatgttgtttgtgaagaagagtttaaatacgccatgttagctttaaactgtatatgcccagcaacatctacacttattacactactggttcatacctctagagggcaagaaggccagcaatcgccagaacaatggcagaagatgtacggtagatgctccgggaatgaagtctaccacattgttttggaagaaagtacattttttgctgaatatgaaggaaagagttttacatatgcctctttccatgcacacaaaaagtttggcgtctgcttgattggtgttaggagggaggataataaaaacattttgctgaatccaggtcctcgatacattatgaattctacagacatatgcttttatattaatattaccaaagaagagaattcagcatttaaaaaccaagaccagcagagaaaaagcaatgtgtccaggtcgttttatcatggaccttccagattacctgtacatagcataattgccagcatgggtactgtggctatagacttgcaagatacaagctgtagatcagcaagtggccctaccctgtctcttcctacagagggaagcaaagaaataagaagacctagcattgctcctgttttagaggttgcagatacatcatcgattcaaacatgtgatcttctaagtgaccaatcagaagatgaaactacaccagatgaagaaatgtcttcaaacttagagtatgctaaaggttacccaccttattctccatatataggaagttcacccactttttgtcatctccttcatgaaaaagtaccattttgctgcttaagattagacaagttttagccataaaatctctgccacagaccattgttcctgattcaagcgaaatattttttctggactactcctggggatcttggactcaaggctttgcctagatgacttactcaggtgtggagtgacttttgctgctaatatggtggttgtggataaagagagcaccatgagtgccgaggaagactacatggcagatgccaaaaccattgtgaacgtgcagacactcttcaggttgttttccagtctcagtattatcacagagctaactcaccccgccaacatgagattcatgcaattcagagccaaagactgttactctcttgctctttcaaaactggaaaagaaagaacgggagagaggctctaacttggcctttatgtttcgactgccttttgctgctgggagggtgtttagcatcagtatgttggacactctgctgtatcagtcatttgtgaaggattatatgatttctatcacgagacttctgttgggactggacactacaccaggatctgggtttctttgttctatgaaaatcactgcagatgacttatggatcagaacttatgccagactttatcagaagttgtgttcttctactggagatgttcccattggaatctacaggactgagtctcagaaacttactacatctgagtctcaaatatctatcagtgtagaagagtgggaagacaccaaagactccaaagaacaagggcaccaccgcagcaaccaccgcaactcaacatccagtgaccagtcggaccatcccttgctgcggagaaaaagcatgcagtgggcccgaagactgagcagaaaaggcccaaaacactctggtaaaacagctgaaaaaataacccagcagcgactgaacctctacaggaggtcagaaagacaagagcttgctgaacttgtgaaaaatagaatgaaacacttgggtctttctacagtgggatatgatgaaatgaatgatcatcaaagtaccctctcctacatcctgattaacccatctccagataccagaatagagctgaatgatgttgtatacttaattcgaccagatccactggcctaccttccaaacagtgagcccagtcgaagaaacagcatctgcaatgtcactggtcaagattctcgggaggaaactcaactttgataaaaataaaatgagaaacttttttcctacaaagaccttgcttgaaaccgcaaaagttttgctggcacgaaagaaactagatggaaatatatgtaattctctcatatttaaaaacgtaatctcttctcttagaagtatagatcattttgaaacttaatgtactacttactggtactctccctattaatatttgaaggacctcaatggaataaatttgaaaagctaaattaaaatacaaaaatttaaatctgacatttaattgttttataataatccaaactctatgaaagcaattttaaaaattattaaggttttatgaagttgacaaaatctaactatatttggtgcatcacaatggacacagaatgctgctgctcctcttaaaaattaaatgtgtcatattatattctttaaacttactgttttacaaaattgagctcatcgtaaatgtctagtcttctcacatagagattaaccaacaaacttgtgtggctgacctttgtgtaagaatcatagtttgctttagaatacaaatctttaagtcattttaacttttttttctgccttacgatataaaaatatttatcttagaatttgagatgttcatagcatgttttattacattgaagaaactaaaacataaatgaaaagaaacactaggttcctgcactttttggtaactttatgtctagcaaatattttatgccaagaaaagcatactataaagcaaatatctattattctcctaaacgaatgcctagcatagagaaaatacttaatacacatttgttgacttaaatttaattcaaggattgaaaaattaactggatatcttgaaatatacagtaatgattgtccttagactcttgaactttaccatctttcctattcatatatctatatagtaaatttcactagaaaaattcttttaaaattgacagaagataatttataccttttatggactctgaagacacttcaaaacattaaaagtccttatgtctttggtaatgaaacaataacactcaatgaaggatgtattaaaatttttgacttaattttgaaatcgtatatatgagctatactttaacattatgagagaaaagcataaaacaaaaataggtagttcttggcttttaacattaatgcaaatcatgcagaatttgagttataaatttaaatataaattgaccattgatgatatccagtttttcattttttacctgtattgcattttccccctagagaaatagatcaaaagagcacaagagtatgcgtacatagtttaccaggtagtagaagtgtgttaaaatgttcctgtaaaagaaacattggtaaatttaaatacatactgttctaattttgtattttttaatttttgaatttgacattgagtttaattcagcaacaacaaaaaatacatataaaactagaaagggactttttttcctttcttttcataatgaagcagatcaacttaaaggataataaaatttttaaagaaaagatattctaatgtactctcaataattctacagaaataaaactgtaaagtgcaatgtgaaatcaaagattatagtcattgtataatttggcttggaggctatgaaatgtctttttttctttttggtattttacattattcacattttagaataacaagaacaccaagaattacccctaaaacagagaccctgtatttaatctactttgatcagagaagtagaatttataacaggttagctaaaattgggagcatgccttaaaacttaaagattgtatgcatatatgtgtatatgttataaacgtgaaatatatttgacacacacattcacatataaattgttaaaaactgaaggcagaatggaactaatatatgtaacagagaaaaacaataaattttatgaacttgttttatatttgcatatcaagagtcaagtatgatgtttctttaagttgactttttttacttcattatttttaggaataaatgtaagattttacaaatcttttatttccccacaagatctgaagtttggtatttttgcattatgacagttgttgagactaggattttaagctaggatatgattatatttcctatataactaaaaattttgtttcataaattttaaaataattatttttgactatgaacattagtccaaatttaatatttgacacagttcataccagcttgctacaataatgataatttattagtctttctgttatttaaagaataaaaacatgcttataaaagacttttaatgaaatgttgcctttttaaaataattatacttgcacatgaaaataaaatataaagtcaataatagtccttgtagcccaatgggaattgattctgtttattgtctgtaccattttgctaccagttacattgaactgctttaaaataaataataaaattatttctaatgatg

SEQ ID NO: 1110 - DNA, 2413 bp, Homo sapiens
gcaggcctctcctccgagaacagaggccaggtcatgactcactggcttcctgcaacctgacgatggcccagccagaagacaaggcacctgaagtccccacagagggggtgaggtgaacaaagcagacaggacccctctaggggtcctcagcaccctagagccacttactcgcctgcagaggacatggggggtgtggcatgtgccagagctggatacccaggatgcggaggcccttgtggggctgtggccactagggagtttcttggtcacaggacgtgaccccagccaggccctggtgttgaggtcaggacctttaccaggagaagtcaatacctaccagatccagaagattcccagaggtgtgtccctggaatcctccaacctctgcatgccagacctgccccatctcctggcctttctatcagccagcagggatgttctgcccagaaccctgctcttgccccctcccactctagggcccagagatgaacacacagatcctgtgcagatcggcagggtccaacaggacaccccagggaaggtgctttccattgtgaaccagctctacctggagacccacagaggctgggggagggagcagacccctcaagaaacagagccagaggctgctcagagacatgatccagcccccaggaaccctgcgcctcacggggtctcctgggtgaaaggcccgctcagcccggaagtggaccatcctgggccggctctcgccagcctactggaagaggaggaggaagaccttgaaggaaaggaggaaggaagggaggacgaccctgaagaggaaggccctgaggacgtgctcaccattcacgtccagtctctggtcagggcccggagcagctacgtggccaggcagtaccgaagccttcgggtgcgcatcgcctcagattctgggggtccccacgggtctggggacccggccacggagctgcttcaggatgtgcggcacctccttactgacctccaggatcacctggcaaaggactcctacatcagggctgtctttggaagcaggggtcctgggctccccaagaaggacgaggatccaggccccgcgctggagacggcggtgtgccaggcggtgctggcgcccctgaagccggccctgtggacacgactccgcacactccgagcaccggagctgcggcggctgcggcggcgacagacagccctgcgggcgggggcggggcctccgggggcacaggggccgggaccggaagggcagagccccgcccccgccttgcggagccgcatccacgagcgccttgcgcacctccacgctgcctgcgccccgcgccgcaaggtggcgctcctcttggaggtgtgcagagatgtctatgcgggcctggctcgaggcgagaaccaagatcccctgggggccgacgccttcctgccggcgctgaccgaggaactcatctggagcccggacattggggacacgcagctggacgtagagtttcttatggagctcttagatccagatgagctgcggggagaggctgggtactacctgaccacgtggtttggggcgctgcaccacattgcccactaccagcccgaaacagaccgcgctccccgggggctcagctccgaggcccgcgcctccctgcaccagtggcaccgcaggcggacgctgcacagaaaggatcatcccagagcccaggccaacctgccctttaaggagccatgggcagaagagactgtgacagggaccagtgacaactaggggtttcacacccctccgttcatgcctgtaatcccaacattttgggaggccaaggtgggaggattgctcaaactcctaacctcaagcaatctgcccacgtcggcctcccaaagtgctgagattgtaggcgtgagccaccgtgcccaattgtgatcgtttttcccaaagaatgtatcacatgctaacaaaccatatatttatgtatttcattgttcatagtaactacaatttaaaaaactaaaaagaaacaagtgaggccgggtgcggttgctcatgcctgtaatcccagcactttgggaggccaaggtgggcagatcacctgaggtcgggagttcaagaccagcctgacaaacatggagaaacccgtctctactaaaaatacaaacttagccgggcatggtggcgcatgcctgtaatcccagctactccggaggctaaggcaggagaatggcttgaacccgggaggcgaagattgcggtgagcggagattgcgccattgcactccagcctgggcaacaagagtgaaacaccatctcaaaaataaataaataaataaaaagaaacaagtgaagttaacgttaataataatatatttgatttaacacaatgtatcccaaatattatcacttcaacatgtatccatattaaaaagttactgacatattt

SEQ ID NO: 1111 - DNA, 2090 bp, Homo sapiens
agacgcctgagtcggagagacagggggcagaggttgccaagccctggcttccacttgtcaggttccctgtgctagacatgcataatctgtattccatcactgggtacccggacccaccagggaccatggaggaggaggaggaggatgatgactatgagaactcaacacctccctacaaggaccttcctcccaagccagggaccatggaggaggaggaggaggatgatgactatgagaactcaacacctccctacaaggaccttcctcccaagccagggaccatggaggaggaggaggaggatgatgactatgagaactcaacacctccctacaaggaccttcctcccaagccaggttcaagtgctccaccaagacctccaagggcagcaaaggaaacagagaaacccccacttccttgcaagccccggaacatgacaggcctggacctcgccgctgtcacctgtccacctcctcaactggctgtgaatcttgagccttctccattgcagccatccctggccgcaactccagtcccctggctcaatcagaggtctggaggtcctggctgctgccagaagaggtggatggtgtacctgtgtctgctggtggtgacttccctgttcctgggctgccttggtctcactgtgaccctgattaagtaccaggagttgatggaagaactgagaatgttaagctttcagcagatgacgtggcgaacaaatatgactggcatggcagggctagctggcctgaagcatgacattgcccgtgtaagagctgacaccaaccagtccctggtggaactttggggcttattagactgccgccgaattacctgtcctgaaggctggctgccctttgagggcaagtgttactacttctccccaagcaccaagtcatgggatgaggcccggatgttctgccaggagaattactctcacttggtcatcatcaatagctttgctgagcaccttctgggagccagaggaacccaataacatccacgatgaggactgtgctaccatgaacaaaggtggcacctggaatgatctctcttgctacaaaactacgtattggatttgtgagcggaaatgttcctgttgaagcccagggctgaggctgggggtccatatctgagtgtctctttgagatgagaatctcctgccctttcgtggacggccttgcctcttcgtgagtggacacacagatgtgcctcaaacaggattggcaccctggatgcagcaagttcccaggggtgcaagtcaggctgtttctagagtgaggacttgggcttgccctagtagatggtgagctgggaggatgctcagagcttggtggtgggaggtctcccactcctggggttgaaaggatcttcactaagttcctgatcatgactcttgggaagtgatactagccctgaggaccctggggctggtgttgaacctgggatgaaatatcctggcgcctgtgaaccacaaagagctgggactgggctccttttcctgcggcctcaaacttctgggctcaggtgatcctcccatctcagcctcctgagtagctgggactacacatgcgcaccaccatgcctggccaattttttgtagcatttaaagagagggagtctcactatgttgcccaggccagtctcaaactccttgcctcaatggatcctcctacttgggcttcccaaattgtgaggattacaggtgtgagccactgtgcctggctcaaaattattattattatttttatagagatgaggtctcactctgttgccgaggctggtctcaaactcctggggtcaagcaatccttccgtgatggcctcccaaagtgctgggattacaggcgtgtgtcaccgtacctggccgatatttttatttttatttttactttccccatcttttccttttttttttttttccaaacaaaagctttgaaagtggtgacagaaaaatttccctttgagctagacctctagatctgcctcgcacagaaatacattaagtgggctggtctcatgtagtccccacatcattgcaaattactaaacccacactcaacagaaacaaagcatacatcattattctc

SEQ ID NO: 1112 - DNA, 2170 bp, Homo sapiens
agacaggggtagtgcgaggccgggcacagccttcctgtgtggttttaccgcccagagagcgtcatggacctggggaaaccaatgaaaagcgtgctggtggtggctctccttgtcattttccaggtatgcctgtgtcaagatgaggtcacggacgattacatcggagacaacaccacagtggactacactttgttcgagtctttgtgctccaagaaggacgtgcggaactttaaagcctggttcctccctatcatgtactccatcatttgtttcgtgggcctactgggcaatgggctggtcgtgttgacctatatctatttcaaaaggctcaagaccatgaccgatacctacctgctcaacctggcggtggcagacatcctcttcctcctgacccttcccttctgggcctacagcgcggccaagtcctgggtcttcggtgtccacttttgcaagctcatctttgccatctacaagatgagcttcttcagtggcatgctcctacttctttgcatcagcattgaccgctacgtggccatcgtccaggctgtctcagctcaccgccaccgtgcccgcgtccttctcatcagcaagctgtcctgtgtgggcatctggatactagccacagtgctctccatcccagagctcctgtacagtgacctccagaggagcagcagtgagcaagcgatgcgatgctctctcatcacagagcatgtggaggcctttatcaccatccaggtggcccagatggtgatcggctttctggtccccctgctggccatgagcttctgttaccttgtcatcatccgcaccctgctccaggcacgcaactttgagcgcaacaaggccatcaaggtgatcatcgctgtggtcgtggtcttcatagtcttccagctgccctacaatggggtggtcctggcccagacggtggccaacttcaacatcaccagtagcacctgtgagctcagtaagcaactcaacatcgcctacgacgtcacctacagcctggcctgcgtccgctgctgcgtcaaccctttcttgtacgccttcatcggcgtcaagttccgcaacgatctcttcaagctcttcaaggacctgggctgcctcagccaggagcagctccggcagtggtcttcctgtcggcacatccggcgctcctccatgagtgtggaggccgagaccaccaccaccttctccccataggcgactcttctgcctggactagagggacctctcccagggtccctggggtggggatagggagcagatgcaatgactcaggacatccccccgccaaaagctgctcagggaaaagcagctctcccctcagagtgcaagcccctgctccagaagatagcttcaccccaatcccagctacctcaaccaatgccaaaaaaagacagggctgataagctaacaccagacagacaacactgggaaacagaggctattgtcccctaaaccaaaaactgaaagtgaaagtccagaaactgttcccacctgctggagtgaaggggccaaggagggtgagtgcaaggggcgtgggagtggcctgaagagtcctctgaatgaaccttctggcctcccacagactcaaatgctcagaccagctcttccgaaaaccaggccttatctccaagaccagagatagtggggagacttcttggcttggtgaggaaaagcggacatcagctggtcaaacaaactctctgaacccctccctccatcgttttcttcactgtcctccaagccagcgggaatggcagctgccacgccgccctaaaagcacactcatcccctcacttgccgcgtcgccctcccaggctctcaacaggggagagtgtggtgtttcctgcaggccaggccagctgcctccgcgtgatcaaagccacactctgggctccagagtggggatgacatgcactcagctcttggctccactgggatgggaggagaggacaagggaaatgtcaggggcggggagggtgacagtggccgcccaaggcccacgagcttgttctttgttctttgtcacagggactgaaaacctctcctcatgttctgctttcgattcgttaagagagcaacattttacccacacacagataaagttttcccttgaggaaacaacagctttaaaagaaaaagaaaaaaaaagtctttggtaaatggc

SEQ ID NO: 1113 - DNA, 2264 bp, Homo sapiens
attttctcttttatcttctcccctgtggtagtgtctggaggtcgcagccgcctgcatctcattgatctcggcagctgtgtgaaagctcttagcaaaaatcgagaaggaggctcagggctgtgtctctcgctgtctgctctgggcaatgtcatcctggctctcgtcaatggcagcaaacacattccatacaaagagagcaagctcgccatgttgctgcgggagtctctggggaacatgaactgccgtaccaccatgatcgcgcacatctcggccgcggtcgggagctacgcggagaccctgtccaccatccagattgcatcgagagtcttgaggatgaagaaaaagaagacgaagtacacatccagctcgtccggcggggagagctcctgcgaagaaggccgcatgcgcaggcccacccagctgagacccttccacaccagggccacggtggaccctgacttccccatcgctcacctgtccagcgaccccgactactcctccagcagcgagcagtcctgcgacaccgtcatctacatcgggcccaacggcacggccctctctgacaaggagctcaccgacaacgagggccccccagactttgtccctatcgtgccagccctgcagaagacccggggcgacagccggcccgcagaggcaggagaggctgcagccggcaagtcagaaagggactgcctgaagtgcaacacgtttgccgagctgcaggagaggctggactgcatcgacggcagcgaggagcccagcagctttcctttcgaagaactgcctgctcagtttgggccagagcaggcaagcagaggcccccggttaagccaagcagcgggggcaagcccactctctgagtctgataaggaagataatgggtccgaaggtcagctgaccaacagagaaggccctgaactcccagcctccaagatgcagaggagtcactcacctgtgcccgccgcggcacccgcccacagccccagcccggcctcacccaggagcgtcccgggcagcagtagccagcacagcgcctccccactcgtgcagagccccagcctccagagcagccgggagagcctcaactcctgcggcttcgtggaaggcaagcccaggcccatgggctccccccggctgggcatcgccagcctgtccaagacctcggagtacaagccacccagctctccttcccagagatgcaaagtctacacccagaagggggtcctgccgtctcccgcccccctgcctccctcgagcaaggattccggcgtggcgtctagggagtccttgctgcagcccgaggtgcgtacgcccccggttggaatgagcccccaggttttgaaaaaatccatgtctgctgggagcgaagggttcccggaaactcctgtcgatgatgagcagcaggcagctactccttcagagtccaagaaggagatcctgagcaccacgatggtgacggtgcagcagccactggagctgaacggtgaggacgagctggtgttcacgctggtggaggagctgaccatcagcggggtcctggacagcggccgccccaccagcatcatcagcttcaacagcgactgctctgcacgggccctggcctcgggctcgcggcccgtcagcatcatcagcagcatcagcgaggacctggagtgctactccagcacggcccccgtctccgaggtcagcatcacacagttcttgcccctcccgaagatgagcctggatgagaaggcccaggacgcagggagcagacgctcttccatcagctcctggctgagcgagatgagcgcgggcagtgagggtgagcagtcgtgccacagtttcatagcccagacgtgttttgggcacggggaggcaatggcagaacctgtggcctcggagtttgtcagcagcctccagaacaccgctgtggtgtgcagagagaagcccaaggccagccccgacaacttgctcatcctgtctgagatgggagatgactctttcaacaaagcagcccccatcaaaggctgcaaaatatccacagtgagcaaggccatggtcaccatctccaacacggccaatctgagcagctgcgaggggtacatccccatgaagaccaatatcacagtttacccctgcattgccatgagcccccggaacatccaagagccggaggcccccaccgccacccccaaagcaggccccacattagcccagtcccgggagagtaaggaaaacagtgcaaagaaagagatgaaatttgaggacccgtggctgaaacg

SEQ ID NO: 1114 - DNA, 2970 bp, Homo sapiens
acttgacaccacgcgggtgttgcagtgcggactgtttgcctcttccccaccaagaacaccatttggtttcccccggctgggtctctatttagatgggcagtgatgacaccaaatataagcataaaaagacgttttaaaactacagatcctgaaacccagcacggcaggcacctgcagcttccagtgctgtaacagagaaaaaaaaaaatccccactttgcaattgcatctggtcaatgagaggctctagttttggggaagagggaaacacctaaccttgacagaatcatcaccagagacacctgccggctgacaaggacagctttcttggagccaacagatgatgcaaggaaataagaagtgcacagacgcgttcagcgactcctccagcatcggcagcgtgttggatgatgcagacagggaggtgagcagcctaacagaccgggcattccggagtttgtgcatctccgaggacacatccttccatgactcctatctggctgtgtccccggatatcacccgacaggtgtttgggacttttcaccagagaacagtgggccacacccagaggaaaagtggcatttggagccagttaccgtcacagggcacggaacattcgggctgggcggccaccttccaacagctacccaagtacgttcagggagaggaaaagtaccccaaaaccagccccccaccaacgccagtccagaggagactggaggtgccagtttccggcctaaggagcagcaataagcctgtctccaaagtatcaacactaattaaatctttcgacaggaccgagagccaacgttgtgagagcaggcccactgccagcaagcctccggctctgaaaaatcctcccaaattcgctcctcttccagaaaacagtgtcaacttctgcttcgattctgcctttctgacagtcaggagggtgcccgctgaagtttccaacacccatcagaacagctaccagccaggcaggaagcacggagaacaggagtcctccaagaatccagaaatggcctgtcacggctccagcagcttcctcccagcagccaatgacacggccaccttatgtgagtcaaagttcccctctccacaccacaagccagtcacgggtgagcctgggagaggcaaaggtacctttctgcacagtgaaaatagtgcttttgagtcatggaatgcccaccaaccaaagctgctggagagaaaggacacagctggaaccgtcccagaaagcaaagctcccaagcactatggggacacgaccttgctaagagaaccctgtcctcctgagcgcacagtctctccctgccaggtccaggccagctgcagtcaggaagagaacagactcgcagcaggggctctgtccacatctataccctgggggtgcagggatccaggagcccaggtatttgctgtggaaggaaaagctcccagctcacaacctgattctcaagagaagccagcccagcccccatggaggaagccaaagactggcaaaaaagggaaagaaagtctacaagatactttagaagaaaagacacagaccaaccagagaggcccacctttgtatacaaaacacaacccccaggaacagttttcagaaaacaatgctcttgacctgcctgtggaacccaatgaacattatgatcccccctttaacatcagtaagctcctgacccccatcatacccagcaagcacgccctggattcagcagacagccagccagcagagcgaaccccatcacccccaggacagctaaacggataccaagagaaggagcccagtgaatgtcagtctcgagacagctacaagtccaaagcccctagcctgctgttcaacctcaaggacgtgcggaagcgtgttaagagcacatacagttcctcacctctcttgaaagtgcttgatgagaaaactagaggtaaggttgatggaaagcaagaacctgtgagcaacggtgtcatcctccccaatgggcttgaggaaagccctccaaatgagctttctaaggagagacccgctgatgaccccactgcatcacacatcaatccccagaaggaccctacagctgaccccagtgagccctctgcagacagctatctaactcttagcacagctccgactatcgccaaagcccccttctatgtcaatggggaggctgctgagagaagcagttatgagaacaaggaggtggaaggagagttggagatgggtcctgccggatccagctggtgtccagactccagggaacaccgccccaggaaacacctctccctgaggctttgcaatagggatcctgagcctggaggggctacagagaaagtgaagacccaccagctagagaatgggctctccagatctgtgtcccaagagacagaacctgagagggaagcaggacttcagaacacacacacacacacacacacacacacacacacacacgatcatcaacacatacttagcctttttagatccataaagtccagaaggcagtagggatcccaagacgacctcacccaaagggctccctggctctcctctgatggaggggcactgcttgcttggcccggtcccctccgtgccagttcccaggcgcactctactccagcccttctccctccctcccttcctccctctcctggcccaccctgctcttccctcgccctgcaaattaggtgggtgtggcaagggcaccgcctggtcccaagtgtccctctgtacccacacccacccactcacttgtaagctccttgatgagcaaacccctaaggcccccagctcagactcagcaggcattcaggtcaactcaggcagactgactaaggaccagcccagggcaattttgcagaaatgatcatttgcacagaatgggtttccttcacagggagaaacttgcctctgaaagctattttctgatcaagaaaaggcccactttttaaaaagtgaaacaagtttgcagatacggtt

SEQ ID NO: 1115 - DNA, 2580 bp, Homo sapiens
attcaggtccctgcaccgcactccgctcggaccccaggccgccggtgctgtcgctactcaagtgagtcccgcggtgcccctcccgccgcgccgcccgtcgggcatggactcgggccgggacttcctgaccctgcacggcctacaggatgatgaggatctacaggcgctgctgaagggcagccagctcctgaaggtgaagtccagctcatggaggagagaacgcttctacaagttgcaggaggactgcaagaccatctggcaggagtcccgcaaggtcatgcggaccccggagtcccagctgttctccatcgaggaccgctgcttctccattgtcttcaaggaccagcgcaatacactagacctcatcgccccatcgccagctgatgcccagcactgggtgctggggctgcacaagatcatccaccactcaggctccatggaccagcgtcagaagctacagcactggattcactcctgcttgcgaaaagctgacaaaaacaaggacaacaagatgagcttcaaggagctgcagaacttcctgaaggagctcaacatctaggtggacgacagctatgcccggaagatcttcagggagtgtgaccactcccagacagactccctggaggacgaggagattgaggccttctacaagatgctgacccagcgggtggagatcgaccgcaccttcgccgaggccgcgggctcaggggagactctgtcggtggatcagttagtgacgttcctgcagcaccagcagcgggaggaggcggcagggcctgcgctggccctctccctcattgagcactacgagcccagcgagactgccaaggcgcagcggcagatgaccaaggacggcttcctcatgtacttactgtcggctgacggcagcgccttcagcctggcacaccgccgtgtctaccaggacatgggccagccacttagccactacctggtgtcctcttcacacaacacctacctgctggaggaccagctagccgggcccagcagcactgaagcctacatccgggcactgtgcaaaggctgccgatgcctggagcttgactgctgggacgggcccaaccaggaaccaatcatctaccacggctatactttcacttccaagatcctcttctgcgatgtgctcagggccatccgggactatgccttcaaggcgtccccctaccctgtcatcctatccctggagaaccactgcacactggagcagcagcgcgtgatggcgcggcacctgcatgccatcctgggccccatgctgttgaaccgaccactggatggggtcaccaacagcctgccctcccctgagcaactgaaggggaagatcctgctgaaggggaagaagctcggggggctcctgccccctggaggggagggtggccctgaggccactgtggtgtcagacgaagacgaggctgctgtgatggaggatgaggcagtgaggagccgtgtgcagcacaagcccaaggaggacaagctcaggctagcacaggagctctctgacatggtcatttactgcaagagtgtccactttgggggcttctccagtcctggcacccctggacaggccttctacgagatggcgtccttctctgagaaccgtgcccttcgactgctccaagaatcaggaaacggctttgtccgccacaacgtggggcacctgagcagaatctacccggctggatggagaacagactcctccaactacagccccgtggagatgtggaatgggggctgccagatcgtggccctgaatttccagacacctgggccagagatggacgtgtaccagggccgcttccaggacaacggggcctgtgggtacgtgctgaagcccgccttcctgcgagaccccaacggcacctttaacccccgcgccctggctcaggggccctggtgggcacggaagcggctcaacatcagggtcatttcggggcagcagctgccaaaagtcaacaagaataagaattcaattgtggaccccaaagtgacagtggagatccatggcgtgagccgggacgtggccagccgccagactgctgtcatcaccaacaatggtttcaacccatggcgggacacggagtttgcgtttgaggtagttgtgcctgaccttgccctcatccgcttcttggtggaagattatgatgcctcctccaagaatgacttcattggccagagtaccatccccttgaacagcctcaagcaaggataccgccatgtccacctcatgtctaagaacggggaccagcatccatcagccaccctctttgtgaagatctccctccaggactaggctggaggaagccagtggggtcccccctgagtgggctgggccctctgtccacatgtggggacagggctggtgtggctgctcccagcctcttgctcagagctaggcccccaaattgccttcagccctaacatagtgtctgctgctgcctccctggggaccaggagctagcccagtccctggagctgtccttcattccgttaggaataacactgcagccctctccaccctccggccagcgagtggtcaaggatttttataaaaatcacgataagatt

SEQ ID NO: 1116 - DNA, 2233 bp, Homo sapiens
cttcaacatcttcgattccattttgggtgcctccatggggactgtgtgtccctgtactggaacccaagtgaagacttggctcagagtccatttgctgttctctagaaatccagcctaatcctcttgtgcaaatataatatatatctagtaggcattgctttttctttctggagacaaaacacaggaggattgccccttgatgaacaggactaacctgctgattctttgaagcaaggaactggaaatggtccttttagggatttatgctctggattccagaaaacacgcaaacagggccaataaatgcatctttatttttgtgtccattttgacctggtcaaggaagattccaacaaaaaatccacagtgccggagcaagaagatctcaggctgtgtccctctacagggaagcgctttctgttgtctgaaagaaaggaaagtgcatccttttagagtgttactgtttgagaaaagcaacgttgaagttgatgctgattttggtaatacatttgcagagcatgcttatcatcagacttggatgatgttgggttctgtttttgctttgttttttttccaagacagtgtgtttgttgcccaggctggagtgtggtggtacttcccacctagatctcttgggctcaagaggtctttttttatttttctttctcaagagagagtctggtggtgacacccaggctggagtgcagtggtgcattatcagctcactgcagccttcccctccccggttcaagtgattctttcacctcagcctcccgagtagctgggattacaggtgtgggctaccacacccggctaatttttgtatttttagcagagacagggttttaccatgttggggaggctggtctcaactcctgtcctcaagcgatccacctcccttgcctcccaagtactgagattacaggcgtgagcaactgcgcccggcctcaagtggtcctcttaagtcaggctaccaagttttgggactacatggggcatgccaccacacttggctaagtttttaatttttttttttttttttttttttttgagacggagtctcactctgtcgcccaggctggagtgcagtggcaagatctcggctcactgcaagctcggcctccggggttcacgccattctcctgcctcagcctcccgagtagctgggactacaggtgcccgccaccacgcctggctagttttttgtatttttagtagagatggggtttcaccctgttagctaggatggtctcaatctcctgacctcgtgatccacccgcctcggcctcccaaagtgctgggattacaggcgtgagccaccgcgcccggccgatagtttttaatttttgatagaaagggaatctctcttgcctaagatggtctcaactcctgagctcaagggatcctaaaggtgtgagccgccttgtcctgatgacccatttcaaacgtagctgacatggccaggcatcatggggcacacagtcccagctactgcagaagccggggtgggagggtcctttgatttccaggctataccatgtgctgatcacacttttgatcccgagtagctgggattacaggcagccaccgccaggccggctaatttttatttatttacttattttttcagacggtgtttccctcttgttgcccaggctggagtgcaatggcatgatctcggatcactgcaacctccacctccctggttcaagcgattctcctgcctcagcctcccgagcagctgggattacaggcatgcatcaccacgcccggctaattctttgtatttttagtagagatgggatttctccatgttggtcaggctgatcttgaactcccaaccttaggtgatccacccacctcggcctcccaaagtgctgggattacaggcatgagccattgtgcccggcccatttcatttatttttatgtgtgctgctgaagcaagcacttatgtgtaggaattgttcttcctgtgagcatatgttggccagcctggaccacataccaagatcccatctctttaaaaacacagattacgtggcacctggcacctggtcccagagacttcatttgggttggtcatttgaaacactagcctcccatcaatttagtgtaatcaatccaaatcatgtgtccttcattaagagactaagaacgcctccacgtctatccagtctattttgtaatccccaacggttgtcaatattaataaaatttcttttctttttcct

SEQ ID NO: 1117 - DNA, 3311 bp, Homo sapiens
actcgctgagaggccctaggcctacgtccagatggtggggaaactgtgggggcccaacctgttcgaagggaggaattggggaagggacgggctggccttctccccatgggaaaggggaggacattcagaaggacctcttggcatttgggagcttctgaaggagctgcggccaccgccgccctgtctcctgtgcccatgattcacggagtggcccgggacagagcagcctcttcgcagaaccctcagggaggctccaggcctcagggaggaggcagcaaaggttggttttgctattgtcaaagtcttcagtgggcccttggccaggagactggtggaattgaaacccactcccttaggggaagggtcccagcaggcgtggctgtcttgtctctggttcggattaggtgacaggcactccaaatgtgacaccttctcgttctcatcttagtttctctatcatctgcatttagcccgctagctcagaccaggatgtgccccatgcaggtgagggtgggtggggagagccaaggcactccagcgggctcagggcctggaccctgtgaggcctggatgccgcctccacctaagccttcggctgaacccccagggtggcgtgtgtgtcccttcaggggctgagtgttcgtctgtgtgtctttgatggggccaagcagaagagctcgaattggaaattattcacttctagaatcacaattcagaaaaaaagaaatggttcccatgagcccaggtttcatgctcctgcagtcactacatggacctggacgtcactcctatgacctctttttcaggcgcacaaacacaggtagctgccatgagcatcccacgcgcatgcgtcctggtgtgtttctgccacatgatccgtaggctagattcaaggagcactttctgccagcagcagggaacagagtgcaggcctgggatgaactgaggacatcagaatgaaatgctctaagagccatgatctcatggccggagacagactctggctaaaatcacctgtagtgaccagacttcacagcccaaaccactgtcttcatccataaaatcaggatccaatcgacttggtccaggaactccattcccagacagattttcttggcccagattttaaaaatgtaaacacggtccctcttccagccagcacttttcagctggccagccacagcttgcccttctcctgcaccccaaggaaactgtcaccacccgccaggtcaggagcccagcccaaagccatggcgtaggcctcttcaggactaggattctaaaacgggggtccatttccccaaagggaagtcctcctttctcctcatgtgatgaggtgggggcggctcatcaagccacatgtgggggtgggcctccacccaggatggcactgtccccacacagggtctcctggctcccactccctcctgtgttataaattgtagggaaagaaaactgtggccagcacctttctctaccatcacctccacggggacggctattccttgctagaattaccaggccccctccagcagcagaggccatggggctacctgcctgccctccagctctgacagccagctctcaagtcccagtgggccaggaggagagctctgtcttccccaagattttattgtattgtggcaaaatcaacataacttttttttttcttttgagatggagtttcgctcttattgcctaggctggagtacaatggtgtggtctcgactcactgcaaactccgcctcctgggttcaagcgattctcctgcctcagcctcctgaatagctgggattacaggtgcgtgccaccacacccaggtaatttttgtatttttggggtttcaccacattggccaggctagtcttgaactcctgacctcaggtgatgcacccgccttggcctcccaaagtgctgggattacaggtgtgagccaccatgcctggccaacataacatttttttaaatgtatcttccgcctcagcctcccaagtagttgacactataggtgcacaccaccacacccagctcatcatctttttttttttttttagatttttttgttgttgttagcaacaggatcttactatgttgcccaggctgctctccaactcctgggtgcaagtgatcctctcacctcagcctcccagaggactgggattatgggcatgagctattgcttttaaaatctgatgatcagtgcagtgccttttatcctgagcctccactccactgagtggtctcccccacttcatgccccaggggctcatgtgccaaggcagtgggggacacactccgactatggggagttgtgtcccacccaggcctcccctgagatgcccactggctatgactgtcggaggccagtctgtgaaggtcactgcggcaactcccccagcccacctgcaagaaggcttcaggccaccactgctgggagccaggttctccctgccactccaaggccaggccagggtaccaggacccctgtgatattgtgatataataaaaaatacgtttttggcctctgcccccattcctgacatagatctcctaaaatctgtaatctcctgagtgattggaatggctgacagaattcctaaatcctttggaatttcctgggttatgggggcatcttttcttttttttttcaagacagcatcttgctctgtcacccaggctggagtgtagtggtgtgatcacagctcactgcagcttcctgggctcaagtgatcctcccacctcagtctcctaggtagctgggactacagctgcacaccaccatgcctggctaatcatttttattttttgtagagatgaggtctccttatgttgtccaggctgatctcaaattcttgggctcaagcgatccacttgctttggcctccagaagggctgggatgacaggcatgagcccccgtgcctggccaggagcatcattttaggagactcttggtgggctcctgcatggcctcaggataggggctggttgccagggaaccagccctgtgattaaagggtcaggactttcagccacatcccccaacctctggggaagggagaggagctgaagtttgaatcaatcaccagtggccaatgaggtaatcaattgtgcctatgtaatgaaggctccagaaaaatccccaagctacagggctcaaagagcttccagagagtgaacacgtagaggctctgagatcgtggtgtccagggagaccacggaagctccacgccctgccccacatgccttccccatgagtgtcttcatctgtgtcctttgtaatatccttcataataaaaggctaaacatacag

SEQ ID NO: 1118 - DNA, 646 bp, Homo sapiens
gtgcactctccgcccgaggcggagccccccggctcgcggggatcgcccccgagcgctgcgtcctgcgggtcacctaacccatttgtggcttcctctacctgtgctcagccatggccagcgagagctcacctctgctggcctaccggctcctgggggaggagggggttgccctccctgccaatggggccgggggtcctggaggggcgtctgcccggaagctgtccaccttcctgggtgtggtggtgcccactgtcctgtccatgttcagcatagttgtttttctgaggattgatgccacagggcccagtgggctccgggtcctgccccagggctacggctggaacctgctgtatggctccctgctgctgggccttgtgggtggggtctgcaccctgggagccggcctctatgcccgggcctcattcctcacattcctgctggtctctggctccctggcctctgtgctcatcagttttgtggctgtggggccgagggacatccgcttgactcccaggcctcctctgtgactctgggctacctcagtttccccattttggccagactcaccggcccactggggtggtgatgttttcgttctgttttatttttctaactctgctgaccatgaataaaagaccaaaacact

SEQ ID NO: 1119 - DNA, 1552 bp, Homo sapiens
gtaagtggcagtcgtgatgggacagcacgtatttggcaatttaaacgaagagagtggaagagcattttgttggatatggctactcgtccagcaggccaaaaccttcaaggaatagaagataaaatcacaaaaatgaaggttactatggtagcttgggatcgacatgacaatacagttataactgcagttaataacatgactctgaaagtttggaattcttacactggtcaactaattcatgtcctgatgggtcatgaagatgaggtatttgttcttgaaccacacccgttcgatcctagagttctcttttctgctggtcatgatggaaacgtgatagtgtgggatctggcaagaggagtcaaaatacgatcttatttcaatatgattgaaggccaaggacatggcgcagtatttgactgcaaatgctctcctgatggtcagcattttgcatgcacagactctcatggacatcttttaatttttggctttgggtccagtagcaaatatgacaagatagcagatcagatgttctttcatagtgattatcggccacttattcgtgatgccaacaattttgtattagatgaacagactcagcaagcacctcatcttatgcctcccccttttttggttgatgttgatggtaaccctcatccatcaagatatcaaagattagttcctggccgtgaaaattgcagggaggagcaactcatccctcagatgggagtaacttcctcaggactgaatcaagttttaagtcagcaagcaaaccaggagatcagcccactggacagcatgattcaaagactacaacgggagcaagacctgagacgttctggtgaagcaggtatcagtaataccagccgtttaagtagaggctccataagttctacctcagaggttcattcaccaccaaacgtaggactaagacgtagtggacaaattgaaggtgtacggcaaatgcacagcaacgcaccaagaagtgaaatagccacagagcgggatctggtagcttggagtcgaagggtggtagtacccgagctatcagctggtgtagccagtaggcaagaagaatggagaactgcaaagggagaagaagaaataaagacttacaggtcagaagagaaaagaaaacacttaactgttccaaaagagaataaaatacccactgtctcaaagaatcatgctcatgagcatttcctggatcttggagaatccaaaaagcaacagacaaatcaacacaattatcgtacaagatctgcattggaagagactcctagaccctcagaagagatagaaaatggcagtagttcttcagatgaaggcgaagtagttgctgtcagtggtggaacatccgaagaagaagagagagcatggcacagtgatggcagttctagtgactactccagtgattactctgactggacagcagatgcaggaattaatctgcagccaccaaagaaagttcctaagaataaaaccaagaaagcagaaagcagttcagatgaagaagaagaatctgaaaaacagaagcaaaaacagattaaaaagg

SEQ ID NO: 1120 - DNA, 1873 bp, Homo sapiens
gtgtttatttttgctatggcaatgacaagtcttacagagctacaaacgagagttttatgagaaagccattttaccagctaatgtcaagtaataactagaaaaggatatcaaatagaaacaggctaatctggagttccatgtcatcatagacactgacgtttatccctgaccattacctcagtcatgatgtgctgccatactcgctcttaaaaactttttttaaaagccctgctttgcaccatttgcctattcccttagtgtaaatactcctactatagctgatttcaaggtaccaagtttcactcagctggtcacagaattcttatttcacgataggcgctaatgaccccataggagccagctctgaaggcttcagagtttcactgaattttggatggggtttacttagccttcttctgtttttcttttacctttcctttttaaataagaaataatgcaagacagatacaaagtaattctttttaatttccattttcactggagagtgttgaaccccgtcaggcatgagagcacagtgttccagaacaatgcttactgctcattatcacaggggtcaaaggctaacgtgcagggattgttgcagatcgtggacatgctgcctcctgtgtccatgactgcaatcgtctacctattttacagttgttgagcactcgtgtgcattagggttcaactgggcgtcctagggctccctggacccattttagaccttgagttcttgagttcctcaaaagagaaatcacgcatttatgttttctcttcttagaccatccaggaggtggctggttatgtcctcattgccctcaacacagtggagcgaattcctttggaaaacctgcagatcatcagaggaaatatgtactacgaaaattcctatgccttagcagtcttatctaactatgatgcaaataaaaccggactgaaggagctgcccatgagaaatttacaggaaatcctgcatggcgccgtgcggttcagcaacaaccctgccctgtgcaatgtggagagcatccagtggcgggacatagtcagcagtgactttctcagcaacatgtcgatggacttccagaaccacctgggcagctgtaagtgtcgcatacacactatctctgcctccagctcctatgggggacagctctacagcactggggcaggggagagaagccatgtttagtaagtcacattaatcagaaacaaaaagtagtaagcaaaatatctgaccactagaaaagcatgtatttaccacggacatagagatcgtttttttgtggcgggtggcagcccagctggttggcagttcaggccaccggaggcagatcccctgcagggacagcagagcacttgtgtcctgagaagagctgctgttcatggggctggcagcaccagggcctctcctagcctgccctgctgacactggccagactcctacatgcttctgagtctccagaggctacccggccctcctgaagcaccagggctgaatccacccccagctgagggcatgaacactgccacatggagtcacacacacagctgggcactgccatggagaggaagtctgtccatgtttccttgaatactggtggcctggtccctgtcccattccccagtgaggcagcctgtggggaagcctggcagggaaccaggcgcaggtcagcgtggcgccctgcctcaggccagcactgatgggggactctgagacgcaagctcacactcacccagctcccctgggctgcgcccgttcctgatcgcatggactttctgttctttagagtaagaagtgatcaccatttcctgcttctttgtttctccacaactgtgcagtggatgcctgtttgttttctgccctcagaac

SEQ ID NO: 1121 - DNA, 1868 bp, Homo sapiens
gcttccccacgtcgcttgggggccacggcgcggacgccatggtaagcgcggacgccatggtaagcgcggacgccatggtaagcgcggacgccatggtaagcgcggacgccatggtaagcgcggacgccatggtaagcgcggacgccatggtaagcgcggacgccatggtaagcgcggacgccatggtaagcgcggacgccatggtaagcgcggacgccatggtaagcgcggacgccatggtaagcgcggacgccatgcacacggaccctgactactcagctgcctatgtcgtcatagaaactgatgcagaagatggaatcaaggggtgtggaattaccttcactctgggaaaaggcactgaagttgttgtctgtgctgtgaatgccctcgcccaccatgtgctcaacaaggacctcaaggacattgttggtgacttcagaggcttctataggcagctcacaagtgatgggcagctcagatggattggtccagaaaagggcgtggtgcacctggcgacagcggccgtcctaaacgcggtgtgggacttgtgggccaagcaggagggaaagcctgtctggaagttacttgtggacatggatcccaggatgctggtatcctgcatagatttcaggtacatcactgatgtcctgactgaggaggatgccctagaaatactgcagaaaggtcaaattggtaaaaaagaaagagagaagcaaatgctggcacaaggataccctgcttacacgacatcgtgcgcctggctggggtactcagatgacacgttgaagcagctctgtgcccaggcgctgaaggatggctggaccaggtttaaagtaaaggtgggtgctgatctccaggatgacatgcgaagatgccaaatcatccgagacatgattggaccggaaaagactttgatgatggatgccaaccagcgctgggatgtgcctgaggcggtggagtggatgtccaagctggccaagttcaagccattgtggattgaggagccaacctcccctgatgacattctggggcacgccaccatttccaagtgccacaatagagtgatatttaagcaactcctacaggcgaaggccctgcagttcctccagattgacagttgcagactgggcagtgtcaatgagaacctctcagtattgctgatggccaaaaagtttgaaattcctgtttgcccccatgctggtggagttggcctctgtgaactggtgcagcacttgattatatttgactacatatcagtttctgcaagccttgaaaatagggtgtgtgagtatgttgaccacctgcatgagcatttcaagtatcccgtgatgatccagcgggcttcctacatgcctcccaaggatcccggctactcaacagaaatgaaggaggaatctgtaaagaaacaccagtatccagatggtgaagtttggaagaaactccttcctgctcaagaaaattaagtgctcagccccaacaacttttttctttctgaagtgaaagggcttaaaatttcttggaaatagttttacaaaaatggatttaaaaaatcctaccgatcaagatgagttcagctagaagtcataccaccctcaggaatcagctaagtaattattacttgattcttttagcaaatcaatgcacgttatcctacttaatccttaaataagtttagatttaactaacccaaagtccaggaggatgttcttacaaaaatagctatatcaagggctggcacctagacattaaactgtactttgaaaataagcaacgtgttgcataacttgttggaataattccttgttctgtttaacacttgtcataaattagcagaataaaaatagtcgtgcaacaccgggggtatctgg

SEQ ID NO: 1122 - DNA, 1869 bp, Homo sapiens
ttttaaccggaagccatcacctgcagcgtccccagccacaaagaaggccaccaagggatccaagccagtgaggccacctgcccctggacacggctttccactcatcaaacgcaaggtccaggctgaccagtacatccctgaggaggacatccatggagagatggataccattgagcgccggctggatgccctggagcaccgtggggtgctgctggaggagaagctgcgtggcggcctgaatgagggccgtgaggatgacatgctggtggactggttcaagctcatccacgagaagcacctactggtgcggcgagagtccgagctcatctatgtcttcaagcagcagaacctggagcagcgccaggctgatgtcgagtatgagctccggtgcctcctcaataagccagaaaaggactggacggaggaggaccgggcccgggagaaggtgctgatgcaggagcttgtgaccctcattgagcagcgcaacgctatcatcaactgcctggatgaggaccggcagagggaggaagaggaagacaagatgttggaagccatgatcaagaagaaagagttccagagggaggttgaacctgagggcaagaagaaggggaagttcaagaccatgaagatgttgaaactgctaggaaacaaacgtgatgccaagagcaagtcccccagagacaagagctaacagcacgagaagccagttggggactgccccctcctggagcagctcctgggctgtgctctgtttgaagggggcgccctgctcccctcagatcagtcaggaggaagatgactaaggggagggatcctctgggtgatggcctcttcctcctcagggacctctgactgctctgggccaaagaatctcttgtttcttctccgagccccaggcagcggtgattcagccctgcccaacctgattctgatgactgcggatgctgtgacggacccaaggggcaaatagggtcccagggtccagggaggggcgcctgctgagcacttccgcccctcaccctgcccagcccctgccatgagctctgggctgggtctccgcctccagggttctgctcttccaggcaggccagcaagtggcgctgggccacactggcttcttcctgccccatccctggctctgagtctctgtcttcctgtcctgtgcaggcgcccttggatctcagtttccctcactcaggaactctgtttctgaagtcttcagttaagtttgagtttatgactgagtggcctgtactgtcagacgtgaatgggcctgacgggcaaatccatccctctctccctcacagttccaggagcggcttccctcgtctccccttactccacagggagcctcccttgccaggaccagggctgcgacggccatgctggggcaggtgagtgctctgttagctgctcccagtgctgtccccaggctgcagttctggtccctggttgtcaggtaggaagggtgcacttgaagcaggtgctcatctcggttccttaacgtttatagtctgacccctcacttaggctttcctctgccaccccggtccagggaagaggctcgctcccgcccatggtcatcactggtctgtctgctctgttgtctgttctttccctgactccctcccaccgaaggcctgatggctactcacccctctgggatggctatgggagaggaggagtgatggggaccgccaccttttctgcaggaaatgtgcccagcagctcttggtcaaagcactgttgctataagctatctctgggatgcctctaggcccccttccctctacacacctctgggaaaagattacactgtattaactctcgaggagtttcctcaccaataaacagacaacctcaactgcc

SEQ ID NO: 1123 - DNA, 2216 bp, Homo sapiens
ttttttgtagagatgggatctagctttgttgcccaggctggtctcaaactcctggcctcaggtaatcctcctgcctcggcctcccaaagtgatgggattataggtgtgagctaccgtgcccagctcatagttgttttggaaagagccaggccatttggaatcgttttccttttgcaggacagctgaagtgagcctgctggtcacacaccgtgcctggtgtgggggccgctgcctgggtagctgggtgtctcgggcaggtgcccgtttactcccttgacttttaacttggtacaggaggaatggaagtggcagccacaaataatggctatcctgggctctcctagaacccactcgccccagctggcctcttctgcccgcggctctgctccttctgagcccactctgaggctgcagcccaggctgcctgtgccccacactccctctggagctgacagtccagccggggctcagggcctttctgccttcccttcccaccctgtccaggagctcacccatgccctacatggcccccacccagggcttgtttgtttcttggcctgctcctcccatgcccatcctggcttctctgcaccatgcggggcacacagtaggtgctcactggggactgaaggaaacgcacaccactgagggctgctgaggggttaaggaaccgaaactttgtttagattttcttctgtattttccatatcagtgccttgagtttaaacttttttttttggtctttatcttcacgaaggttgaaaaagatcatctagcaaagcctttttttcccagctatatataaggaatttgaagagttgcataaaatggttaagaaaatgtgccaagattacctcagtagttctggtctgtgttcccaggagaccctggaaataaacaatgataaggttgctgagtcattaggaatcacagaattcctacggaagaaagaaatacacccagacaaccttggacccaagcacctcagccgagacatggatggggagcagctagagggagctagcagcgagaagagggaacgtgaggctgcggaggagggactggcctcagtgaaaaggcccagaagagaagccctgtccaacaataccactgaatctcttgctgccaacagcagaggccgggagaagcccaggcccttgcatgctttggccgctggtttttcccctccagtaaatgtgactgtctctccccgttctgaagaaagccatacaacgacggtttctggtggcaatgggagcgtgttccaggcgggcccgcagcttcaggcactggctaacttagaagccaggagggggtctataggtgctgctctctcatcccgggatgtcagtgggctgcctgtttatgctcagtcaggagagcctaggaggctgacccaggcacaggtggcagcgtttcctggagagaatgctttggaacactcttcagaccaggacacctgggacagcctgaggagcccgggtttctgcagccctttgtcatctggtggtggagcagagtccctgccgcctggggggcctggacatgcagaggcaggacacctcggcaaggtttgtgacttccacctgaaccaccagcagcccagccccaccagcgtcctgcctacagaggtggcagcccctccgcttgagaaaattttgtctgtggatagcgtggcagtggactgtgcctacaggactgtgcccaagccagggcctcagcctggcccacatggatcactattgactgaagggtgtctcagaagcctttcgggggacttgaaccggttcccctgtgggatggaggtgcactctggccagagagaactggagagcgtggttgctgtcggcgaagccatggcttttgaaatttccaatgggagccatgagttactgtctcagggacagaagcagatttttattcagacttccgatgggcttatcttgtcccctccaggtacaatagtgtctcaggaggaggacattgtcacagtgactgatgcagaggggcgtgcctgcggatgggcccgctagaaggagttcctctagaagctgtggagtcggtcgtcaccgcgagagccctcacagtgaagtggagtcagatcctagattcgtctgattttatccagagaaggtctatggcaagcaatgtatatttttctaatgtgaatattgcacagatgaaccttttatttataaagaataatgtctttctgc

SEQ ID NO: 1124 - DNA, 3119 bp, Homo sapiens
gtcagctgcgcgcgaaccagggctgggaggctcggctggaggtgtgaccagggcagggactgacctggcccggaacagaagcgcgcagagtcccatcctgccacgccacgaggagagaagaaggaaagatacagtgttaggaaagagacctccctcgcccctacgccccgcgcccctgcgcctcgcttcagcctcaggacagtcctgccgggacggtgagcgcattcagcaccctggacagcaccgcggttgcgctgcctccagggcggccccgggctgctcctgctccgcagagcgacgccctccccccgggtgccccggaccctgcacttgccgccgctttcctcgcgctgctctggaccttgctagccggctctgcacctcccagaagccgtgggcgcgccgctcagctgctccatcgcctcactttcccaggctcgcgcccgaagcagagccatgagaaccccagggtgcctggcgagccgctagcgccatgggccccggcgaggcgctgctggcgggtctcctggtgatggtactggccgtggcgctgctatccaacgcactggtgctgctttgttgcgcctacagcgctgagctccgcactcgagcctcaggcgtcctcctggtgaatctgtctctgggccacctgctgctggcggcgctggacatgcccttcacgctgctcggtgtgatgcgcgggcggacaccgtcggcgcccggcgcatgccaagtcattggcttcctggacaccttcctggcgtccaacgcggcgctgagcgtggcggcgctgagcgcagaccagtggctggcagtgggcttcccactgcgctacgccggacgcctgcgaccgcgctatgccggcctgctgctgggctgtgcctggggacagtcgctggccttctcaggcgctgcacttggctgctcgtggcttggctacagcagcgccttcgcgtcctgttcgctgcgcctgccgcccgagcctgagcgtccgcgcttcgcagccttcaccgccacgctccatgccgtgggcttcgtgctgccgctggcggtgctctgcctcacctcgctccaggtgcaccgggtggcacgcagacactgccagcgcatggacaccgtcaccatgaaggcgctcgcgctgctcgccgacctgcaccccagtgtgcggcagcgctgcctcatccagcagaagcggcgccgccaccgcgccaccaggaagattggcattgctattgcgaccttcctcatctgctttgccccgtatgtcatgaccaggctggcggagctcgtgcccttcgtcaccgtgaacgcccagtggggcatcctcagcaagtgcctgacctacagcaaggcggtggccgacccgttcacgtactctctgctccgccggccgttccgccaagtcctggccggcatggtgcaccggctgctgaagagaaccccgcgcccagcatccacccatgacagctctctggatgtggccggcatggtgcaccagctgctgaagagaaccccgcgcccagcgtccacccacaacggctctgtggacacagagaatgattcctgcctgcagcagacacactgagggcctggcagggctcatcgcccccaccttctaagaagccctgtggaaagggcactggccctgccacagagatgccactggggacccccagacaccagtggcttgactttgagctaaggctgaagtacaggaggaggaggaggagagggccggatgtgggtgtggacagcagtagtggcggaggagagctcggggctgggctgcctggctgctgggtggccccgggacagtggcttttcctctctgaaccttagcttcctcacccttgttctggggtcatggcgatgcttcgagacagtgggtagggaagtgccctgtgtggcatatggtactcgtgggcgtgctataagtgactgctgttcatgtgggtgaggtggtcactcttgctcagggtctgttgtgcagcccagatggacacctgtttctccaacctggttattagcattgttccgatttgttctcggcattgcccaggtttgggagataaatgccggggcggagtctggttgggggctcccagagttcacatctgacagtctgtggtcaggacctggcaggcacgggcagtccctgggacatgcccatctctggaagcctaggggtccccagctccaggcctgtccgctgtgactgcctgtgtgggcacgcagatggagcctgtctcctgccttcctttccatggtttgccaggggtttggcatcttgactgcggaagctgtggagtctgtgtgctcagagccttttctggtgaagatatcatcagagcatgtgacctctgtttcctccccctgaaggccaccgctgggcctctggatcttagacatgagacggtcaagagattgaagtagtagccagggcccaggtgtccagagagggtggcctgggatggggagggcccttgctccccaacagcagtgctgggggagccaagagaaggtggagcatccctgagtagtggtgtgcatcacccccagtttagtaatcacggggtgccattccccggtgggagcacccaccatcaatgtcattgaatgtccccatgggacagtgttgaggacttttgtgacatctgtcctatttcacagctcagggaaaggtgcacagcagaagcaggttgttccccatttaaagttctggagcccaggctgtgagctccttggctgagccctctcctgtccctgggagctccccaggtgcgaggagcctgccagccagtggggcctacactctgtgttattgcatctccgccaggctaaaagccttggtcactactttagagacggggactgcttgctgtcatgtttcgccttcctcggaagctccatggaatgttctggagcaggcatcttagggcattccctccgcacttctctgccagcccatgtggctcccacactgggctatcccttgccttaggcttgtggccttttttttttttttttttaatttgaaaaatatttttcatgtgcacttaaacgtgttgtggaatgatgctgggtctcaagaatgctgtgaatcaataaacattttattc

SEQ ID NO: 1125 - DNA, 1629 bp, Homo sapiens
aacctctgctccctgcctcgcctcccgcgcgcctaggtgcctgcgactttaattaaagggcccgcccctcccctcggccgcttcccttactgagcttgctgagctccggggcccgcggagctcgcgccaggctcctgggaaaggacggggagtgttaccggggagcagctgctccattgtgcctcgaggccccgatcgggctaggcgactctcctgattcaagatgaccaacgaagaacctcttcccaagaaggttcgattgagtgaaacagacttcaaagttatggcaagagatgagttaattctaagatggaaacaatatgaagcatatgtacaagctttggagggcaagtacacagatcttaactctaatgatgtaactggcctaagagagtctgaagaaaaactaaagcaacaacagcaggagtctgcacgcagggaaaacatccttgtaatgcgactagcaaccaaggaacaagagatgcaagagtgtactactcaaatccagtacctcaagcaagtccagcagccgagcgttgcccaactgagatcaacaatggtagacccagcgatcaacttgtttttcctaaaaatgaaaggtgaactggaacagactaaagacaaactggaacaagcccaaaatgaactgagtgcctggaagtttacgcctgataggtaaacaaatcatactccccagtcaagacttccctgacagtcccactacgagaaagctgtggtgggacagccaagtactcgtttccacaccaagactcagactttttgagccaaaaaaaagccacattcttacactgtccagcttgtaacggttaatgtaaaacttaccagatgaaccttgtgtttcagcttttttcttttccccttccccttgcttcagaggcctgatggcgtcggactattccgaagaagtggccacctccgaaaaattccccttctagaacatgtagacacttgagaaatgtttctgtttgaagaaaatagagggagaaacagaagtcttaagtctgtggcacactgtgtcttcagacagtttgaaggaatgaaaacctagagattttaaatcatgaattgaacatgtaaaattccagtaaaatgtaaaaacggaatatgcatcgctcttaaccttgagcatagtgacttagagacactgtgtatcagttttgccaataagactgtggacttcatgattgttgttgaacttctgggtcaaaactcaaatgaggtgaattttgcctttaaagggtttatttgctgagaaccaactttcaatagtcatgagagaatcaaataatagatgtccgtacaagtagcgcatatatttaaccatttagtttggggctctatattacttgcttgagccttaatcaatgtggttttattcaatggtttgttctttgaatggttgcaaaaactgtagataatcttactgaggactgtacaaacatgaaggtgtggtatcaaacttcaggttgaaactgtttgaagcattataaacattcatttcacaactagattgtataaggatattagctgtgatgagactcactgcattattttttttagtgaattttatgaaatccccgttccattcaacaggcacatgtttaaaag

SEQ ID NO: 1126 - DNA, 1721 bp, Homo sapiens
agtcttctgcgtcgctcacgctgggagctgtagaccggagctgttcctattcggccatcttgtctcctcccgtgacaagcaaatgctgagggaattcattaccaccagaccagccttacaagagctcctgaaggaagcactaaatatgaaaagaaaggaccattaccagccactacaaaaacactcttaagtacacaaaccagtgacactataaagcaaccacataaacaagtctgcaaaataaccaactaacatcatgttggcaagatcaaatctacaaatatcaatactaaccttaaatgcaaatgggctaaatgcatcaattaaaatacacagagtggtgagctggataaacaaccaagacccactgctacactgtcttcaagagactcatctcacatgcaaagacacatatagactcaaaataaagagatggaggaaaatctaccaagcaaatggaaaatggaaaaaagcaggggttgcaatcctagtttctgacaaaacagaccttaaaccaacaaagatcaaaaagacaaagaagggcattacacaatggtaaagggttcaattcaacaagaagacctagactatcttaaatatatacacacccaacacaggagcacttagattcatcaagcaagttcttagagacttccaaagagacttagactcctacacaataatagtgggagactttaacatcccactgacagatcattaagacaggaagttaacaaagatattcaggacctgaactcagctctggatcaaatggacctgacagacattcacaaaacactctaccctaaaacaacagaatatacttatgtattagtcaattctcatgctgctataaagaactgcctgagactcagtaatttacaaaggaaagaggcttaatttactcatagttctatggggcttggagggggcctcagaaaacttacaatcatggcagaaggggaaggaaacacatccttcttcacatggcagcaggaagaagagtgagtgaaatgcggaagctccttataaaaccatctgatgtcatgagaactcagtcacagtcttgagaacagcatgaggataaccactcccataattcaattacctcgcaccaggtccctgccatgacacatggggattataggaactgcaattcaagatgagatttgcttggggatacagccaaaacatatcaacagctcattgccacaggctcttattctaaaattgaccacataatcagaagtaaaagactcctcagcaaatgcaaaataactgaaataataataaacagtctctcagaccacagtgtaatcaaattagaactcaaaactaagatagtcactcaacaccatacaattacatggaaattgaataacctgctcccaaatgacttttggataagtaagaaaattaaggtagaaatcaagaagttctttgaaactactgagaacaaatatacaacataccagaatctctgggacatagctaaggcagtgttaagagggaaatttatagcactaaaagcccacatcaaaaagttagaaagatctcaagttagcaacctaatatcacaactaaaagaactagagaaccaagaacaaacaaagtccttagctagcagaagacaagaaataccaaaactcagagctgaactgagggagattcagacacaaaaatcattcaaaagatcaatgaatccaggagctgattatttg

SEQ ID NO: 1127 - DNA, 1737 bp, Homo sapiens
gaggacgcggctgctgctcaaagtggcggagcgcggcggcgggaggcaggtgcacggcacccgccagtgggggtgcctcaacttccgcgggcgtttaaatagcagcctctctcccctcccaccggtgttgacttcaaaatcaaaactgtagagctaagaggaaagaaaattagattacagatctgggacacagcaggtcaggagagattcaacagcattacctcagcttattacagaagtgccaaggggatcatattagtatatgatatcactaagaaggagacatttgatgatttgccgaaatggatgaagatgattgataagtatgcttcagaagatgcggagcttctcttagttggaaataagttggactgtgaaacggacagagaaatcaccaggcagcagggggaaaagtttgcacagcagatcactgggatgcggttctgtgaagcaagtgccaaggataacttcaatgtggacgagatatttttgaaacttgtcgatgacattctgaaaaagatgcctctggatattttaaggaatgagttgtccaatagtatcctgtcgttacaaccagagcctgagataccgccagaactgcctccaccaagaccacatgtccgatgctgttgatttcctactttggagacaaagtggaaatgattcctggaaaggggaaaaaacgttctattctgcactacaatcattttgacaatttcctttcgcactttgtaatccaagtcagagctatacactaacttgtaaatatgcatatatgcaatcctgggtaagttttggttataagttacctatttccctccaaattattatatttcattcattaccccagtgtctagtgtacatacactgggaaacctagtacttctaatatgaagaatgggagaaatgaaaggtataatgtttcttgaaataaataatataattgtccttattaattatattatgaggacagaagatattctgataagagagaacgtggtgctttgcttaccgttttaaagaaaatttgtaaaactaaagactttttgaaaaaaagctatcttaagtgctttttctttatttacaagacatttcccccagtggtagcatctgaagtattggagtgtttctgccacgaagcaaagctccattcatggccgtcatggaaggttatttattaatgttacataatggtagaatattactagttagagggttggatttgacttggtcctaaggccacagaatctctctcatggcttcctaagggatgtacctttatgcttttaagaactacaaagattcaataaagaaagaaatgtttttgaaactatagaaaaagattttaaaacacgctgctgtcctaaacaaatcctgtttaaaggaattttaaagagatgcattttactatatcaaagaacatacgtgtatttgcctaaacactctgtacctttgtaatgataaaacttcccccttctttacggtgaagcttattctgattaagcctagactgtgttcttttttttttttttttttttttttttttttggtctgatgatgaatttgtgaactctatctttggtatatcttttattaaactgcactgttttgtttagtcaaggtaattaagtaattatgtatttgaataacttggtgtgtcttgagtgttgtggtatgaaaagcattgtggtctttctacactaatgaagtgcaaataaaattttgtatttatgaatg

SEQ ID NO: 1128 - DNA, 1501 bp, Homo sapiens
tttatgtctgttatatataaaaatttaaaaatttggctcatgttttgtacatctggtttttaatttcatttttttaataatttatttttgttgtattttacaaaatgatctgtccgtaatggattgaacattttgaaacatttaaaaatgggtccttcatcacaggtactttggcaagcactcctttaaatcattactttattttatttatttatttatttctgagaaagggtctcactctgttgcctaggctggaaaaccattacttaaaaaaaaaaaaaaagactagccagcctgctttctgagcatctacttgatagcaagagggcctcatgctcaacccctccgtgctgggaaggaagcattcccctcatcaaggactgcggctctctggaataagcaacgtgtgttccctcttgggggtcagccaaggccctgaacatcacaaactcctcctccacctccagcttcttatcctgtgcaccaactgcaggatggctctctacatgttgctggggcaagaagtccggagacctgaaacctcataccatgcgacaaagtgcactcaggcaaagtctgatgtcaacagaagttctgttgatgccaacagaagttcgatatggattcatattgacaaacctccacgggtcctcaggtgggggtgtgtgtgtatgtctatatacacatggatgtggctgcatatgtgggtatgtgcatgcacatatgtgtgttcacatgtgtgtatgtgtgggtgtgtatgtatgtgcatgtgtttgtatgtatacatgtgcatgtgtgtatgtgtgcgggtccatgtgagatcaagggaagagcagctgaaagctggtgtggtgtggtccggtactgaggaccaagtaagagtggaggagacactacctctttactctcctctcccaacacaggcaagattgagctctgtgtctggtgtaagttaggagagcccagaatagagggcttgacctccaaggcctggccagccttcctgcacctggctttgtgcacctggcttcctctgctttaactgcttttgctcctcctccacctgacagaacctcgaagccctctgcaatgcctggttcaaatgctcccctctgtgtaggtgaagcacagggccttgatgctattttgtatgatacgtcattgtagaaacatgtcattatgcatttgtcaaaacctatagaacaatacaacacagtcggccgggtgcagtgactcacgcccgcaatcccagcactgtgagaggctgaggtgggtggatcacctgaggtcgggagtttgagaccagcctggccaacatggtgaaaccatgtctctactaaaaatacaaaaattagccgggcgtggtggcaggcgcctgtaatcccagctactaaggaggctgaggcaagagaatcgcttgaacccaggaggcggaggttgcagtgggccgagattgcaccactgcattccagcctgggcaacaagagcaaaattctgtctc

SEQ ID NO: 1129 - DNA, 5062 bp, Homo sapiens
aggagagcggcggcggcgggagcagcgaagggggcggcagggatcctccaggctgccggctgggaaggcgtgggcgacccggtgtgtggcgcgcccagagccccgcgtttcagccctagggaaggaagccagttgagggaagttctccatgaatgtacgtcacaatgatgatgaccgaccaaatccctctggaactgccaccattgctgaacggagaggtagccatgatgccccacttggtgaatggagatgcagctcagcaggttattctcgttcaagttaatccaggtgagactttcacaataagagcagaggatggaacacttcagtgcattcaaggacctgctgaagttcccatgatgtcacccaatggatccattcctcccattcatgtgcctccaggttatatctcacaggtgattgaagatagtactggagtccgccgggtggtggtcacaccccagtctcctgagtgttatcccccaagctacccctcagccatgtctccaacccatcatctccctccctatctgactcaccatccacattttattcataactcacacacggcttactacccacctgttaccggacctggagatatgccgcctcagttttttccccagcatcatcttccccacacaatatatggtgagcaagaaattataccattttatggaatgtcaagctacatcacccgagaagaccagtacagcaagcctccgcacaaaaaactgaaagaccgccagatcgatcgccagaaccgcctcaacagccctccttcttctatctacaaaagcagctgcacaacagtatacaatggctatgggaagggccatagtggtggaagtggcggaggcggcagcggtagtggtcccggaattaagaaaacagagcgacgagcaagaagcagcccaaagtcgaatgattcagacttgcaagaatatgagttggaagtaaagagggtgcaagacattctttcgggaatagagaaaccacaggtttctaatattcaggcaagagcagttgtgttgtcctgggctccccctgttggactttcctgtggaccccacagtggtctttccttcccctacagttacgaggtggccttatcagacaaaggacgagatggaaaatacaagataatttacagtggagaagaattagaatgtaacctgaaagatcttagaccagcaacagattatcatgtgagggtgtatgccatgtacaattccgtaaagggatcctgctccgagcctgttagcttcaccacccacagctgtgcacccgagtgtcctttcccccctaagctggcacataggagcaaaagttcactaaccctgcagtggaaggcaccaattgacaacggttcaaaaatcaccaactaccttttagagtgggatgagggaaaaagaaatagtggtttcagacagtgcttcttcgggagccagaagcactgcaagttgacaaagctttgtccggcaatggggtacacattcaggctggccgctcgaaacgacattggcaccagtggttatagccaagaggtggtgtgctacacattaggaaatatccctcagatgccttctgcaccaaggctggttcgagctggcatcacatgggtcacgttgcagtggagtaagccagaaggctgttcacccgaggaagtgatcacctacaccttggaaattcaggaggatgaaaatgataaccttttccacccaaaatacactggagaggatttaacctgtactgtgaaaaatctcaaaagaagcacacagtataaattcaggctgactgcttctaatacggaaggaaaaagctgtccaagcgaagttcttgtttgtacgacgagtcctgacaggcctggacctcctaccagaccgcttgtcaaaggcccagttacatctcatggctttagtgtcaaatgggatccccctaaggacaatggtggttcagaaatcctcaagtacttgctagagattactgatggaaattctgaagcgaatcagtgggaagtggcctacagtgggtcggctaccgaatacaccttcacccacttgaaaccaggcactttgtacaaactccgagcatgctgcatcagtaccggcggacacagccagtgttctgaaagtctccctgttcgcacactaagcattgcaccaggtcaatgtcgaccaccgagggttttgggtagaccaaagcacaaagaagtccacttagagtgggatgttcctgcatcggaaagtggctgtgaggtctcagagtacagcgtggagatgacggagcccgaagacgtagcctcggaagtgtaccatggcccagagctggaatgcaccgtcggcaacctgcttcctggaaccgtgtatcgcttccgggtgagggctctgaatgatggagggtatggtccctattctgatgtctcagaaattaccactgctgcagggcctcctggacaatgcaaagcaccttgtatttcttgtacacctgatggatgtgtcttagtgggttgggagagtcctgatagttctggtgctgacatctcagagtacaggttggaatggggagaagatgaagaatccttagaactcatttatcatgggacagacacccgttttgaaataagagacctgttgcctgctgcacagtattgctgtagactacaggccttcaatcaagcaggggcagggccgtacagtgaacttgtcctttgccagacgccagcgtctgcccctgaccccgtctccactctctgtgtcctggaggaggagccccttgatgcctaccctgattcaccttctgcgtgccttgtactgaactgggaagagccgtgcaataacggatctgaaatccttgcttacaccattgatctaggagacactagcattaccgtgggcaacaccaccatgcatgttatgaaagatctccttccagaaaccacctaccggatcagaattcaggctataaatgaaattggagctggaccatttagtcagttcattaaagcaaaaactcggccattaccacccttgcctcctaggctagaatgtgctgctgctggtcctcagagcctgaagctaaaatggggagacagtaactccaagacacatgctgctgaggacattgtgtacacactacagctggaggacagaaacaagaggtttatttcaatctacagaggacccagccacacctacaaggtccagagactgacggaattcacatgctactccttcagaatccaggcagcaagcgaggctggagaagggcccttctcagaaacctataccttcagcacaaccaaaagtgtcccccccaccatcaaagcacctcgagtaacacagttagaaggaaattcatgtgaaattttatgggagacggtaccatcaatgaaaggtgaccctgttaactacattctgcaggtattggttggaagagaatctgagtacaaacaggtgtacaagggagaagaagccacattccaaatctcaggcctccagaccaacacagactacaggttccgcgtatgtgcgtgtcgtcgctgtttagacacctctcaggagctaagcggagccttcagcccctctgcggcttttgtattacaacgaagtgaggtcatgcttacaggggacatggggagcttagatgatcccaaaatgaagagcatgatgcctactgatgaacagtttgcagccatcattgtgcttggctttgcaactttgtccattttatttgcctttatattacagtacttcttaatgaagtaaacccaacaaaactagaggtatgaattaatgctacacattttaatacacacatttattcagatactcccctttttaaagcccttttgttttttgatttatatactctgttttacagatttagctagaaaaaaaatgtcagtgttttggtgcacctttttgaaatgcaaaactaggaaaaggttaaactggatttttttttttaaaaaaaagaaaaaaaaagaagaaaagtataccagataccaaaagctagctttcttatgttttcctttaaattttcagatttaccttcattctgttttcactgatgtcttttgcaagcctttgattttttttttttgttacagtttagtaatttatattcaccagtcacttcatatgtcttgaacatctgtatctgtaaacatgaatcaccgtgtgtgtacttacagggctaggatttcagtgttgtcagagtattaccacacagcaacagcaacatacagaagatatgttcactcagataagactgccctaaacaaccattttgtcactcagttatttaactgtgtttagctcatttaaatcaaaatgtgtactttaatctaaaatgttttaataatctgtatttcttataattttaacactatgagctgcctgtataagaaatcaagtaaccagaatgcacctataaattatggagcattgtagattttaccacatcaattcatagcagtaactttaagagggcattgtgcaatagttagttgttttcttgttcagctattttaaaggctgctttaacttgtttgtttgtctttgtatataactacttctaatctaatcactagagttattatattctgttatgtttgaccagaattatatgacaagaactggtgacagtttagtgcctctgcccattgtccatgatttacactaattgtgagcagtcttcttatgtgtcagctcattatttttgaaacatttgcctttaggctgttctttgaggtatcaatgaagtgattgaatttcaataccttaattcagtgcacataatactaatgtaacagcagatgaaaattgataaaacccaaaagagagtcatctaaatttgtagttcctatttctgtgggtttgcctggccatggttggagagggaatggtgtttgatggtaaacacagggtgtttggggatcaaggagcctagattctctccctggatctgtcactaacttgctgcgtgacctgaacacgtcactttacctctctgtgcctcagttttcccatgcatgaaaaataaaataaaataaaacggg

SEQ ID NO: 1130 - DNA, 4166 bp, Homo sapiens
ctttttttttttttttttttgagatggagcttcgctcttgttgccgaagttggagtgcaatgccacgatctcggctcattgcaagctccacctcgtgggttcaggcagttctcctgcctcagcctcccgagtagctgggactgggggtgcccgcaaccatgcccggctaattttttgtgtttttggtggagacggagtttcaccatgtgagctaggatgatctcgatctcctgacgttgtggtctgcccacctcggcctcccaaagtgctgggattataggcgtgagccaccacgcccggccaagtgattgttttatgtttattctgttttgggttgaactatagtttgctacgaatgaacctggaaggaattatacggagtgaaaaaaggctccgctcactgataacgcgggtgaacctggaaggaattacacggagtgaaaaaagaccctgctcactggtaaggcgggtgaacccagaaggaattacacagagtggaaaaaagactccgctcactgataacgcgggtgaacccagaaggaattacacggagtggaaaaaaggccccgctcactgataacgcgggtgaacccagaaggaattatacggagtgaaaaaaggccgagctgaaagatcacatgccgtatgattttttttttatacagcattctctaaagacaaaaattaaagagatggaacacagattcgtggttgctaggggttaaggatgggggaaggagacagccggagggagcctgtggttggattgcctcagctgcggtgggcacacactgcgcgtgtgtcatgggatgaccccggggagcttggtggaccgtcgtggtgggagagcctggctgtgatactgttcatagttttgcgagatggagcccctggaagcagggggacaaggtattgctctgcgtcatttatttttatttatttttttttttttgagatggggtctggctctgtcacccaggatggagtgcagtggctcgatctctgctcactgcaacctccacctcctgggttcaagcgattctcctgcctcagcctcctgagtagctgggattacaggcgcgtgccaccacacccagctaattttgtttgtttttagtagagatggggtttcagtatgttggtcaggctggtctcgaactcctgacctcgtcatctgcctgcctcggtccccacaaagtgctgggattacaggtgtgagccactgcgcccagcctgctctgtgccatttcttacaactacatgtgaaggtacagttacttcacggttgctaactagaactagaaaactagaaaaaaagcagttgctaacattttttttttctttttttgagacggagtttcgctcttgttgcccagcctggagtgcagtggcgcgatctcagctcaccgcaacctccgcctcccgggttcaagccattctgttgccttagcttcccgagtagctgggattacaggcatgcgtcaccacacctggctgattttttgtatttttagtaaagatggggtttctgcatgttggtcaggctgtctcggactcccgacctcaggtgatgcacccgcctcagcctcccgaagtgctgggatgacaggcgtgagccaccgcgcccggcagcagttgctaacattttcacacagcttcttgtggagaaggcccctttccactgtgaagtgtgaatgcgtcaaggtggagcccctgccccggaggcctctcctctgtcagggtcagctgtggcgctcggggctgctgtcttcaggggcggtttccaagtgggatgagcctgatgtggcccctgtggctgcttccttgagactcagtggtatcagccgtttgtttttagatgactgattgaagtgagttatgtgatcataatatctaattgtcaacaattgactttttttcctcgaagagggattttggcaacaaaacttgccagtggtcctgcaggctgccgtccacgaggtgtgcatatgaggctcaggaggcatgtgcgtttcctgagcgccttggcggacagcctcaggaacacaggcagcaggtgctgaggtcacaccccagttctgtgtgagctggcggctcgtctcagcatcctgaataactgtcctggaagcacacaggaggaaggtacctgcagccctgggtgcgcaggcacaaatgaccacaacactgaaggcgtggcgggcagaggtgcatcgggcagcgcagtggaagggacgcgctgggcgtttgggttgaacagaagttaaggacttcatgggaaggagatggggggtcttgcaggcagaggaagttccttttatacctagagtgcttttgtttgtttgtttgtttgtttgtttgttttgagatggagtttcactcttcgttgcccaggcaggagtgaagtggcgcgatctcagcccactgcagcctccgcccgccatgtttaagcgattctcctgcgttagcctccctagtagctgggcttacaggcgcgtggtaccacgcccagctaatttttgtatttttagtagagacagggtttcaccatgttggccaggctggtgttgaacttctgacctcaggtgatccactcacctcagcctcccaaagtgcctggatgacagtcgtaagccactgcgcccagccccagctacgttgtgtttttttttccccctgtagagatgggttttcgctatgttgcccaggctggtttctaactcctggactcaagtgatccacctgtctcgactcccaaagtgctgggatgacaggtgtgagccattgcgtccggctggaatttcttatggttcgtttccttaggttaaagattcagaagtaggatttttgaattaaagaaactaaatactgtctatggcgcttgatacatcttgccaggcagttatcagacagggttgtactggtttgcgccaccccagaacgtgtgcaaggcctgtttgtggaccctccttggcctggctgtctaggtcatccacctgcgtgtgctcacagagcatatggatttttccctgcggtgccttcacttgtggctggaagagccttctctgtgatcctgtgtcctgggtgctctgttggcctccttcttgccaccgaggaagacatggaggctagagagggctcactgaacagtgaaatgattggaacctaaggagcttcagcagaaggtgtcatgatggggctaggctctcccgagggctgtgtggcctcagcgtcttgttgggcagatcctgctccctgacacagcggggctaagagccagcctgtgtcacacacctgtgaattaacatgcctggctgaccctcactggagaagggctacacgtttgtgacgaaagcagaagaggtgtttattgtagaccaaatccaagctgtcattttacttttattagaaattctttgggatttggctcatgcctataatcccagcactttgggaggctgaggtgggagaatcacctgagctcagtcgtttgagactgccttggcaacatggtgagacctcatcttctgctcaaatttaaaaaattggccgggcgcagtggcgtgcacctgtactcccagctactcaggaggctcagttgggaggatcacttgagcccagggggtggaggctgcagtgagcccagatatgctcatgaagcactgtgggtttctcctgcagtgcaccaccgcactccagcctgggtgacggagagagaccccatctcaacaaaaataaaaaagaaaagaaaatgggacactgttgatacagtcacagagctgaaggagcagcatgggtcgtgattctggatcgtccctccagggcagctagagtagctgctgggaagtatttctctcagtttcccgggagcagtgtgggtcgtgattctggattggccctccagggcagctagagtagctgctgggaagtatttctcagtttcccagtgcaccccatgtttctagtagaaaacacaattggtaattaaatattggaagtagtttctaacaattggatactcacctgagaacgtaaatttgctctctgaaataagcggtgggctttaaataattgcctttgtgaatatgaaatttaagtattagatgcacgattaggatcgattgtaacaaaacagtgatatctaaaatataccttcatgttttcaaagt

SEQ ID NO: 1131 - DNA, 3832 bp, Homo sapiens
atgtcctaaatggtttccactgcgcacagcttcctctcagcccgctctgagctggaagcagcatgtgggacctggccctgatcttcctcgcagcagcctgagtgttctcactaggggtcactctgtgggtcatttgcagccattttttcactgtgcacatccctgcagcggttggccaccctgtgaaactgagagtcctccattgcatcttccagctgctgttgacatggaaacccaccatggcatatgctctcgtttgtgcaaggagagtgactccgtggttctggcagttggttaccgcaagttacctaagcataagtttccagtgccagtaagagactgcttggtggccaccatccacttcctgaagtccctggatgcatatggagtggatccagcccgggttgtggtctgcggtgacagtttcggaggggcaatagccgcagtggtttgtcaacaacttgtggacaggccagatctgccccggatccgggctcagatcctgatctatgccattctccaagccctggatttacaaaccccttcgtttcaacagaggaaaaacatcccactgctcacctggagtttcatctgctactttttttttcaaaacctggatttcagctcctcctggcaagaggtcatcatgaaaggtgcccatttgcctgctgaagtctgggaaaagtacagaaagtggttgggcccagaaaacatccctgagaggtttaaggagaggggttaccaactgaagccccatgagcccatgaatgaagctgcttacttggaagtaagtgttgtcctggatgtgatgtgctcgcccctgattgcagaagatgacatagtgtctcagctcccggaaacctgcatcgtgagctgtgagtatgatgctctccgggacaattcactgttgtacaagaaaaggctggaagacctgggagtgcccgtgacctggcaccatatggaggatggtttccatggagtgctcaggaccattgacatgagcttcttgcactttccctgctccatgagaattctgagtgcattagttcaatttgtaaagggactgtgaccatctttcttctctgctggtactgcggtgtggattccactggcatccagcctcccacagggctctctgttgctgatttaggtggtgcatagtggggctagggagggggtagaggttgctgtcacctttctggtccaggttctagaaccacacaatgcatgctcctgatgtccagaggacgtggtagaaaagacaggtttggaggtgggagtgtggctgtctctattctctgttgggaaaacctgggctgacaatattcagtggccatttgtgggagtgaatcagccggtaagagctgttctcagcctccctaaggggcagttcaggctcccagattgatccagactgtgtgtgactttcgtccatttgacttgactttggaatagcacaagggcatcatgtacttcacgaggctttcccaatgtggctcagaggcaggagctctgatgctctgggctgctgtgaggtggtggtggtggtagagaaactggcttcacccacctactcttctgtgaacagtagtgacttttcccgctgtttctcagcctctgggatcagagtcttcactgtctgggctggaaactttaagatagaatggatagagcttccacagtggttggcatctagtggtggatgaagacagcctgcagctgcccgacttggggagctctggagctcctggaatcaaagcctgtcttccaaccagaagccccaaggcaatgttctaagaatttgagaagagaagttgggagggaagtggggtcctgagttagagacccatgaaggctgagtctaaccagataaccctgtccacagtgcaaagtcaagacagccaaaggaacagaagatgtatttgtgaaaactatttcttttttaagacatggaaccaactcaaattggcctctattagaaagacaatagattggcttaggtagggatgcatgctaggcatacatcaggcaaggtttgatccaggaactcacacagtgccatcagctgtcctgtcttctctgctctgctcttctctcctctgtgttaatgccaccttctcctcttcatacggtggcactgagcagcttcatgcctaccttcctccagggtcaagttcattatcatggacttgcctcatgctcagcagtcccagaaaaaagcctaattgcaacttgatggctttgttggctttctgagcaatgtgtccagttgccacagtgaagggaatggaataatctaactcaccattcccaagtcctatgccatcctgagagtggggggtggagtcaattcaccttggtgcttggactaagcatgaggtggtgagtgacaacgttcctaattgaagggtagggtaaatggttgttgggtggacaccaacacttattctactacagaagctaaattgaaccctcaggcagggtacgtgaaagtggcaagagatgtcaagaccactgggcaagttggccagttgttccttaggaatgaaaattcttttgaaaggaatggccagggtcctctgctggccccacttggtcttctggaggctctgatcttggttggttagtggtctttacaggccaaggtcaaggccattgcacaaaaaaccctgtgcatgcccttaacttgctttcagttgaatatttgggctgaactatgaggcagagaggaatcccattgggtggctccttgctgcattcgcagttgaccagcatggggtttgttggagaaataggaaccatcccctgaaaacacacactatggtagccactcaactgttgaaaggcactggagtccaatgggtgaggccgcctctgagacaagcctctgagttgaggctgggagaggctccctccttggagtgttgctttttttgtttcacccctgcctctggagatgggtagaggaacatgagctgaccttctgggaagttaggttggtgaggagttgctgaggcactgcagggccatgcccagtagagaggaatgtataacattttaagaggctgagagcaccccttgttgggcgcatgcccatggcagcttccttctgccgatcatgggagaaatcaagcactttcacctaatggctagatgattgattttgggatgaaattctccactcctctcctttaccacatcaccactatccttcctgcaatacatccacgagactcactgagtggaaaagggataggaatgaatgttcacccagggccagctacatgctaggcactgtactggaccatttaaatttgccacctcttatgttcctcacattaatcttacagagtaggtacagacatacctatggatattgcagattcagttccagaccacagcaataaagcaagtcacatgaattttttgctttccttagtgcatgtaaaagttacatttccactatattatagtttattaagtgtgcaatagcattatgtctttaaaaagcatgtacataccttaatttaaaaataccttgttgctgaaaaatgctaacaatcatctgagccttcagtgattgcagtagcctaggctactattttctatgtggggtttgcacattctgcccatgtctgcgtgggttttctctgagttctccagcttcctcccacattccaaagatgtgtatgttacattcatgggaatgtctaaattgtcgtaatctttttgctggttgatggtcttgccttgatgttgatgctgcaggtggtggttgctgaaggtgggggaggctgtggcaatttcttaaaataaaataagacaacagtgg

SEQ ID NO: 1132 - DNA, 3314 bp, Homo sapiens
aggttcgaatagaaaactgctgcagaagggaagccactgagaggagcaaatgtggacttgagggaaactctctcccccacccccacttctatcccgtgcaatttaataccatcctcgccaggaaccttaacctcgtcattttaaaaaatgagatatccgtgacccagggtgaacttgttgaatgtaggtacagcagaggaaattctagactctatgagcgtctgagccttgtccagtgcaaacccttcgtgaacactgggtcagtgtgtggccgtgcccacctgtgcgccgacactctcagcatgcctggtccacccgccttgacctcgggcgcggtgtcccagctaagctgggcccagcgtcccggccttccccagctgacaagcctagctcgttcgctcccggctgtggccctcccaccctctcccactagctcactccattcttctagatttctcttcactcatcctctcccatccccaccgcgcccacctccactcccgccctctaccggtctctcactttcctccctccgcagtccctctttgctgtgacctctttcctcaactctgcaggcctgaaagaaggtcacacacgcacgctcacacccacactccacacgcctcgtcccaaacaaccccatgaacattgtcctttgttccgtctcttgggccactttccctgtcgcttcctcccagcccgtcctgatttgctccccaaaagtacgtttctgtctccccgctgccctggcgctccccctttgatttattagggctgccgggttggcgcagattgctttttcttctcttccatcccatcctcccttctggtcctcctttccacagtgggagtccgtgctcctgctcctcggttggctcctaagtgccccgccaggtcccctctcctttcgctctcccggctccggctcccgactcttcggccggctggcatctgcttccctcccctgcctcgtttctcgtcgcccctgctcgctccccccggcgctcgcccgggcgctgtgctcgctcctggatcgccagccgcgcagccgggctcggccggccgcccgcgcgccactgtgcagtggagtttggtggaatctctgctgacgtcacgtcactccccacacggagtaggagcagagggaagagagagggatgagagggagggagaggagagagagtgcgagaccgagcgagaaagctggagaggagcagaaagaaactgccagtggcggctagatttcggaggccccagtgcacccgtggactccttcggaacttggcaccctcaggagccctgcagtcctctcaggcccggctttcgggcgcttgccgtgcagccggaggctcggctcgctggaaatcgccccgggaagcagtgggacgcggagacagcagctctctcccggtagccgaatcactaaatctggagccgccaaactgctacttctgggcccacgggcccacaaggatcgaatcggcagagtccccgcccgcgttctcgctagcgggtgggggaaccgcctggccgtccccaccctggatccccacgccacagcgccgggcagcccctcctgtaggcagcgaccttggccagaggctccccagggcccagctcccttcaggagaggccgagacgcagggaaacgataacggggaatggagaccaactgccgcaaactggtgtcggcgtgtgtgcaattaggcgtgcagccggcggccgttgaatgtctcttctccaaagactccgaaatcaaaaaggtcgagttcacggactctcctgagagccgaaaagaggcagccagcagcaagttcttcccgcggcagcatcctggcgccaatgagaaagataaaagccagcaggggaagaatgaggacgtgggcgccgaggacccgtctaagaagaagcggcaaaggcggcagcggactcactttaccagccagcagctccaggagctggaggccactttccagaggaaccgctacccggacatgtccacacgcgaagaaatcgctgtgtggaccaaccttacggaagcccgagtccgggtttggttcaagaatcgtcgggccaaatggagaaagagggagcgcaaccagcaggccgagctatgcaagaatggcttcgggccgcagttcaatgggctcatgcagccctacgacgacatgtacccaggctattcctacaacaactgggccgccaagggccttacatccgcctccctatccaccaagagcttccccttcttcaactctatgaacgtcaaccccctgtcatcacagagcatgttttccccacccaactctatctcgtccatgagcatgtcgtccagcatggtgccctcagcagtgacaggcgtcccgggctccagtctcaacagcctgaataacttgaacaacctgagtagcccgtcgctgaattccgcggtgccgacgcctgcctgtccttacgcgccgccgactcctccgtatgtttatagggacacgtgtaactcgagcctggccagcctgagactgaaagcaaagcagcactccagcttcggctacgccagcgtgcagaacccggcctccaacctgagtgcttgccagtatgcagtggaccggcccgtgtgagccgcacccacagcgccgggatcctaggaccttgccggatggggcaactccgcccttgaaagactgggaattatgctagaaggtcgtgggcactaaagaaagggagagaaagagaagctatatagagaaaaggaaaccactgaatcaaagagagagctcctttgatttcaaagggatgtcctcagtgtctgacatctttcactacaagtatttctaacagttgcaaggacacatacacaaacaaatgtttgactggatatgacattttaacattactataagcttgttattttttaagtttagcattgttaacatttaaatgactgaaaggatgtatatatatcgaaatgtcaaattaattttataaaagcagttgttagtaatatcacaacagtgtttttaaaggttaggctttaaaataaagcatgttatacagaagcgattaggatttttcgcttgcgagcaagggagtgtatatactaaatgccacactgtatgtttctaacatattattattattataaaaaatgtgtgaatatcagttttagaatagtttctctggtggatgcaatgatgtttctgaaactgctatgtacaacctaccctgtgtataacatttcgtacaatattattgttttacttttcagcaaatatgaaacaaatgtgttttatttcatgggagtaaaatatactgcatac

SEQ ID NO: 1133 - DNA, 4600 bp, Homo sapiens
attcttgaagacagctcgaccgtgatggaggagacaggcatttagaataagcatgaaataaaggtggctgttaaggggtcagctcccctcaccaaagtcacttttgatttacttacaaaagttttcttaagatttcttcagaacccaggtcaaaaggctgtggcaggaggccaggcagatcacagcgtccatgcctagatgctccctgacccccaggaaccagaagtgctgtctcctgaaggctctggaaacccggaatcagcctacgaggcaccagggccaccttggagggtggaaatgaggacctcaggccccagagggcatgcaggcgaggtgaagttcaggagagccaggaagtgtccccctcttcccggcctgctgtatcccaggacacagggcgtaagtgtggaggaggaagggctgcagggtgaggcagcccacactttggctcaggacagggatgggaccgggacatatgggaaaatagtctgggggtcctgggtaatggcaggagcatgagctcagggtcgggtggctgtcctggatgacctgtgggactctcttcctctccgagccacgctttcctcaactgtcccttccttgtgggatgcaagaggccacggcgagcgaaggcatgtgccaagagctgccactcaatgtgagtcagcgtgctggccctccctccttttctccagggggcctaggacttttggggggagcctgaggacatgcttcgctgatgtcactgtgtggagtgtacaaatggccaccctgctgctcgttggttctatatgggcatccaggctggagagcagggggtggggagatggagatgccaccagcaggggactggttcctagaagagagggcgagtttgggtggtcccagaggtgttcttcccagaaaagagagcaggaggcaggaggtgggcatggagaatgtggaggggggcattgacagtgttctccaccacccatcagataagacctggagcctcattaccaaagacttaatgagattcgctttgttttcttatgagccacacctctctgggccttagactccttatccatgagcttcctgcctgcaccctaacattcagtgtcattggccgagttacccaatggctcccagcctcagtttcttcatctgcacattagggataagtacagccatccacctgggaggtgtcaagggggtgtggccgcagcacccagcccatgcacaagttcagtgatcattacctgtctcccccagccctgcctgagtgccaggatcagcaggcttgggaagggggagcccccagggatgtggaaagtggagagggagcacatgggctctggggcctcggggctcctgggctctgttctgcctgtctgggagctgtctcctgctctcccttgcagtgtctctgtctctcttcgttctgttcctccctctgtccttcagtttttccctctccatctcagtctctggttgtctcagtctctctttgcacctcactgtctctgcctttctctgcatctctcttcctttcctgggctctctctctctctttcatccctgttttgggctttctctgtctctgtctctctgtttttcagtctgcttctttctgtctccgttcatttctctgtatgtctttgtcccctgcactcccattctcctcccatgctgtcctctctgggggctcctctggcttcactgggccacaggcccaggctggggtgtgaagaagcaggagctcccccgtcagatgacactaggtgccccagtcagggcagtgggggccagacaaagagctctgcgaggggtggcaaaatcctcttcccagggaagggaatgtgggggctactggccagctgtgggatgggtggctgagaactctcataccactgtaaattctagatgtttttcacttatatcagcttcctgatccccctgagccaaaggcctagaaggtccctgtccctgtccttttggaatgtgcagtcttacttaccagagtgacaaggggaacagagttgaaacaggtggtttcccagcacgggagcctgtgggggctgcttagagaacagcacattccctgggagccagagccatctgggagggctttctggaggaggcagatcatgagggatcaggatggggactaatatgtgctgagtgcctggtggtgctttataagtatcagcagattgggagataagcatagccaccctgtggagacacctgggaggtgtcaaggggcatgcattgtaaaggcccagagtggtgaagcatccaccagctggtaagtggtagcctcgggtggggcctgtcgctgtccccatgctctgtccactactggtgtggcttgccccacttgtgaccatcgtttcttcccctccacccccagtgccacttcctctctccctcgttgtaggggaaagaacatgggctgtgtggccttggaccaattgcctgccctctctgggccttcttattggtgacagacagactggtgactttctgagaggatctatgcaacctcaggctcctgcacctgggttacagggtcttctggaggggaagagatgagcaggtaggctttgacacctgcctgctttgtcctgagtgtctactatgtcatctgctttaaatgcgaagtccctgggacttgcgagttatctctaagccttctcttttcctgactttctgggagtgtgtgtacccccattccctcaccccagccatcagggccctttctgagttgggcctccttcctagctctgggctaggccccaaccctggccctttccaaggccagcaggaactggaaggtccgtactcatgccctgggaggctccaggctctaaggggtgctggagtgatggagttgggcggctggtgctcagaggaccttaatggtgtgggggcagctggaaactggttgtctcttgaaccctcttgccaccaggcctctgtccaggagggctgctgggggccaatgggccagacaccagacagtcacacctttggcagggctgaagtcggggggtgtgtgacacaatgggaggggctgggcctggcagtccctgcagcctataagcaccagcaacccatgaggggacacaggcaccctctggcctcatccttcttggagccagtgggatgtagcaactaaaatacaagctctgaagtttcatggactggagttgcatctctgcttccatcctaattagcaagagaccttggtcacgttgcttaaactctgacactagattttccccctctgcaaagcaaggacaatagcagtgctcccttcccgggtcagttgcaaggattaaggatgatgtctgcaaagtgcttagtcagagccggcatacggtaagtgctcaataaatgctggctcccattattagtatcccttccctccacgccctcaacacatccctttatcatgatggaataaccaattgcctggtaacaacatgttcacacttccacgctccccatcaaccatgctcacctataaggcaggctgcgaccagctcctcttcatctattcattgcctggcccatgctaggggcccaagaaatgtctgctgcatcaacgagtgattttgggaaaggtgctgagcccttctgtcccatgaagttcttgcgagacagtgtctcaccagcaacctggatcgtgagaaccacagcgggtgggccagatctagatggagagtgtccattgggcagagctgcttctgtgaaaggaaaggaagtttttcaagaaaccatgaggggggcccaagaatccaagtttctaactctgggatcggttttctgtcttttacctcggtttgcctctccctagctgtgtggtttatggcaagtcactctgtgcctctgtctccacgtgttcaaggaggcagccggtccaaggggccttcatagaaggggctgccgagatgtgagccctgcattggggggatgccccacagaggtgctgtcccccatcccctttccaggtatgagtgtcccccagctctgagtgaatcagtaggaggtgctggacctgggctgattctcacagtgggacctcaactctagccccgggttggctgacattagaggactttgggtcgttgttctggcagctgcaaggaagagccaatgtcagggagggaaaccccacattccctggcactatccaaacaaaggtttggttaaaacaaagaattctcatggagaagagtctgaaggacccaaaacacatatttctgtagacatcccatcccaaaataaacccatggatcaagccagacccaaatacaaggatgctgtgaaccacatggttgaatattccacactttccccatccattaaaccccacccagggtgggaaggggatggatttccctcagttctcagggcctagaagagcagggcttttttccctcaactggttgagttttactttgtgagcaccatgattcctaaaaccagttatattttctttttctcttgggccgccagggaactcacagcgaaatctaccaaccaaagaggatgtccatacctgtctttttctttcttccttcattttttgacttaatttcctcacttg

SEQ ID NO: 1134 - DNA, 3658 bp, Homo sapiens
agaagggcgcgaaaaatggggccatcttgctccgccgcggctggcgggctctgggttccccctgcgacggaggtggcctcgaagggccgcgtcccgccccgtcctaaaccccgaagcggagtcgccgtcctacagggccgcgtggatgcggagccctgtccccctccccccgccaccccttctgtgagcggcctccaagtcgcagggtccccctggacggccgggggtcgggggagagcccgggcgcccccagacttgcgctcagcacatcttggcatcgcagcactttgcaaagcttgtgatggaaggaagggcggatacatctcccctgcttctgcgaggggatcttgcatgcgtggggcggggggatcgtgcatgggcgggaggaagtcaagcaccagtcgggaggggggggaccgagcatgggtggaggaaaatcatgcatccttggggggatggtgcatgcgtgggcatctactaaggacgggaggacgtgctctgcaggtgggatggccaccaccgtgcgtcaccggcgcgcagtgctgggcgcaggctggggcagtgcccgcccgggcataggcagcctgtgcggctcccggcgccggggtggggttaggggctgcaggggtgagcacagcctcgggctgccgcactcacgcgcgctctgctcggccgcctgcagcaggaccgagagccccaggagcctcgcgtgcatcttccgtgccgaccccgcagcctgcgcccgccccttcccctgcacgcggccccgcgtcggggaggtttccggcccggggcccgactgcgggtggcatttctggctaagccgttaggcgcgaattgtatgtctggtttattcgtagtggccagcaggggagggagggaggatgcttggggtttctggcttccagggtgggtggggacgaggtggtggagtccagctcaggtccgggctcctgataagggcagaagcgggttctgcgctgcccccaaccctgtaaccgccaggaaagcgcttggtgagcgtcgggactgcgcaggttcctcgggaggtggctaaactggccaccgcctctggggccgcctaaagcaagtccgttaaccactagtcagggaggaatactgtgtttgagtaaatatatgtagagttgggttagaatcattgattgggtctttttgaaatcttacagttctgtgtccagaaaacacagggcacgttacccggtatcgtggtctacacctcgcccacaaatccatcccaggctgtatcctcatggaagctttttccagatgtgcttgagggttaagatcgcaatgtgcaagaagaaaaagtgcacattggaaaaccttctcttcggagatatctatatctatatttatatatatttacagatatggagatatatacacacacgtatctgaaaacattctgacgttttaaaaacggtaagacagacttttattcagaaccatttccttagatgtaagggactgcactgaggttttgcagcaggggagagagattggggtccgaaaataataaggaaaagtggggatttatagccaaggagcagtgtgggggacggtggatggaaagtcattgagaaggggacatcaagtgggggttctggcttccctgacctaacaggattcctgctgagggtgggccaagttgatccacatcggggatgggggtggggtggagcaggtgttggaatttggtcagatatggagggtattcagacacctgaggtggggaattgggattaaactgacttagcaggattcttgctaaaactagactctgcaggaacagaggaaggaatgcccaggttgggcccagtcgtgcagagagctcggaggaggctgtccagagtctgatcagggagacattctttgtcattcatgtatatacccatatattgtaataggctgttcttgtatgactataaagaaatacctgagactgggtaatttatcagaaaagaagtttgattggctcacagttcttcaggatttacaggaagcacggtgctggcatctgctcagtttctaggaaggccttgggagcttatgctcataacggaaggtgaaaggggagcaggcacatcccatggcgaaagcatgttcaaattaacataagaagaaagagaacttggccgggcacgatgtctcatgcctgtaatcccagcattttgagaggccaaggcaggcggatcacctgaggtcaggagtttgagaccagcctggccaacatggcgaaacgctgtctctactaaaaatacagagattggctgggtgtggtggtggacgcctgtaatcccagctacttgggaggctgagacaggagaaccgcttgagcctgggaggtggaggttgcagttagccgagatcgtaccattgtactccagcctgggtgacagagggagacttcatctcaaaaaaaaaaaaaaaaaaaaaaaaagagagagagagagagagaatttgaatagtccagtgagtgttagagaaattaaactggtagtcaaagactattcaggtctaggtacttttacagattaattctgccaaagtttcaatgaacagttaactgctacctaatataatttgctccaggaaacaaagaccgaactttacccagcttattttaaaagactgctgtagttttgattgtaaacaaagatatacatagaaagaaaattattttaatgacaagcacagatgcaaaaatcctaggtaaaatgataaattcaaaatatattaaaatagtattatatgataaggtgggttttactatgaattttcacaacccagaaatcctttgatgtcactccattatcattttgaacaagaaaaatcctttttttttctttctttcttgaggcagtctagctctgacatgaggctggagtgaataggcgcaatcttggctcacggcaacctcaacctcctgggttcaagccctgttctcatgtctcagcctcccaggtggctggaattgcaggcgtgtgctaccagactcagctaatttttgtatttttggtacagatggggtttcttcatgttggccaggctggtctcgaactcctgagctgaagtgatctgcctgcctcggcctccccaagtgctaggattgaaataatcaaatgatttttcttggttgggcacagtggctcacagataagaagacaagcatgctcagtatcacaactactgtttaatattgtgttggagggtatacctaatgtataaggaaactgaaggaaataagatcatgtaactagcagaaaggaagggtgagacactcatcatctacagatgcttctctacctagaacaatcaaccttgtcaagctgatgaaatagttcaaaacgtggccgggtgcggtggctcacgcctgtaatcccggcactttgggaggccgaggcgggtggatcatgaggtcaggagatcgagaccaccctggctggcatggtgaaaccccatctctactaaaaaaaaaaaaaaaaaaaatagctgggcgtggtggcgggcacctgtagtcccagctacttgagacgctgaggaaggagaaaggtgtgaacccagcaggcagagcttgcagtgagccgagatcacgccactgcactccagcctgggcaacagagcgagactccgtctc

SEQ ID NO: 1135 - DNA, 4982 bp, Homo sapiens
agttaggtgggacttgggttggggtagagtcaggttgtgacctgcactccattagccatgagacctcaggcaagttccttgctttctctgagtgctttcctttcctttcccttttcttttcttttttgtttttcttttgttttgagatggagtttcactcttgttgcccagcctggagtgcaatggcgcggtctcagttcaccgcaacctctgcctcccgggttcaagtgtagctgggattgcaggcatgtgccaccacgcccggctaattttgtgtttttggtagagacggggtttctccatgttggtcagactggtcttggactcccgacctcaggtgatccgcccgccctggcctctcagagtgctgggattacaggcatgacccaccccatccggccctctgagtctttcttatctgtaaaatgggtataataatacctatctaatcggttttagtaatggtggagataatgcctgaaagtgctagtatagaggtttaatagccagcaaggactgttattagaatgaatagtaatatgactactgtcacattttgcaaatgtgtaaagaagaaagagggctaagtgaatcaaagggagacagccccactcaccctgttctgccccagaggactgagcgatccccaccatctggcaagctgcctcaccaggaggtccagctggggctacaggactggctactttgctacaatggcccgtctttcctgagcccagtggagggtcccaggggggcagaagtcattgataggggccagtagggttgtagagccactgtctgaacttctgtggaggtctggtgcaggggaggtgtgaacagataggaggctaggtgaggatgcagcagaggaagggggcaggagtgccccaggagggggcggtaccgaggcagggattcagctgggtctgagagggaggcaaggctgagggggatggccctttggagtgggcagggacatgaccacagaaagcctgggaagtggaaacagacaggagcctgctggagctcttggagctttgtgtggggcactaggggaaggaggcaggcactccaccctgacctgcccctacctctggatgagggtcttctctgcctgttggatgatgtgctgcccctgctcttggaggaagaggcctcccagccaccccctcctgccagtcgccttgccctgctgacccagacagatctgctatccctacagcatccaggaaggccacagggagggggcccaggtggcatgggtttctgaggcctgggatctgctctcagtcccgctctcgccaaccccctttgcccctctgtgacagtgtgtgtacatatgcgtgcatgtgtgtacctgtgtggtgtggctcacaaggtcacccctgggggtgggataataagaggtaaagtgtgaccccctctcttccgtacattcattttttcaagcttgtgaatattcacattgttaatataatcttctgcagtcccatgacttcgaatagcacttagatgccgatgacccccccaccaaagaaaccccactgtctcccacagactccaggtctgtatctccaactgcctactcaatacaacacgtccacctgatgcaatgaacttaatgtgtctaaaccccaattccacatttccagtcctcctaccggctcctcccccagtcttctctactttactatatgacaactccatttttcccaatactggttttaaaaaccctggagtagtccttgactccagtctctctcacctttcaaccaattcagcagcaaatactgacagctctacctttgctcatcaaagcatatccccaaatcaccctattccagactgcacactgtcatctctcccttcaattacagcagtagcctcctaactagttttcttgattccactcttgcccatcagcagtgaaattaccccagagcagttaaaatgatcttttaggatgggcacggtggctcacgcctgtaataccagcactttgggaggtggaggctggctgatccccttaggttgggagttcaagaccatcctcaccaacagggagaaaccccatctctactaaaaatacaaaaattagccggatgtggtgggacgtgtctgtaatcccaactacttgggaggctgagacaggagaactgcttgaacccgggaggtggaggttgcggtgagccagaatcgtgccacagcactccagcctgggcaagaagcgtgaaactccgtctcaaaataaaataatcttctaaaaatgacagggccaggtggggtggcacttttttataatccgagcactttgggaggctgaggtgggcagatcgcttgacatcaggggtttgagaccagcctggccaacatggtgaaactccgtctctactaaaaatactaaaaattagctgggcgtggtggcgggtgcctgtaatcccagctactcgggaggctgatgcaggagaatcgcctgaaccaggcagatgcaggatgcagtgagccaagattaagacactgcactccaacctaagcaatactttgtctcaaaaataaaaaaaagcctgggaaacaaagtgagaccccgtctctacaaaaaagtcaaaaaattagctgggtatggtggcagtgatggcacacacctgtagtcccggctacttgggaagctttttaatattttttgcagagaccgggtctcactctgttacctggcctggtcttgaactcctgggctccaacaatcccctttcctgggcctcccaaagtgctgggattagaggcatgagccaccgtgcccagcctcaaagcatattttaaaggatagaaataaacagccatatgaagagatacagacagggcggtctggaagggtccagagcaggagcttctatctccatagagttggggttacgtcaccctctgggcacattctgtcagcctccacacgttcagctctcagaagctcccgaaccctgtcctttgggccttttatggagaactccattggctgtccatgactgaagcatggacaactgtgataatgtgattgggcaaaaagggtctgatctaagcccagcaaggccagtccagattctttgggcctttgtgcagcattcctttctccagggtatggggcaaggacccactctggaatgaggatcctacaacccacaatcagattagagtcctgccttgggcagctgaaaagaggacaggagaaggtcagagagacgaaaggctgttttttgaggcctgaggcaccccaacatgacaacgtaagactgtaaccatggtcatgtgagttatgagctaggaaccctggacgaaaccaacacatatacaatcatctcccacctcccaacgcctttactttcacagcctctgcagcaaactgcggtcactataatcgctcctgtggcacagaggcatacccaggggaatctgcccagggggccactctgtgcccacgtgggaacccacacctgcttgtaaagcctcccctccctctgaccagcaaccaggacagtttgttgttccaagcagtgggctcatgtctgttttggctcagaacagggtggggagagcgggccagggacccgcaggaaggcttatccttgagattgcgtgggagacacaacaaggggtgggggcccgcaggcggggcggggcgaagcaggtgatatcaagcccagagccccagcctctccccacagtctcaccatggcccgcaccgtggtgctcatcaccggctgttcctcgggcatcggcctgcacttggccgtacgtctggcttcagatccatcccagagcttcaaagtgtatgccacgttgagggacctgaaaacacagggccggctgtgggaggcggcccgggccctggcatgccctccgggatccctggagacgttgcagctggacgtaagggactcaaaatccgtggccgctgcccgggaacgcgtgactgagggccgcgtggacgtgctggtgtgtaacgcaggcctgggcctgctggggccgctggaggcgctgggggaggacgccgtggcctctgtgctggacgtgaatgtagtagggactgtgcggatgctgcaggccttcctgccagacatgaagaggcgcggttcgggacgcgtgttggtgaccgggagcgtgggaggattgatggggctgcctttcaatgacgtttattgcgccagcaagttcgcgctcgaaggcttatgcgagagtctggcggttctgctgctgccctttggggtccacttgagcctgatcgagtgcggcccagtgcacaccgccttcatggagaaggtgttgggcagcccagaggaggtgctggaccgcacggacatccacaccttccaccgcttctaccaatacctcgcccacagcaagcaagtctttcgcgaggcggcgcagaaccctgaggaggtggcggaggtcttcctcaccgctttgcgcgccccgaagccgaccctgcgctacttcaccaccgagcgcttcctgcccctgctgcggatgcgcctggacgaccccagcggctccaactacgtcaccgccatgcaccgggaagtgttcggcgacgttccggcaaaggccgaggctggggccgaggctgggggcggggccgggcctggggcagaggacgaggccgggcgcagtgcggtgggggaccctgagctcggcgatcctccggccgccccgcagtaaaggcttcctcagccgctgtctcccgcgcccttctttgtcccctgggtctgtgtggtccctggggatggggcggcggtagcagctgtgggtggctaattaagatagatcgcgttagccagttttaccagcgcagctaggcgcgatggctgtcgcctgtaatgccagcgctttgggaggcggaggcaggaggatcgctcaagccccggagttggagaccagccagagcaacacagtgagacccccatctctacaaaaataaagaaaatttaaaaatc

SEQ ID NO: 1136 - DNA, 3204 bp, Homo sapiens
tgttgccattcccaaagaacaccatcgctttgttattggcaaaaatggagagaaactgcaagacttggagctaaaaactgcaaccaaaatccagatcccacgcccagatgaccccagcaatcagatcaagatcactggcaccaaagagggcatcgagaaagctcgccatgaagtcttactcatctctgccgagcaggacaaacgtgctgtggagaggctagaagtagaaaaggcattccaccccttcatcgctgggccgtataatagactggttggcgagatcatgcaggagacaggcacgcgcatcaacatccccccacccagcgtgaaccggacagagattgtcttcactggagagaaggaacagttggctcaggctgtggctcgcatcaagaagatttatgaggagaaggccaatagcttcaccgtctcctctgtcgccgccccttcctggcttcaccgtttcatcattggcaagaaagggcagaacctggccaaaatcactcagcagatgccaaaggttcacatcgagttcacagagggcgaagacaagatcaccctggagggccctacagaggatgtcaatgtggcccaggaacagatagaaggcatggtcaaagatttgattaaccggatggactatgtggagatcaacatcgaccacaagttccacaggcacctcattgggaagagcggtgccaacataaacagaatcaaagaccagtacaaggtgtccgtgcgcatccctcctgacagtgagaagagcaatttgatccgcatcgagggggacccacagggcgtgcagcaggccaagcgagagctgctggagcttgcatctcgcctggaaaatgagcgtaccaaggatctaatcattgagcaaagatttcatcgcacaatcattgggcagaagggtgaacggatccgtgaaattcgtgacaaattcccagaggtcatcattaactttccagacccagcacaaaaaagtgacattgtccagctcagaggacctaagaatgaggtggaaaaatgcacaaaatacatgcagaagatggtggcagatctggtggaaaatagctattcaatttctgttccgatcttcaaacagtttcacaagaatatcattgggaaaggaggcgcaaacattaaaaagattcgtgaagaaagcaacaccaaaatcgaccttccagcagagaatagcaattcagagaccattatcatcacaggcaagcgagccaactgcgaagctgcccggagcaggattctgtctattcagaaagacctggccaacatagccgaggtagaggtctccatccctgccaagctgcacaactccctcattggcaccaagggccgtctgatccgctccatcatggaggagtgcggcggggtccacattcactttcccgtggaaggttcaggaagcgacaccgttgttatcaggggcccttcctcggatgtggagaaggccaagaagcagctcctgcatctggcggaggagaagcaaaccaagagtttcactgttgacatccgcgccaagccagaataccacaaattcctcatcggcaaggggggcggcaaaattcgcaaggtgcgcgacagtactggagcacgtgtcatcttccctgcggctgaggacaaggaccaggacctgatcaccatcattggaaaggaggacgccgtccgagaggcacagaaggagctggaggccttgatccaaaacctggataatgtggtggaagactccatgctggtggaccccaagcaccaccgccacttcgtcatccgcagaggccaggtcttgcgggagattgctgaagagtatggcggggtgatggtcagcttcccacgctctggcacacagagcgacaaagtcaccctcaagggcgccaaggactgtgtggaggcagccaagaaacgcattcaggagatcattgaggacctggaagctcaggtgacattagaatgtgctataccccagaaattccatcgatctgtcatgggccccaaaggttccagaatccagcagattactcgggatttcagtgttcaaattaaattcccagacagagaggagaacgcagttcacagtacagagccagttgtccaggagaatggggacgaagctggggaggggagagaggctaaagattgtgaccccggctctccaaggaggtgtgacatcatcatcatctctggccggaaagaaaagtgtgaggctgccaaggaagctctggaggcattggttcctgtcaccattgaagtagaggtgccctttgaccttcaccgttacgttattgggcagaaaggaagtgggatccgcaagatgatggatgagtttgaggtgaacatacatgtcccggcacctgagctgcagtctgacatcatcgccatcacgggcctcgctgcaaatttggaccgggccaaggctggactgctggagcgtgtgaaggagctacaggccgagcaggaggaccgggctttaaggagttttaagctgagtgtcactgtagaccccaaataccatcccaagattatcgggagaaagggggcagtaattacccaaatccggttggagcatgacgtgaacatcctcaatctggaggaggaatacctagctgacgtggtggacagtgaggcgctgcaggtatacatgaaacccccagcacacgaagaggccaaggcaccttccagaggctttgtggtgcgggacgcaccctggaccgccagcagcagtgagaaggctcctgacatgagcagctctgaggaatttcccagctttggggctcaggtggctcccaagaccctcccttggggccccaaacgataatgatcaaaaagaacagaaccctctccagcctgctgacccgaacccaaccacacaatggtttgtctcaatctgacccagcggctggaccctctgtaaattgttgacgctcttcccccttcccgaggtcccgcagggagcctagcgcctggctgtgtgtgcggccgctcctccaggcctggccgtgcccgctcaggacctgctccactgtttaacactaaaccaaggtcatgagcattcgtgctaagataacagactccagctcctggtccacccggcatgtcagtcagcactctggccttcatcacgagagctccgcagccgtggctaggattccacttcctgtgtcatgacctcaggaaataaacgtccttgacttt

SEQ ID NO: 1137 - DNA, 3831 bp, Homo sapiens
gttaggctgccgttggtcccgagactcccccatctgcgcccccgccctgccctgcgaggccgccgccgcgcgccccaccgtctgttgcagtggagcgtgagccgcggctgcggctcctggttcttgtggaagcaccgaccatgtgccgagagctaactgtgtcaagaagagcatgcttcagttggctggagtgagcaattcaacttgtggaggagtgagaaatgttagtgttgagacaagaaacgtaaaaccccagggtaaggacagcaaggctgaggagaatggctcccacagcttcatgcactccatggacccacagctggagcggcaaatggaaaccacccagaacctggtggactcctacatggccattgtcaacaagaccgtgtgggacctcatggttggtgcgaagcccaagaccaccatgcatatcatgatctacaatgtgcatgcaccgcctcatggggaccaaggagttcatcttctcggagctgctgtccaacctgcgctcgcgtgggaacgagaagacactcatggaggagtcggcagagtaggcacagcggcgcgacgagatgctgcttctcagagctgctgtccaacctgcactcgcttgggaaccagaagacactcgtggaggagtcggcagagcaggcacagcggcgcgacgagactcgcgtgggaagaaatagacactcctggaggagtcggcagagcaggcacagcggcgcgacgagactcgcgtgggaacgagaagacactcctggaggagtcggcagagcaggcagaccaaggagttcatcttctcggagctgctgtccaacctgcactcgcgtagggacaagaagacactcctgcaggagtcggcggagcaggcagaccaaggagttcatcttctcagagctgctgtccaacctgcactcgcgtgggaacgagaagacactcctggaggagtcggcggagcaggcacagcggcgcgacgagatgctgcgcatgcaccacgtgctgaaagaggctctcagcatcatcggcaacatcaacacgaacaccgtcagcacagctacgggggcccgtggacgacgcctagctgcagccaagcccagcaaaagaatggcatacgggagttgctgcacaagcctgggtgctccacgctgtcagtgaggctcacctcacaaagatctttggagagaaggaggtggggatccgagtgcagtgagagcctcccctgcccctgcctgcccaccctgcctgaggactctactcaccaccatgcttatcagcacccacaagctcctggggggctggggctcctggaccaggctcatcagcaagcttcagggcagtggccgggaatttgctgtgtccctcgttgtagtcaccacaagccgcaacatcttctccagcagctccagcagcttcacctggagggaggggtgctcagctgttatgcatctaccggcgcccaccctcacgcccacccccacccctgcagagatgttgcacaccctaccttcatctcctccatgtcctgggccagcctgatgatgtcctcctccagttgccgcatctttggcactgccccctggctgtgttctagggtgatgaactttcctacaggaggacagggctcagacgctgaggtccctccgacggccctgcagctccccctgccgtgccctggcctcccactaactgatgacttctgtctttccagtactggatgaatcgaagttctagtttctccgctcgctccctcaggtccaccttctcctccaggaggtccataaggccactctggagccaaaataatggggtcacatctcggcagcaacacccacccctgcccttcttggcccatgccaggactcagtcacctccagcttctccatgacctcctgcatggcccggtgggtctccccactcacagactggcccctagtcactggggctgggaccgctgcctctggcttctgctgggccgaggccaccaggtgagccatgcgctggcagcacaccctctgctctttcacctgctctcataaccgtgcctgctcctcctgggcattggctccagcggagttgaaaaatgcaacctgagggcaagaggtgagcattcttgtaggggcatacacagaacgaacggggcagagaggtggagtgcagcctcttcccttggggcctcagagagtgcatctgttggtcacaggtgaaatggtgtctgaccactggctcctggaagggatgagggtccagagaaatcagaaggcagggaaaccaagagcataaaggggtcttggagggaccacagaggaaggtggcaaaatgggtacagggggagtcaggctcaccgtggcctcccagctctccaggtcctctgggttgcttggcatgggccgaggtgcctcctcctcactgtccagatgtcctcctctatctcctgtggggggtggccagaagggtcctcagacagcccaataagggaggtactgtgggcccacctctgcctccaccctcactgtgtaacactgagccagccactacccagagagcagctgctgttctttatttttacttttaagaaccaagatcaggcatagtcccactaccagtcgatgtgggagttctgacccgctccctttctgacctgggccagttcagccatccttaggcaacttggtggccccccgctcccaggaggacatcatattgatgccaaacttagtgcgggcacccggtcggcatagggaccagctgttctaaaggtctcttccaacctttgcctttttctttgctgcggccaatttgctctgttgagtttcttctgccattgcggggtggggagggaggcggggttggggccacgtgagcaaaatcccagtgagcactgatgaacacctccacttgcctaccaggcagctgtgtgactgagcccgaggaggcacaactagggcccccatagaatgcagaacaggggcgtggccttaatgctccaagcccattggtcaatgacaaagatgaaagggaaagggggtgtggccaggcagcagtatgtccagagggacctgtggctcacaaggaaagctgtccatgcaactgctgtccccgcctactctgaggggaggggccgccccctctgggagaggggaggggccggcttttgctttaaaagctttaaaactttaaaaaatatatgtgtgtatactttatgtatatgtgtgtgtgtgtgtatctatgtgttcctccagagctgtcttcattatccagcttctatgcaaggtctacgattttggcctatatttttcatcttcaaacacagtacaaaaattaccagtattaccataactgagataaagatcctataaaaatggaaaatccatagcatgcttgatgattaacgaagcagactatattatccaacattccaataagataaaataatcacaagtttcttttttttggaaaaaggtttctcttattctcctatgttattgttaaaaaattttttcttaaacaagaaacatgtctaatatctgtaacaacacaaagcttttgggccagatgcggtggcttgcgcctgtaatcccagcactttgggagcccgaggcgggtggatcacctgaagtcaggagttcgagaccagcctggccaacatggtgaaaccccatctctactaataatacaaaaactagccaggtgaggtagtgggtgcctgtaatcccagctattcaggaggctgaggcagtagaatcacttgaacccgggagacggagtttgcagtgagccaagctcacaccactgcagtccagcctgggtgacagagcgaaactccatctc

SEQ ID NO: 1138 - DNA, 4050 bp, Homo sapiens
attatgctgtggaaatgttgtataatcagccagaccagaaatatgatgaagagaatcttccaataccaaattctttacgctgtgagctgttacttgtattgaaaactcaatggccctttgatccagaattctgggattggaaaaccttgaaacgacaatgtcttgcattaatgggagaagaagcatccattgtgtcttcaatagatgaactaaatgacagtgaagtatatgaaaaagtggtagactaccaagaagagagtaaagaaacttctatgaatgggctttctggtggagttggtgctaattctggccttcttaaagacattggtgatgaaaagcagaagaagagagagataaaacagttaagagagaggggatttatatctgctcggtttaggaattggcaagcctacatgcagtattgtgtgttgtgtgacaaagaattccttggtcacagaatagtacgacatgctcagaaacattacaaagatggaatttatagttgccccatatgtgcaaagaactttaattctaaagaaacttttgtccctcatgtcacactgcatgttaaacaatctagtaaagagagactagcagctatgaaaccattaagaagattgggaaggcctccaaagatcacaactaccaatgaaaatcagaagactaatactgtggctaaacaggagcagcgacctataaaaaagaatagtctctattcaacagattttatagtgtttaatgacaatgatggttcagatgatgagaatgatgacaaagataaatcctatgagccagaagtgattccagtccagaaaccagtacctgttaatgaatttaattgccctgtaactttttgtaaaaagggctttaagtactttaaaaatttaattgctcatgtgaaggggcataaagataatgaagacgccaagcgctttcttgaaatgcagagcaaaaaagttatttgccagtactgtaggcggcattttgtgagtgttactcatctcaatgatcacttacagatgcactgtggcagtaaaccatatatctgtatacagatgaaatgtaaagctggttttaatagttacgccgagcttttaacccaccgaaaggagcatcaagtctttagagcaaaatgtatgtttcctaaatgtggaagaattttttcggaagcttatttactatatgatcatgaagcacaacattataatacgtacacttgtaagttcacaggttgtggtaaagtttatcgttctcagggtgagctggaaaagcatctggatgatcacagtactcctcctgaaaaagtgctgcctcctgaagcccaacttaattcatctggagattccattcagccttctgaagtgaatcagaacacagcagagaatattgagaaagaaagatctatgcttccttcagaaaataacattgaaaacagcttactagcagatagaagtgatgcttgggataaaagcaaagcagaatcagctgtgaccaaacaagaccagatttctgcctctgagctcaggcaagctaatggaccattgtcaaatggtttggaaaaccctgctactactcctctacttcaatccagtgaagtagctgtgtccattaaggtgtctctcaatcaggggattgaggataactttggaaagcaagaaaactcaactgtggaaggcagtggtgaagcactggtcacagacttacatacgccagttgaagatacttgtaatgatttgtgtcatccaggtttccaggagagaaaagaacaagattgctttaatgatgcccatgttactcagaattctttagtaaattcagaaactctcaaaataggtgaccttaccccacaaaacttagaaagacaagtgaacaacttgatgaccttttctgtgcaaaatcaggcagcatttcaaaacaatttaccaacttccaaatttgaatgtggagataatgttaaaacatcatccaatctttataatttacctcttaagacattagaaagtattgcatttgttccaccgcagtccgacctaagtaattcattaggaactccatcagtgcctccaaaagctccagttcagaaattcagctgccaggtcgagggatgtactcgaacctataattcttcacagagtattgggaaacacatgaagacagcacaccctgaccaatatgctgcatttaaaatgcagcgcaaaagtaaaaaaggtcagaaagctaacaacttaaatacaccaaataatggaaagtttgtttattttttgccatcaccggtgaacagctcaaatccattttttacatcacagaccaaagccaatgggaatcctgcttgttcggcccagttgcagcatgtctcgccacccatttttccagctcatttagcaagtgtgtcaactccattgttgtcctcaatggaaagtgtcataaatccaaatataacttctcaggataaaaatgaacaaggtggtatgttatgttcccaaatggaaaatttacctagtactgccttgccagcacaaatggaagatctaaccaaaacagttctgcctttgaatattgacagtggctcagatcctttccttcctttacctgcagaaagtagttcaatgtctctcttcccttcaccagcagatagtgggactaattctgttttttcccaactggaaaataatacaaatcattattcctcacagattgaaggaaacactaattcctcctttctaaaggggggtaatggtgaaaatgcagtttttccttcacaagtgaatgttgcaaataacttcagtagcaccaatgcccaacagtctgcacctgaaaaagttaaaaaagaccgtgggcggggcccaaatgggaaggaaagaaaacctaagcacaacaaaagggctaaatggcctgcaattatcagagatgggaaatttatctgtagcaggtgttacagggcttttactaatcccagatcactgggtgggcacttatccaagcgatcttactgtaaaccactggatggagccgaaattgctcaagaacttctacagagtaatggacagccttctcttcttgccagcatgattctctccacaaatgcagtaaatttgcagcagccacaacaatctaccttcaatccagaagcatgttttaaagatccatcatttctacagcttcttgctgaaaatcgctcgccagcatttttaccaaatacatttcctcgatctggtgtgactaactttaataccagtgtcagtcaagaaggtagtgaaattattaaacaggctttggaaactgctggcattcccagtacatttgagggtgccgaaatgctttctcatgtttcaacaggttgtgtctctgatgcatcacaagtaaatgcaacggtgatgccaaatccaactgtaccacccctgttgcacactgtatgccatccaaacaccttgctgaccaaccagaataggacgtcaaactccaaaacttcctccattgaggaatgtagcagcttgcctgtttttccaacgaatgacttactactgaagactgttgaaaatggtttgtgctctagttcatttcctaattctggtgggccatcacaaaattttaccagtaacagttctcgtgtttctgttataagtggtcctcagaacacaagatccagtcatttaaataaaaagggaaacagtgcttctaagagaagaaagaaagttgctcctccactaattgcacctaacgcttcccaaaacttggtaacaagtgacttaacaacaatgggactcatagcaaagagtgttgaaatcccaactactaaccttcattcaaatgtaattccaacttgtgaacctcagagtttggtggaaaatctaacacagaaattaaataatgttaacaatcagttatttatgactgatgtaaaagagaatttcaaaaccagtcttgagtcccatacagtgttagcccctttaacattaaaaactgaaaatggtgattcccaaatgatggctttgaattcatgcacaacttcaataaattctgatttgcagatttctgaagacaatgttatac

SEQ ID NO: 1139 - DNA, 3136 bp, Homo sapiens
tttttgtcactcatcaaccagagggacagaccaggccctggggtttgagtgtactttgagagcagagtgggatgtccctgtgtttcccacctgtttgcagagacagaatgggaaagggtgagtgtcctaactgcatgcccaactcatctcctgcactctgcatgccgaggtgccccccgaatgccaggaaggcatctgtggctgggcatggtggagccaccttgacagagcgcagagagccgtttccactaacgcctcccggtgctgtcctggtcggcctgcgatgggggtcctggctgagcccaagcaaggggagggagctcagggctgacccctctgccagagatcggctctgtgcttggaatatggaacccaaagaccttaacactgcccttctctctgccttcaccactccaggagcccggtgggcacctaccacatctctagtctagccagcacgcgagtcccgagggtgggcctgaattcctgagcttgctctcgcgtgcctttcaggcgatgagaatgatttatttgtttgtgatgcatgtttgctgaaagattaataaatcatttctgtgcctttagcaaacttcctgtgttgctcttaaaaagggatcatccaccttcccggaccacaaggttaaggtaaccccgctaggtaaccctgataggcctgctgcggggcagaccgacagagagagagagagtgagggcgagggtgaggtaagcaacgccccgggaaccccggggtccctggctcacatctcctcgccagctcaggcgccttctgggaaaatgaatccttgcatttttctgttctctaatatggcttttgaggtcttaaatttgaggagccggaatcatgccttcctcctaatctgcagggcctctttggagctgcccccgccagcagtgaagggtgcttgtcggccagggcgcctctccccgggcgcctggctggaggtggctggagctgggacgggcagggccctggctggggtggtggttggcagctcagctctcctcccttggctgcccttgctgaacccacccctgacctttgtgggcagctgcagtgtcaggcgggagctcggggctcttgctccaagactcttgagctcccaggaagacctgccacaccggcatcagtggctgctgctgtggccacgtgaggtggggctgtgaggggaggcggctgctgtggatgatgccaggaccctgggggcagagcctctgagaaggtgggctccctggctgcacagtgtcaggcagaagcccctggctgcctgctgaaagccccaaggtcaggggctgcccagctccccgcgctgcggtctgtggtggccccgtgcatgcaccgggtggctggcccgctgagcttccccggcaccaggtgccctggacctcgaggtcctgagcctgacccagggctggtctgaccgactctctgcttctggctcctgggcacttcttctcagctcagggcgtgctctgtcaaaacccaagtcctttcttggctctgtgtcaggcggggtgttcagcagggggcacctggctcttctgtctttgcagggccccctgctgcgctggctcaaggtgaacttcagtgaagccttcattgcctggatccacatcaaggccctgagagtgtttgtggagtccgtgctcaggtatggactaccagtgaacttccaggcagtgctcctgcagccgcataagaagtcatccaccaagcgtttaagagaggttctaaactctgtcttccgacatctggatgaagtagccgctacaagtatactggatgcatctgtggagatcccgggactgcaactcaataaccaagactattttccttacgtctacttccatattgaccctagtcttcttgactagaaaggccagctggcacctctgtctcatgttcgtgcagattattacagacacctctttcctttagccagagaatggttcaaatgtcttacagaactaagatctttttcagagaaattgctcacaaaagttagtgacagttgtatttatttttttaagttacaataaaatgctctcaagtcctttgaatgttccaacaaattcaaaacttcattttctgaatgttttacataaatgcgaactacctgttcgcattggtaacctgctgctgtatttcatgtcttaacggctattttgaggttcattaacaacatagaaagccttgaactgtataaccagctagattccttaataattagtcactagagacagcccaaagacaaatattgggcaggaaatcagttctcactgagcccggtttccatgtaaaatctctgttgtggtgggcataggtggcaccatctaaagaaaagaggtcttgttttttgtttaaaaaagtttgtggggaggaaagacatctgtgtatcacttcaaaatattgatttactgctaaacatcactctgaatttatgatgtggatactaacttcatacatttatcggcattgtccaaaatattttattctttaatggaaaaagccattaatattcaaatgaagggatcacatcactcaccattttaacactggaagccacttgaacgtgtccttttgaggagggtgggacacaacagtacagaaataagtgctaatttcaaagctatcattttctatttttctaagataaagtaaatgaattccaggttaaatgttcactttaaggtaataatcaggaaagcaaccttactactgaaatgtatcttggctgtcaagagtatcaaatgccatgcagcacttaaacttgtgataaggaagatgaagggtcttcagagaagaacctcttaaaaggcccacgggtgcaccagggctgaggtctgatgggaaggacttgactccaggtgcagagatgcacaggctcaagagagtaaaccaggactgctgcccgcacagcttccctcccgggcactcacctcgccatccctgccgtcccaaggctctctctcaacgatggtagggaaagccccgcctcctacaggtgccgtggagccacgcccaaaagagagctcccttagggaaaaatgaccaaaacacacacacacatttacaatggactgctggtgcagaagaataaacaactttaaaaataac

SEQ ID NO: 1140 - DNA, 4157 bp, Homo sapiens
ctttgacccttttgaagattgtagggcaggtattctgtaggctgtccttcagattgtgtttttgatgtttttctcatgattagattgaggttaggcatttggggcaggagcactgctgaagcaatgtgtcctcgttgcaccgtatcaggaggcatatggtgttgatacgtttcattattgtgatgttaactttgatcattgggtgaaggtggtacgtgcaatgtttcttccctgctattaaggtactgtttttccctttgtaattgataagtatcttatgaggatatacttttgagatccaatttttttaacttagaatttattcaaaagtcaagaatcttaaatctctgagatggcgtgggaagaaaaagtgctagatacacagagatctttcttgagtcatgtgaaggagcagtgcccaagcccagcaaacccacagcaaattcccttggcttccagaagagatggagaaagcagtgcccccagtggagggtcaaaggcctctgtgcagggtgttgtgggcctggagagctggcctggccatgtctttacctcctctgggcatctccccaccccaacaccctttctgtggcctggtggctgagttgcagccgacacccagaggcaggtgagttgacagcttggaagaggctgcagggtggatctgctgcatgagcaggcctgagcccagccttacctccccacagtggtcctgtgtgccctccggctgcctaatgcatgttggcacttgctgtacgagcacccgcttcttcacctcgcgtgctgtttgtgtcctgcactccttccttaaccccatcgtccttctgctgtgtttgcagcccctatctaccctggtgggagtggccaaaaatatttaggaggggatcaccagtttgtagtggcctcagaggatgtgtggtcccccttatgcctcagccactcatcagcctagcccctgcccatcatctggcattgcacttgtggaaggaaagaaggggagggctgggtggtgggtggagaacacgtcagtccaccaggcgggccctgcttgctgtgttcctccacgctgctgtccacccacaccccagcagtcctctgagggacctcccgggggtgacctgggccacaacagactgcccactcagaccccatcttacccatgccgtggacaccccgcccccccccgccactgctatgctatagctgggggtgtctatgtgagctgtacagcccagcaccacgctgacgatgttcttcatccccttctccctgcagggcatcgagcgcctcaaacgaaagaaccagcccagggagcacatggggagctggcagtcagtaaaggagacctttggtggggacttctccctgaactggttcaaccccttctccagaccgtgtcagccagagatccccagtgacaaagacatggtgcggcaggtgacatcgctgtcagacaccgaaacaatggaggatccatcagaggagacaaaggacgaggactctgtggaggtgacagatgaatagatgctgctgtggggagagaagcaaacactaaaaagtgctgtcaaccttcatcctggggttttggctaaaggggcttatgggcatggtgcgctcccagcacccccagtgcttcccttagccactcgcttggccttgccatttcccctccttcttctctccatgttgggccaggtctgggggtcgggagtaggctggggacatcagaggaggatgggggctttctcagagttcatctaagaagagtctgcactgagacggctcatcaagaaccgttctccaagactgggtggctttcacattctccgcccagcaaagggagcttttgaacagggcatcccaggggcagaaaagagcttgcctttggctttccccaggatttctgtcttctcttgggaaggctgggcccctggctcctggctttgagaagtaaggttgtgacagaaggaccgggcagggcttgccttggggacctgggttgggacactgacatcaggggagactagcctggaaagactgcagagctgccagctactccctggaaagggcttccccatgctgcctgccgaaattaggaggtagaggtggctgccacatctacctgcaagggccaggcgtggttcaaagaggaccctgcattaagctctacacacacatgtgcaggacatgtccagcatggacagagccagagttaagacagtagcaccgaaaatgagcccccattccacagacactggagtcttcactgagcgagacagctgggagctgtcctgcctgtggctacatatctagccattcacagatgtggatatgggaaggacctctttggagctactggggactccctaaccactcgcatgagaacttaattgaatgttacctcttggagggagtctaataacacatgtaggtagaactgaccataaaccctgcctgtgtgtttgaaaaggccagttctcccaaattggtgcccatcttgtctctgaaaaggtgggtgatggccagggtctgctgattgatgaatcagatgaatcaggaagatagacaaacacacacacacacacacacaccccaccaggatgagtctgccctctattcaccccatttgaagcctgtggtgtctgtgaccactgctgaaggtctgagcagcgttctggtgctcctaaaccccattccagtggttgctgaagcagcatcttctgcacaaagcccaacagaagggttcttatccccgtttggtataagaagtggattcaccacccactccctccacgtgcctttgttcctctctttggcccatttccccagcgtctactggcgtcaggattggcaggagcacaggcactcagcagagcatgcccctgcaagacctcagtgttagggccccccttccagctccaggcaaaagggcatgagtcctggccccaaggggcctgtggctgcagttcagaggagaagaaggtcagtgtttggaggtgcagcctcaggatgctgagaaaggaaactggcgaccgtgagaaagaaaagagccaagcagcatcctggttcttggacagcatctttggacactctgtgaagggcaacgatcctgccagagaccgtctctctacaactgatgacccactagggcctggggttaattgctcaaagggcccagtgttcacaaagccacctctgccctaacccttgccagagctctccaactatgacccacgagaggggtgatggtgggattctaacatcaacagagcaaccagaaagacattgggcctcccacactcaggctgcaggcccactttcttggtccttatcagctttaatatttattaatgacgacataggagcccgagtcagctgtaaaggccattaacttgcaatctggacaggaagttgacgctcaccactttgggtaagagctgctctgactgtagggccccctatttgttgtcctaacccagaagcagctctgggctgccaggatggtggatggaataccagagagttcacactagggaggaagcaatgcctgccccctggagtctcctagggggcagcagttagaataagggaagaggatttgctggtcactgtttgctgacatgggtttccatggtgagttcaggcctgaggacagcagtgtctgcaaaaccacatggcccttgagaaatgtccttgcacattgggcttcaaactcctcttctagggaatccatcttggcctgaaagcagaggtacaacaccagccccaaaggcaattctgttttcagattggttgctctggaaaggaaggctggggtgagggggcattttacttgcacagaggctgaccctgcctcccctcttcactgaccccatctccaaggtagacctcagccatgtcagtccctgttctgggaggtgctgggctgggccacagccagggttatgtaggtaattaacctgtccaaccctgagcctcgcctccccacaccagcaacacagtggtctctctgtggtgaccattcacagcataacattctgcttagcctcaaactgaaagcattgcaactgatgtcaaaaccagatgagatcttacagggagagagattgggtgcaatttgcctctttctttgaataaaaagctctttgctcaccctc

SEQ ID NO: 1141 - DNA, 4802 bp, Homo sapiens
cccatctatgtatgtatgtatgtatgtatgtacgtatctatctatctacctatctcagtctatcatatctatgtatctaccgatcaatgtattaattcatccacccactctatctatccatccatcctctatctatctatctatcatctacctcatctatccatatctatctatctatctatccactctatctactcaggttatatctatctttctatctgtctgtctatctatctatctatctatctatctatctatctatctatccatccagccaccctattcatttatgtctgtctgtctgtctgtctgtctgtctatctatctatctatctatctatctatctatctatctatctatctatctatctatctatcattctatcctatctatgtaccatctatctatctatctatctatctatctatctatctatctatctatctatctaatctatctccacctctattcatccactcaccctatctatccaaatccctcttctgtctatcatttatctacctatttatatatcatctatctctatgtatgtatgtatgtatgtatgtatgtatctatctatctatctatctatctatctatctatctatctatactgttcaagggagaagacctagcttcctgtcctctcgtcacctctcacagagaatcacttgaagcttagtggtccaagcagcccacatggacacaggaacctgcccagccagagaagttctgggtcatgggcttcctgacttttatcaagtagtcagtatcagaaccccacagttcatcagccagtaggggcaacactgccatcctgaggcaatttggaaatctgagggcagtgttggttatcacagggacaccagaggcattcagtgggcagtgggcagggatgcccatagctctgatttcagggaattctccacaaaatatctctcacctcaaacgccagttatacccctgatgagaaacacttcattagggagtcacagaatctgttagctcataagaaattcttggtagataggataattataactattggttggtacaaaggtaattgtagtttttgccattgaaagttattaaaagtaggccgggcatggtggctcatgcctgcaatcccagcactttgggaggctgatcacgaggtcaggagttcaagatcaacctgaccaccatggtgaaaccccatctttactaaaaatacaaaagttagccaggcgtggtggcacgcgcctgtaatcccacttaggaggctgaggtaggagaatcgcttgaacccgggaggcagaggttgcagtgagccaggattgagccactgcactccagcctgggtgacacagcgagactccgtctcagaagaaaaaaaaaaaggaaggaaagttattaaaagtaatgacaaaaacttcaattacctttgcaccaacctaatatttatattattaataaagacccactcgatgaagctggtgaggatgaagccactgatgtccaggtctggctttactgaatataaaacaaacagccaacagccccatgaaaagcagatttctgagtccaaagctccagcaatttaattcaataagtctgatgggatctaggaattgcattttgtagcatgcaatgtgccacaaaaagagtgctaggtgatcctgaggcccagtgtgtgggtggttatatcactgtttgaagactggagaaagtgaaggcagaagccacaaaggcaagacttgaatatgcacaggtgtaaggtagagccagcaccttggagaacggcagaacatttttatgaagttggaaggggtcatccgagcagtacttagggaagttcctacatcatggctggccaagttcaccacgtgtaccccatatgggatacaattatgactctgatgtggctgataatctctttattctaattgtccatcccccacccatcccgtcgtttctaacccttcctgatctggagctctctgtttctggtgaaagattctctttgtcaggtttcctagcttctacctccatttcctaacaaaaggcatccctggcatgcccacgtctttcaagattctccgtgatgtgacccactgtcttctcacatccttgacagccagacccatgtaggctggtctgtttctgttttctcatgttccttttcttgccctttatgtagacatatgggttcctacctgccttttgtctattgtgtgtaagaactggagttccccagaccaagtcctcattctgttgcctccccgaacctcctcaccagcattctttagctctttaactcttacaatggtgtgattgtcataaaggaggctatttactgagacatacaaaggaccataatgttccgtaacaagcaacatttatttgctgcttcgaagtggtgtgaacccaccattaaacagtgagtatatattttgtgtcaagttctaagctaagcattgtgcaaaatataaatgtcactcagatgaatataaaacaagcttcttgctctcaaaagtctacaatgtagttaagaagttgtatctggctgggcatggtgtctcatgcctgttatcttatcactttgggaggctgaggtgtgtggatcactttaggtcaggaatttgagaccagcctgaacaacatgaggaaactacgtctctactagaaatacaaaaattagccaggtgtagtggtgtgtgcctgtaatcccagctactcaggaggctgaggcaaaagaatcgcgaggacctggaaggcagaggtttcagtggtgctatgtcagctcagtgcaacctctgcctcccaggttcaagtgattctcctgcctcaacctgccgagtagctaggactacaggcacgtgccaccaggcccggccaatttaaattttttttttatttttagtagaaacagcattccaccatgttagtcaggatggtcttgatctcctgacctcatgatccgcctgactcggcctcccaaagtgctgggatgacagacgtgagccaccgtgtccagcccgcaaatcttatggtacccacagaatttttttctgccccagacacaacctcagttgtttgtctctttaagagggaatggcgtaagcctatttctataagcaaatagtgaattttttttttcccgaagtcctgggtaccaaagtgctttatgaaagccacttgttttggggtagacagatctctcctgtttgaaaaaggaaaagggatggaaggtttcctcaataggtgacctcctgggacatgaggcaagtgggcccaaggccatcataattatttaacctctttcctaagtattttggtttctctgtcctggaaaatggtgccactgccacaccttgtttatgtttcattttagaatgccagaaatgtcactgcatatttccctagagcccgctggtatgattactacacgggtgtggatattaatgcaagaggagagtggaagaccttgccagcccctcttgaccacattaatcttcatgtccgtgggggctacatcctgccctggcaagagcctgcactgaacacccacttaagccgccagaaattcatgggcttcaaaattgccttggatgatgaaggaactgctgggggctggctcttctgggatgatgggcaaagcattgatacctatgggaaaggactctattacttggccagcttttctgccagccagaatacgatgcaaagccatataattttcaacaattacatcactggtacaaatcctttgaaactgggctacattgaaatctggggagtgggcagtgtccccgttaccagtgtcagcatctctgtgagtggcatggtcataacaccctccttcaacaatgaccccacggcacaggtattaagcatcgatgtgactgacagaaacatcagcctacataattttacttcattgacgtggataagcactctgtgaatttttacagcaagattctaactaactatgaatgactttgaaactacttatacttcatactcataaaaattattgtgtgttgctaatttgttcatacccactattggtgaaatatttctgttaattttgttatatgttttttgtgtgaaccctaaaggttaaaccttagccctgtgggataggcagttagggaggtgtggaaaatctatgcattaccttaatgtctctgtgtggttagtatggtagtgactgttcatcatatgacatttactgaagatgaactgggtccatgatgaagtgtgtgtatgtccacgtttgtaatcatagaatggaccccattcttttgttaaatacacaagagaaagctttctgtgacagttccaggtcttgaagctaatcagcatctcaagaaagtatccagaaagaacatctgctagttggttataggcggtgggaggaataatatacctaattggttataggtggggggagcatgataagcaaagaaaaggcaaacacaaggaaagatcagatgaaacagaagatgatagtaaaagtgatcctaagtaagaacataatgtaaaattgtcagcagcctcatggggaggaaaaaggaagagtcaactcacttgaagaagagggtcttgagaaatccttagcataaagggctactggtgagattgagatctgagcaggcaaagctcaaaagagagtttggaggttaaaaataatttatttttgcagtagtgtgctttgaaatgtgtaaatcttatttctaatgtatacaaccacatttcacataaaaatatgcaatttatatgccagataaaaataaaacaagtgaatttgcaagtg

SEQ ID NO: 1142 - DNA, 5447 bp, Homo sapiens
ggggaccgctggggaccctacttcgccgagtatgattggtgttccacctgctcctcctcttcagagtctgacaacgagggctatttcctaggagaacccatcccccagccagcgcgcctgcgatacgtcacaagcgatgagctgctgcacaaatacagctcctacggcctccccaaatcttccacattaggtggcagaggacagttgcacagcaggaaaagacagaagagcaaaaactgtatcatttcttaatatgattgggatcagggaatgggagaagatgggagctaagaatgtaaagtcagaaacttgcactgttttaaatgttaaagcgcttttgggggtggcttatgggggataaaagggaaaatgctgtcagtagatggaggcaaggttacaggttgactcaataggtagtcacagttcttggcatgttgaatattatttgcacatttcactttggaaacacagtagactctatcgaggccaggcttggtcacttccttcccatcagttctgtgttgagttgccatctctcaagatggtaaattgtttcctgctcgcttttatcctctctggttctcttacttttaggacccttttttcagtaagtaatttgtttattagccaggacccaagactaagttatttacatgtccattgtaaatgcaatgtaaatgagagttctgataaaatatttttgtattttgtaatatcaaaggaatttctatatcgtaggactcagtggggacttgcatgcacatccaccattgtctctgagtagtattgaaatgtggcccggtaccacctttttttttttttttttttttctatacaaatttgttacatgtcagtgagacctttttcaaaggaacatattcaatttggctttttgtggctgaaaaaacataactgttagacccaaagcattttatgctccgttccctcttaaggagccatccttaagtctgctcccaccctcagtagaatttattttctacaaagtggtagtaatttttttttaaattgcaaatgtaatttttgccaattagagaaaccaaccggtgtcagtaaaattctgtgagaaatgccatccctgctgggaatgttgaagttacttaatgttgatctatcccttggggaaagtaaaagtgactgtgagtggtgccattgtgtgatgtcagcatgacgttgttttgaatgtggcattatgttctggtgctcatgtttcctggattgtattatctgctttcctttaccaaggcagacagaactgctgccttagcctgacaaccggttgtcctcaaagcaaatgaacttaagcatttgggattgagggacagaaggattctgagggggctctgcgagggacggtgtgtgacatgtcatgcctggagaaggaacaaggctatttgaaaacagaaggcaggtcaagggtagaagttaaaggagaatctgaaggcaggtcagggaaaagaagaactggaaatgaaacagaggacaggtgacaaccacctcgaagagctcccagagattgtagaaagagtccagtgtaaccagcttagtaaccagagtatctggattacccaggaaggttgagctgctgagatttcagtggtgcaatgtctttaaaaaaacaggctttgttgggagggtatttccattttgaactttgaggactgttggtcagaaaatgggctcaaaagtgagtttgcttaatgaagacatttaacggttgtgctgtttatagtaaaataaaactccctaccttgcttcagttaaaaatgaagcacttggtttcttccatcctcctcctccccttaatggattgtggcagttgaaataatccatcggaggacccacctgtagtgagatgtactgtcgatgtagtgcccggtgtatctcagtggccatctgccatggtgaggtgagcgtgatctcttttcagtatagtagttaacattttctagtattttttatggagagaatgtcaaaagtggcatttcagaccccatcccagatgggtctgaggaaaggaaggctgtaaaggacatggtaatggcactccattcgggatgtattaaaataatttgcttttcaggtattaatatgacatttgtcattgtcactgatttttttaaaaaagcaatgcacatgttggttgtggctgttttccgcatgctatcttcatatctaaatgcttcattaattatccgagcctccggagaattaactctattacgtttgtatagtaagtttgtaaactgcttggcaaactgattaagaaataatttgcaataccgtgctactaaagtggcaggtttctggtagaaattgtgcgagtccaatttggagttttaagttccttgattgatgaaactaaaaaggcaattttggaaaaagagagggggaaaagtagatcacttatcttagcaaacggttgaaaatatgtctgtcctctgtggccccaaatccagtgaaagaaattctcccagtaaaagttgcttcctaactctgtttttctcagaatacctcttacctttctcaaagaaagcttcaaccaccatcatcagaaagaaggtggcctaaaaactgacacatggccagtgcccggaggggtctggaggcataagtctagatgcccagagagcatccaggcactgaactgctcagagcttgagatgaaatgacatacaagcttcagggtaaaactgtctactagcaagattacctccctcaattctaccattgcagatttcttctgaccccaaatgcaaccttacagagaatgctgaatgaggaaggccaattccttacaatgatggcagaacccccaagcgaatgccctattgaggagaaggacatcactgtatttggaattctgcctgctagtgatagctcacacatcacatcccagaatcccactcccaatgcattatttcctgaggcaagaacttaaggtcctcacctaattcctccatcacaaccattaactcttattggacaagctcctcctgtgagtggggcctgtactcacttcctcttagatcataattccatcttcaagagactgatttccagaatagtaatctttttccagcgttctctcttctccaatgccctggttgttatttttcccacctctcctaatattgatcttcttgtcttttggttagaactgcaacttcggagttgagttcatttcctattgctgctcaattcagtagcaacatagctggcttgttcccagacccaggaagtataagtcattgacagtttcctgagtggctctgccaatccataccacccttggtactgtgaaaaggcttcttggcagccaggtggcattgaggatggtattcagggcgctttccttctgtcatatagttgtgggatctctaccaagtgtgaaggtgaatgaggtaagggagatcagaaccatgcttcctggtttttcatacatccaaggaagaagtcctggtgtgggttgtttgacaccttctttccactttcaccttttattttttattccttcctttctacccccaaccagtcgagcaaatgagcaattttgtgtttctaatacagggtctggaagtagtgctttctaatcctcatttcctgtaggatgttcctgcactataacaagattatgttttcttccttctgcagcagctttctgcttcttgggtactactagctattgttcaattcaggtgaggcctgtgatgacatatatgtggcatgtgctctgcgctccctgcaagctgagcagatacaaccaatgcatcactgtatactcttgctgagaatgtggatgcagcctcacagatctttgcaacactccaaccagccaggaccagttgatcagaactgatcttattggtctgataaccaatcttatttgtgaactgattcatatctgtctttccactcttggttctcttgccgtagaacaaaaacagtttaggaagcataattacgaacatttaggaaccaatatgtataagtaattcggagactccaattcacctgcccctcccccatcccaggttgtggaggctcgaggaagctgacttcttaggctaaaggacaaaaaaatctctttacctccttggccattttcatgttctctgccaattactataggcagtcttcattttgcagaggtgaggtaagacttcatcttattcttcatgtaatcccaccttctaacaaaaaaataaataaatatttaaattccaaggagaagtgttctttgtgtatttctagcagaaaacagatgcttaagcctaagaaggaagatccgtccatgacaaaggaaagtggaaaactgaaccagttatctgaatacttcatgccaggacagttgctattagcaactgttttgcaccttcagggctttaaaatgggctctgcagacagcatttgcatgtgcaagactcagtagccaagcctccactgccaattgttgaaggcagtttcagatcgccaccttttgaggtacatttctttaagcacaagagaagtagaaatggcctttgccttgtctccagtggtttgtccctctggtgcctcagcagataccagagcttattcttatgaccatttggaagtagtcctcaaagtaaagatcaagaaaaaattggattctttttccattttctcataatagtagcctagtcaacacaagactcccataaaatatgactcactattgggagccatactattttataagcttacttcctgctgacaaaactagctttcctcaaggaaatataaaggaggggaaagtcacatagtgttaggaaaacattcctgtgttttgaatacgatgaatccataggatagagaaaaatctgcttgttctattctgagagttctctgagatatcccttcactctgcttggcatttggccattgatattcaacaggtcactgaccaagcttttctaaatttttcagagagagttacttaccaataaggtctgttcttaaacctacctagttgattttcatatctttccataaagtgtcatgattctatcatagaccctgacttaacattgtaaggactatgagtcctccattttttaattaatttttttttagcaaattaggacttcggcaggttttcctctcctaaactcattctttcctccacaggattgctttgtccatctcctgctttcatttcaagtgcataaacaaaacctcaaagggcctgggaaggtgaggcaggccagagtctgtgttctgtgttgagtgtcaagctatttgttaagaaggtctgcaacaggcctttggtgtgggctctgccagagactgttctgaacactttgcttgagatccgtgccctgtaaaatggatatgatgttttactgatgtctgtaatacatttgtaaacttccaataaaatttgaataaaagaaatgttgccattc

SEQ ID NO: 1143 - DNA, 3609 bp, Homo sapiens
tatatttttaagttatcatcttagtttgagtttggcatatgagggaattgtgacccatctagttgtgagattgctattcatttggtcagactctagtctcatctcaccactgctggtgatcttttcatgtcttggataatatgatttctttgacacatataaaataataagcaaccttttgccttggccagttcagactgtcatgaaggggtatagtcagctgtttctgcataatggaaatgtccatagcattgcccttattattgtacttggtatcaggtcacctgccttctcttatttacttttatattatgctcatctcagttttgtgtgatgcagtttgtgcacaggaagctcatccttttccaattcgctgtgtgtttacttctttagttttcaaccaaagttttgtaatttgtgttggttttgtcagttttaaagaaataaaccatattcaacttaaagtcgaatttgttattaattttttatatcctttattctttaggcagatgatgttgagggcaaaattagacaaatcattccacctggattttgcacaaacacgaatgatttcctttctttactggaaaaggaagttgatttcaagccattcggaaccttacttcatacctactcagttctcagtccaacaggaggagaaaactttacctttcagatatataaggctgacatgacatgtagaggctttcgagaatatcatgaaaggcttcagacctttttgatgtggtttattgaaactgctagctttattgacgtggatgatgaaagatggcactactttctagtgtaagtacagttctaaagcaacagtagaccttattacctccacaaagccagcattttaattgtggcagcccaattattgggacagtataatgatatttttcccaggaaagaaaaactattgtttatgaggcttgagttttccttcattatgctttgggagaccttgagaatagagctgaattaaatgctgttgtccgttagggccctgaatgtaggcttaaacagtaaaatgagctttgcctgtgttttcttttacttgccacctattcatctttataataggcaagtgcactgaagtgatgtaaagaggtctgatttatccaagttgctgcacaccaattaagtgaattgtacattcagaacatagcaggtgtacccattgggccctcacagagtagcttgctgacactgaaaattcagtcagagaatggaaaagaaaatggacactgcatgggggcgcgactgtaattgacctgcttggctttctgttttatctgcagatttgagaagtataataaggatggagctacgctctttgcgaccgtaggctacatgacagtctataattactatgtgtacccagacaaaacccggccacgtgtaaggtaattggcagtataacacgtgccttgtcttttatttcagaagaaggaactgctgaagtttccaatacttgttataatagtgttgatttgtttaaaaaaaaaatcactattattcatgggctatgtactgatttatttcattgttccctttgaaacagtgtagaagattaaactaattttgagtatcttgataatttttgggtatctcaaaggtggattgaaaaaaagatcacacaaactttaaagtgtttgtaatactatagtgatctgcaggttttaaactggtcatgttatgatattttaattttaaaataatttctttactgtagtcagatgctgattttgactccatttcaaggtcaaggccatggtgctcaacttcttgaaacagttcatagatactacactgaatttcctacagttcttgatattacagcggaagatccatccaaaagctatgtgaaattacgagactttgtgcttgtgaagctttgtcaagatttgccctgtttttcccgggaaaaattaatgcaaggattcaatgaagatatggcgatagaggcacaacagaagttcaaaataaataagcaacacgctagaagggtttatgaaattcttcgactactggtaactgacatgagtgatgccgaacaatacagaagctacagactggatattaaaagaagactaattagcccatataaggtaggactttcaagaatcttaaacactgtattcttttcactgtttaaaacagaagaaaagctaccaaatatcagtatatgagagagtccaagtcattttgtaaaattaacttttacaaaagtagaaatattcttccagtaatttataaaaattctcactcatggccgggcgtggtggcccacacctgtaatcccagcactcagggaggccaaggcgggtggatcacctcaggtcagaagttcaagaccagcctggccaacgtggtgaaaccctgtctctactaaaaatacaaacattagctaggcttggtggtgggcgcctgtaatacagtgacttgggaggctgaagcaggagaatcgcttgaatccaggaggtggaggttgctgtgagccaagattgcaccattgcactccagcctgggtgacaagagcaaaactccatctgaaaagaaaagaaaagaaaagaaaaaaaacccgggtgcagtggctcacgcctgtaatcccagcactgtgggaggccgaggtaggtggatcacttgaggtcaggagttcaagaccaccctggccaacatggcgaaaccccatctctactaaaaatacaaaaattagctgggcatgataacacgtgcctgtaatcccagctgtttgagaggctgaggcacgagaatcacttgaacccaagaggtggaggttgcagtgagctgagattgtgccactgcacttcagcctgggtgacagaatgaaattgtgtctcagaacaaacaaacaaacttatcccaaggatagtctaccatggttagcttttctttcatttgtatgcatctttaaaaaatctgaatgcctagtctcttccctaacaaattatgttgtttttcccaagtttcttgtcttctcagttgttatatatatatattctcttttttctctcttcccagataaaagcaaagttatacatatatattctctttgcttttgctttcttcttcctaaaaatagcctttattgctatttattaatataatctttgtactttaccatagccgaaaccatgttagtactattatatttttaaacattcttcttgcccttttttcccacttcgtcgtcatcttccatattttccctcctagatcaaattggccttatcatttggacattgtcaggatggatattgtttatgccaccttatgtgaatgaaaatttgctatctaggcaaggcgtggtggctcatgcctgtaatcccagcactttgggaggccgaggtgggcaggtcaccagagctcaggagttcaagaccagcctggccaacatggcaaaacctcgcctctactaaaaatacaaaaattagttgggtgtggtggtgggtacctgtaatcccagctacttgggaggctgaggcaagggcatcacttgaactcgggaggcagaggttgcagtgagctgagatcataccactgcaatccaggctgggcaatggagcaagactccatctc

SEQ ID NO: 1144 - DNA, 3917 bp, Homo sapiens
atttaagcagcctccttgactgtaggtccgctgactggcttcctccttgagagcacactcacagtgccggaccgcaggcacctcgccgatgttcctgtccacttgctttttgtattgctccttctccagtgagcttggaagcctcatgcgggcaaggccttgtctgtctggttctctgttgtgtcctcggagcctgccacagtggcggcgcttggtggctttgacaggggactggattgggtggaaggggcgagattagacctggatacagtgacgtccttgtcagccatgccgagtgcagagcgcctactgtattgtaggcatttgaaatgaaacggagaatgtttcccaggccgtgcctagcaaggatgcctggcagtcgtggttcgggaagcacaccagatggaaaccgaaagtgctgccgttttgagcacctactcattgcacaccctgggtccaggggctcaagggttcttgttgatgcacgagataagcttggcattccttggcagtattctgaaaatgagaagcatgggatgttcctgatggccttcgagaacaaggcggggctgcctgtggagccggccaccttccagctgtacgtcccggccctgagcgcactctggagggattctggcatcagggaggctttcagccggagaagcgagtttcagctgggggagtcggtgaagtacttcctggacaacttggaccggatcggccagctgaattactttcctagtaagcaagatatcctgctggctaggaaagccaccaagggaattgtggagcatgacttcgttattaagaagatcccctttaagatggtggatgtgggcggccagcggtcccagcgccagaagtggttccagtgcttcgacgggatcacgtccatcctgttcatggtctcctccagcgagtacgaccaggtcctcatggaggacaggcgcaccaaccggctggtggagtccatgaacatcttcgagaccatcgtcaacaacaagctcttcttcaacgtctccatcattctcttcctcaacaagatggacctcctggtggagaaggtgaagaccgtgagcatcaagaagcacttcccggacttcaggggcgacccgcacaggctggaggacgtccagcgctacctggtccagtgcttcgacaggaagagacggaaccgcagcaagccactcttccaccacttcaccaccgccatcgacaccgagaacgtccgcttcgtgttccatgctgtgaaagacaccatcctgcaggagaacctgaaggacatcatgctgcagtgagcgaggaagccccggggtttgtcgtcgttgagcagcccccacggctgtcggtcagactcttgggtgtgtgttgtctgtgtggtccttgagtgggtttctcggatccgtgccctggaatacctggctcaggaatgctgtcagaccagccagccagcgagctctaggcaaaaggacatggaaactgtcacgttagctactgaatcctgggggcgagtgaaactactgaaaatccgagtgatgatgttgtgaatacggaacacctaatcacacagcttgctttgcttttacagaaacgttcctctttttctgacgcagtttaattgaggaccgtgttgtgtgtctatgtgtgtacacacgctctgtcttaatgacagaaacacaaaaaccagctggccttgcagacggcttttctaactcacaagtcttccctgagacagactaacctgaaagctttgcctaacagtagcttgtagagatccagtgcacgccgatgctgctaaactcagtgcctgagcccggccctgcagccccagccgcagtgtctgaaggccacctcccaaagggagcacgttgccttttcaaactcccgtgccgatttcctaagagcccctagtccaagcctctcagatgaagctgaggagccgtgcctaggatcccttcccagctctgaggacgggctgcagagctctgcaggtgtggattcaccttacgcccctacagcaggctcagcccttcccaccctgccccatgcccagcagcacaacacggagtgagacaggatgcccacggtgactgccgctccgtccgtgcacacacagcggtgctcttctccccttagccacccactgcccaacccaacggcaaagacacagaaaccaggtccccttgcagacggctctcccatcttcctgcaagtcatctgctcacacacagttggcagcacatagcgtttccttctttcagaaacattcctcttctggggcttcagaaagctggcaaggccactagcagagcttttgttaatgccccagctgcttggcgagctaacagctgacctttcgggaagcccacagacgctggaggaatcttgagtttctccaaactgccgctccaccagtgcctttggacagccgtgcctgttcgccgctctccctaagtctgattctcatcgaggcccctcgcttctatgactgtgcttgcagaagagtaaacactctcggatgccgctgtcctgggggagcccgcgggagcctgtgaatgttgatacgagctggccagtcctgggcccagctcacttgtccagctacctgccaggtggctttcactgtgtttaaaatacattgcattccaagctggtcccctctgtgtatcactctactgagaaatcctgcctagtgtgttttgggatgtgtcctagcatttacaagaaaatgaaaagcgtcctcttaattggcacccgaatgttgctgtggctcagtcacatatcccagggccctcgtcccgaggccgtgctgccccgagccccgagcccctctgcagctcacccttggcttgttttccgcaaacccggtaaacgcaagcccttggggcagatgcagaagcagaagagggaggggaaacctgcctctgggtcaccctgttagcacagcgttctcatcgggagacagcatggaactctctctcgcagtgctcgaggctgtgtgtcagtgtttgctgggcttgtggctccttttttggctggataaagaagtcgctgtttttgtactgcttctgtggctcttcacagacctcacggatgtgaccggagatgagtgccgatgaccacgttttaaaggagaaagagagctcctggtggggccctcggggtggtctcaggtcccatttgcagtctgcaacagtgacgcgcagcccggtccggagcgtggtgagctttgtttgccttctgggtcagctttcgctgtgtctcctgtgtgtgttagaatccagagcccagaggaagtgcaagcgggtcctccgccaacggggagagcctcttcgcggcgctgttggcgacagcagcgctgtgattcgcgtagcaggggagttgtttgaaacaccttcctgagtagtccggccttgtcaatgagtgcttgttttcctttaaacagtctgacatatttactcgtcactttcaaaccagaagcatgagaggaaggagatattgtggggtccgtttaactcgatagaaagcgcagggggatggcccccggcgcgggctcttgacccgctcagcgctgaccccaccgccctggccgaggcacttggccttgctgagctggacttcctcctcctcctcctcatgaccggggtgaattagaacgtttttaaagacacccccttccaaattctgtaacacattgtaattggagaagaaggaaactctgcaaggctaaactgtcattcacaacttggctacacatagactctagtcagttttgtctccagaaccttaggcttttgtattttttaattttaatttcactgttaatccttattgtcttttttattaagatgttggaaaagcaggaggtagttgtgcctcaattattgcaaaaatgtaacaataaagttcctcaaaat

SEQ ID NO: 1145 - DNA, 3538 bp, Homo sapiens
aaaacaagtgattacaaagcaccaaatagcttctctacacggaggactcaaacacttgggacgttagtgatgcagccaatgggcagctgcctgccactgttactcgcctcccccgtggtcgcacaggggagaattattatggcccagctcaggtctgagtcataagcattttttgtttttttgagacagagtcttgctctgtcatgcaggctggagtgcagtggcgcagtctcagctcactgcagcctcaacctcctgagctcaagcattccccacaccttagctgggaccacaggtgcgcaccactgtgctgggctaatttttatatttttgtagagacagcgttttgccatgttgcccaggctggtctcgaactactgagctcaagcagtctgccctctttagcctcccaaagtgctgggattacaggcgtgagccaccgtgtccggccagcatcttgttggctgagttcttcagatggtttgtatgagattcggttcctggggcttcgtgtgagggaagtggcctctgtgtgaagtctccattcctgcttccctctgggagactgcccttggccgaatcacacactcactcgggcacccatcacggcagttctgctcctccattagctgttttcttaggttcccagcaaagaccctgttggttacctgagatgctcccagtccacctgaggagacgtttacctggacacaatcccatagggtgcagacacagtaccatgggaactccagcaaagaagagttgccccctgttatgtttcagtcctgacttaggaatttcatgaggggtctcagttgtcagttcagaagatgagaaaggaggaccaggagagccagatagcgcccacgaactcttccctccctcgagactgcgccagtcagaggtcaaaggtacacgcaggccacgtctcagaagatgaaatcatggacggaagccacacgaggtccccaccaagctttcacctggcatccagcccttccatacctccgtgcagtgagggcatctccagcgctgatggaggctggccagctgtgtacctggatttgttgggttccgagattagctgtgcatggttgttacattttgtcagtatcttaggaaaggacgctgaagtatgttagcatgggaaggaaggacagcgctcagtggctctttggttataaattcagaggctcagcctcagaactggaggcttccaccagggaggacacgcaggagtcctccgagcctcacagctggccctgtgcgtggcactcacagaggctggggaaagactgggccttgcctgaagcaaggttatcacagttccgtccctgtgactgtgggagttaacggttgagaaggactggccatggagtcccggctacttgggagactgaggtgggaggactgcttgagcccagaagttcaaggccagcctgggcaacatagacagtgaaaaaaaaaaacaaaaaaaccaaacaaaaaacaaatagaaaagggagtgaggccatccttggtagatggagttcctgagatgtaaattggagagtggagtccctggatgccactgttcaggtttctgggaagccggtcagcagccctcactggtcccgggctggatgctgtgccccggccgcttggttgggcagggctggcgtcccctagaaccttctgagggaggggagcctgcaggacggggtgggtggaaacagagacttcagctccacaagccctgcctgtgcccactcctggctgcacagctacctgtggagctgcccgtgtgggctgtgattccttggagggcttgagaggggctgttgtcagcggaggtcccaggctgggtctccttccacactgggctgggaaggaggctgtgtggctgagtcgagatggagggttttatatctagagagaacacgtgctgaatatccacacagatactgagattgccgatggaacttgcaccttttgtaaggtcagtgatcacagtcctggccatctcttttctctaaaagatagttttcagaaaatggcaagtattaaagcaagtgtcttctctatgttttctaagataagtattgtagaagattttctctatttgtataatgtcttcagcctcacctcactgacactccttggtttcaagcactgttactaacacccagaggtgacagcctacagcaaaggaggagatctgagactttaaaaagtcagtagtgttcaggattgacactctggggccatttgaatgggaggaaacaaccccaacacagcagtggcttctgagagtgctccctggcacctgcccctgtcccacagccaccgtgacggtgccaggccctctgcacaggtgggctcactgcagctgagggcttgtgcccgtcatccaggggcgtttgtgtagccttagcctctctgtgtcaactaatcatgtttgtattttctccccctcacctcaggtttccttaggaaataaagaaagaagcaaaggtgtattctacaaagcacttcagagttgcccttgggcaaaggtaagtgttaaaggccatggtgtcttcagcttcccgaaaacttcccgccaggtctccgtccagctagtgtcttcccggcctgccccgcggcaccggggatgctcggctcatggacgccataccctgtcccaaggtacatccagagccttttcctggtgaaactgtcccctgtggagtcagagcctggccctacctggggctggtgcttcatggaagtgttgccgtgggtagctggtttcccagcatttggtcagagtccagcccagatgctgaaagagttgggatcatgtcccagcctggctgtgagagcccaggtcaggtgacactcagaagtgaaactgagggcgacggccagcaattcctggaccccttttaaaagagaaggcctcgcttggcgtttgctcacttttgcgagttcagtgtccttcctgaacatgcccagtgctgcccgagttaagaaagtctcagccaaggggagcaggggccgtggagggcgacaggagggcagggtcaccaggaacctggcccttgcttcctgagctcctccaggctgacaggaagtggcggctgagtggggcggccttcctgcctgccccctaggtgttgtacctggacgccgtggagtatttccccgatgagatgcaggagatcctggacctgatgactgagaaggagctccgggtgcgcctgccgctggaggagctggagctgctgctggaggattagagagcagtgggaaaacgggctgtgcctgcgaggccaagttgcccaccctgcggagctaggaggcgcgagcagagaacgtgtgtgttaggagaactcggcttttgaaatgttctttctcgatagtaataatgtgggctgccagcctctcacatcttgcacactttttgggtgtgtaaatgacacaaaagttatttacatattatatatgtgaatatgtgtatatatgtacatagccagagagtcatgccacgtggtcattaaaccgatgatgattgagg

SEQ ID NO: 1146 - DNA, 3718 bp, Homo sapiens
cgattgctcatcgctgggcctggaagatcacacagagggtttggcttggagtgactcctccaagcagggtctgcaccgccctgtgggctcaaggagggagaggagctgtggagaaatgctttgatgtctcttgcagatgaaacagtggagggggagtgggcaagactgggccaccatgggccacttgtctctgaggtgtgcaaagaggtgccagagggccacttggcagcggggctggttgggggccctgcatggagtcccctgtgtctgttgtctcacgagtcggtgtccaccagagaccctgcatgatccgcagcagtcctggcccgttagacctttctgtgtaaaagaaatgttctattgtgttctgtccaagacagttaccactggccgcatgtggcccccaaggcttgggatgtggctcttgccactgaggcctggatgtgggcgtttcatcgcatttgaatgagtctgaacctgtctttgaagagcctagggccagtgtgtgccacattcaactgtgcagggcagtgtccgctcatggttgggttcagaggatctgactgcgggtgccacacatgtgctagctcacgcgagtctcacgacagccttgctccacggaagaggaagtggagcctcgggaagggtgacagcagtggggtctttagctggagtggcccaagcccattgcggatggagggatggatttggccatttgtcaaacagctaccgagcacccactgtacatgtggctttgtgctgggacattgaggagggcaggagaaggaaggcagacaaacacccgggccgggctccagcaagccctgggttccgggctatgtcaggtgctcagggctgaacctggcatgtcttgcagcctctggctcccaatctgagaagggtggaccctgggctcccatgcgatgcagcggtagggggggtgccctttgccagcaggtgggagccgtctgtctgcagagctcagtccctgtagaggtggtggagctgcctgtgggaggccagggaggcgaggaaggaagccaagcccacagccctgggaaagcccaaggagtcggttggagattattttgggcatctctaccaccaaattgccggcttcctctgctagtctttcccctggagaaccgttttgagcagaagcaaaatcacagggcaaggagaagcttagaggagcacattaactctctgtggacccaggaacagcctgcgggcacctgcgtcctgctcctgtgggcctgactgctgcaaagcccctggcggggtggagggagctgagcgtcaccggggtggccctcagggcacctctgttctagtggatgacaggatggtggggaagctggtgcgtatgtggtgtagagacgttcgtattctagttccagaacccctccctcttccccagcccccttttttcttcctcccccaagtccttcccagagcccccctttctgtttccttcctggacaggcactcactgttgtaccgatgaggttgtaacagaaacactgggaagcctcacagcagccggagggggcaccacaaggagccttcctgtttccaccattagccaagcaaatgaagcagaatactgaactgcctgagtgccactgtcatggaaaacacgcccaggaaaatcccctctgcacacccagcaggggtttgccttggggggtccaggaccccatatatctctcttcctttctgttgtcctgctccgtattttaggaacttcccacagtggccccatagtatgtttactcacagtcacgttaggaaccatggcgctgtgctgtgtacatacctcaggtgccgtttggcttagatatcgttgtaggcactgcagagggaactctaattaaagatagagatgtccaagcatggctgtcgtgcagaggggactaagggtgctgtgtgtggtcagcgttcccaggcagtggtaggaagcctgggggcctgacactgactgagcccccccactgctcccccaggaggcctggaggctgacgaggcactgccctcagggctgccgcccaccttcatccgcttcagccaccactcctacgcccagatggtgcgtgtgctgaggcggacggcctcccgctgtgcccacgtggccaggacctacagcatcgggcgcagcttcgacggcagggagctgctggtcatcgagttctccagccgccccggccagcacgagctgatggagcccgaggtgaagctcatcggcaacattcatggcaacgaggtggcgggccgggagatgctcatctacctagcccagtacctgtgctctgagtacctgcttggtaacccccgcatccagcgcctgctcaacaccacccgcatccacctgctgccctccatgaaccctgacggctatgaggtggcagctgccgagggtgccggctacaacgggtggacgagcgggaggcagaacgcgcagaacctggatctgaaccgaaatttcccggacctgacgtccgagtactaccggctggcggagacccgcggcgcacgcagcgaccacatccccatcccccagcactactggtggggtaaggtggccccggagacaaaggcaatcatgaagtggatgcagaccataccctttgtgctctcagccagccttcatgggggcgacctggtggtgtcctaccccttcgacttctccaagcacccccaggaggagaagatgttttctcccacgcccgacgagaagagggagccccctcctcagcacagacctgtcctgcttggtggggccctgatgagctcatgcagggtgagcccttcgcctgcctgacccaccaggagcctctgcccaagatgttcaagctgctgtccagagcctacgctgatgtccaccccatgatgatggacaggtcggagaataggtgtggaggcaatttcctgaagagggggagcatcatcaacggggcagactggtacagcttcacgggaggcatgtccgacttcaactacctgcacaccaactgctttgagatcacggtagagctgggctgtgtgaagttcccccccgaggaggccctgtacacactctggcagcacaacaaggagtcactcctgaatttcgtggagacggtgcaccggggcatcaaaggtgtggtgacagataaattcggcaagccagtcaaaaacgcccggatctcagtcaaaggcattcgccacgacatcaccacagccccagatggtgactactggagactgctgcccccaggtatccacattgtcattgcccaagcccctggctacgccaaagtcatcaagaaagtcatcatccccgcccggatgaagagggctggccgtgtggacttcattctgcaacctctggggatgggacccaagaactttattcatgggctgcggaggactgggccccacgacccgctgggaggtgccagctctttgggggaggccacggagcccgacccgctccgggcgcgcaggcagccctcggccgacgggagtaagccctggtggtggtcctacttcacatcgctgagcacccacaggccacgctggctgctcaagtactagccccggccccagcacccgccaggatgtggagaccgaggcccatctccgcatcccgggctcctggctcttgattttgtctgccacagacatcccacaaagccgctgccattttattaaagtgttttgatccactttccactgg

SEQ ID NO: 1147 - DNA, 4062 bp, Homo sapiens
actagtagggacaggctcattcttttgaggagcccaccctgctccactgttcagggtatctcttctttccgagctcctacgcctttagataaagggcacttacctgcttaactctttctgcgtgtctcttgactgaattcaaggagaccaagaaccagaggacttccacgcccctcctggtaacatctggtgttttcccctggtggcctgtgaactgttcttctggatgggtaaccagagctccgtaccccaggattcccctctcggatgcatccttagaaactgggataagtttgatccccaggcattgaaacgaaaaagattggtttttctttgcaatacagtttggccaaaatatgaactagaagggcaggaagcctggccagtggggggaagcttaaatgttaataccatactccagcttgacgtctactgccgacagcagcgcaaatggtcagaggtcccttatgtgcaaaccttcatgatcttgagggaaaaccccgatttttgtaaaggctgcaagatagatcctgcccttttagctatcctcagtcgtccactccagagacctcaaccaggaggcttcaatgatttcctggtcaacccacctcaacctcctcttcctgagaccaaagagaaagagcaagcacccccagctccttcctccttgtatcgcactcttagccttcatgggtcagcctcaacctacactaggccctcaggcccccgctctggaatctgcctgctaccagtggtgagccgaccagtaggaccagtccaagtccaggtccccttttccatgcaggacttgtcccaagttaaggaaggcctgggaaaattctcagagaatccgggaaaattcctggagggcttccgtaaattaaccctcacttttgaactaacctggaaggatgtcgccatcctcctaggacaaaccctgtctctggaagaaagacagaccatctgggaggcagcacgtcaatgcggggatgagctacacttggcagatgccaactaccccgtgggagctacagctgtccccctgcaggaccccaactgggactacgataccccggcaggaatctgcgccagaaatcatatgctcctatgcctgatagagggaatgaaaaggagtcaagtcaagcctgtcaattataataagttagcaaccatcgaccaagggccacatgagaatcccacggcctttctcgaaaggctccaggaaactcttatcaaacataccaacctagacccgggatccccagaaggacaactagtcctaaaggatcacttcctcacacaagctgccccagacattaggagaaaactgcgaatgctggctttgggaactagagcccccatgtcagaaatcctcaaattcgcttcctcagtgttttataaccgagaccaggatgagagggacagggccgagaggaaggaaaaacagaaagaagagaggcaggctcaattactagctgctttgcaagttcaccagccccctccaggttgccctaaggataccttcccagggaactgctatcagtgcgggaagccgggccattggaaggcaaactgcccctacgggccaaggggggaaaagccctgcacggcctgtcccctctgccgtaagctcaggtactggaaagagaactgtcccgagagccaaaagggcccctgagccaatgatggctttgagctgagggtgccctctgccttggccagctcccagatgtgacatcatcatcaaagggatggagcccagggcaactctggatgtagcaggtaggacaatacattttctatttgatttgagagcagcctgctcggtgctgacccccttctctaggcaactttcctctgtcaggtaatcagggtaaatggcatctcttcctaagatttacaccttctttattgttaaaagaccaattaatcttttcccatgagttcctgatactgtctgaatgtcccatacgtctttagggcagggatatactctccaaactaggggcacgcttcacatttacctgaacttccctgaaaggctttcttttttttttggaagactcacccatgacattgctgaattatcttgatctggaatcacaaataaccctgagatatgggctttgatacactaggaagggcaataactgcagtcccagtcaaaatccagctaagaaaaccttccacttctttcataagaaacaatactcgctatggccagaggcaacagaaggacttgagcctatcattaacccattccttagacatggcctgttaaagtctgtaactctccctgcaacacaggaaatctattctgctggtagaaaacatttaaagggttctccactactgaaccctgattaagtctggttttctgatggcggcagtttcatccaacatggagtgacacatgcagttatgcaatagtgtctctatttgacattatagaagccaaatcccttcctccaagaacattggcacagctagcagagctcatttccttaactagagccatagaaatagggaaaaacccaaaagctacaatttatacagattcaaaatatgccctctcaggactccatgctcatgtggccatctggaaggaacagggatttttaccagcaaaagatacccctaaggaatgtggaccacagatcctggccctgctctaagctgtacacctatcacaggaaatagctgtagtccatggccagggacaccaaaggaccagggagaaaatgcccagcaaaacaggagggtggatcaaacagccaggaccactaccctgtagggaactcctcatggcccttaacccatctttacccaacaccttacccacccacaaaaacccaagaggaaaaggaatgggctatcaaatatgaatctacccgagaacctgaggtgtggtatacagtgggaggaattctccactttcctaggccctccagtaaaaacttgtgagagcactccatgagtcatgtcactttgggagacatcatctccagcacatgtgcaaaaacctcttttccaggaaagggctctactagactatttgtcaggtctttaacacctgtgcatcctgtgcctgtaatagcccccagggccctacgctgccctgcttttttttttttttttttttttttttgagtcaaagtttcactcttagtacccaggctggagtgcaacggcgtgatctcagctcatcgcaatctctccctcccaagttcaagcgattctcctgcctcagcctcctgagtagctgggattacaggcaggtgccaccaaaaaaagaccaaaaaaaatttttttttttttttggtatttttagtagagatggggtttctccatgctggtcagactggtcttgaactcccaacctcaggtgatccgcctgcctcggcctcccaaagtgctgggattacaggcatgagccaccgtgcccagccaaatttttttttttgttcaatgttgcccaggttggcctcaaacgcgtagccttgcctccttgtgacccaggacaaccggccagagccaatgcagctccctgtcctgcttagttgagccagttcagcattgggaagcttacccagggaaagactgatggatgtatttcactcaattgccagcctgtagaggctataaatgccttctggtgtttgtggacacctttattgggtgggttaaagcctttcctacaagaacagaaaaggcccaggaagtagccaaggtacttcttaaaaaaaaaaaaaaaatcatcccggccgggcgtggtggctcacttctgtaatctcagcactttgggaggccgaggcaggcggatcacgaggtcagagaattgagaccatcctggctagcacagtgaaatcctgtctctactaaaaaagagaaaaaattaggtgggtgtggtagcgggcgcctgtggtcccagctactcaggaggctgaggcagaagaatggtgtgaacccgggaggtggagcttgtggtgagctgagattgtgccactgcactccagcctggacaacagagcgagactccgtctcaaaaacaaaaaaaaaaag

SEQ ID NO: 1148 - DNA, 3616 bp, Homo sapiens
agaccgtggaggggaaaaagtggaagcagggtgatggttcgtctgtcccagtcacccaggagaaagatcacggggagggcagacatgggtgttcgtggttaagagagaaggatgcgattggcttccgtaccatttgaaggcaaaatgaaaataagaaaatattaagaacaaaaaaagaagactacagaccagtacccccgatgaacattgatgccaaaatcctcaacaaaatactagtgaactgagtccaacagcatatcaaaaagataatctaccatgatcaagtgggtttcataccagggaatgcagggatggtttaacatacttaagccaataattgtggtacaccacataagcagaatgaaaaatggaaatcacatgatcatctcaatagatgcaagaaaaggatttgacaaaatccagcatccctttatgatgaaaaccctcagcaaaattggcatagaagggacataccttaaggtaataaaagctatctaccacaaatccacagccaacattatactgaatggggaaatgttgaaagcattccctctgagaactggaacaagacagggatgcctactttcaccacttctattcagtatagtactggaagtcctagccagagcaatcagagaaagaaagaaagcgcatccaaatcggtaaagaggaagtcaaactgtccctgttagctgatgatatgtgattgtatacctagaaaaccctaaagacgtatccaaaaagctcttaaaattggtaaatgaattcagcagagtttcaggatgcaaagacatcatgactgagaacccaaaagtgaatgcaacaaaaaaggttttgcacagcaaaagaaataatcagcaaacagacaacctacagaatgggagactgtcttcacaatctgtacatcagacaaaggactaatattcagaatctacaaagaagccaaacaaatcagcaagaacaaaccaaacaatcccacaaaaaagtgggctaaggacatggatagacagttctcaaaagaaggtatacaaatgtctaacaagcctatggaaaaatgctcaacatcactgattatcagagaaatgcaaatcaaaaccactgtgcaatactacctcactcctgcaagaatggccataatcaaaaataaaaaaataatagatgttgacgtggatgcagtgaaaagggaacagttttacactgttattgggaatggaaactagcgcaaccactatggaaaacagtgtggagattccttaaagaactcaaagtagatctactgtttgatccagcaatcccactactaggtatctacccggaggaaaagaagtcattattcgaaaaagatacttgcacatgcatgtttatagcagcacaattcgcattgcaaaaatatggaactggcccaaatgcccatcagccaatgagtggataaagaaaatgtgtgtgagtgtgtgtgtgtgtgtgtgtgtgtgtgtgtgtgtgtgtgtgtgtgtttatgaatgacataatggcatttgcagcaacctggatggaattggagactattattctctgtggagtaactcaggaatggaaaactaaatagcctatattctcacttatgagtgggaactaagctatgaggatgtaaaggcataagaatgatataatggactttgagggactttcaggactcggggagtagtggggaagggggagagataaaagtctacacattgggtacagtgcacattgcttgggtggtgggtgtaccagagtctcagaaatcaccactgaagaatttattcatgtaaccaagcgccacctgttttctcttatatgaagaccaagctcagtaatgctgtgtttttatggacctataattgtgtccatgctgccctgtcattttaccagttcttgtatttgagcagataataccaaaaatggtgcaaacttacttttgctacagatgatgacaattttagactaggttacacatatttatacatatagtacctaagggtaggagctcaggcaagagtgtagggaggagcccagtaaatgtgagatgaaattctagagcaggtaaagtcaacgtggggtgaaattctagaccaggtagagctcgtggcaggtgctgtgttaggtagctagttgaattggtagggaaatgtttcagaaggtaagataacaggtgaccacaaacttggtagcttacagaagtttatttaagttccgaagggctaaagtccgaaatcaagatgtcagcagggccacactcccttcacgtggccttctcttttgtatttgtgcctcttctgtctcttataaggataattattgttggatttagagcccacctgaaatgcaagatgagttcatctcaagatccttaacttaaatttgtaaagttgttttctaaatagtgcagtctttacagggtccaggtattaggatgtggatatatattttttgggggccactggtcaaaaccagtgaagtcctacttaaaagcctggtaaactaagggaatggtgaaatagggattgaaatagaagaacaactacctgtgtttttttgtttgtttgttttttctgttgctaggtttttgttgctaaaaacctagttgtcctgacagagacgcccctttaaataaatagttcctgtgctgagtatccccaccctactctggaggggtggttttgtttctctaaaaattgccagattcattcaggtggcagattaaaaataagtaaatgattttctttttgagtaagtagtagggagatctttgggaaaaataacctagaaaacagtatatgtatttttgccattcttcttgcagatatatagattatattgatatattttaactttgtcagtgttttcaacatacacagaaaagtacaagataataggtcttagcactcatgtgctcgtcacctaaacttaataaaattttacatttttcatatttccttaggatatatattttaaggaaaaatatatagtagactattttacatatatatttttatagtttcaaaatatttggcacaatgcttagactacatttttgagagttagtcattttttatagtatatacattattggtgttgtcaggaggacttctttcagatcaatatttaactgtgggtattttgaaatgtaatagtttacagttctgaaatagcatgaagttcttaaaaggaaatcttatttaaaaactttaatgttagatagtttgtcagtaatctcttctttgaattattgcaatagcctttgtttttttgttttaaaaaaattttgagatatttaaaaacaaacaggaaagtacggcaaggaacatgaaccaacatacttgctccattaattccttttgctttaccatcttgcttcaggtttttttaaaatgaaatattatacaattgaacccctgatattattttcctttctttttacctagaagtaacagttatcctgaatttgttgagacctctattatgtctatccgtaaaaaatatatatcattatatgataaatattaaaactgtatattgcatagtattagactgtatattgtatattatcatgtaatattaaaactttagtatattaaaaccttatataaaaagt

SEQ ID NO: 1149 - DNA, 2974 bp, Homo sapiens
tttatatttggaaaaactgaaagactccgcaaaaaactattaaaactgatgaattcagtaaagttgcaggacacaaaatcaacatacaaaaacaagtagcatttctatacgtcaacggtaaaaagaaataaaaagtaacccatttacaatagctacaaataaaattaaatacataacaattaaccaaagaagtgaaatgtctctacaatgaaagccataaaacatttatgcaggaaattgaagaggacacaaaaaaatggaaatgtatttgatgctcatggattagaaggaaaaaatgcttaaactgtccatactacccaaagcaatccacagattcactgcaatctctatcaaaataccaatggcattcttcaccgaaatagaaaaaataactgaaaaatttacatggaaccacgaaagacccagaatagccaaacctatcctaagcaaagtgaacaaaactggagaaatcacattacctgacatgaaattatactacatagctatagtaaacaaaataccacgttactcatataaaaacagacacacagaccaatggaacagaataaagaaaccagaaacaaacccatacatctacagtgaactcattttcaacaaaggctaccaagatgccagcagcatacattggggaaaggacagtctcttcaataaatggtcctgggaaaactggatatccacatgcagaagaatgaaactagacccctatctcttgccatatacaaaattaaataaaaatggattaaagacttaaatttaagtctccagactatgaaacaactaaaagaaaacattgttgttttgccaggacgtaggacttggcaaagatttcttgagtaattctccacaagcacagacaactaaagtaaaaatggacaaatgtgaccacagaaagttaaaacacttctgcacagcaaaggaaagtccacaatgtgaagagacagcccacagaaacccacagaatgggaggaaaatatttgcaaactacacacctgacaagggattaataaccagaatatataaggagttgcaacaatcccatacgaaaacatctaataatctgattttaaagtggcaaagtatctgaatagatatttctcaaaagaggacatacaaaaggcaaacagatgtattgaaaggtgctcaacgttattgatcatcagggaaatgcaaatcaaaactacaattagatatcatctcatcccaggtaaaatggcttatatcgaaaacacaggcaataacaaatgctggcaatgatgtggagagaagggaaccctcatacactattggtggaatgtaatttagtacaaccactatggagaatagcttggaggttcttcaaaaaactaaaaatagaactaccataggatgtagcaatcccactgccaggtatatacccaaaagaaaggaaatcagtatatcaaagagatatctgcactttcatgcagcactgttcacaatatccaagatttgtaatcaacctaattatccatcaacagatgaatggataaaagatatgtggtacataaacacaatggagtactattcagccataaaaagaatgagatcctgtcatttgcaacaacatggatggcactggaggtcattatgacaaactttgcatgttcttattatttgtgggagctaaaaattaaaacaattgaactcatgcagatagagaatagaaagatggttaccagagtctaggaaagataggggtttggggggaagtagggatggttaattggcacaaaaataatagaaagaatgaaaaatatctagtatttgatagcacaacagggtgagtatagtcaataataatttaattgtacattgtaaaataactaaaggagtataattggattgttcgttaaaaggataaatgcttgaggtgatggatatcccatttaccttgatgtgcttattatgcattgtgtacctttatcaaaatatttcatgtacttcatgaatatatacccacaaaaattttttaaaaattatgcctaagacaaaagtcatatacttcaattgttaaagaaggggagaatatcaatttagaattttatatctggtgctcttctttttcttgtgatacgtatttccattgtttattatactccatttaccaggggatcagtgttaacttcaccagtgataagccatactgataccatgtagccttgaaataatgtgatgagaagggcatttcgcctctccagtcattctacccaaaactcataactctagtccaatcatggtaaaaacatcagacaaatcctaattgagggacagtataaaaaatatctgactagtactcctcaaaactgtaaggtaatttttaaaaagaggaaaatttgcagaaactgtcgcaaccaaaggaggatactacagagacgtgacaactaaatgtaatgtgatgtcctgtatgggatcttgaaacagaaaaaaaaaattaggtaaaaactaagataaaatcggtttgctatttgtgataaatgtatcatcacaatataaaatattaataataaggaaaacgtgtgaaatatataggaactctattgactctcttcacaacttttctgtaaatataaaaagctgacaaataaaacgtttattgaaaaaattaaatggaagcaggaagattgaggaagggaatcagaactcaaagtaagatcaatgtggccaggtgcggtggctcatgtctgtaatcctagcacttttgggaggtggaggtggtcagatcgctagagcccaggagtttgagaccagtctgggcaaagtggcaaaatctcatctcgattatgtatttatatatgcatgatggtgcctgactttagtcccagctattcgggaggctgaggtagtagaatcctttgagcccaggaagtctaggctgcagtgagctgtggtcatatcactgcactccagcctgggtaacaaagcaagactctgtctc

SEQ ID NO: 1150 - DNA, 3370 bp, Homo sapiens
atgggtcaggacctcttctgaaatgggagtttaagacctacaatcagacaagaggtgggtgctatgcaagtggagctggtgactgatggctgaccattgatacaggctaggaataccaatgagcaaggggactcagagtcagagacttggtccgagaggagcagacatcattggcagaggacggagctccaggctctgcaaggaatcaagggaagctccaggcgtgggggccggatgtgacctccattggcttccgcctctgggatctgagagaagcgaaagcgtctttctgaggggtgtcttgagagtggcagagggcagcgggtccaggctccatgaggaggcaagccttgggaatctgagggatggagactcagttccgcagagggggtctggggtgcagccctgccagcatcaagaggaagaagaagagggaggactcaggagactttggactccaggtcagtagggaccttggcccttggagttccaaggcacggtggccacatgtggtgcatcctcactctgcctttggggtgtcagcaaggagtgggttgtggtctgaggagtggagcctcaggtcaacccagggaggagtcccagagggaggactcaggcaaccaattatccctgaggtagaaaacctgcccctgccatcggtccttggaggccccaagcaggactctaggaaagagaggcagctccccacttcctagttggggttctctgggagatggtggtcgtggcctgcaaaactcatccacagttcagcaggagagacatggataggccttgtcaggagtaaatctgaatacctggaggaaacccagagagaggaggcacccctgaaatctgcttcatctgtcagcctttggcatcccatgaggggtgtccatgtagtgccccttcactttctgcctcccatatctcagagaggtggggcccttggtctgaggcaggtcctcaggtcagcagagggatacacacctggtcagcacagggtggagtccaggatctgccagtagtcaaggagaggaaaattgatgaagactgaaggtaagaatgtaccctcccacatgccaaagaaaaagggacctcaccaatccttgcttcctctgttttcatccctcggaggcccaagttggggaggcatgtgccatgctcacatttctgccacgaggttgggggtggcaccttgctcagggaggtgagcaccttgtttcaagggggtgatgacaggtcagcaggtggagccacacctgatcagcagagggaggagtcccaggatctttaggactcaaggtgtatgtgtccccttggtgaggactggagatacccacatcccataatgaagggatcccacagagtctctctgtcccctgtccttggctgtgtggggacctcatcacgggtggccccaagtggcaaggtcacttgtaccacaggcagaaagttgggaaaccttcagggagatgaggtcttggtgtaaagggatatgtctgctcatctcaggggttgggagtcaaggaaggacaggccctggcagaagtaaagatgaaaaacccacaggaggactttggaatccccagaaccgaagggtccagcctctgctgtcagccctggacaaccacatgatggggtgatgggacgtggggccccttacttctgttttggaatcttgggcaggtgagcactatgttctcagaggacgacttccagtcaacagaaagagccccatatggtccacaactacagtggtcccaggatctgccaagagtccaggtttttagagaacaggccaacctggaggacaggagtcccaggagaacccagaggatcactggaggagaacaagtgctgtggggccccatcacccagatatttcccacagttcggcctgctgacctaaccagagtcatcatgcctcttgagcaaagaagtcagcactgcaagcctgaggaaggccttcaggcccaagaagaagacctgggcctggtgggtgcacaggctctccaagctgaggagcaggaggctgccttcttctcctctactctgaatgtgggcactctagaggagttgcctgctgctgagtcaccaagtcctccccagagtcctcaggaagagtccttctctcccactgccatggatgccatctttgggagcctatctgatgagggctctggcagccaagaaaaggaggggccaagtacctcgcctgacctgatagaccctgagtccttttcccaagatatactacatgacaagataattgatttggttcatttattgctccgcaagtatcgagtcaaggggctgatcacaaaggcagaaatgctggggagtgtcatcaaaaattatgaggactactttcctgagatatttagggaagcctctgtatgcatgcaactgctctttggcattgatgtgaaggaagtggaccccactagccactcctatgtccttgtcacctccctcaacctctcttatgatggcatacagtgtaatgagcagagcatgcccaagtctggcctcctgataatagtcctgggtgtaatcttcatggaggggaactgcatccctgaagaggttatgtgggaagtcctgagcattatgggggtgtatgctggaagggagcacttcctctttggggagcccaagaggctccttacccaaaattgggtgcaggaaaagtacctggtgtaccggcaggtgcccggcactgatcctgcatgctatgagttcctgtggggtccaagggcccacgctgagaccagcaagatgaaagttcttgagtacatagccaatgccaatgggagggatcccacttcttacccatccctgtatgaagatgctttgagagaggagggagagggagtctgagcatgagatgcaaccagggccagcgggcagggaaatgggccaatgcatgcttcagggccacacccagcagtttccctgtcctgtgtgaaatcaggcccattcttccctctgtgtttgatgagagaagtcagtgttctcagtagtagaaggcacagtgaatggaagggaacacattgtatactgcctttaggtttctcttccatcgggtgacttggagatttctttttgtttccctttggtaattttcaaatattgttcctgtaataaaagttttagttagcttcaacatctaagtgtatggatgatactgaccacacatgttgttttgcttatccatttcaagtgcaagtgtttgccattttgtaaaacattttgggaaatcttccatcttgctgtgatttgcaataggtattttcttggagaatgtaagaacttaacaataaagctgaactggtgttgtgaaacagagaaataaaaggagaaggtcatt

SEQ ID NO: 1151 - DNA, 3794 bp, Homo sapiens
gactcagatctcacctcctaccactcccctaggagagctgggggccactgtttcctggattatcctaaaagcttctgaggccgtgaggacttggcagcatccctgctccctccttcacctccccctttggcactgcctgtcacctcctttataaagcctggctcttttatcaccgccacttggccctcactgccgccgccagctctgggctccatggactggtcccgtctgaggtgcccctgaccgtccctgccctcaccccaccccggatcccggcaatgctaaccgctgtctgcggctctctgggcagccagcacacggaagcgccgcacgcctccccgccgcgcctcgacctgcagcctctccaaacttaccagggccacacgagccctgaggccggggactacccctccccgctgcagcctggagagctgcagagcctcccgctgggcccggaggtggacttctcgcagggctatgagctgccaggggcctcctcgcgggtaacctgcgaggacctggaaagcgacagtcccttggccccgggccccttttccaagctcctgcagccggacatgtcacaccattatgaatcgtggttcaggccgactcacccaggcgcggaggatggctcgtggtgggaccttcatccgggcaccagctggatggacctcccccacactcagggcgcgctgacctcacctggccacccgggggcgcttcaggcgggcttggggggctacgtcggagaccaccagctttgtgccccgccaccccacccgcatgcgcaccacctccttccagctgccggagggcagcatctcctagggccgcccgacggggctaaggccttggaagtagccgccccggagtctcaagggctggattccagcctggacggggcggcgcgtcccaaaggctcccggcggtcggtgccccgcagctcaggccagaccgtctgtcgctgccccaactgtctggaggcggagcgactgggggctccatgtgggcccgatgggggcaagaagaagcatttgcacaactgccacatcccgggctgcgggaaagcctacgccaagacgtcgcacctgaaggcgcacctgcgctggcacagcggcgaccgtcccttcgtgtgcaactggctcttctgcggcaagcgcttcacgcgctcggacgagctgcagcgccacctccagacccacaccggcaccaagaagttcccctgtgcagtctgcagccgcgtcttcatgcgcagcgaccacctggccaagcacatgaaaacccacgagggcgccaaggaggaggcggctggggcggcctcgggagagggcaaggccggcggcgcagtggagccccccgggggcaaaggcaaacgcgaggccgagggcagcgtggctccctccaactgagctcctcagtgccgcctccctgcgggtatcccggggggcactggatgcgagcccccaggtctgacgtccttgggggtggcttgaggaagaggggaaggtgcgtatttattcagggaggaggaaaagtggtgcagggacagggagatggggcgctaggggttcttagtctctggggctactaggcaggatgaatttgactgggtcggtaggagctgcgcgatgcccctctgttctcccctgcctcacagtttccctcgcccctgggctggggggttggggtgggacacccgtaccgcggctggctggtggggacaggctagaggagacagcaagtcccagtccccggagcagagagaagtggggccggcccggggcgctggtggtggctgtctggacacgtccttagcgcctgggaaccaggacataaaagcgcctccggagccgccctgcggcggggtccctttcatcccacttaaagtgcttctgcccctagggtttccggagggagagccgagatgggatgggggagcctgggggtcccccttggcaggggtgtctctttctggtttggagggttgttgctgtaaaaataactcctttgatgagcttccttattaaccctttcagacccagtctgttggagccatgaaggaagagggaaagagggctgccattcctgacagcctcccagccagggctggcgataaaggaccgagataggtggagggggcgagtagggaagtcctcttctaaaatgagagatagggatttggtggggtatggaaggaactaaccccttccctctccacctctgattcagcccttaattcttggtctatgataaataaagttcagtagtctcacattccccatctattaccctaggtgtgttttcaaggcagccagcggtagaatccatgtagttcccaccagttgccttcccctcagggatggaaggaagagggtttcttgggctggttgagggcagattgggggtgtctcatcagagggacctccactggttcccactcagagtggaggcctgcagcctacctgaccatctctttagctgtcaccaagaaaataaaccccactgtctctctagcttggcccttgtctttcccttgcccctgccatagcatgttcattaggggattccttcctccccctcatctcacaggggaagggagaggaaagagttgttctcccactggaaggggttctgccttctgaggtgacatccaggaagctgtccccattcccttctcctttagatgctagaaacacattttgattctgatcatggggtgggggagagaggaaaggagggaggggagaagcccagcagaagctgagccaggcagaggggaaagaagctgatatgaggaagggtctgacaggccacagcccttgcagccggagggctttcccacactcaagagaggggccttacagtccctctgacacccctcccccttcccctcgctccctttcttcacccggagccctctgcagagattagctgtgtattgatttttaagttataagcaaagggtattttatttaatattaggttatgtgtgtgcatgttgtgtgtacctgtgtgcatgtatgtgtgtttctctactgagcctggggtctctagccagggagaccccatcttattcaccatgtccaagatcctgggatctgggcccagcatctcttcctcctttgtagatgctggagcccagccaaggtctgggagctatatgggaagtgggggctgggatctgggtgggaatatgtgtttgtatacaaaggggccctccttaaaagggacaggatgaccttcccgaggaactcattggcctggggtagtttaagaagtaatgttctttctttctttctcttttccctacctcctgctaacccaaccagagatccccttccttgctgagagggttgggggcaggaggagatttggcagtgcctgcaggttgcctggccaggtggagagggggaaagaggaagggcaccgtgggtgtaagatgcctttctcctccacccatcgaaaccagccaccccttccctgtgccaccaagacagccttttccagtggccatcctaaggggaactcccaaatgggtgttgctggtggacacagatgctccccccaatggaagccccaagctctgaggtatgcgggtagaggctttggataggttttcttctgctcccctcttttatagatctaggctgcttggctgcctgtctttctaggcagtccccctagaggaaaaatgtaggaatttattttttctttaactgctgtgaactcactttgagggggtaggaggagggagaaacagcctgtgttttttatgcaataaagtcatcaactac

SEQ ID NO: 1152 - DNA, 3775 bp, Homo sapiens
ctaatcagttaccccccgctcggcggtggcagatggccggtgtggatctagagtggccgcagaggcgctcacaggacacttcagaagcacgcgagccagcacctaaacgctggaaggtctcttgtgagatcccagatcgtctgctcctcgtaacaagcgggaagctctgtcagccgggggcctacgtttgggctcggcaccaacggggactggcggcccctcgggaaagggcacgtgtcccccggttcaccaccaccctggccccttgtctcaggcctgacccacctcctcatgtgggctgcctgctgggcctcctacaagcatctgaatctgggggacgttctttccctagagtctcggccttaccttcccaagttcccaaggcttctcctgcccacgtccgtcgatgccccttcggcaggcctcgggtgggctggctggggtggggtgcggtggcctctctctctgccctgcccctgcccccgccccagctctccatcccaaatgctagaagctctccagggtgtgtgtgtgctgggtgggggttgctacgggagagctgtcgtgggggctgccctccacccatcctcacgctccaccccaggcgggagcgctccaaggtgccctacatcgtccggcagtgtgtggaggaggtggagaagaggggtatcgaggaggttggcatctacaggatatcgggcgtggccacggacatccaggcgctcaaggccgtcttcgatgccaataacaaggacatcctgctgatgctgagtgacatggacatcaacgccatcgccgggacgctcaagctgtacttccgggaactgcccgagccgctcctcacggaccgactctacccagccttcatggagggcatcgccctgtcagaccctgctgccaaggaaaactgcatgatgcacctgctccgctccctgcccgaccccaacctcatcaccttcctcttcctgctggaacacttggaaagggttgccgagaaggagcccatcaacaaaatgtcacttcacaacctggctaccgtgtttggacccacgttactgagaccctcagaagtggagagcaaagcacacctcacctcggctgcggacatctggtcccatgacgtcatggcgcaggtccaggtcctcctctactacctgcagcacccccccatttccttcgcagaactcaagcggaacacactgtacttctccaccgacgtgtagcccgaggcagggtggctgcgggcgggtggtggaaccagcccctccagcctggggtccaactcagacttgaaagactgcaatagaaaactcccaaacccagcaccccagactcgagggaagccagctcccaagaactggaatgcgtacgtcttttgtgccaccttgtacaaagccggctgcccagccccagcctcaccaccgcatcccacctcctgccctccatacctctagttgtgtctgatgctccgtgctgttcgggaattgttttatgtacacttgtcaggcagaaaaggtagtgaccggcccggcgtgggcacacagacagcccgctttgttctttcatttcctccagcactttctttccgcctgagtccagcccaaggccttttattttgcgctgtgtaactgctgccagcttctctcttggccctgctcccagatggcggtctcctggcagcctcccctcagtcttcctccacccgctcttccttcccagcctgcctgcatgcatgtgcacccttggtcttcgctccatcgccttgaaagctctgaagaggccctgggttgccgcggcagcagtggtctgtttgatgctgccgtttgccgctgccggcccctcctcagactccgcctttgggagcacacctgctttgccttgctgcctgtgcaaatgttggacaagcagacacactcacactcgtccccagcttagcacagagctggagcgcccatttctggaattttccgtttgggaatctccacttctggggtttacctgttcggcctcctgcctatcagtgaggcatctctgactgtttcttctactgcttttcagttcccttccctgctgttctatttcctttgagtgtaaagactcacaggtgacctgctatcgagatagccagagggtcaggagagaatgggggaggaggcagtcaggctgctgaggaaacaccacaggctgaacgggggaggaatgcacatgccacgctgggtgtcccgggtcgcggggaggcagctcagctcttaggagcaagttgtgggggcttttcaagaggggccaggcttcctggagggtgactgatgtggccgaagcaggtgtccaggcaggtaggctgcagccaggagctccctggcaccgcaggacctcgtggtactcttgccttagattttacacacactccacagccaagcactgccacggtcctccaggacctgggaagcaaaggcacaggcccacggtggccagccattgtggtgccgccccagcttctggatacagccttttgggtaaacactgggaactccagaagttgtggggagagtggggaatcagacagccgcctctaggggctgggttctgctggggcctccttgttggtgctgtaggcacccgccagggagcagggacccgacttgcagacgcattgcccggtactaggaaggagtgaggtgtgttcccaccgtacacttcccacacgagctgcggctgccagcctcgggccatcagcctaggagagcagatgcagctccaggggctcgacttatagccagttacagctccccggctcttctgtgtggcagagcgtcgtttccgggccctcagggctggggagctcagttcccattgcttgtgctcagggctgagtcttaaagaagggtttgccggccctaacgctgcagcgcgtgcgcggagagaggccctttttgagcctgtttactcctgtggccttgggcagaacagtaaatactctgtgcacggaggaaagacatgcccaagaggaaggaagtactgaccatcggctgcctgtgagcagcttagcaaggagcccttgctccctgggaaaggcggtgaacttgagtctaaagatgcagtgcctggcccttcctaaggtccctgcctggcatccgagtgtcggtgtgtggcacagaaggctcctgcttgcttccaaagtgatggacaggaaggggcagagtgagtcacggcccagactgggcaccttcgcgtctcagcctcagggagccccacagccccaagctcgctgaggcaacgtgagaacaggctatgggaaggctgcaaaggctgagaaatgcaaaggctcatatttataaatcccacccccagagtggggagggtcaggtgccagacctggactaaactgcaccaaggaaacacccagcagggtctcctgtgagccggggaccatgcagcccgaaacctccagtcactgcgcccggcaggagtcaggagccagggactgtgcagcctggaacctccagtcactgtgcccagcagggtgggctgtgcccagcaggagtcaggctaagaaacgccaggtctgcctgttcttgctgggcaatggctgatggctgccagtttctgctgatacacaggtaggatgggacccttcatgaatatctgactttaataagttggtaaggatatattttttgtctatgttctgtttcaacttatgtagattattataaattgatgtaaaccacgtgagaggaaaatgttaataaaaaatgcaaagccccatcatttgcac

SEQ ID NO: 1153 - DNA, 4508 bp, Homo sapiens
cacactttctcttaagcaagggggaactgctgaagtcaatccctttcctcaccgatttccgagtagagttgacaatgatgtcagagtggctgccgaagggaaaccagatgccctcccctcccgctccgtctcagcctctctctcccctcagtcttctcccccctcccactccgtctcagcctctctctcccctcagtcttctcccccaccctgcccgtctccctcgctctctgcctctcctgtccctgcccaccagctctctctctggcttacctgtttcccctgcccccagctctccgtctctctccctaatcccccttcccacttcgtggactcccaggttcttctttgggcagtgggagcctctccgggctggctcctgcattttctccacctgccccattgccaagggcactttcttgctctgaaggccctgaagccccaggcttaccggaaactttctgtgccccggagctgggatcagctgcttctccaaggagccctgggatgatatttgtaaagatagattgcaaaattagaattagtattttcagaatcccttcccctcttttcccactcccacccaacccagtgtcacagtgtcaggcaggttcgggagatgaggacgcctaagcccagcgccacttctcttcccaaccctggactaacaacttgagctgaaccagatgtgaactgaagcccaaaacaactgacattgacttgcagtgtctaattcaacttaactgaaatgcagtatcaatgttggcctgaatcaagccatggcaagatgtgtgataagccagggactgtggctccccaacaacgcatcttccttaaaccactgaacccgtgcaagactagagctctatcgtggacgaacgaggggtgttctgcctggcttcggtgattcgtatctgctgtcatttgtaaactgtttatacaccgccttggtgacaggaccccagatctatttctcagtcacactcaaggagctctcctgggataacacactccagggctctcagtcggacctttcaccatgaatcgttgaagcctcctgcggtggctgcagccccttgctctggctttatcaggtcaggtctcggctctgcaggcctcggagcccacaacagaaaagacccttttatcagcgtgcgctgcggggtggctgcaccctcttcagggtcagggtggcctgaacttgcgtcctgcgcctcatgtcccccttctctcctgccctacggcacggtgccggctctggaatctgagcgcgttgacaccggttcctccctggtcaggctggctgcttccctttcagtgtctggggccggcctcgggggtacctgcagccaccggggcggctgctgctgggaggtcaagcccatttcgtcctcacgttaggatgtgacagtgccctgccgaggacggtaactgagatggaaaacgagttaaggcgacaagggctgccctttcagtgggtggcatccgtgaggcagatgtcagcccccagggcaggaaaaaggaaagcccgttctgcctgcatcctctcctgagaccgtgtcactaaagttggaacggggagacccagcgaggacaggggccacggagtcagaccccggggacagagtgctgactcggcctggcggaggccggcgtcctcatcgccagcacggaacgggacgcagctcctgagtgcagagaggaacgcgggctccacgctgtgccggacacgcaagcgccctcagctctgcgcgctcccggcatggagcgagcgctgagaccgcaaccttccggccttgttcttctgaaccggcacgaaagccgagagcaggacacgcaggtcacgctcagcgcagggaggccgccctcgccgggcgcggtccggggtgctcaggctctgcagccccaggtgccagatgtcgcggctgccgtcttctccctgacgccagcacacgcttccccaggcccggtcctgtcacgtctcctcccaacctggggccactgctcctcccagccctgacagcgattcctggaaagctcttgctggagcccagctgtcagctcacctgctctgatacgccgtccgccctgtgcggctgctctgtctccacttggatggatggtgcctgcgctcatggtcacactgctcagccaggggccacagggccttggagccccgtcttccagctcctgcctcctggaggcagtgcttcatgacctgagcccaccttcctgcaggaagggctcacagcagccggcgcggccccaccccaatccccctcccccgagagaggtacggtgctggacatccaacaaaggtgacaacagggctcacctctcccctgtggatcttccccccggggcccaggggctctgagcatttccacaatgcacaggatacacccaccctggaattctctgtgcttgaccttgaggacagcatagaataaaagcaagccccgctcttagcttgcttgactttgacaatttttcagcgtcacaagcaagaaaccaccacctgtgggccccagtgagagactgaacttacaaagagacgatgaccacagcatatggaaaggaagaaggagccaccctctgcaggagccctgaagcccgaagagcaggaggccaggcactcgccttaggacggggccaggaggccaggcgcttgccttaggatggggccaggaggccaggcacttgccttaggacggggccaggaggccacacagtgatccctgtagcagtggccccatgcggccaagacttaagatagcagacaccttccccgatttgtgtctctacttaaaatgtaagatcagctggagaaagcccagtgtgcgcccccaccaagcccacaggactcctgctcctgcagagccgcccccgccccgtcaggcccaccgtgctggtgctcagggggctgcatcctgctgggagcacgattccgggtgtttctccaggcgctcagtccgtgcctcctttttcggtcacacatcttatcatttgagtttagcatctacttataaacatcattttcaaatctgaatcctgcttcctcactacaataaaaaggagagacaaaaggaagttgcgcctacaaccttccagaagccctgaggagccgccccatgcctgacgccacatcccacaagctcccgaaatcgcggatggctcagtgacattccagatgctgtcccatcgctcagagtcccgagacacagacatggacaccaagtccatcctttgaggaaggcagacttggcgggaatgtggttttcttcaaaggtgagggggtagggggagctgccagggcccagccggcaggggcaggaggggcggggcttcggcccagggccctgcacgggggtgaccatcagtgccccccatcaccgtgacagtcctatccccagtctgcaaaatgccccctggatggagcatcccatgagagccgggccatggagaggctggaatgtgccagactctgaggcacccagggggtcagcctttccctctggttggtccccctgtgccacaccgcagcctgcgcctggccagcttcccgtccctgcgagcacagcctgcgcctggccagcttcccgtccctgctgcgaccccattactaggtcatcgtctcatgccagagaactcgcaggaatcgcatgcaatgtttaacgagaggcagaatgtgggcaccaggtgtgaagcagtccccggctgtggacgggagactccaggctgcgccaggcagggcgccttcccctggaccttgaagggcacccgatgtcctggggccgtgaggggcggggtgcttatccatgtgacaggattcttccagtagcaacagggagggcccagcaaaacccgcagtttgtttcgggccacgttccaacaagtgactcggcggcgtctcccacctgcacactcagtcaggaggctgcagtctcccgtccagccccacagcctgagggattcctgttggttacccagaactacctgccacaggtgccagggcaagagatgtcactcaattttccagcccccagtcctgtagacatcctgggtgtgcggcacacatcggctcactcacactgaccctctgagccggtgagaactccacaagaagagggccagcgcctcacaagatcaaggcggaacaacgcgtttgtgggatgatgaagacctcataacagacgtgccagtgggttgattactgtgaaattctcaactgtggtttctgtaacttaaaaaaaaaaatttccactttgggaggccgaggcgggcagatcacgaggtcagaagatcgagaccatcctggctaacacagtgaaaccccgtctctactaaaaatacaaaaaattagccgggcgtggtggctggtgcctgtagtcccagctatctgggaggctgaggtaggagaatggcgtgaacccaggaggaggagcttgcagtgagccgagatcgcaccactgcactccagcctgggcgacagagcgagactctgtctc

SEQ ID NO: 1154 - DNA, 4829 bp, Homo sapiens
aaaaaacgctgtccggcgccaggcgcccacctgcaagcccaagccggtgctcggccagttacaaaagaaatggtcaggatctggacaacgataatgatagtattaatcctcctattaagaatcggcccaaacaaaccctcgctgtcagggcgacaggcgcccgcccaagcccagacctcggacctggttccaagcctgttcccgctgggtctctgggcgcccggtttctgcacctggagctcgcccgatgaggacaaggtctggaggccggcctgggaacaggggccgaagggcgagccggaccctaggggattgaggccgaggaagccggttccggggacgggcaacagggactcagggaccagaaggcggctgcaggacgcgaccgagcaggaccccaggcccgggaacgacgtcgcgagcgctgagactgccgggcctcccagcccatctggcattcgagcgcaggaccgggcgccccggcaccgccgcgcgccacccgctaggatgccggtggccccagcgccctcagccgacggagagccgctgcaggaacagggaggaggccttttccaccgcacccggagcgtttacaacgggctggagctgaatacctggatgaaagtggagaggctgttcgtggagaagttccatcagtcgttttccttggacaattaacaagttaggcttccacagtgccagggcctggggatgctggacatgggagagggttgtggtcgttagcctgggaaaatcattcttttaaacaatattcgccggaaaattagttttttcctaacatttctcaaacaaggcaattagggccgtcagaatcggtgctggaagacgaagtccccacagtgcaataatgaggttcccacggaaaatcagtacgttgtgttcgtaactgagataacagctagagaaggggctttgggctttttgagtctcccaatagtcagtctctccctctctctctctctctctcttcctctgactttctggctttggacactcccaatggtatatttctttgtggtgtttttatatttggatataagagaggaacttcttgttggatttttaagggaacacacttcgttttgacccttccaataaggaaaggggagctacaggaacagagagctctttagaaggttacttttaaatggaggcccccccattcatggtacccactcccacttggacctctgagacctccagaattaggcatcattctaaaatctggacattagaagtcacagactttgtatataaccacatattcataatttatcttttcaatgttttttattcatagatgaaaatcttgcaggcatagttaagaaaaatataattcctagaaagtacaagggaaggattatgctctgcagatacatgactaacaaggatagctggccatgcccagggctggtgttggttgaggaggtggtgatggtgcggggcatgtgtgtgtgtgtgtgtgtgtgcgcttgaggagttgtggaagtgttcatatctgtaaagtattatttcatggatgcagaccttaatgctaggttgaataactttgttgccatggaagaagaaccgcacgtcaggcttttttcattagcaaaccagtaagcactcactttgggcctctgaaatcacttccatcacctaacaccagagatacaaactgaagctagcccttaagagcctccccctaagatttagagagaatgatttctcaaccagttttcatctttgaaagtgccatttctccctttatcattgtgatttttattcaaatgcatgagtctctgattttctaccatatacaaagggtagagactacagtttcctatagaagaaacttcacatagtggccgaaggatcttatttctcaaaattcaggaactggtttcctctttctggaaattatgacattaacttgatttcatggtatctctttcatcttcctcaatgcctgtgctgtatgtatatttttattatatactgtaggtatatttttattaccaaaaaaaggagaatttgagcatgccacaatcttgaaaaatctgaggttgccctgctgtagaaccctttaactgccaggactttgtactgtttcccaagtgttaccagagccaggccgccagccttatgcagtctgtttaccttagctggaaccagggtgctgtgctgtgggttctatgaaactttctgtttcttcatatttggctttgtaattcctttctatcagttttggaggcatttcctattattcctctgccatatgttttctgccaaattaattgccttaagattttccttaagcttttggaaatgtataatgtttgagaaaaaagaaaaagaatagactgagtggaatcgtatctagtttcagttaataacatgtttcagttgatgttactgttatagctactgggcataaagtctccttcccttttttgaatcctatttttgaggcattgaagctgtgtctgtaagagacaataggccagttgggttaaatcagtgacgagattgtccagtgcagattggtgcccagtgagtggatcttcactgctcacaggccggactggggtcagctcacacagcgaggtgacggtccgctcctcaagcagtggatggtgctcttcggccttgcagatgccgctccattttcctggcttcaaaattttccagatatttcagtgcccccagaatgacatgctaacattctgctggcatgggagcatgaggcagtttgtctctaaaacatgccagagaatctcttgtcactacctaggcaaagaaccagtggcaaggtggcagcctcccaaagagctcatccctaatgtgacatcctggaatcagatggcacggacaccggcccagccccttcccagctctgtgactaaggacaagtgacaccccccctcccccagcctcggtctcctcctgtgtacattcagaaggcagatgctgccatgaggccatgtgtgctatgtccatggtgcaaggtggcacgcatgccgagtcaccaggtgagactgccgctttgggaagggataggaaggatctccggtagccttcgtgggcaggatgcctcttatttgaatgtgcctttagccacctcacagagcctatttccacatccctgtggattcatccctgtggaaatcttgagaatcatttatcctatgctgtcatgaagcagcagcagaatggagaaggtttaaaaagactcatggacaggcaaagcggtcaaacacctcctggctcagacgcacttgccttcccacacacaagtctggaagctcaggatggtgttcacggaggcagatgctcggggccggggcctgagtttcctggggcacagcctccatatctggggttccctggactatgcccagatagctcataatgtcccagccttatttgtgatggagaaggacttggggaaaagccaccgggaagcagtaagtctaaccagggaagtgcactgacttgcatgctttgaagaagagaagggagaaaagatacaaaaccctcacctggtttgtctgtaacagttgttatttctcaggggagctgcattaatgggccaagcctgtgcagctgggtgtgtgaagcatgcattttgcaatggactgtctccaaaagcagagcgaggtcacccaagaaatctagagcaagggaaaatactcattagcaaaggaattttgctggagccttgtaacggccgactcattatttcctttccaagttattttaaatgaaattttaaaaaacatcttgctttccaagaaattttgcttgttggcatatgtttggtgttttgattcagtttggaggatgaactagttaatttccctgggagtacatgcctattaaaaatatagcatcctgcatctgaccaagatgctatcttactatcttattgtgcctatcttttatgcggagagagaaaggggggtgttgggaaggagaccagactgtggaaacattttctttattttttctctttttcttccttttatagtttgtttatttttcaacttgacatgggtagagaaagcgaatcgctagtatagaaagcacatctggaatccatccggcctcctctctctggctcaccctcctcccagcaatgtttctccttggaagttgggggaaggtaggcacctctgaccttggcagggtctaacttggggtcatccactgcatactcatcttccagaaggcgtcttattcctcctcgacaaaaaaaaaatgtgttggtattaaaatgctttgaggtaggctggatgaacccagcttagtgaggatgacatgaaaacccttagctaatggggtctttattgagtagaactcaggtaagttcagatgtaagcagtgtctctcagtaaacatgaaaagactgaagatgcagacaatcaaatacttaagtctcttgaagagctgggtggtgggcgggggtcttcccaggtggtcagggagatgtgttagtgtagcacttggaagagagtggaacgaccaggcaaggatgtgccgtggaggtgggcagtgggagcagcccagtgtcagcatctgtattggttagaagaccaccgctaatgaggaggagcgtctctaccctgcagctgtctgtactcctgtgtcttccgtaatgtgccaagctctctgaatatatgcaaaactagtctgcaaaaagccatatgtctcagcatctggctttatttctaagtgttcaggtggaatttaagccgcgatcaaatttacaatgtcactgccagctctggacacttacttttggaataaagcaaagagtgaacact

SEQ ID NO: 1155 - DNA, 4224 bp, Homo sapiens
atttactcaacaatgttagatgtcacacatgaaaaagttttgttatctaattattctcatcagaaatttgttgcctgcttctgcagacgtcagcagagctgtaagtggagtagatctggccctctgcagtatgggaatcctaaccagagaggggagatgagggtttacaaacataaaataattgtttataagcaattgtttattttgaaatcatttttgatttacaaaaaaaagttggaaaagtggtacagagagttccatcattcgcttcacccaggtgcccctaatgctagcatcttgtgtaaccacggtacatttgtcaaaggtgtaaaatagaatgagggttttattcctctgggaagttgctcctctggggtttgtcatcacacaggaagggaaataacagtgagtctgaggaatgcatgcatctggtgctgtcagctccctagaaatgtgaccccaggttgattttcctgcagggcgggtccaatgccgtctactgggctgctcggcatggccacgtcgataccttgaaatttctcagtgagaacaaatgccctttggatgtgaaagacaaggtaaggccacttctcttaggaggaacatgaggtggtagtaaatggatgcatgtgagtgtgagtgctggcctaccgtgtgcatcgggacccaaaggaaaggtatcagaaccagaattcacctgcagaacatttaagttggaaatgtcttgttgcctgtggtttggtctaatactgaaatcagccttaagtcaaaatctttcaggtagttgccataatacgcacgcattgaattataatccccataacataaaaacctcaaagttctagtacagacaaccagagagagacctcggtctcgattcgattttcttcctgactcaaccttgtgcttttaagcggatctcccctattctcttcttctttgaagtggctgacagtgctgacctgacaatcacagacactagaagatattaatgagacaatgcacataaagtaataaagtaaggcttttttttggcacaacggtgttataaaagttactgatttatcaagataccttgttttcatatgtgtgtgtttcattcagttcacacaacaatcctgtgaattaattggctgtgctggaacctgaacctggaattcctacctactcatccattatttattctactgtacaatacttctctgcttccagtactggcagactaatttgacgtttagtcaagctgccacatgcagttgcatgggttgtgcactgcaccatatctgaggggtaacattcatatcagagacacgcatttattatggcagttttctggaaggtggcaacactatatcttgttttgtcttcttaaaatttgtttattctgatgattttctgtggggtggatagaagtaaagtatcttaaaggatttgcacttgttactaattcacagaaagttattgcatgggcaaatagtgacattctttaaaatttctgagaaaatctctgagaatataagaaaataagtttctaatcataggcaatgaaatgagaagcttattaataaataaaattgttcatttaagtaactgctgaatgatgaacccaatagtaaaaagagagtgttgtgtttaaagagaaaatcacacagctagaagtatcagcacataaagaagactgagaacagctatcatggaaaagggagagccttctcctgagttgtttgcacttcacaggatgagccaagtatgtgggcttaatactcactgtgtggtggacaccccaacctcaggtccccatcctagccactataggggcatctgcccaaggtgggtgggtggaaccaaaggggacagagtggaaccaggcaggcctgggtgtaggccttgggttctggtctccatagcctgctcacagatgtggctctgaatcaccggctccttttcttctgcagtctggagagatggccctccacgtggcagctcgctatggccatgctgacgtggctcagttactgtgcagcttcggctcaaatcccaatatccaggacaaggaagaagaaacccccctgcactgtgctgcttggcacggccattactctgtggccaaagccctttgtgaagccggctgtaacgtgaacatcaagaaccgagaaggagagacgcccctcctgacagcctctgccaggggctaccacgacatcgtggagtgtctggccgaacatggagccgatcttaatgcttgcgacaaggacggacacattgcccttcatctggctgtaagacggtgtcagatggaggtaatcaagactctcctcagccaagggtgtttcgtcgattatcaagacaggcacggcaatactcccctccatgtggcatgtaaagatggcaacatgcctatcgtggtggccctctgtgaagcaaactgcaatttggacatctccaacaagtatgggcgaacgcctctgcaccttgcggccaacaacggaatcctagacgtggtccggtatctctgtctgatgggagccagcgttgaggcgctgaccacggacggaaagacggcagaagatcttgctagatcggaacagcacgagcacgtagcaggtctccttgcaagacttcgaaaggatacgcaccgaggactcttcatccagcagctccgacccacacagaacctgcagccaagaattaagctcaagctgtttggccactcgggatccgggaaaaccacccttgtagaatctctcaagtgtgggctgctgaggagctttttcagaaggcgtcggcccagactgtcttccaccaactccagcaggttcccaccttcacccctggcttctaagcccacaggtaggaacctccatgctggccccgtctctccagcaggtgttggcttccgcactctctcctttcaaggtctaggggggaagggagttgtgtttgggtcacttggcctatactggaccctgtggccttagtggttttcaggtccaggttggctggtagccttgtgtgtgctgcctgttgtccagcagtaacagactgacttggcagtagcaaaacaagggcctcactgaaatcacagccacagacacaaaggtccatcctcataaatgtgcaaactgcagaatttgcacagtcagctttggggacacagttgcaaattgcattgcattctactcagggctctggccttagagacaaaaagagctcaaactcaaacagtccaagcatagcacagatccaatagcagcccaagaagggtcctcaacccttatccttctttctggagtgctacaggcagacccagtattgtagatacatagagcaacaaaaagggatttccaggaagcaccatcctgctcagttcaaggttggatagaggtttccagaggctccttagtggttttcagggatggtctctctggtcacatccaccctccttgggaacgtttgctgccttccgggccttccacagacagggttattgattcacattagggggctgtcacgaaacacctggcagtgagcaagagaaaatgatgcaatcttgggtgtgattccaactgaatcctcctttagacagagcgagtgagtttgtggaaagataagagaccttccaagagtttcctaaaccaggacagttttgtgctttgtgccttgattcattctctgtatatgatgtcacagaagagccaggtctgttccccaggttgatgctaaagtttgtgtttctcttacgtcccctcagtgagggaggacgctggggagcatgggtagctgcggagagttggctgagatttatattcccttttcaacttctgttctctgaacacagctatagaattgaaatgaggagaagaaagaataaccaaaacagagttataattcatattattatattgctgatacatatgtcaatatttatagagtactgtgtgccaggaactggaagaaatatggtctgaaggacgcctcatttaatccaagtgacagcttccgaggtgtttttaccgctatttccctgcagccttgaggggtcagttggcttctctgaggcgcacaggtggcaaatcccagaacatctggtgcctgagccagtgcttgtcaataacaccctgcataaggaattcacaggcacacctttccattttccagtgtgatttttttgttttttgtctttgcatattaagttaaatgttattacaaaagagtcaaaacttt

SEQ ID NO: 1156 - DNA, 3319 bp, Homo sapiens
attttttttcacaggcctgccttctctcactaacgctcttcctagtccccgggccaactcggacagtttgctcatttattgcaacggtcaaggctggcttgtgccagaacggcgcgcgcgcgcgcacgcacgcacacacacggggggaaacttttttaaaaatgaaaggctagaagagctcagcggcggcgcgggcgctgcgcgagggctccggagctgactcgccgaggcaggaaatccctccggtcgcgacgcccggccccggctcggcgcccgcgtgggatggtgcagcgctcgccgccgggcccgagagctgctgcactgaaggccggcgacgatggcagcgcgcccgcggccctcctgctcgccctggccggtgctctgctcgcgccctgcgaggcccgaggggtgagcttatggaaccaaggaagagctgatgaagttgtcagtgcctctgttcggagtggggacctctggatcccagtgaagagcttcgactccaagaatcatccagaagtgctgaatattcgactacaacgggaaagcaaagaactgatcataaatctggaaagaaatgaaggtctcattgccagcagtttcacggaaacccactatctgcaagacggtactgatgtctccctcgctcgaaattacacgggtcactgttactaccatggacatgtacggggatattctgattcagcagtcagtctcagcacgtgttctggtctcaggggacttattgtgtttgaaaatgaaagctatgtcttagaaccaatgaaaagtgcaaccaacagatacaaactcttcccagcgaagaagctgaaaagcgtccggggatcatgtggatcacatcacaacacaccaaacctcgctgcaaagaatgtgtttccaccaccctctcagacatgggcaagaaggcataaaagagagaccctcaaggcaactaagtatgtggagctggtgatcgtggcagacaaccgagagtttcagaggcaaggaaaagatctggaaaaagttaagcagcgattaatagagattgctaatcacgttgacaagttttacagaccactgaacattcggatcgtgttggtaggcgtggaagtgtggaatgacatggacaaatgctctgtaagtcaggacccattcaccagcctccatgaatttctggactggaggaagatgaagcttctacctcgcaaatcccatgacaatgcgcagcttgtcagtggggtttatttccaagggaccaccatcggcatggccccaatcatgagcatgtgcacggcagaccagtctgggggaattgtcatggaccattcagacaatccccttggtgcagccgtgaccctggcacatgagctgggccacaatttcgggatgaatcatgacacactggacaggggctgtagctgtcaaatggcggttgagaaaggaggctgcatcatgaacgcttccaccgggtacccatttcccatggtgttcagcagttgcagcaggaaggacttggagaccagcctggagaaaggaatgggggtgtgcctgtttaacctgccggaagtcagggagtctttcgggggccagaagtgtgggaacagatttgtggaagaaggagaggagtgtgactgtggggagccagaggaatgtatgaatcgctgctgcaatgccaccacctgtaccctgaagccggacgctgtgtgcgcacatgggctgtgctgtgaagactgccagctgaagcctgcaggaacagcgtgcagggactccagcaactcctgtgacctcccagagttctgcacaggggccagccctcactgcccagccaacgtgtacctgcacgatgggcactcatgtcaggatgtggacggctactgctacaatggcatctgccagactcacgagcagcagtgtgtcacgctctggggaccaggtgctaaacctgcccctgggatctgctttgagagagtcaattctgcaggtgatccttatggcaactgtggcaaagtctcgaagagttcctttgccaaatgcgagatgagagatgctaaatgtggaaaaatccagtgtcaaggaggtgccagccggccagtcattggtaccaatgccgtttccatagaaacaaacatccccctgcagcaaggaggccggattctgtgccgggggacccacgtgtacttgggcgatgacatgccggacccagggcttgtgcttgcaggcacaaagtgtgcagatggaaaaatctgcctgaatcgtcaatgtcaaaatattagtgtctttggggttcacgagtgtgcaatgcagtgccacggcagaggggtgtgcaacaacaggaagaactgccactgcgaggcccactgggcacctcccttctgtgacaagtttggctttggaggaagcacagacagcggccccatccggcaagcagggaaagaagcaaggcaggaagctgcagagtccaacagggagcgcggccagggccaggagcccgtgggatcgcaggagcatgcgtctactgcctcactgacactcatctgagccctcccatgacatggagaccgtgaccagtgctgctgcagaggaggtcacgcgtccccaaggcctcctgtgactggcagcattgactctgtggctttgccatcgtttccatgacaacagacacaacacagttctcggggctcaggaggggaagtccagcctaccaggcacgtctgcagaaacagtgcaaggaagggcagcgacttcctggttgagcttctgctaaaacatggacatgcttcagtgctgctcctgagagagtagcaggttaccactctggcaggccccagccctgcagcaaggaggaagaggactcaaaagtctggcctttcactgagcctccacagcagtgggggagaagcaagggttgggcccagtgtcccctttccccagtgacacctcagccttggcagccctgatgactggtctctggctgcaacttaatgctctgatatggcttttagcatttattatatgaaaatagcagggttttagtttttaatttatcagagaccctgccacccattccatctccatccaagcaaactgaatggcattgaaacaaactggagaggaaggtaggagaaagggcggtgaactctggctctttgctgtggacatgcgtgaccagcagtactcaggtttgagggtttgcagaaagccagggaacccacagagtcaccaacccttcatttaacaagtaagaatgttaaaaagtgaaaacaatgtaagagcctaactccatcccccgtggccattactgcataaaatagagtgcatttgaaat

SEQ ID NO: 1157 - DNA, 3291 bp, Homo sapiens
aaataagccaggcctggtggctcactggtgtaatcccagcactttggggggccaagacgggtggatcacttgaggtcagaagttcatgaccagcctggccaacatggtgaaaacccatctctgctaaaaatacaaaaattggccgggcctcgtggcacaggtctgtattagctgagtgtggtgacctgagcctgtagtcccagtcactcgggaggctgaggcaggagaactgcttgaacctggaaggcggaggttgcagtgagccgagatggcaccattgcactccagcctggccacagaacaaaaccctttctctaaaaacaaagtcaagggcgcattaagcagctccttcatgtcctcaggtgacaccgtctcaccaacatggcaacaccacctgcaacattcaccgtcacgctgaccaggccaccggcaggtgctgcagtcacagcagtgggcgccggcaccacggcagagcaagcgcccactcagtgccgggcacctactgtgtgctgggcggggtggggggacggaggacacagccatgtgcgacctggggcgccaccacagcaggccagagcctgggcacaaaagagcgaggctttaaacgagagaagaatctgaacttcaaactctcagggttttattccgaataacgaaagtttttgcgaaatggagtcgggttcgctttctgggtctttgatttttttttttttgagacagagtctcactttcaagtgtgctgctcaagtgcggtggcgcggtctcggctcactgtcagcttcgcctcttgggttcacaccattctcctgtcgcagcctccggagtggctgggactgcaggtgtctgtcgccacgcccggctaatttttttgtatttttggtggggagagggtttcatcctgttggccaggatggtttcgatctcctgacctcgtgatccgcccgcgtgggcctcccaaagtgctgggattgcgggcgtgagccaccgtgctcagccacagccagctaattttttcatgtttttggtagagacgaggtttttccaggttggttaggctggtcttgaactccaacctctggtgatacgccggccttggcctcccaaagtgctgggattacagacctggccagcctaaacgatttttaaaacaagttagagattttgggttagtcttgttttccaggaataaagtaccatttttagtggccaaggatgtaccagagggtgtggccctgtgacatccagctgggtctgcccagggccccgctcagcgaccgaggctttctaggatttatgctgccagttgcagagaaaatggccctgagtgagggcgttatgactgccccacctgcctcctgtaaccgcgtggctgtgggattcggggctgggaattcgggttcctgtggggccagcacacggccctgtgcttctccctcaggcggagagagggtgggggcagccccgtgcgtctcctgctctaggagggagggacggtgggggccggtgcgccagtgcggtgtctctgctgcaggtggctgggctgacgctgctggctgtcggggtctactcagccaagaatgcgacagccgtcactggccgcttcatcgaggctcggctggggaagccgtccctagtgagggagacgtcccgcatcacggtgctggaggcgctgcggcaccccatccaggtcagccggcggctcctcagtcgaccccaggacgtgctggagggtgttgtgcttagtcccagcctggaagcacgggtgcgcgacatcgccatagcaaccaggaacaccaagaagaaccggggcctgtacaggcacatcctgctgtatgggccaccaggcaccgggaagacgctgtttgccaagaaactcgccctgcactcaggcatggactacgccatcatgacaggcggggacgtggcccccatggggcgggaaggcgtgaccgccatgcacaagctctttgactgggccaataccagccggcgcggcctcctgctctttatggatgaagcagacgccttccttcggaagcgagccactgaggagataagcaaggacctcagagccacactgaacgccttcctgtaccacatgggccaacacagcaacaaccccagtcacgtgtcacacggaggatcaagtcctgctggtcggccgtggctgactcttcaggcacgttgggctcctgggtcagctgctgccgttcgacgctccctggagccctgactcagattcatgctggtcctggccagcaatctgcctgagcagttcgactgtgccatcaacagccgcattgacgtgatggtccacttcgacctgccgcagcaggaggagcgggagcgcctggtgagactgcattttgacaactgtgttcttaggccggccacagaaggaaaacggcgcctgaagctggcccagtttgactacgggaggaagtgctcggaggtcgctcggctgacggagggcatgtcgggccgggagatcgctcagctggccgtgtcctggcaggccacggcatatgcctccaaggacggggtcctcactgaggccatgatggacgcctgtgtgcaagatgctgtccagcagtaccgacagaagatgcgctggctgaaggcggaggggcctgggcgcggggtcgagcaccccctacccggagtccaaggcgagaccctcacctcatggagcctggccacggacccctcctacccctgccttgccggcccctgcacatttaggatatgctcctggatggggactgggctgtgcccagggcctctgtcccccaggatgtcttgtggtggcggtcggccgttctgccccccagggcaccccctgttgtaggcactggctagggaggggcaggcctccttcctgcccctcgagacactcttgggagatgcattttccgtctggctcacagggggagggtgaggctttgtaccccagcccctgcccaggccactgtgagggtgggtgctggctgagcccctggggcagaaggagtggggcaggcggggtctttgttctcggctcccacagcagagccaggtgagggggggcctgccaggactagacagaagtggggcggcctgaaccctgcttccagccatggccaggggccacggaacccggcaggggtgtctgaggccgccctgtcagctggccggtccaagcctgtggctggagctggtgtgtgtttatctaataaagtcccacaggtgcctcaaaaaaaaaaaaaaaaaaaaaaaaaaaaaaaaaaaaaaaaaaaaaaaaaaaaaaaaaag

SEQ ID NO: 1158 - DNA, 3440 bp, Homo sapiens
agcatttcttccttctgcgtatgggacaggaccctttctggaatgggggtcttatgacctacaatcaaacaaggtaggtccgatcatttccttatgaccagtttttatacagaatgtaaaccaaaagtatatgagacaggtcccgatcaatgtagaaagtttactttgccaaggttaaggacacacccatgacacagcctcaagaggccctgcctatgtgcctaaggtggtcaggccacgactttgttttatacattttagggaaacatgagacatcaatcaatacatgtaagatgtacattggtttggtccagaaaggtgggaccactcaaagtggggacttccaggtcacagggagatttaaagattttctgatttgcaattggttgaaagagttattatcaatagaaaggaatgtctgggttatgataaaggattgtggagacgaaggttttatcgtgcaggttaagccttcagagagaacagattgtaaatgtttcttatcagacttaaggagtctgttctatcaacaattctaaaaggaagagggtacaatgaggcatgtctggctcccccttcccatcatggcctgagcttgtttttcaggttaactttgggatgcccttgccaagaggaggagtctgttcagatggttggagtacttagaattttatttttggtttacaagaaaggcggatgaaaagtttgataatatttttaggttttatagctggctttcgggaaaaggggttctggtttctaggacccacgtggggaagagggattctagtttctatggctgccctcggggaagagtgggactgagagacaggaggcgagcaggagaaggtcagagaaaaccttttgcttctcaggctgcttctgaggccttcattttagggtgttgttttccatgtcccaacagtgacacaacagtgtgaatgtacttaaaactactgaactgtaggtttaaaaatggttatgatggtaaattttgtgttatgtgtgtattatcacacttggttttttttgttttttttttttgagatggagtctcgctctgtcgcccaggctggagtgcagtggcgctatcttggctcactgcaagctccgcctcccaggttcacgccattctcctgcctcagcctcctgagtagctgagactacaggcgcccaccaccgtgcccggctaattttttgtattttcagtggagacagggtttcaccgcgttagccaggatggtctcgacctgctgacctcgtgatccgcccgccttggcctcccaaagtgctgggattacagacatgagccaccgcgcccggccattattaccacaattttttaaaacctattttaaaaagaccacgaaacactttaaacattaaaaataatcaaatatttttttaattgcttatttaaatagacttatgatggcttttcaacctacacagttgttgagttttttgttgttgtttgtttgtctgtttgtttatttagtagagatgggggttcaccctgttggccaggctggtctcgaactcctgacctcaagtgatccacctgcctctgcctcccaaagtgctgggattacaagtgcgagccaccatgcctggctcattcaacttatacagttgtttttaaaataaaaaatacataagccaggcacagtgttgcacacctgtagtcctgattactcagaggttgaggtgggaagattgcttgagcccaggagttcaaggtcaacctgggcaacatggtgaaacctcttctctaaaataaaatatatgtaataaaaaatttaggctgggcactgtgtcttgcatctgtaatcccagcactctgggagacccaaggcaggtggaccactcgagcccaggagttcaagaccagcctgggcaacatggcaaaactccatctttacaaaaaacacaaaattagccaggcatgggggcatgtgcctgcagtcccagctacttgggaggctaaggcaggaggatcgcttgagctcactggaggttgcagtgagctgagatcacaccactgcactccagcctgggtgacagagcaagactctgtctcaaaaaaaaatttttttaagactataggtattttcattatttttctcatgactcttctcatccttctgatatttgtacctcaatcctcagaccactgtccctgtctattctatttgggtaacaaccagtaagtggacatttacaaatttcctagtttttactggggatgacagtccccaatgctaagttgcatcgccttttacctgcctgactggtatactaaaaaatcaactctcagttgttataggtaatcatcatgattaatagaaaatatgttactcttttcacctgttctgcagataggacaaagtaggtgcagaatcgttaattcacttgaacaagtcatagcaaaggtcttaaatgagggcttgtgcagggtcagctttctgggcttgagacctgtacagtcacataggttgccacatttagaggagctccatgcttgtttgatgttctctgttatcatcttgacatttttaatatatatatattttaacaaaaggccccatatttcctttttgcactgggccctgcgaattatcttgctggtccaggacttaggtcactgatctcaaaatatgatgttctaggctcagcagtgggaagggtcgtacaagtaaagaagcattatcccttttattcaagattcagcgtagctattttatacacaatggtcatactgattttgctgtagagcactgcaatactaacactagaatccaccatttaaaagggaagctagagccctcaatagttacatccacgtttcagagagaaatccccacaaagacggatataattttctcataaatatttacaagttttaaatagttggatgttagtcaccccatttatcttggtgtttccttgtgaatgaagcccatccaacgtcgacatcgtattgagaaaaatctgtgaagctaatgaagaaagaagaatcaagagtgccaaaaataaatgtttccatcctgagccaaagaatgaatcacttgtgcattcatatgttatagaaaatgtgattccttttttccagttttacaaggccaacacctatcagcaacacaaattctgacttttactgacttagactaggtctcaaaagccataaaaaggccgttcatggaaatgaacaaagaatgtatttgtatctttatctgagaagtcatgccagaatccctttcaaatcagcagggtaacatttggttttacatttgtatgttttagtgagttttataaaccctgaagctaaccgatttttcttgtaaagtagagaagtaaactgattttgggagagacgcctggggatatagcagagctgaaatgtttgtgccttgtttattaaacatgatcatcctcaccag

SEQ ID NO: 1159 - DNA, 3976 bp, Homo sapiens
ggtgttgaagctttggggtatgatccagcaggtggcacttaggcttattggtcggttggtagactcttgcttggttgtgtggctcccccatgttaactcacagttgcagccatgttctctctcaatgctctgaaagtgtgggtttctctcccccttgagtgctgtctgtagatcatgacttggcactcctcggatgcccactgcagctcttgtgtaatctcagtgtttatgttcctttcccaacttggaggcagcagaggaagggactttggtattggttgtggccaagggtcatttgcttgtcacctggggactccaccccagagagatgcaggtcagcagtggctcagtgcaagcagcccaggatggagagtctgtgctgtgggcccaagccaggggtttcctgtcttgtgtcaagcaatgcggggggtgtgtgggatgcacgggagacacactggcctcctctccttgggtcagctgcagcttgctggaggtgtaaaatcaccctttctaggtgtacagttctgtgaattttgacaaatgcatcagtcatgtaaccaccatcacaattaagttatataacatttataagcactttaaagcttttgatgcatgttaatcaaattacctgctggtaacattatatgtattcctatctaccatcagcttataaaatgtgaacattgggtattgtccttaaaagactaaaaaaaaaaaagtccagtttttaggtaaattttccatctcattttaagttactttttttaatattaatgaagttgcattttttttgtaggtttatctgtttttatgtcttacagtgtgaatttttgttatgtttttggcctgtatttctggccaattatctctttcttattgatttttaagaactattagggggctggggttgaaagagtgatctgtcatgtcgcaaatacattttcttttgtcattaagccacttttaatattatgtatagctttttttctctcaaaagttttaagttcctgtagtctcaccatcttttcctcatagagtccaccatggaagtcatcttcataaagtcctttcccactccatgattatttaaatgttttccctttttaaatttaattcatctggaatttatttttggtatatcacatggagtagaattttattttctcccccaaatgatgagccacttgtcctggtcccatttatcaaataatagatcttttccccaccaatttgaaaagccacctgtattatatatcatatttatatacttaagtatgtctctgaactttcccttctgttccacaaaattccttgtctttttgggagaagactacttactggttcgcactgtttttaataatgtagttttataaaatggtttaatatctggtttggcaagtactacttttcattattatactttttcaaaatgttctctcaggccctaattatttcagatgaactttaaaccatatctgagtttaaacacccaataagaatttgtattgaaattttatgtttatagattaatctaagaataatttatatcattataagcagtcttgtcactgagggatgttcaaaaactgactcattgctcttcagagattaaagttttataattttttaagagtataaaaattataaattataaaaattataaaagcataggttctacatgttttatgtgttcatcctaggaatcatgttattgttgttaccattgattttagcatctgtttttgcattttactttccaacttgtggatcctatttacagctttctatttattaatttttataaaaacctagtttattaaaaactagttacagtaatatttgattttttaaagacaattaggtcatttgtaaataataagttttccttcacttttctgattttattttatttatttatttatttatttatttagagacagagtctcactctgttgcctactttggagtgcagtggagtgatctcagctcactgcaacctctacctcccaggttcaagcaattctcttgcctcagcctcctgagtaactgggattacagacacatgccaccacacccagctaatttttttgtatttttagtagagacggggtttcatcatgttggccaggctggtcttgaactcctaacctcaagtgatccacccaccttggcctcccaaagtgctaggattacaggtgtgagccaccgcaccaggcccacttttctgatttcatacttcacttctttttctggtatttcattatttagaattatttttataatttcaaataattcttcacactgtcatattttaatgacatatgaagtaatatattttttaaatcaaaaatagatgttaatgcagtaccttatggtgaattaatccctcagctttagaataaaccttatttggctatggtgtattaatcttttaacattatgctcaatatttattatttgaaatatatatataatcactaactttagttttctttaatatactatctttgtcaagttatggtattaaggttggattattctcatgttgtaaaattgagactcttgcatttttctatgctttggaacaatttaaatggcataaccatacctgttgcttaataagcagacttagctcacctgtatcacctgctccaaagctttttgggggaccatgagccatagcattttttaaagccctctctctcactcagtgttcagaatttgtattaaaatttcaaagttcatttaacaattttgattatcagagtgaaaagctaatgcatctgttttcttagacttgaacagagtataaaataaagatgaaaactaaatctcaaacacatttccatcagtgctttggatttcattagttcttggcaaacattatttacacttacataaagtttattgattccagtatgatgttcaaaagctgactcattgctcttcagaaattacagaaatgtctaccctcaatctcttgggaaagaaactgaattaaaaaggtagagtaagaaataagctgaaacttgtctgtatcaattagttttccttgagcactccctggatatatgcaactacacggaagtatttaagagattataaaaacagtttctcatcaagtttttcatctgaggcagggaccttgatggtttcttctcatggacaggtaactctatgtacatttcagtacatccctgtaatcttcagcctacttgttagttaccataacaacagtaacagcattttcttcttctttatccaggacatctgtgttaaggcttatctagcccttcgtcatcacacaaacctactgatcatcctgttctccatgatgctgatgacaggaatgccccagttaacaagcaaagaagacattgaatatatccgggatgccctcacagtggggaaaaatgaggaggatgctaaaaagtattttcttgatcagatcgaagtttgcagagacaaaggatggactgtgcagtttaattggtttctacatcttgttcttggcatcaaacaaggagagaaacattcagcctaatactttaggctagaatcaaaaacaagttagtgttctatggtttaaattagcatagcaatcatcgaacttggatttcaaatgcaatagacattgtgaaagctggcatttcagaagtatagctcttttcctacctgaactcttccctggagaaaagatgttggcattgctgattgtttggttaagcaatgtccagtgctaggattatttgcaggtttggttttttctcatttgtctgtggcattggagaatattcttggtttaaacagactaatgacttccttattgtccctgatattttgactatcttactattgagtgcttctggaaattctttggaataattgatgacatctattttcatctgggtttagtctcaattttggttatctttgtgttcctcaagctctttaaagaaaaagatgtaatcgttgt

SEQ ID NO: 1160 - DNA, 3700 bp, Homo sapiens
gtcactgtcttgggctgtgtgctgacgggagccagggccttgtaaggcccagaccctcctccttctctcccgtattagtcaaggttctccagagaaatggagttagagatgcattgctataagaaatggaatgggctcgcatgattacagaggctgaggggtcctacaccctgtcgtctgcaagctggaaaggcaggagagtctgtgctgcagccctagccagagcctggaggcccgagaaccaggcacgccgacgacagcacacttccagcctgagagcaagagaaggtcagtgttccagctccagcaggcaggcagagggagggttctctctccacctttgtgttctactcaggtcttcaatgggttggatgaggcccatccacattgcgagggcgtctgcttcactgaatccaccatcgtacctgcttctcttggatgccgtccgattgcagagacgctgttcccttgagggttcctgccccaccgtgtgtgctggtgctaggatgtctgccctggtccagccctgcacccctgagtcagaggctcttactctgggttcaattaagaaggttatttggcccccacacaaagctaagactttcaccttggcatttgttaggaattctttcctgaagttggacagtttggccatgttcaagcctctgaattcttccatagaattgtcttctggaaatcatgccacagtaatttaagtctccccggctgtatgtgtgaggacttcttaccctcttgggcatggaggggttagcatgtttggtagccattctagtcatagtaggttgacagttgagtgtttcctagatctttccaagtagaccagcatgactatggaagaggccctgaaggtcccaccccgacacgccagtccgaagggcccttgcctgggcaccctgcaccttcccctggacctgctgatgcgcctggctgggggaatgcgggccttcgcgttggttccacctccagcttccatgactgtggagttctgcagtgggttcattgagaaagtggtggtgagaccagggtatctgagaggagtggtcggcagggagatgagacaagtgtggagaccaggcagatggaaggcgcatgtctggagggtgtgagagctgccaggtgggtgtctgcagggtcttgcagagtcgctcagccgcaggtggggcggctctggagaccctatcagcacattccagagagtggcagaccccacggccaggcatggactgatgagcaggactgtcctccactgtccagacaacagcacagatgaaacccaggagcgcctgggacggtgctgtgagccctgcacatccacggagtctctcagatgaaaccacacgggtgtcacagtgacgctctctcccctcagaggctgccgacccctcgctgggctgctggactgctcagggccggcccttgaagcctggagggagccatgggtctgtgtgtacacatgtgtgtgcccgtgagtgagtctatgtgtgatctctgaaaatgaagcttccacattaccaatgcctggagaatccagaactgggactcccaggtaactgagggcctgggtcccaaagctggtggctgaagctggctgctccgaggcatgcgtggcaggaaggggtcatcaggagggccacccaaggccccgggcacctctgatgggtttccagagtccctgccctcacgagagggaagtcagttggagaatggggtgctgaagtctcgagagaaaggtgtccttgactcggggtccagagtaagcagcttctgccccccatatcacgtggctagtggcttgtcctgactgtgccccacgtgtcatggcaaagtttcgacacccactttggagatgtcttgacagaggccagcgtcaggctcccgttcttccacacgctggaagctgctgcacagcgggctcagagcctgggctcaggaggcatcccggttactgttgctgtatcctggagggtggcatctcctgggagctgtggtccgagccccttgcaacagcggggccaggagaaggctggttgctgggtgcatcctgttcttggggttccacctgctgtatccatctcccgggggattttccgtcgccgtccttggttccagcacatgccctgagtggtaatgccgattcctgcctgtgctgccgacttggtgcggggagcctgtggctgctctgtcaggtggttggccccgatggctccatgggtggcccccgcccaggcatctcatggagggactctgcctacgtcactggccgccagtcctgggggacaccgtgtgcatttgcacatgaaccatgatgggaacctgggggacgggtctcaggctgagaaaggttcccctgggcttcaaggtaaatcataaagcgaggtaatttcctataagtgtcagaggacactgtaactgtcccttctgagcaggacattgttgtggttgtctgtcttcccttttgtcttctgcctgtgggattatctagattctgagcaggtaaattgtttcaggctctggccttctcagagcctttctgtggctgtaggttgtggggagggcaccatggtagttgcccctgcttcattcactcagagccactgacaggggccccccaacctgctcggagccctccaggggcaggcactgtccctgctgcccccctgctgccctgaacatctccccagccccacagctgacccaccctttcagggtaacagtgcagctgcgggggcagccccctccagcccttccttggtcagcctccctgctgctggcccttcctggagacgtgatttgccctagaagtggcaggtgtgtgtggctcatgccctcactgtaaggctgtgccaaggcagtgccaccttgggaaaaatcaaaaccccataccagctcctcccagtccatgccagcacacaccctggctcctcagaaccccccacagaagcaggcaaggaatcaaaaactcaagtctgcaggaagccaggcagggatggaggaggggtatactgtcacaggtgagagggtcccagaagcctttctggaggaggtgacttcaggctggatttggaggggcaacttaacaagcagacaggtgggtggagacgctccagcagaggaaatggcatggagtgtccaggagcccacgaatcagctggcattgttgaatcatggagaacgcagagacggtctcagaagtcggccggagcctgagtcattgggccacgcggcttcagtccttccttgcagcctgtggggagtctcaggggaattctgaggaggaaagggggatgctcatgataggtatttattgtttttgtttgtttgtttttaatcacttattttcacaagtgtaatcgaagcacctggttgtgagtccaggagagtaaaacatttagccctcgcccctcccatccatcacggattttctgacgcctgcagcagggttcctgccaaaggaaaacccatttatagtcatatacttccgtgaacctttgatataacccagttatgtatctagaaacctgccttttcaaaaatattaacctgtctataaatgtagtaaatgttatataaaatgcaatcatgtttaagaagttaactattgttatattaattcgagttgaacaattcaaattctcaacttcatttataaacatagttaattaaattcctttatgcatat

SEQ ID NO: 1161 - DNA, 3676 bp, Homo sapiens
attttgtctatttttgctttggttacctgtgcttgtggggtatttattactcaagaaatctttgcctagtccaaagtcctgatgttttttgcacaaggtagaagatgggtgcatctggcttccgaggcgatcgggcagtgtcagtcttcagctgctaagccgagaagatctgggaaggagtcagtcggagagccttgggccagagttccaggggctctggaagtggctgccagtgagctaatactctgcttgagattcattaagtcaaagactgacatttcctctgaccacagactcgacttcagtctgcagatattatcctgcaattcagcacacattgctatctgctcatcgtggaggaaaagcaaattgcagatattttactctgccaaatcattatgtgcttaggatattcaaggttagaaaaagctaagtgacatgtacttttagatacttggcattgtaattacaatgtagtgcaaatcagcaagtatttattgggtacttatgtgtctagcattgtaatcatggcttttccttacacaacacttgacatagccagatggatacaagagattttctgggcagaatttcttctgaaatgttccctccactggcccattattttactattggagccttttttttttggatctaaaaaaatgttggttttcagattgagggtaatcaagataccctggttatggcaattagagcaagcattgtagttgtcattggcaggaaacaagagtcagaattggaattgagatgagtatcaggagtgagagaaagttgtagtttgagagagaagatgtatattaaatgagaagggagagaaggtagaggtcatctctgactaaccttctctacttcttagttttgctaataatctgtctttcatgtggaacagggaagctctacctacctaaattagtatgatgttgtgttaaggagtgtaaacttacaaaaagaagcagagccagttatgtccaagttgaagcaaaaaagtacatttcactgttacagacttctttgattatccaagccactgctttttttcttttaaaatggataatgttgaaaagttcagaatctagcaaatttgtgaaatgtcactttgggtaacatgtgctaaataattcagaggtacaattaacaaaatatctatatcacagtgattgaatgttctcaactagtttgtcccttttgcttctctctccttctggcaagtcttttataagttggaacactgaaattgcatgcagattttaaagacattgatgtataattcaatagcaactcatattgtttttaaacatcaaggtttcactactgattttcttcagagagatttcatttccacatttgtcattcatagagaagacacaaggcgacctcttttgaggtgattttcatgagcaaatgatagaaaacatgaaggaaaaatattatttcttgtgttttatttgtaataccctatgtatctgcctgcactctaacagttgacgacacaagaaaggaagtttgatgagaaagatgtaaaatatcaagatgatttttcatcataatatgtagtcagaatcttgagaattgggaggaaaggtagagaaggccagcaagacagcatgttcatgagtatgaaggtgggctcagagtgaaccaggtattcaagtattttataataccacgccaccaccttctcggatgatgttatacggatagtgagagattcattactatttctgagttggaaagtagaccagcaatcctgtagtataacatttcatttcaaatcattcaaagtggcttgaaattatacactggctgattttaaaaggtgggttagaatcataacttatttgttttaaagaaaactatgtcatctgcttgcataatgatttttcacttaatgttttattcagtctttctatataattgagcctaattgttctctaatactgaaaggactcagctttatatgcagccatccctatttttgatatttctatgaaggtgcttttgaataataatgaatacgccttttagatttgttgtaagtgttttatattccaggactgctacttatacttacttgtattcttggtttataacatgtagtactcaggagaataaacccttgggaatgctatgcaataaggattctaagagacacttatgtcctatttatttttatagtttctgtaagaaagtgcttattgggcagaaacaaccaggatagcttacaaatatgaatgcctggaaagatccccagggtcttcattatttatgttgtttgataagcacattctaattgttgataggttaaggccagtgttcttagactgatgttctcaaggttttgtttcttctaccttaagagttaaaacattcaagagaattaatagcatgtattgagcaattactacaccagagatacaaaggatgggtaattagagagcaagaagaagtatttgaatttggaataaacagtacaaataagagagacagagtgcaggatatgttgtacatcagtgtttgcttgaaatggaggaagactttcctgcaggatgaaaaatggagaatggctagaaaggttagagttagattgtaaaaaagcctgaatgttaaactaagcaatttgttttaccttataggcagtggggagacatggagtaccatcagtagttcacttattttcagagtagaagcattttggcattctattatctattacttaatatagaatgcagacatttatttggaaatgcaatagtcatttaactcttagcatgacagctcatgtgatatacagtattacattttccctatattaaatactatacgaagaataaaatcgatttatatttcaactctctttttacttggagatgggggtgaatgttgttgatcttcatctttaggcagtaatactgatcattatcattacctttattaaattccaacaaagtgcaaagtgtaaaacatacaacttggcaagggagtccttctcatggttgaataattggagatatttcaaggtgaattatcaaactattaacctctttggatttttcttttggtcagaatcattaaagggactggtatttgggtgagatttgaactctgtgaggtcagaaactatgacatacttactctactattgacaatatccagcacataattatatgcctggcacatatttaagagactaaaaggaacttattgagtgaatgagtgaatgaatgatattctggacttctgtgatttttcctaatgtgatttcacccccctttcacttaagtcacctattggcacttgtacattgttatcactaaaatttatccactcttaagacctggtaattaatgcaacacatgatcatgaatggatctcaggcaagaaggagccattaggaggaaagtcttagctaggtgtggtggcacacaactgtagtcccaggtactggggatgctgaggtgggaggattgcttgagcctggaaagtcaaggatgcagtgagccgtgatagtgatattcgaataacatctttagataatagaattatatcaatgttaattttgtgacattgatcattgttctttgattatgtaagatgttaacagaatttttgcagaatctggataaaggttacacaataattattttataatttttgc

SEQ ID NO: 1162 - DNA, 3204 bp, Homo sapiens
aagtgagaaatgctgcttggtgagctgggctggctgggctgctggccctcggtcagccgcctgcaacaggcagggccacgggaacctcatcagcagagcttcctggaggcagcgtgggtggaattgtggaattgtcatcagacaggcctgggatggagcttccccactggaacgcagctggctgtggacagggagtcagctgctgcctgaagggacaaggaggcctgcgaccacagcaggttcccacctggcctgggcctggaggccagcaggcacctttcagggcttcccagctcagcccccacagctggatggagctgtgttccctgcagaagtgtggccggctccgagcaggcacagggggctctttccctccacctcagccctggcctatgtgggcacagcagaggacgtgctcacaccatgggggcccccgaccaggcgaggccagggcgtgtccacattggggaagtgaacgaagaaggacaagtctatttgaggggctggctgatagtttagaagcccagaatcgcctggcagtgaattattctgctgagtaacactgtacccagagggatgtggctgaaaaccccgggagggaaggctgcgtgcgggaagcactcccatcctcccccagcgcctgctctgggcgttccggagctcagcgtgcatccttgcctatgctcacctgtgaagagggagaacgtcgctgtccgagcaaatgtctcttctgtgtccttggctgccttcctcctcctcctcccgccgcctactttggggccccttcctcttctcagcagtgccactgaccagcccagcctcatgcaccatcccggccgttgccctggagggctggcagctggcaggactcagagagggcccagccatcacccctctcttgagcagatgacagagtaacactgggagttactatggacactggaaaagagaacacagatgcgtcggagattttgtagttgcaactcttctctggtaaccaaaaaacatcaggacattcattgcaagtgcaacgctgaggctttgaaggaaccaaagagatcctttgcagccctgaggacggagggagggagggaaaagggagtggggtgggagggagggagggagtccactgcagaaagtggcactgatccctctgagcctctccggcctcatgtgtaagatgccagctgccccggagtggcagtggcgagtgagtggctgtgtaaggtgcccaggcaggagcttgcgggcagccctgtgtgaagtgggcagccttgggccgggttccctagaagcagagctgagatggggattcttgttcatgcgattggaggtgcttcctaagaagttgctccctgccccaactccgagccagggcggcactgaccatgggcaactttcccttgcagggggcactcccagctgccggggaggggcagtggccctgaaggggcctggtcaggaccaacagttttcttggcagtggtgtgtttgtccccatttcgcagatgaggaaactgaggcttggaaagacccaggtccttgcccaggccccacaccacacccaggaggggcggcgctggagtcctgcgccacgtcgctgttctcaccaggaggaggcccttgtttgctgcgtccagcgaccccatctccatgctgcaggcaggaggacacagccggggctcctggaagcctctcgcgttcctgggctagggaaccttcctccatctcagagccggccatggggtgtcccctgaccttccgcagccatgtcccccttcgatggagctctgcttctggccctccctccacactgaaggcccctgtgatcacatggcccacccgccaatccaggtggcctccctccaaggtcagccggtgagctgccttcatgcctgcatggtgtctctgacccttggccacgcaacctaacatagtcacagctcctggagatttgcactgggatatcttgggtgaggggaattattctgctgacccccgatggcaactgcagtggtgggaggggaagagaacaccaggatgtgttcagagagagaggcgtggacctcagggggtgtcaggggaagagggcccgggagggagaaagcatttggtttagacgtgttgggtgtgaggtgcccatggaatagcagggtggagctggtgggggaagctggggggctgccctggggctctagcacatggaggccaaggagggagtcgtggggtggagggggcacagggctccccaaggtcctgggtctgcctcagggccgctgctactccacacccctcctcccatgcctgagcacccatggcagtgaccagcagtgaccatcatcacccaatgaggatggagggaaactgaggctggcctgagatgtcctgaggaatgagctggcaccggagtcccacaggtgaaggctgatgaaattctaggagagtccatgtcctaaaggataagaagcaactattcgttgagatgagagacttcaaagatagtcaatgatcgtgaaagtcggccagcctttctggaccatctcgtgcaattgctctaatctatccctgcaatagatccctttaatacactttgtcatatgttgaattttctttttagtttttagttttcttttgttgttgttgttgttttcccattttttaaaattattattattgtggagacagagtctcactctgtcacccaggctggagtgcgggggtgcgatctcggttcactgcaccctctgcctcccaggttcaagcaattctcctgcctcagcctcctgagtagctggggctacaggcacccgccattatgtctggctaatttttgtatttttagtagagacagggtttcaccatgttggccaggctcgtctcaaactcctgacctcaagtgatccgcccacctcggcctcccaaagtgttgggattacaggcgtgagccaccacacccaggcccattgtttttaattatcaacgttatttttgttattctatgtatttcatctttgcatgatttccagtatgggaggtataaattgtgtaaagacgttgagagttctaatttgttgtatgcattttttacaaatgtgactccgtgaaaatgattatcacaacattgactttatgtgtaagcgttgtgtgtgtgcgtacataaaatcgtcgaaacttcctcaataaatgaagagatgtcctttttgt

SEQ ID NO: 1163 - DNA, 3453 bp, Homo sapiens
cattgaggacatccaaaactcactcaagatcaccaagtggtaggaaagtactaactcctgggcatagccctaggggagtgactacaatgtgaatactcatggaatgcctagccaggtgaagaagtgaatgcatgttggcatcccagagggaccccccttaagagggcatagtttggggttcagatttgactccagcatactgttgaaattggggcacagggggctagtgattagtcaggatcaatcagtggagaggagattaaaactcacatctgggagtccggaatcagaacttgtagttcttttttttgaaatggagtctcgctctgtcgcccaggctggagtgcagtggcgtgatctcggctcactgcaacctctgccttccgggttcaagcaattctcccacctcagcctcctgagtagctgggattacaggcgcccaccaccacagccggctactttttgtatttttaggagagacggggtttcaccatgttggtcaggctggtcttgaactcctgacctcatgatccacctgccttagcctcccaaagtgctgggattacaggcgtgagccaccatgcccagccctatagtagttcttcttttgccccttaatatcctcacccacatgtcctgtaccctgcctgaaccaccctcctctttttgttctgatctttgagctccctagagcccataattctttagagcaggtatgtcccgagtctgaaacatgcccttatttgtcccaagctctggacatttctcaccccaaggcggatcaatcatgattaaatcactccaattaaactttaggctccagtcagaccttcagccaaatggaaaaaaaaactaggggataagggaggtagttggagcaagaaaatgttattagttgaaaccttacgggaccttcctcccttagtgagtctgttggctaaaggttccctggcttcgtgaattagaattggatactgtttccaagttagcaaaaccaactctaccccagcaccccacgaggaagaatgtggaaggatctcccattggccggttggggcaaaagcctgaggcaatctttcatccccttttgccaaggcgagactttcccagtgacggtgatgtagttggccactctgactatgggtggactcgggtgtagacctctgaagctgagatcacacgaaaacctggcctccccgccatgtagctgttggagagtagaaaaatagagcacgcctgatgtttctaaatgagaagactttcaatagtaatgaagaatccatggcactctcctcaccctcaaacacatggcagtcattcacatacaggccccaaagccactgttagtgctgcagtagctcctgtggacattggaaagcccggagagggcgtggaagaaatcagctggcccccggcaggttctctggggttttgtgcccaaggctcctggagccctaaaaactttcaaaagttaactccccacgtccccatcctgcttgggtttctggacttttctgaggcaccggcagaggggtctcgttgctcccttgagtgtaggggcagccctttaacctggctccttgagtccctgctttttctgcttctgttgccttcttcctcgtcttcctctctctcaatatctccctctctttgtccctccccagttcctgacctggccatcccggggtgcccttgaccagccccgtgcctcctcagggtgtcccagcaccagcctggcacagagtggggctcagttagagtatgtgggatgttggtttcgccaggtgagtgaatgaaaggactcgaccaccacagctgagccactagctgggccatgcgaagagttctaggtgcaaaggctggagggtggaattcatttttgagaggtgtgtgagcagcttccgacccctgccccatttgaacgggggccttgctggtcgcgtccctgcattcacctgcgcggccatcccgtcatccaacagttgatcctaactgagcacgcccacggccctggtctggcctgggcaccggccaccgtagcccatcccttgatggcctctgtgtccccaggagggcgggccggggggttgcccaggggctggagcagtggactgtggctccatagaggtaggctggagggtgtgagggcagattcaagctatccccagggctctgctctggtcggagccagccccttctccctctctgccttccccgccccattcctgatgctgaactgttctggacccctggccctgagtctctcaggaccaaagtgggcacgggaacagctgtagtgtgtgcccccccgggctttggccacaggtctccctctcgaggtgtggttgtgactgcgacccttcccttgccgtgatgccttcctcccccggggcttggtccagctccttcactctctagcagctgctggggcccacctcccatgccgaggaccagcaggggaaacctccagggagcatctgcaggctctgcttctgcccggctgctggcttgctctccctggtggctctccagcggccagcttcctcacccacccggcactctgctttgctctgtctcctgaggtgggcctgaccaacctccccttctctgcctcagtccctgggctccagggctcagctccacagccctctgcctagcaggctggttctccctgccaagcccatacctgtggtcacctggccctcctgtggtctgagtaccactcccctgccccaggagccactcccactccagctgcctgtttccagcaggttcccagtgtccccgacaagcccctgctggtgtctccatctcctgccaagcatcctccagtgcctcctcctgtgggcctggcctcagggctatggacagactcctgtcccatcccagagacccctcgtgatcgtgccctggcacgtgggccgtggcccggctgggtcggctgaagaactgcggatggaagctgcggaagaggccctgatggggcccaccatcccggacccaagtcttcttcctggcgggcctctcgtctccttcctggtttgggcggaagccatcacctggatgcctacgtgggaagggacctcgaatgtgggaccccagcccctctccagctcgaaatccctccacagccacggggacaccctgcacctattcccacgggacaggctggacccagagactctggacccggggcctccccttgagtagagacccgccctctgactgatggacgccgctgacctggggtcagacccgtgggctggacccctgcccaccccgcaggaaccctgaggcctaggggagctgttgagccttcagtgtctgcatgtgggaagtgggctccttcacctacctcacagggctgttgtgaggggcgctgtgatgcggttccaaagcacagggcttggcgcaccccactgtgctctcaataaatgtgtttcctgtcttaac

SEQ ID NO: 1164 - DNA, 3889 bp, Homo sapiens
tttactctggctttcagagcccttaactattctcaacatactcgttgttttctctaaagctgaatacaaaatttgctgtaagatgactttccattcactgtagctggctcttgtcattctttcaccttaccctatactgcccagcactcatatgttcccttacctttgattataattttcatttggtgtgttgccttctctcatgtcatgcctgtatgtatacacagacacatatgaaatgcatataggcatgcttggtatgtgtatatgcatatacagagaaagaaatgttttaactacttggaaagactaccttaagacaaatgaagtcttccctcttccctatagtaataagaaggtaggctccccattcaattttgcaatcttctgctactatatttacagaaaagctgccttttacaatgccgagatcatggtgtacctcagaatctctgaccaagagcaaataagcattttttcttattgtttttcagtatgttgcaagagaaagagagagagtttcaagaagtgtaattgtggcttgtatcaacactgttactttcgtacattggtaagtttttttcttctttcctttttttttcttttttttattatactttaagttctagggtacatgtgcacaatgtgcaggtttgttacgtatgtttacatgtgccatgttggtgtgctgcacccattaactcgtcatttacattaggtatatctcctaatgctatcccttccccctccccccaccccatgacaggctccattgtgtggtgttccctaccctgtgtccaagtgttctcattgttcaattcccacctatgagtgagaacacgcagtgtttggttttctgtccttgcgatagtttgctcagaatgatggtttccagcctcagtcatacatgtgcatgtgtctttagagcagcatgatttataattttataatcctttgggtatatacccagtaatgggatgcctgggtcaaatggtgtttctagttctagatccctgaggaatcaccacactgacttccacaatggttgaactactttacagtcccaccaacagtgtaaaagtgttcctatttctccacatcctctgcagcacctgttgtttcctgactttttaatgatcaccattctaactggtgtgagatggttatctcattgtggttttgatttgcatttctctgatggccagtgatgatgagcatttttttcacgtgtctgttggctgcataaatatcttcttttgagaagtgtctgttcatatccttcgcccactttttgatggggttgtttgattttttcttgtaaatttgtttaagttctttgcagattctggatattagtcctttgtcagatgggtagattgtaaaaattttaattcaaactgaaatatttagcaagaactatacagcatatgagatgccaaagtttagaaacaaacttcattagtaagtcttctatcaagcagatgtcagtatgttggctgaagctgttacataattgaaatgtgcatatctaattcattgtgtattctccagttttgaaaggtaagcagtgtttgtcctgactagtggattcatctagtgtgggatatgcacaaaaattaacagttgtatgtttacttagactgtttttgagaccagaaaattaattagacaagggaaatatagcaaattaggactaaaattaagtattactaatagaataaaaatatatggaatcaattttatttaggtgtgaccactataacatgactgtatcccatgtgttagatgctgaaacaagagaaaaccagaatgtttccctgccattttcaggaaaaagagaaaacatccaaatatcttagagtcaggagagtaagattttccaggtcaattgccaccttccacatgactagtaataattatgcattataatagttcagagcccaggatgcacggaacataaacgcatggcagacaggtgctgtgactgtgtgggtctgcggagggattgtgggagaaaggagagtaagatgtggctagaaggtactggtatcattatctcctgtcccgtctgctttctctgctcccttgctgcagatactgttgcgggaagacctacagctgcattaacttaatcagtattgattcatgctgtccctcacttttgcttctgctaattggctgttatttttgttactggcatggaatcctgagagcatttaccacagttgcatgcgaatattctctcctctttcaaattcctcatttcttctgtgcattccctcattgtcaaaggattatttactctcctctttattacctagatagtctgtggtggattccttctttaccctgcaagtcactgcccttccagctttaactcctgtcccaggttcagagatttgtctctagacttaatcttcttcagtggaactgagtcataaattatcttgcctcctgtatgagcttacttttatggttatacagcaacattttttaacaactcaagataacatgatataattatgttgtacatttctctaacactgtaatactttattctacacactctgtcacttttaccttcaatcatactcttgattaacatgtccgtagcatgaatagcaccctctattttctgctgcccattgccacttctttctaggctcattcttcctgtcaaataatgtaaatggatagaccgtttgcttgacactttttattttccgaagcaatatttcccaagctgaaaccatgctttttcctagaaattcatttttttgcctttgaaccataagatgagattcactgttttctttttttttttccttccttttcttcttcttgacagccatttcagttctctcaagtggcattcacaaaccacacattaaatggttaattgagtcttaaatgctcaaatgctcaagtaatgtcctctgttgtttggtttgggattgcattgctgggatcctgttttggcacacaggtctttaatcatgtggttttaattacgacattcgtcccatgacatttgggagtggattaggatacggaaacccaggccatttgtttaggaggaaaaaagatggtattttaaagcaaccatagtcaaacaacttatgaatgtgttgaatagtcagttagcattccaagaaaagagttaggtctttctgtttcttgctgtaccctcaacacctaacttgctgcccgtgcattgttggctctctataaatgtttgttgaatgagagactgagtgagtgactcagccctaaatgaaagtttaagcaaatggcaaagaagattgttcctctgaagtagggtttgtttttatcttttgtgtgaatgtgtgtatttaatgtattgggttggattaatgagacagcaaggtatgcatatcaagggggaatataatcacatgagaaattaactaataaattatttttcttaaggtatgaattattactcatgtataaaatgaatcacattagccaggttaaagaagccagaattatccagaaaaaaacccagctcacttattcagtagtcaatgggaaatagatggcagaatgaatgaaaacatgactcattctccttcacaaagtgccttactcgtcatctctgcaaagctccaccaaggctcaggtcacatactgccacctacaaaaacctgacttcccaaatgaaaataatctctatttctggccctctaaatagatttcatatgacacttggtaggacatcacagtcacctaaatgaacattttgtgcccttttcaaaaccataaactcttagggggcaggatttttttttcttaatttagttttggagccccactaaacaatgtcacttatactgtgcacatataaatgatgaataactatttgttg

SEQ ID NO: 1165 - DNA, 3159 bp, Homo sapiens
aatagttactgagtgcctgtcctggcagacaggcttctctctgtcacgggatttatgttcacacagagagagacgagtggcaaacaactaaatacattccccctgcgtgccatgctgcagacgaaacaaggagatgtgacttgcagaggggaagggtccactttagatgagtggtttggggatgtatctcttggagaggcgacatttggctgaggacctgaggaggagccctgaaagctgtggggtggctgccccaggccgcagaacagggcaccggcagcctgggtgggcgtcagcatggcgaggtggagagacagctgcgtcgctggaggccagcgtggctggagatgagcaggcgtgggcacggcaggaggcagagcgagctcttgagtccagtttccattctgtgctgggagaccgccagagggtcttgagctgggaggtgaaagggtctggtgcacatgttaatgaagccttctggctgagggtggcatgtgggaggtgaggtggaaggcaggtgggggaggagcctgtggacctgtgtcccgaggcctctgttgtcatctgtcaccggctgggagtctgaaccaaagatgttgccttcgctgctgtgcaaagtcactggaactgaccggggaggcgtccctgtgtctgaaaggggagctgtgacgaaggagaagcaggcttccctcgggagaggggctctgtcacaggagatggtctcgaaaacctgagttacaaaagcaagagcagggaggaaatgtgccaaggaggcttcaaggccccgagtagggagagtgtgatggggcccgcagcagggttcatcctgtccctgcagccggccggtgggtctagcccacctagatccgagaccaaaaaccagaagcaggggctgtgtgtgtgtgtgcatgtgtgcatctgtgcgtgcatctgtgcatgtgtgtggaagttcccatgcagaaatcatagtgtacagacggaaagcttgaatggggtgaatagagaattctctgaagctagtgccgttttcgtgcatgtttacatattgtctctgctcctctgtcttgttcagcatcgccatcctttatttgagatttggggcgcaagtactacaagacaattttgtagcagagctgtcaactcactaccagaattatatccttttcactggagggccctggctgcaggacgcctgcttagcattgcagcagttagtggctcagatttgcccctctcaagaggagacaggtcagctcctcgcgccctgttctccggaggcctcgtctctgctgagaggtgtctcagttggccccgctgcagccgtgggaaggggcagcctgtccctcctctgtacacaggaagcttggctcagtagttgccccaggtcaggtttcgggtggcagagcccggctccaaacccagagaggctggcgctctggagcgtgcccacgccacgctgctttccacccagaggggcaggtgctgtgaggtaaatgaggtgcggttgcctctccacaccgcggggctccaagcccctactgccctccagcagagcactgtggggtggctgagggctgccgtgagcctcctgtctccccccgggatatctctctcatcatcacggagatgtatccaagggtatgacagttgtggcaggttgagcctgtgtctgtagggaagagctcagaaaatactgggacccccttcgattcccgctgtgcctgaggccagtggcgcagggctgttgcctcccgggagccctggcctcgcccagaagtcggagaggttaggtatgtgctttccactctttgttggggacacttcaagagttaatcctttagatcctgggttctttctttgggatttcttatgtcccagttaatgcatgaattaatatacgattttttcaaagttttgtgactgaatttcacactaagcttttatctgattttcataggggtctgtaatccagaaatgttcagagcaattggtttgagagtttgtttccaattctttatttcattattgtgtctagagaccttgattcaccgtatgcccgtggccttcctgcccttttcatgtaacttgatctcttctggccctgccctcggtgctggtgacaggagcgccaccagatggctcagtgggtccaggtttccactgatgtgagaggccatagttcacctgttatttactgtgacctcgaagagtgcttgtgacccctggcttgtgggcttgaactgtggagtcctgacgtctgggtaatggacccccgggcactggcgggtgcttggcactagaaggggctgctgatggcgggaggagtggtcgggctgtaggcagagcctctgactgatgtgtccagatgccgcgttccttcccttgacagcaccaccagccgagttcttatctttctatggcctgttgaacttctatctctacaccttggcctttgtatattctccatcgaagaatgccctctatggtaagccaccctggggtctggactgctggccagttagcgggcacagaggcctgtgttcatccacgacccacttcccgggtttcccattcatgtgggcgctgtgattcccagtgacttctcttggcagagagagagtgagttgaaatgtcgagctctgaggtgagttggggcccagcatatgtagaacctgcgttgtgtcattcccacagagttgacacactcattttattagtgtcagtccccagcttttgctgttcagtttgggattttttgactttacaatgatgcaaaagcaatgcacattcaggagaaatcacactttgaatacccaaacaaccattctgtttttcactttcagtacagcattcagcaaattcatgagagagtcaccatttattacaaaacaggctttgatcctttgatcccagcacttctggaggccaaggcgggaggattgtttgaggctgggagtttgaaaccagcctggggaacaaaatagggaccccatctctccaaaaatttaaaaattagacaggtgtggtgacatgtgcctgtagtcctagctactcggttggctgaggagggacggtcgcttgagcccaagaggagaggctgcagtgagctatgacaccactacactccaacctcggtgacagaatgagaccctgtctctt

SEQ ID NO: 1166 - DNA, 2983 bp, Homo sapiens
agtatggccgggctatggcggcgagcactggctacgtgcgactgtggggagcggcgcggtgctgggtgctgcggcggccgatgctggccgccgccggggggcgggttcccactgcagcaggagcgtggttgctccgaggccagcggacctgcgacgcctctcctccttgggcactgtggggccgaggcccggcaattgggggcagcgcgggcgccggggaaggcccggtcataacggcgctcacgcccatgacgatccccgatgtgtttccgcacctgccgctcatcgccatcacccgcaacccggtgttcccgcgctttatcaagattatcgaggttaaaaataagaagttggttgagctgctgagaaggaaagttcgtctcgcccagccttatgtcggcgtctttctaaagagagatgacagcaatgagtcggatgtggtcgagagcctggatgaaatctaccacacggggacgtttgcccagatccatgagatgcaggaccttggggacaagctgcgcatgatcgtcatgggacacagaagagtccatatcagcagacagctggaggtggagcccgaggagccggaggcggagaacaagcacaagccccgcaggaagtcaaagcggggcaagaaggaggcggaggacgagctgagcgccaggcacccggcggagctggcgatggagcccacccctgagctcccggctgaggtgctcatggtggaggtagagaacgttgtccacgaggacttccaggtcacggaggaggtgaaagccctgactgcagagatcgtgaagaccatccgggacatcattgccttgaaccctctctacagggagtcagtgctgcagatgatgcaggctggccagcgggtggtggacaaccccatctacctgagcgacatgggcgccgcgctcaccggggccgagtcccatgagctgcaggacgtcctggaagagaccaatattcctaagcggctgtacaaggccctctccctgctgaagaaggaatttgaactgagcaagctgcagcagcgcctggggcgggaggtggaggagaagatcaagcagacccaccgtaagtacctgctgcaggagcagctaaagatcatcaagaaggagctgggcctggagaaggacgacaaggatgccatcgaggagaagttccgggagcgcctgaaggagctcgtggtccccaagcacgtcatggatgttgtggacgaggagctgagcaagctgggcctgctggacaaccactcctcggagttcaatgtcacccgcaactacctagactggctcacgtccatcccttggggcaagtacagcaacgagaacctggacctggcgcgggcacaggcagtgctggaggaagaccactacggcatggaggacgtcaagaaacgcatcctggagttcattgccgttagccagctccgcggctccacccagggcaagatcctctgcttctatggcccccctggcgtgggtaagaccagcattgctcgctccatcgcccgcgccctgaaccgagagtacttccgcttcagcgtcgggggcatgactgacgtggctgagatcaagggccacaggcggacctacgtgggcgccatgcccgggaagatcatccagtgtttgaagaagaccaagacggagaaccccctgatcctcatcgacgaggtggacaagatcggccgaggctaccagggggacccgtcgtcggcactgctggagctgctggacccagagcagaatgccaacttcctggaccactacctggacgtgcccgtggacttgtccaaggtgctgttcatctgcacggccaacgtcacggacaccatccccgagccgctgcgagaccgtatggagatgatcaacgtgtcgggctacgtggcccaggagaagctggccattgcggagcgctacctggtgccccaggctcgcgccctgtgtggcttggatgagagcaaggccaagctgtcatcggacgtgctgacgctgctcatcaagcagtactgccgcgagagcggtgtccgcaacctgcagaagcaagtggagaaggtgttacggaaatcggcctacaagattgtcagcggcgaggccgagtccgtggaggtgacgcccgagaacctgcaggacttcgtggggaagcccgtgttcaccgtggagcgcatgtatgacgtgacaccgcccggcgtggtcatggggctggcctggaccgcaatgggaggctccacgctgtttgtggagacatccctgagacggccacaggacaaggatgccaagggtgacaaggatggcagcctggaggtgacaggccagctgggggaggtgatgaaggagagcgcccgcatagcctacaccttcgccagagccttcctcatgcagcacgcccccgccaatgactacctggtgacctcacacatccacctgcatgtgcccgagggcgccacccccaaggacggcccaagcgcaggctgcaccatcgtcacggccctgctgtccctggccatgggcaggcctgtccggcagaatctggccatgactggcgaagtctccctcacgggcaagatcctgcctgttggtggcatcaaggagaagaccattgcggccaagcgcgcaggggtgacgtgcatcgtcctgccagccgagaacaagaaggacttctacgacctggcagccttcatcaccgagggcctggaggtgcacttcgtggaacactaccgggagatcttcgacatcgccttcccggacgagcaggcagaggcgctggccgtggaacggtgacggccaccccgggactgcaggcggcggatgtcaggccctgtctgggccagaactgagcgctgtggggagcgcgcccggacctggcagtggagccaccgagcgagcagctcggtccagtgacccagatcccagggacctcagtcggcttaatcagagtgtggcatagaagctatttaatgattaaagtcatttgcagt

SEQ ID NO: 1167 - DNA, 4775 bp, Homo sapiens
acacaaactctggaaaagatgaaatgaggtcgagagggacattaggtggcatctggaggagtaggacatgatggggaaagaggatgtgtggaggaggagggctttgggggtgttgtaaccaggaaggggaggagggggtgggatattatgatgcagctcacattgaacactctctttcctgttgtttccacaccagctattacgtatattgtcaccgtcttcactggggatgtccggggggctggtaccaaatccaaaatctacttggtcatgtatggggccagagggaataagaacagtgggaaaatcttcctggagggcggcgtgtttgaccgaggccgcacggacatcttccacatcgagctggctgtcctccttagccccctgagtcgggtctccgtcgggcatggcaatgtgggtgtcaacagaggctggttctgtgagaaggtggtgattctgtgccccttcactggtatccagcagaccttcccttgtagcaactggctggatgagaagaaagcggatgggttgattgagaggcagctctatgagatggtgtctctcaggaagaagcggctgaaaaaattcccttggtccctgtgggtctggacaaccgacctaaagaaagctggtaccaactctcccatcttcatccagatttatgggcagaaggggcggacagatgagattctcctgaatcccaacaacaagtggttcaaacccggcataatcgagaagtttaggattgagctcccggatcttggcaggttttataagattcgagtatggcatgataaaaggagttctggttctggatggcatttagaaaggatgaccctgatgaacactctgaacaaagacaagtacaacttcaattgcaaccgctggctggatgccaatgaggacgacaatgagatagtgagggaaatgactgcagaaggcccaacagtgcgcaggatcatgggcatggcccggtaccatgtgactgtgtgcacaggtgaacttgaaggtgctgggaccgatgccaacgtctatctctgcctttttggtgatgtgggggacacgggggaacggctgctctacaactgcaggaataacacagacctgtttgaaaagggcaatgctgacgagttcactatcgagtctgtcaccatgcggaatgtgaggcgggtgaggatcagacacgatggcaaagactccggcagcggctggtacctggacagagtgctggtgagagaggaggggcagcctgagagcgacaacgtggagttcccatgtctcaggtggttggacaaggataaggatgatgggcagctggtccgagagttgctacccagtgacagcagcgcgacactgaagaactttcgctatcacatcagcttgaagactggggatgtctctggggccagcacggattctagagtctacatcaagctctatggggataaatctgacaccatcaagcaagttcttcttgtctctgacaacaacctcaaagactactttgaacgtggccgggtggatgagttcaccctcgagaccctgaacattggaaatatcaaccggctggtgattgggcatgacagcactggcatgcatgtcagctggttcctgggcagcgttcagatccgtgtgccccgtcaaggcaagcagtacacctttcccgccaaccgctggctggacaagaaccaggctgacgggcgcctggaggtggagctgtatcccagcgaggtggtggagatccagaaattggtccactatgaggttgagatttggacaggagatgtgggtggcgcaggcaccagtgcccgagtctacatgcagatctatggagagaaaggcaagacagaagtgctcttcctctccagccgctcaaaagtttttgaacgggcgtccaaggacacattccagcttgaggcggccgacgtgggcgaggtctataagctccggctcgggcacacgggcgagggctttgggcccagctggttcgtggacaccgtgtggctgcggcacctggtggtgcgggaggtggacctcacgccggaggaggaggcccggaagaagaaggagaaggacaagctgcggcagctgctcaagaaggagcggctgaaggccaagctgcagaggaagaagaagaagaggaagggcagcgacgaagaggacgagggggaggaagaggagtcgtcctcatcagaggagtcctcgacagaggaggaggagatggaagaagaggaggaagaggaggagtttgggccggggatgcaggaggtgattgagcagcacaagttcgaagcccaccgctggctggcccggggcaaggaggacaacgaacttgtcgtggagttggtgccagctggcaagccgggtcctgagcgaaacacctatgaggttcaggtggtcacggggaatgtgcccaaggccggcactgatgctaacggctacctaaccatctacggcgaggagtatggagacacgggcgaacgacccctgaagaagtcagacaagtccaacaaatttgagcaggggcagacagacaccttcaccatctatgccattgacctgggggccctgaccaagattcggattcgccacgacaacacaggcaacagagcaggctggttcctggacagaatagacattactgacatgaacaacgagatcacgtactactttccatgccaacgttggctggcagtggaggaagatgatggccagctgtccagggagctgttgccagtggatgagtcctatgtgctgccacagagcgaggagggtgggggaggcggtgacaacaaccccctcgacaacctggccctggagcagaaagatcaatctaccacattctcagtgaccataaagactggggttaagaagaatgcgggcacagatgctaatgtcttcatcacactctttggcacacaggatgacactggaatgaccctcctgaagtcctccaagacaaacagcgataagtttgagagggacagcattgaaatcttcacggtggagacgctggatctgggagacctgtggaaagtccggcttggccatgacaacacaggcaaggccccaggctggtttgtagactgggtagaggtggatgccccatctcttgggaagtgcatgacgtttccctgtggccgctggctggccaaaaacgaagacgacgggtccatcatcagagacctcttccatgcagagcttcagacgaggctgtacacaccatttgttccttacgagatcaccctctacaccagtgatgtctttgctgctgggacagatgccaacatcttcatcatcatctatggctgcgatgccgtgtgcacccagcagaagtatctgtgtaccaacaagagggaacagaagcagttctttgagaggaagtctgcctcccgcttcatcgtagagttagaagatgtgggagaaatcattgaaaaaattcggattggccataataacacgggcatgaatcctgggtggcactgctctcacgtggacatccgcaggctcctcccggataaagacggtgcagagaccttgactttcccatgcgatcggtggcttgccacctctgaggatgacaaaaagaccattcgagaactggttccatatgacatcttcactgagaaatacatgaaagatgggtccttacggcaagtctacaaggaagtagaagagcctctggacattgtgctgtactcggtgcagatcttcacagggaacattcctggggcagggacggatgccaaggtgtacatcaccatctatggagacctcggggacactggggagcgataccttggcaagtcagagaaccggaccaacaagttcgagagaggaacggctgacaccttcatcatcgaggccgctgacctaggcgtcatctacaagatcaagctccgccatgacaactccaagtggtgcgcagactggtacgtggagaaggtggagatctggaatgacaccaacgaggacgagttcctgttcctatgcgggcgctggctctccctgaagaaggaggatgggagactcgagaggctcttttacgagaaggagtacactggggaccgcagcagcaactgcagcagccctgctgacttctgggagatcgccctgagctccaagatggccgatgtcgacatcagcacagtgaccgggcccatggctgactacgttcaagagggcccaattattccctactatgtgtcagtcaccactgggaagcacaaggacgcggccactgacagccgagccttcatctttctcatcggggaggatgatgaacgtagtaagcgcatctggttggactacccccgagggaagaggggcttcagccgtggctctgtggaggagttctacgtcgcaggcttggatgtgggcatcatcaagaaaatagaggttctctatgaaatgacggtgtggacaggggatgtggttggcgggggcactgactccaacatcttcatgaccctctacggcatcaacgggagcacagaggagatgcagctggacaaaaggaaagccaggtttgagcgggagcagaacgacaccttcatcatggagatcctagacattgctccattcaccaagatgcggatccggattgatggcctgggcagtcggccggagtggttcctggagagggtaaaatgtctagaccctcactcttccttccagccaccacccaccccttcccctggttcctctggcttgtcaatggaccttgttaaagcacaaatgtcactgtagaggatcattacatgaacccagcccat

SEQ ID NO: 1168 - DNA, 3473 bp, Homo sapiens
agactgtgagagcagacactgggcccatacatgtgtccacccaaggagactgggcagcagctgcagagagcaaaacgacctgaccttctcacatggaaacttctccaagacttggtgtcatggaaaaagcaaagtcgctaaaaagcacacacgcacactttttttttttttttgacacggagtcttgctctgtcgcccaggctggagcgcagtggtgcaatctcagctcactacaacctccgcctcctgagttgaagggattcttctgcctcagcctcctgactagctgggactacaggcatgcaccaccacgcccggctaatttttgtatttttagtagagatggggtttcgccaggctggtctcgaacttctgacctcaggtggtccacccacctctgcctaccaaagtgctgggattacaggcgtgagccactgcacccagccacacacgcactttttaaaaagccgcacgacacatctgtttttgtacacacagacccagaaaaagataacagcttggctgatcacagaagcacctctgagaagggcacagtgcctggcgatgggcaaacaaaggagggggcagtgacttgccagaagtcgctcagcaatcacagccccacaccggagtctggctcactctcgactgtaccaccctgcctgccctctgaggatgccgcaaacttgaggccctgggaacacccacctagggggtcaattcatgcgccttcagtgaaaagcagtggcaacaaacagccttggaaatcaacaaggcaaagtactcacgttgaagaaattggtcttgttcctctcgcagaagagcccctgtgccggcatgtgctgcagttgttgccacgggatactgctgcctagcaacacgtcgcgggcccactggaggttctggggaaacaagaagtaggttgaaagtgagtgtgtgggctgctcagggcgcccacagggaaggcaggcggtcccctccttcctggctgcatggcaaaccacgatgagcagcagttcctgcagacatcgattccacagctccaggctgctctggccatgggctttgatcatcaggctgtgggatgcattttcagaactgatctctggcccagcaccactggtttaggagtgtagtctttgactcctcaaggtggagactgacagacccctggcctgaccaaccctacaaacctgccacatgtacccagtacccgccttctgtcagggggcccccacaagcccaaatagcagccctgacttatttgtcaggaatcagtagcgttccttattcacggccagtggtacagctgctttaggctcggagggctggactctggccacagtgcttaggtcagtgatctctgggcaaagagcctcttggtggaatccaggcccaggggagaatggtgtagggtaagagggtgagtgtgggcctggctgcctctgccttctctggggccttctcactggcccatagagcaggccttcccaccagctgcctggccagccactcctccctctctggtcttcaccacagcagccaagcaccttgcactggccatctcactccacctcaggaccatgctgtcctaaaggaaaagggctggcaatgggcagagctgggcttggcacctgggactgcacaatgccagaccctctaccctttccacggcacccactgtcccagccaatctgtcctcccctcccgctcaggtcccttgctcgcctttcccagcgctgggcgcaggccttcatcaccttgcactccagctgctccgaaagccctctcacttcttggcctgcaagcttgtcccacctggtcccattctgcccactgctggccaggctgagcatactgaaccattcccctaatcatcatgaggcaaaagtgcaactccagctccctgactcgctggctgtggggcccatgctagcctgcctctaagcctttgctcctatgagggctacccttctgcccccaccgggatgctgtagggactgagggctgctcctgaacactgggcagggagggccctgtggctgtatgtaggaggctccattcactgtgagcttcccgtctgctgagggaccccctgcctgccccaccctgaggggaaggagagacaggcagaggagggaacaacctgggcagcaaaagggtcctcagaccctggaggcaggctcccaactgagaacagaggccactttgctcaaactcacagaaaacagtaaaatacccagtcctgaccttcaacttctgagctctagcaccctaggaggaacaacctgtagtttactttcaagtgtccccagcagctgggcgcggtggctcgcgcctgtaatcccggcactttgggaggccaaggtgggtggatcacctgagatcgggagttcgagaccatgcctggctaatttttgtatttttagtagagatggggtttcaccacgttgcccaggctggtctcgaactcctgacgtcgggtgatctgcccgccttggcctcccaaagtgttggaattacaggcgcgagccaccgtgcctggtccatcacctgcacttctaataccacagttgagcacatctgaccatggaggtaggctgcaaaggggacctcccttttacccagtctgagaaggtcagggaggctctgggagaaggtgatacctgggctgtggtttgcacaaagctgttatggggataagggactcactgaagcaagtgcccagacacctggggcagtcagggcctagccaaggaggtggaggggatcagatgtggctgcccataaggccagtggggagccagggtgctatgaggcagggagtaagtgctaagaccatgggctgcagggcccagagcagaggcaggctgcctaggggactgagcctgtgtatacccttgctctcctctatggccctggcctcaatgctgtggcagaccactcctccagctgtgacttcatgacccagggcacaggcctggcctgagaaaagttacccaagagtcatgaccccagagctgcttctggggctcctccggaacttggaaaagtgtccggaagacctctttaagtggcagcacttgaggccagcaggaggagatgtgagaccctgacttgaagaagcatctccagtagccatcattttcctaagaataccaagaaagtaaagcctcgacaaagacttccttctggctggggacacaagagaaagcacagaggccaggatggagtcacatagactctgcttccctgcccagctgccttgttgcaggccctgtggccatgggacgggaatggacattcctctctggtttgttttccaccactccacctgcaccaagccagtttgtcccccagattggagcagaaagggagaaggcagtgggagaggtttctggggcaaagggtgcagaaagcactagcctgtcaaacccaacctggattataaattagcttcctgcagacctggc

SEQ ID NO: 1169 - DNA, 3484 bp, Homo sapiens
gacagaagatggcggatgagcagcgtgcagggttttctccctgtggctcactctctcttactgtgctgggcggttgcttcctctcctgctgcccttgggagtcagactccaggttcttcagcctgtggcccctggggctctcgggccttggaggactgactaggagcacacggtgggcctctctggtttgggggcctgggacgtggcggagccctgcagcttctgtgcggcctgttctgggcgtcgcgttgaaacgccagccagttccccaagtaagctccctgcacacacgcctgatagcctgttggttccgtccttctgcgggattttcactaccactctctaactcacacacagcagaaagagcatacgggagagatgaagcagtccactccaagaacattctcatcctacggattacgagtccccctgggattacaggagtgttgaagaaatgttgtgacacatcagaacaccgcgaaatacatggacactttcaaatcatggaagactcaagaagaaactttaattagaaggaaacaggaatattcaacggactcccaagacaagaatatagatgtatatcagaagctgagcattgaagttgctactagagtctccccgagcccttattggattctcacttcaggagctgctttcattattttgcctctcagtttcaaaatagacaaagaactcaacactcaacaataagaaaatgaacaacttggttgaaaaatgggccaaagaccttaacagacacctcaccaaagatgatagacaggtaggaaataaacatataaaaagatgctgcacgtcagatgtcatcagaaaagtgcaattaaaacaacaatgagacaccactatgcatctcctagaatgaccaaaacccagaacactgacaccaaatactcttgaggatgtggagcaattctcattgctgatgggaatgcaaaatggtacagtcttttggaagacagcttggaggtttcttataaagctaaacttggatttaccataccatctaccagcagtgctccttggtatttacccagtggagctgaaaatgtatgtccccacagaaaaacaggcacgtggacgcttacagaagttttacacataatttccaagacttggaagcaaccaagatgtccttcagtcggtgaatggaagaataaactgtggaacaatcagaccatggaatattattcagtgctgaatagaaatgagctaagaaagccataaaaaaacatggaggaaaaaatgttcaacaccaagactgaaccctaatgtaacctgtggactttggatgataatgacgcatcaatgcaagtcataaatttggaaaaatgtacctctcctgggaaggagttgataatgaggtcaggagggcatctttctcggctcttcactgtgagaaccttgtgggattcctgaagatgaaaccatgaacgcgagggagtcttgctaaaactgcagcattcgagaggttttcactcatgctggctcacacttgtcctctagcaattcatcaaaattaccacgacaaagaagacagaaaatactacacactacccagagattgaaactgaaggtgtgaacaacagagaaaagagagggcaaagaaaaggaaaacaaagaagacgtgggatatgaaaggtgtatgccatgtgtggacatcaagaaatgtttcagctcgcacttctgccaccaattgagcctggaacctcactacttggagttggggggagggcagtgctcattcatcacctgtgaaaatagggattgagagttccctaactttgccatttttcctcaagcactggcattggtcttctgaatgtcaggctctgtataagtgagtcctcagctgagccacaggctctgcattcctggcagtccacacacttcatatcctttgtttatgctgctcattttggaattcaaacaggttggtggggcacatttcaacagataatgacacacactgactgctcatgagctattttatggtgtgagaatgttgtgatgttatgaaatgcggaggcattaaaacatggggacattttctagaagatccttagcagagagtacagaagactaaggtccaaatctctgaaatgatgttttccaaattattgcacagctatgtcaaagtaccttgatccagttaatgttaacaaataaaaaattatgaaatgttattttctaggtatggatagtagtggatagtagtagatctgttgtgtagtggagattacttaggaagaataaatttcaactttaccaagaaagtactacattaattgcattagggaattgtgaattgcattaggaaaatgctcattcttctttcaatagccaatatctggatactatactctcttgaatttctaagatttgcatccaatattctataattagctttccagtttattgaatgatttaatttacatacaaatattttctaatatattccctgtaaaatagtttaaaaaattaaacgtttctctaattacacattcctccctagctgatacaatttcatttatttgcttactttcccagctggacattcagaaattttttactcatattgtcttcaattgcatatttgccagtttctagcttttattttattttttatatccattttgttctaggtgtggaaattgctaagtgtagagcttaataatatttcaccagaaagatatgtgtctaactccctcatgaagaaatagtatgttaccaacactcccaaatttcctttgatgtcaaaaagcattatttttctcgagtctttttttgtgttggtatgatatataaacgaaatcatatacacatttattttttcatttagatactttccttcagtattatgattgagacattaacctcagtttaagtatttatgtcattttcattgctagttcattgtaagaagcacaccttttatttatctattcccttaatacatattcctgtttccagtgttagattaatgcaaataaggctatcgtgagcattcttttacatgtttttcagtgtacaaatatatgctgagagaggaattactgaatcacagaaagcagtatatgcagctataatagatattaccatatccaccaaacgtttagcatttcctgtttcattttattcactctgggggatgtatagagatttcacattacattataatttaatttctctaatgtctaatgatggggagcacctttttcatgtttttattgtcaatttggctatcttctttttctaaatgcatgttcaagtatttcatccatttttattggtcttctttttttactggtttaattgaattctttacatattatggatatgagctctttgtcaattttatatgtatgcttatattcactcctacttcactctgcagcttgctttttatttttatgcttttaataatgaacataatttctttattttaataaatatcattattttt

SEQ ID NO: 1170 - DNA, 3547 bp, Homo sapiens
ccccagggggtgtacggaaggcccctgcccctttccgcccagcctcagagcgcttcgcggccaccacggtggaagagatcctggccaagatggagcagcctcggaaggaggtccttgccagccccgaccgcctgtggggttcccgcctcacctttaaccacgatggcagctcgcgatatggccccaggacctatggcacgaccactgctcccagggatgaggatggcagcaccctcttcaggggatggtcccaggaggggccagtaaagtctccagcagagtgccgggaagagcacagcaagacccctgaggagaggagccttccttccgacctggccttcaacggggacctggctaaggcagccagctcggagctacctgctgatatttccaagccctggattccctcaagtccagccccctcctcagagaatggaggccctgccagcccaggcctccccgcagaagcctcaggctcaggccctggctctccccatcttcacccgcctgataagagttctccctgccactcacagcttctggaagcccagagtcctgaagcttcccaggcttctccctgccccgctgtgactccatcagctccaagtgcagccctgcctgacgagggctcccgccacacccccagcccggggctccctgccgagggggctccagaggcccccagacccagcagcccaccccctgaggtcttggagccccatagcctggatcagccccctgccacctcaccccggcccctgatcgaggtgggtgagttgctggatctcactcggacgtttccatctggcggggaggaggaggccaagggtgacgcacacctccgccccaccagcctggttcagcgccgattctctgaaggtgtgctccagtcacccagtcaggaccaggagaagctggggggctcgctggctgccctgccccaaggccaggggagccagttggccctggatcgtccctttggggcagagtccaactggagcttatcacagtccttcgaatggaccttccccacgaggccctcgggtctgggcgtgtggcggctggactccccgcctccctcccccatcactgaagccagtgaggccgccgaggctgctgaggctggcaacttggccgtttccagcagggaagaaggagtgtctcagcaggggcaaggggctgggtcagctccaagtgggtcaggaagttcctgggtgcagggggatgatccaagcatgtccctcacccagaagggcgatggggagagtcaacctcaattcccagctgtaccccttgagcccctgcctacaactgagggcacacctggattacctttgcagcaggcagaggagagatacgagtcgcaggagcccttggctggacaggagtcccctctccccctggctaccagggaggcagccttgcccatcctggagccagtcctggggcaggagcagccagcagcccctgaccagccctgtgttctctttgctgatgcccctgagcctggacaggcactgcctgttgaggaggaggccgtgaccctagcccgggctgagaccacccaagccaggacagaggctcaagacttgtgtagggcatcccccgagcctccaggccctgaaagcagctcccgctggctggacgacctcctggcttcaccaccacccagtggtggcggtgcaaggcggggagctggagctgagctgaaggacacacagtccccaagtacctgctctgagggactccttggctggtcccagaaagatctgcagagtgaatttgggatcacaggagacccacagcccagcagtttcagtccttccagctggtgtcaaggtgcttctcaggactatggccttgggggtgcaagccctagaggagacccaggtctcggagagagggactggaccagcaagtatgggcaaggagcaggggaagggagcaccagggagtgggccagcaggtgtggcatcggccaggaggagatggaggccagcagcagccaagaccagagtaaagtgtctgccccaggggtgctcacagcccaggaccgggtagttggaaagccagcccagcttggcactcagcggagccaggaggcagatgttcaggactgggagttcagaaagagggattcccagggcacttactccagccgggatgcagaactccaggaccaggaattcggaaagagagattcactgggtacctacagtagtcgagatgtaagccttggggactgggaatttgggaagagagattctctgggtgcttatgccagccaagatgccaacgagcagggccaagatttggggaagagggaccaccatggtaggtacagcagccaggatgccgatgagcaggactgggagtttcagaagagagatgtgtcactcggcacctatggcagccgggctgcggagccacaggaacaggagtttgggaagagcgcttggataagggactacagcagtggtggcagctccaggacccttgacgcccaggacagaagctttggaacgagacccctgagctctgggttcagccccgaggaagcccagcaacaggatgaggaatttgagaagaagattccaagtgtggaagacagccttggagagggcagcagggatgctggccggccaggagagagaggatccgggggcttgttcagtcctagcactgcccacgtgccggatggggcactcgggcagagagaccagagcagctggcaaaacagtgatgctagccaggaggtgggagggcatcaggagagacagcaggcaggggctcagggccctggcagtgctgacctggaagatggggagatgggaaagcgtggctgggtcggtgagtttagcctcagtgttggcccccagcgagaggcagcatttagcccagggcagcaggactggagccgggacttctgcatcgaggccagtgagaggagctatcagtttggcatcattggcaacgacagagtgagtggtgctggctttagcccttctagcaagatggaaggtggtcactttgtgcctcctgggaagaccacagctggctcggtggactggactgaccagctgggtctcaggaacttggaagtgtccagctgtgtgggttctgggggctcgagcgaggccagggagagtgccgtgggacagatgggctggtcaggtggcctgagcttgagagacatgaacctgaccggctgtttggaaagtggagggtctgaagagccggggggaatcggagttggggagaaggactggacttctgatgttaatgtgaagagcaaagatttcatcactagtggttgaaggttttgtcccttcctctcctccttccctctccctctctgcttcctcctccagcctcccttgggttttcttttgataccaatttatagcattttttataaaagcctttgatttttataatgggtgggactgtatccctgcctcaccccaggtctccgtctgccccgccaggtaccccacagagaccaatgacattttgccacttgaaacaataaataaagttttttggg

SEQ ID NO: 1171 - DNA, 3511 bp, Homo sapiens
aaaaaaaaaaaaaaaaaggcccatgactgagccccgtcgccgccggccgaggaatgggctccgggctctggtaggaagcgctgggagcggggggcgcttttaaaacaccgatctgggttttttaaaaacctcctttgaaaaaataatggcaaactcgacggggaaggcgcctccggacgagcggagaaagggactcgctttcctggacgagctgcggcagttccaccacagcagagggtcgccttttaaaaaaatccctgcggtgggtgggaaggagctggatcttcacggtctctacaccagagtcactactttaggcggattcgcgaaggtttctgagaagaatcagtggggagaaattgttgaagagttcaactttcccagaagttgttctaacgctgcctttgctttaaaacagtattacttgcgttacctagaaaagtacgagaaagttcatcattttggggaggatgatgatgaggtaccaccaggcaatccaaagccacagcttcctattggtgcaattccatcttcctacaattaccagcaacacagtgtgtcggattatctgcgtcaaagttatgggctgtccatggactttaattcgccaaatgattataataaattggtgctttcactgttatctggactcccaaatgaagtggactttgctattaacgtatgcactctcctatcaaatgaaagcaagcacgtcatgcgacttgaaaaagatcctaaaatcatcacctgtcccagctactaataaccaagtccctactgccatgtcgtcgtcctctacccctcaatcacagggaccacctcctactgtcagtcaaatgttatctgtgaaaaggcagcaacagcagcaacattcaccagcacccccaccacagcaggtacaagtacaagttcagcagccccaacaagtacagatgcaagttcaacctcaacagtcgaatgcaggagttggtcagcctgcctctggtgagtcgagtctgattaaacagcttctgcttccgaaacgtggtccttcaacaccaggtggtaagcttattctcccagctccacagattcctccccctaataatgcaagagctcctagccctcaggtggtctatcaggtggccagtaaccaagccgcaggttttggagtgcaggggcaaactccagctcagcagctattggttgggcagcaaaatgttcagttggtcccaagtgcaatgccaccctcagggggagtacaaactgtgcccatttcgaacttacaaatattgccaggtccactgatctcaaatagcccagcaaccattttccaagggacttctggcaaccaggtaaccataacagttgtgccaaatacgagttttgcacctgcaactgtgagtcagggaaatgcaactcagctcattgctccagcaggaattaccatgagcggaacgcagacaggagttggacttccagtacaaacgcttccagccactcaagcatctcctgctggacaatcatcatgtactactgctactcccccattcaaaggtgataaaataatttgccaaaaggaggaggaagcaaaggaagcaacaggtttacatgttcatgaacgtaaaattgaagtcatggagaacccgtcctgccgacgaggagccacaaacaccagcaatggggatacaaaggaaaatgaaatgcatgtgggaagtcttttaaatgggagaaagtacagtgactcaagtctacctccttcaaactcagggaaaattcaaagtgagactaatcagtgctcactaatcagtaatgggccatcattggaattaggtgagaatggagcatctgggaaacagaactcagaacaaatagacatgcaagatatcaaaagtgatttgagaaaaccgctagttaatggaatctgtgattttgataaaggagatggttctcatttaagcaaaaacattccaaatcataaaacttccaatcatgtaggaaatggtgagatatctccaatggaaccacaagggactttagatatcactcagcaagatactgccaaaggtgatcaactagaaagaatttctaatggacctgtattaactttgggtggttcatctgtgagcagtatacaggaggcttcaaatgcggcaacacagcaatttagtggtactgatttgcttaatggacctctagcttcaagtttgaattcagatgtgcctcagcaacgcccaagtgtagttgtctcaccacattctacaacctctgttatacagggacatcaaatcatagcagttcccgactcaggatcaaaagtatcccattctcctgccctatcatctgacgttcggtctacaaatggcacagcagaatgcaaaactgtaaagaggccagcagaggatactgatagggaaacagtcgcaggaattccaaataaagtaggagttagaattgttacaatcagtaaccccaacaatgctggctgcagcgcaacaatggttgctgtgccagcaggagcagatccaagcactgtagctaaagtagcaatagaaagtgctgttcagcaaaagcaacagcatccaccaacatatgtacagaatgtggtcccgcagaacactcctatgccaccttcaccagctgtacaagtgcagggccagcctaacagttctcagccttctccattcagtggatccagtcagcctggagatccaatgagaaaacctggacagaacttcatgtgtctgtggcagtcttgtaaaaagtggtttcagacaccctcacaggttttctaccatgcagcaactgaacatggaggaaaagatgtatatccagggcagtgtctttgggaaggttgtgagccttttcagcgacagcggttttcttttattacccacttgcaggataagcactgttcaaaggatgccctacttgcaggattaaaacaagatgaaccaggacaagcaggaagtcagaagtcttctaccaagcagccaactgtagggggcacaagctcaactcctagagcacaaaaggccattgtgaatcatcccagtgctgcacttatggctctgaggagaggatcaagaaaccttgtctttcgagattttacagatgaaaaagagggaccaataactaaacacatccgactaacagctgccttaatattaaaaaatattggtaaatattcagaatgtggtcgcagattgttaaagagacatgaaaataacttatcagtgctagccattagtaacatggaagcttcctccacccttgccaaatgcctttatgaacttaattttacagttcagagtaaggaacaagaaaaagactcagaaatgctgcagtgaaaaataattccacttacacagtgggggactcaaagtcagccacatttcacatactgttactgaagaaagcaccaagtcttaatggaacaaagaccatagaatgaattattttatctcctcccatgatgctgagaggaagcttcgtattctgatctctgagtgaatccctttgttctctgttt

SEQ ID NO: 1172 - DNA, 2008 bp, Homo sapiens
actcgccggtcgcagtgaaaaggcggaggcggcggcccctccggctcccactgcctcccccgccgcaccccctccccaccttccgcacccgccaaacttgatgtgaccctggcccgacgcggaggctgcccctctcactgccccgtgggtcccccgccacccgctccgcacccgcgagcgcaccgctccccgcgccccttcccacttcccgcggggccggcgccgcgctcgccctcgcgttccttcccgccgccccctcccccgcaccatgagcaacctgaagccggacggcgagcacggcggcagcaccggcaccggctccggcgcgggctccggcggcgccctggaggaggaggtccggacactgtttgtcagcggcctccctgtggacattaaacccagagaactctacttgctcttccggccgttcaaggggtatgaagggtccctgatcaagctcactgcaagacagcctgttggttttgtgatctttgacagccgtgcaggagcagaagcggccaagaatgcgctgaacggtattcgctttgatcccgaaaatccacagactctgaggctagagtttgccaaagccaacaccaagatggccaagagcaagctaatggcaactccaaatcccagcaacgtgcaccccgccctaggagcacacttcatcgcacgggacccctatgacctgatgggggctgctctgatccctgcatccccagaggcctgggccccctaccctttgtacaccacagagctgaccccagccatctcccatgctgcgttcacctacccaactgccactgccgctgccgccgccctccacgctcaggtgcgctggtacccttcctctgacaccacccagcaaggatggaagtaccgtcagttctgttagtttttcagtctggtcaccggggaggtggttctggtaatctgtggtggtgccgggacaggcgccccgagttcccactgcccccgggcggcctgcacagagctgctgccctccagagactgtgaatcccaagcctgactcagtggactgcttcctgttcccctccctcctcttcctcaccttgttctgcaccctcaagcctttctccaatgcctcccaggaggatttggggactttctccctggggcgcccagatccagctcggaggcctcactgggacctggcaaggcctgacctcccgcccaaacttgcttctgtagctccccctcgaggaagtgaggtgtttaattttgcatgttttctggcatgaattaagacacttatacttgtatatatgagtgtacagtttgttctcacactgtcaccatagcgacaggtcctggctcccagtggttcatcctgcctgcccctctctcctcgccccgcccctgcacccaccccgcttcagggaggcccaagttccgtggccccacacgcttccaggctcagctcccacctccacccaacagatagatggggtttgctttttcatttcacatggggctcctccgctcctgccttctcggatgggccaacagtcgtaagaaagccctctctgcccgttctgttcacctctccacagcgcaccccgcccgccgctgctcctcattctttccaaacctcgaaaccaaccaaaacgtgagaagtatttttgtaccctgtgtaacaaaatatttatgcatcataaaggatttttcatgtgcgtaccattaattattaaagcgacctcgttcgccctgtcagataagtttaatgtttagtttgaggcatgaagaagaaaagggtttccattcttcagcagtacgcctttgtgtctggcatttgtttaagaaaatgaaatgaaggaaacactgtgcaatgttttttgttttgagcatatcagtgctttactgtcagccgcagctgtgaccgtctggccatttcagacttgggagatgaggcggctgttgtcattgctgatcctgtgaaaatgtgaaactggataatatatgaaatgcaaaataaaacaaaacc

SEQ ID NO: 1173 - DNA, 3636 bp, Homo sapiens
catataaatgctaccttttagattgtaagtccgtcagcagtcttgtaattattgctttatgcagttgtcttttaaatcacatagaagaagaaaagatgtacaaacagaaatgagtttctgctgtctctgttgctggctttgcagttgtcttttttggtgctctttgtgtggatttgattgtggtgtcttggacttcagcctcaagtatttcttgtaggacagatcttctagcaatgaattctctttgtttttgtttatctgagaatgttgtaatttttccttctcttctgaagaataattgtgctggatatggctgacttggttggccctctttttctttcagtcctctatagatgtcattccactgcctctggcatctgtggtttccatggcgggagcaccgcaccatgtctcagtctctttttagcttctcactgtttgactgtggtgtgtctaattgtggatctttcagtgtgtcctacctgcagttctttgagcttcttggatatagaggttaatatttcttgtagtctgattgtttacgtcttctcttcacttattgatcttctgcctagttatattgatattgaatgtgggtattgaatccttcggttttgtcagcttcatgttcagccagtgactggacaggggacccctttaagtgctttgcaccagtaactctcatggttctgctgacacacagttgatgtgtggtgagtatgccttcagcgctccattgtggttctgcaaatttgggaaattttaggttgtcgtttctcgaaatattttatgtccatgttctcttcccccacttggactccagctacgtgtgttgatgtggagctgggcacagccttggaggcctccttgactttcctttattccggaattttttcttcttctcagaatgggtcatctcagtttacctatcttcaaggtcacagatgcttttgccaaacaaaacctgatgtcaagctgctctagtgaatttttcatttcagttattgtacttttctactccaaacttccatttggctctctcctataatttctgtatctttactcatattctttgtttagtgaaacattctcatactttaattctgtagacacagtttcctttagttatttgaacatatgtgtagaagctgatttaaagtacttgtctaagccgggcgtggtggtgtgcgcctgtagtcccagctgcttgggaggcagaggcaggagaattgcttgaacccgggaggcggaggttgcagtgagccgggatcgagccattgtactccagcctgggccacagagcgagacgctttcaaaactagatagatagatagattagatagatagatagatagatagatagatagatagatagatagatagataggataagataagatagataggtgacttgtctactaagttcaacatcagggcttattcaggggaagttcctattgatgaccttttttcccatgtcagagccaaggaaataacatactctttctttgtggtctcatatatatgtattttttgaagactggacactttaataatgtgctgtgcaactctggaaatcagataccctctccacgagtttattgttgttctgttgctgttaccttttgtttagtgtgtgttctggactaatttgaagtgtccacctcatcagcttcatgttcagccagtgactggacagaggacccctttaagtgctttgcaccagtaactctcacggttctgccgacacgcagttgatgcgtggtgagtgtgccttcagcgctccatcgcggttctgctgacacgcagttgatatgtggtcagtgctccagcaggcagctgccaactgtgcctttgccttcacttcttacttgcacacagccacaaagccagccagaggtgagggccagggcagctcaggttcctctcgggcacacacacagctctgtgcctgtgtgggcacagccttccatgcctccaggagtgtggcagagcttctcagcggccactgtgggcatctcgttcctcagatcttcctttcatgagttatgtagttgaattatcaatctttcttggcttctaagttttgtgttctagttagaatgctcttcccccttaaagattatatttgaaatgttttccatgttttcttctagtacttttatgggtttcattttcatattgaaatcattgatctacttctagtttttgatacaaaatgtgagccaggaaacccagtttttaaatttcaaatagctgtccaggtgtccctgcacctcttatgcatgagccctcgctttgtgccaatgtggagtgcccgcctgctcacacgtgcccatgtggagtgcccgcctgctcacacatgcccatgtggagtgcccgcctgctcatgtgcccatgtggagtgcccgcctgctcacacatgccgatgcggagtgcccacctgctcacacatgcccatgtggagtgcccgcctgctcacacgtgcccatgtggagtgcccgcctgctcacacacgtgtccatgtggagtgcccacctgctcatgtgcccatgtggagtgcccacctgctcacatgtgccgatgtggagtgccgcctgctcacacacgtgcccatgtggagtgcccgcctgctcacacgtgccgatgcggagtgcccgcctgctcacacgtgccgatgcggagtgcccgcctgctcacacgtgccgatgcggagtgcccgcctgctcacacgtgcccatgcggagtgcccgcctgctcacacgtgccgacgcggagtgcccgcctgctcacacgtgccgacgcggagtgcccgcctgctcacacgtgccgacgcggagtgcccgcctgctcacacgtgccgacgcggagtgcccgcctgctcacacgtgcccatgtggagtgcccgcctgctcacgtgccgatgtggagtgcccgcctgctcacacgtgcccatgtggggtgcccgcctgctcacgtgccgatgtggggtgcccgcctgctcacatgtgccgacgtggggtgcccgcctgctcacacgtgcccatgtggagtgcccgcctgctcacacgtgccgacgtggagtgcccgcctgctcacgtgcccatatggagtgcccgcctgctcacacgtgccattgtggagtgcccgcctgctcacacacatgccgatgtggagtgcccgcctgctcacacgtgcccatgtggagtgcccgcctgctcacacgtgcccatgtggagtgcccgcctgctcacacacgtgcccatgtggagtgcccgcctgctcacacgtgcccatgtggagtgcctgcctgctcacacacgtgcccatgtggagtgcccgcctgctcacacaaagccctggcatggtggttctgtaggtttcctgtcctgccggccgagtcagacgctgttaccgtacattctactcatggtggctttttaatacgtttttatgtcaaggatcccttttatatttctctgcacctcgagataacgtaggaatattagggatgagatggaagaggagagggtgtttttgtaaaattgaattcaggactgatttgttagcctggtgcttttcgtatcagaccttttaatgaattttcatggatgctgattaaaagacaaacctgtg

SEQ ID NO: 1174 - DNA, 2426 bp, Homo sapiens
cgagtcagcctccgtctccttgagggccccggccactgtcagccctggagtctgaaaacaaaacgtgtccatcccggagtccctccgtcacagatgtcttcatctaggtggcagctggttccgcatagggtctgttgacctgttacccccactccgcatagggtctatttgcctgtgttaccctggctccgtgtagggtctgtttacctgtgttccccccgctccgcgtagggtctctttgcctgtgttccccccgctccgtgtagggtctctttgccttgttccccctgctctgggtagaatctgccctagagactcgcggggcctccacctcataatgtctgagccgagctcagagctgtgccctctgcggcctcgtctgttgcaggggagcaggcaggtcccaggaagtgcgtgtccttcctcccgcaagcagacacgtgctgcctcgaagcctcagcagccagccgggcaggcatggcaaacaacaccccagtgtctcgggggcaggcgcagtgtgagctacatcctctgctggggccgtcttgggagtggttctccaggtgccagggcctggtcagggaagtccggcctcagctcagcgtggccctggagccacccacaaggcacacgggagctgggctggggtggcaggtggggcatcggcaggacgtttgtggggtgagggagtgcgggtgtttggctgggagcccagagggtgttgtgtatcactcactgaggctggacaagagggaaggcggagaagcctggccacatgtctcctgagggctccaggcagggccctctcacctgctgccagggtcccagcccgcaggagcttcccgtccacctctgaactcacggtccacatggcgctggagcgtcgggcaccatctacagggcttgaggccagcagcctagcctctgggtccactggggcaggcaagacatgcaagaaagcacttcagccaagcagaagggagccagctggacgaggtgcgccaggccatgggcatgctggccttcccgcccgacacgcacatctccccgtacaaggaccttctggaccctgcacggtggcggatgctgatccagcagttccggtacgacaactaccgactacaccagctgggaaacaattctgtgttcaccctcaccctgcaggccggcctctcagccatcaagacaccacagtgctacaaggaggacggcagctccaagagccctgactgccctgtgtgcagccgctccctgaacaagctggcgcagcccctgcccatggcccactgtgccaactcccgcctggtctgcaagatttctggcgacgtgatgaacgagaacaatccgcccatgatgctgcccaacggctacgtctacggctacaattctctgctttctatccgtcaagatgataaagtcgtgtgcccgagaaccaaagaagtcttccacttctcacaagccgagaaggtgtacatcatgtaggccccacgtcgtgaagcgcacgcctcggggacgggctgcagtgggcggggaggccacgccttcctcctgtcccacgctccagcctgccgcggcgtttctgtttcttgcgaccaaagatccgtgagcaacgataaatactcttaggaagagagaaaataaggtttcataagtttgtacttgaaaacatttggattggtaggattttgtaacacgtcaaccatttgatgcttctgaaaagtactttcaacttgcgaaggaaactcttctttaaagactgacctaaacaccgagggaaacttaagaacgtttaaaatataggagtccgtgatttccctgtgttttcagtttctttccttctgtgaacgatgagacttggagaacgggctggtccttcaccacttcctgttggccctggcctggccggggaaggtggcagcggcaccggactgacctgcagtgacccgcgatgccgcgccacgagggacacttatggcttcattcgagagctgctgccaaaacgcctggcgccgccaccgtcgggggctggcttcgaggacgcccgcctgcctcgcgggtcgtgtccgcgggactgtgttcgtacgtgcatagtttcgatatcacatcgcggggctgtgttcgtagctgcgtcgtttcgatatcacaccctctgtgtgccgccttacttcctgcttcgagaatgtataacgtggaaatccacgggaccaaatttctgcagaggccttgccggatggttccataactgtagagtctaattgctatccattacagaaattaatcgttcagttgaaagaagtactgatgacttttcaaaacaaatgaaccaccgtagctgacagagaaccgtatcgtagaggtttgtagttagtgcttatttttgcatgttgatgttgactagctaataaactgtaaatgtaaaccatgcg

SEQ ID NO: 1175 - DNA, 2331 bp, Homo sapiens
gagaaaatataattttgaattttccgtctgttggattggcagtccctttcagctttacatcatctacagatgtgttaggtatgttctctgggtcttctaagtcaccgatggagttcttgaatagttcagatccaaagacagcgtcctgtgaaaccctgctggaaacttgtctttctctctctcttttttttttaagacagtatcttgctctgtcgcccaggctggaatgcagtggcatgatcttggcacactgcagcctctgcctcctggactcaagagatttctctcacctcagcctcttgagtagctgggactgcaggtgtgcgtcaccaagcccagctaaatttttttgtagagatatggtttcaacattttgcccaggctaggagactcatctcttgattccattcagtactgtgtggatttggataggtcatctaattataaaatcatctagctcacattttctcctgtcttcttccttttagaatttaagcttcatgagaatagaactctctctctctatctctctttcattctctcatatatcccaagcatctaaaacatggattgaagcatagtgctcaataaatgtgttttgttgttgttgttgttgttgttgttgttttttgagacagagtctcgctctgttgcccaggctggagtgcagtggcgcagtcttggctcactgcaagccctgcctcccgggttcacgccattctcctgcctcggcctcccgagtagctgggactacgggcgcccaccaccacggctggctagttttttgtatttttaatagagacggggtttcaccatgttagctaggatggtctcgatctcctgacttcgtgatccatctgtcttggcctcccaaggtgctgagattacaggcgtgagccaccgctcccggcctcaataaatgtttttgaataaatgaatgaaggatagccagtcatggtggctcacgcctgtaatcccaccattttgggaggccgagttgggctgatcacttgagctcaggagttcgagaccagcctggtgaaccctcatctctacagaatgtacaaaaattagccaggcatggtggcatgcgtctgtggtcccagctacttggggagctgaggtgggaggagcgattggaccagggaggggatgcggaggttgcagtgagctgagatcgtgccactgcgctccagcctgagtgacatagtgagacccatctcaaaaaaagaaggatagatatgaagaatttgtcatgccttgttgaaaacattatacgttgtcttcatggaattcctccttattgtaaaatctaatttataccaacaatatactgtctggctttcttgcagaaaaggaagtaaatgagctgatggaagagctgtttgaaactgtgaataatgatcctcgagtgagaacatgggattttaagtcagttctccagcaagatgtgtcatttggtctctgtgatgctccctctaggagagggggtctgactgaaccaattctccttttagtctacctgggaaagaatataatgacaagggaattttgctaactactagactcttgattatatacatgtatgttgttcttattaacattttccttgaaacttctttttgtttgagggggttcttgctccatcacccaagccagagtgcagtggtgaaattacagctcacagcggccttgaccttctaggctcaagcggtccttcgtctaagcctcctgagtagctgggacataccaacacacccagctaattattttatttgtagagacggggtcttgccacattgctcaggttgttctggaacttctgggctcaagcaattttcctgccttgggcctcccagtgctggaattataggtgtgagccagcatgcctggcccctggaaaacttttgatgacttcccctactgtcatttggtgtgtccttaaagattgtcaactagttttaaactactttgtgtacaaataattacctttttcataaatttgtttcaaaagatttttcattttaagagattgatcattttgaggctgggtgcagtggctcacgcttgtaatcccagcactttgggaggccacggcaggtggatcatctgaggtcaggagtttgagaccagcctggccaacatgatgaaaccctgtctctattaaaaatacaaaaattaggcatggtggcgggcacctgtagtcacggttactgcagaggctgaggcaggaaaattgcttgaacctgggaggcggaggttgcagtaagcccagattgtgccactgcactccagcctgggcaatagagcaagactgcaagactctgtctc

SEQ ID NO: 1176 - DNA, 2732 bp, Homo sapiens
aaaaaagtacaaagaaaggaggtagtgtcatttggaagaaccttaaatatgcagtgtcactgaagtcaggggaagaaaagaatttcacggagaagggcgtgttcaatgcgtggaaggctgcagagtagataatgaagattcaaaaaggcaaatctgagaggggttgcagtacagtcgtgtggtttctagactacacggcgtttcgaaagtgggtaaaggcagacatcacgcgtcttcaagaagttcagaagaaagaggaagagtgttgtcatagtgggtaaggtcaagtatctttgattgcaaaacaacagtcgccagaagagaaggggctaaaagttggaacgaggaagaaggctcggagaaaggtgtcagacaaagcgggattagcaagaagctgttagggctggtcctaccgggatgagagaaaggcgcagaggccagccgagtggaaagagcagcggtgacgaaccgggttccactcagacgtccgacacttctcgccaaggggccagcgcggacagcagcgcctcccggggacctctgagaagccctgtttctgcgcggctccgcccgacctccaaggccgacctcggaggctcagagacccaggccccgttggcactcaccccactgccacgcggcgccagcgccggactggccgcacgataagcgcgtcccaggctgccgccaaccggccctcgggggagacgggtcccgggggcgcaggcgcgggccccagacacagcgagctccagagagagcgcagcgccgagcctggcagctctggctccagcaggaagacgcagcccacggccagcgccaggaagcccgcgtacgcggagccgcgccacagcgccatggggacccaggcgccgcacctgcgcgaaccaactcctttcctagcccgcgcctcttccgggctcggcgcgcgccgatgtcgacacaagcgctacgtcacaagggtgcgccacggggccccccaaggggcggggcgacgggcggcgccaggacggagcgaggggggaccccacgcctcagtcccaggcctggcactgcggtgttgccgccccggaggaggtgggacaacggcggttgtgccagtccgggcgctgcacccccttcccggaactctaatcgtatccccaaatagagggatgggaacacatttgctttcgcagtaaaacgaaacggacagattgtgaagaagcggacaaacctcgcgttaatattcgaaccagtgggtgtccccattggcacggatcacacccccatcttttaatccctccctccgcccgtgtcccctcatttgctagacttgtcctcttccaggcctagtgctcggcgcttctgagaggaataggctcacagaatagcggcgctgccgagacccctggggtacgcgaggcagggggattccgcccctttggaaggtggccgagaccctcagccactaaaggacttcgtcgagacaggagagcccgcagagatcgttctcttctggataaccagattattccacaatcaaactttaacccttttgggggcgctgttccctttaacaaactctggaaaatgtacacaatcttgtgcacaacacgagagttatggacctgggttgagaaacgctgctttcttttgttcccccttggtgacatcacttaaacccagccctctcttcgctgatacttttctgtgcatgaggctaggttgagagacagtgaagctaggctgggtaccagctcattctcatcagccacaatgcccggcctagtcttgttccctggtttgtttccacttttccaattctctcggctcctgaccttggctttgtgtccagttttccactgtgaccctgacctttggacttggcagcgaaactttatttccctaactttgatcttgggcattagtcttcattctcctcagccccacctcatcagaacttccccatcctggtcatctaccttcccgcagttcatcctacccagcctacctgaccatgccatccctttcgacaaagatattcacacaggaacagatttgggctaccttggaaaagaagccaaagagccagtcagatctttatgaagccatgaaagccatcttccctagagttgcctgtcacttctctctccttagggagacatgtcagtcagttcctagagaaactgcttcttctcacaaccctcagctgtcaggtttccctggcacccagaggggactgagccagcagctgacctgaaaacagcgagtctgctgactgtccagcgatcatttccctctattgagaattttaaccaagtttctgttgtctgtagttatttgatattggctgtggacccacaaagtcacacaaggctaaagggtggacagcacggaagaggcagtacatcttaacaaaatcagggttctggatgaagggaggggtggtgaatggttgctgcaatcaacagttcatacttcaatggaaagaaggtgggatttgattcctggctgcaaatcttcactctgtcacctgctatctgtgtgccctcagggtctcactttgtctcccaggctggagtgcagtggcgcaatcaccactcactgcagcctcacctaccgggctcaagtgatcatcccacctcagcctctccagtagctgcgaccacaggcacgtgccactaaatgattattttttcaagggagaaatcatgcctgtcatacaaataaaaaatgaacaagtgtaaaag

SEQ ID NO: 1177 - DNA, 2213 bp, Homo sapiens
tttgagccactgcatcccctagcggcgcccgggtggctgcagccgctggcccgaaaatgctgctcgggcgagcaggggtcaggcgggaaaagaagactccaaatccactctctgctcgcccccagggcaatgctgccaggagagggagtgggttcccccgcaggctatcccaccgatggggctgagagcttaatttggggttttatttgaattggagacattgttccctcttcgctcctctaccccataaaattccctacaaatgcaaaaattcgagatagaagaagccgtccctgaaagtaagttctgaaggattcctttcatgcggtgaaggaacaacaacaatattcaacttcaccttggtgtgtgagggtcgtcgtgttttaaaacactatccctgtagaaagattagtgaaatgtattggaagaagtagtggaaacgtgaatcttcctggtctcgcgtttggatcttctttggagtcctcaccttcttaaatctgatgtttgtttgaaatcagggctgaatttccatatataggacagaaagaaagaaccccaattttttaaagaaagctcccccccccccgccacgtttctcctgagcccacttggtctcccgttattaggcggcccagttaagaggcatcgattttcctttcattctctgaccactcgtctctcctgggccagccaggctgcccgcatcttctcctgctcacagcgctctctaaaccttttaattatttagttgctgtctaacattcaccggaaacctctccataaacaaggagaaacgaatgcacacgcatttttgctaagaagcccgggattaagatttaaggatacaagctgaaagaaaaaatgaaaaatgcttctccgcgcgtcaatcgaggggtggatgcgccacgcagcgtgagcccagctcacagccacgcgtaagaccaaaagctgccatgggttctgcgcgcggagacctcagagccgaagagagaagtccccgcgtcagaaacgctgcggatgccaggtcttgaaaatgctgacttctgaggctaagaattatttcaaagacaaaaagaaaagactggagcagccggcggagctcgggtggaggaaagcgaggaggcgaccaggaggatgccgccgccgccgccgcagggcccggggcttctgcagggcgcaaggcctccctcaccagggtaaggggctggcgatcaacctggacgcctgggaccttgggagcaagcatcccgcagccgagcaggcgacggcgcggccaccgcctagagaggagccggggcccggggcggcgtgcgggtcggcagcagccggcttggcctatccgaaaccccaggcctggaagcggctgctttaggcgtcaagttgagcggggtatgtgtgtcctcttggaaaaaaggtgagaaatggagccggactttctccactcggtaggggttaagctaccacacacacccccaaacacatgcccacgtgcaagtccctcccacccgccctcccaggggcgaagagaccctgtcccagtggaagtggggaaacccagtcgggtacagaaagcagaggccatggcgcagagcggaggcgcggctttctggggctcagccctagggctacagacccagggcgcggagatgctcgcggccgggccacccaccagagccaggcaaccggcgcttccaggcgagctccgcggggccgaggtgccgggagaagcggccccgggcgcccgcgcgctgcccgacctgggtaacaggcaaagcggagccccggggtcgaagtcctaaagttactaatcccgcggagggggagagagcgtgcctcgggccgcccggggcggtcatttgagcgtgtttacttaaagactttgcaagcagagcgcgcgcgaaatcgtcggatttccagcgaggcagcaaatatttgcaggcagaagaaagaagcggagccgagccgagccgccgagtccctccccccggagccccggagccccggcgcctgcctgggcggtcccggccgcgcagacagaaaagaagccgggaatctgcggggctggggggcggggagcgacaccaaaggccagaaactgcagcacggcccgaggccctggcgagctgggcctgggggaggagaagtcccttcccattccagctcgatcaatcttgctgggctgcgatcggtcaataaaaacggtgtgaagcggc

SEQ ID NO: 1178 - DNA, 2421 bp, Homo sapiens
catttgtgagagcaccaaacctttaccatacacaagagataaagaaaaaggcaagaagtttggttttagtctcttatggcgcagcttatctagaaaggagaagcccaaaacagaacacagcagtttctctgctcagttcccacctgaagaatggcccgtccgagatgaagatgacttggacaatatccctcgagatgttgaacatgagataatcaaacgaattaaccccattttgactgttgacaatttaatcaaacacactgtcctaatgcaaaaatacgaagaacagaaaaaatataatagccagggcacttccactgacatgctgacaatcgggcataagtatccttcaaaagagggggttaagaaaaggcagggtctgtctgcaaaacctcaagggcagggccattctcgaagggatagacacaaagccaggaatcagggaagtgagtttcagccaggaagcattagactggagaaacaccccaagctccctgctacacagcccatccccagaattaaaagcccaaatgaaatggtaggtcagaaaccacttggtgagattacaacagtgctaggttcccatttgatttacaaaaagcgaatcagtaatcctttccagggtttgtctcaccgaggaagcacaatatccaaagggcacaaaattcagaagacgagtgatctgaaacccagccagactggaccaaaggaaaagcctttccaaaagcctaggtccttggattcctcaagaatctttgatggtaaagccaaagagccatatgctgaacaacctaatgataaaatggaagcagaatccatttacataaatgaccctactgtcaaacccatcaatgatgacttcagaggtcacctcttcagtcaccctcaacagagcatgttgcaaaatgatggtaaatgctgtccctttatggaaagcatgttgagatatgacgtgtatggtggagaaaatgaggtaattcctgaagtcttgaggaaaagtcattcccactttgacaaattaggggagaccaaacagactccgcatagtctgccatcacgaggtgcctccttttcagaccgaacaccctctgcttgtagattagtggataacacaatacaccagtttcaaaatcttggccttttggattacccagttggcgtgaaccctttaagacaagctgcaagacaagacaaagactcagaagaattattgagaaaaggatttgtccaggatgcagagactacaagcctagaaaatgaacagctttctaatgatgaccaggccttgtatcagaatgaagtggaagatgatgatggtgcctgtagttcattatatctagaggaggatgacatttctgagaatgacgacttacgtcaaatgctgcctggccacagtcagtattccttcacaggtggaagccagggaaatcatttaggaaaacaaaaagtgattgagagatctctgaccgagtacaacagcacaatggagagggttgagtctcaggtgcttaaaagaaatgaatgctacaaacccactgggctgcatgctaccccaggtgaaagccaagaacctaacctctctgctgaaagttgtggcctaaattcaggggcccagtttggttttaactacgaagaagaacccagtgttgctaaatgtgtacaggcctcagcacctgctgatgaaagaatctttgattactatagcgcaagaaaagccagttttgaagctgaagtcatacaagacactattggtgacacaggaaagaagccagctagctggagtcagagtcctcagaatcaggaaatgagaaaacatttcccacaaaagttccaacttttcaacacttcacatatgccagtgttggctcaggatgtccaatatgaacacagtcacttggaagggacagaaaatcacagcatggcaggagatagtggaatagattctccacggacacagagtctgggatctaataattcagtcattttggatggactaaaaagaagacagaattttctgcaaaatgtcgaaggcacaaagagcagtcaaccactcacatctaattccttactaccgctaactccagtcataaacgtttaattttcttttggaaacctacttttttctttataaaaaggtagagcattattacagaatctttcaatcatgtaagaattgagtatataagaattgtctaaaggcaagcatatctatactattaaccacattacacattttgttctaattactggctttttttcctcttttggtgtcttaaggctttttgaagcttattttactgtgagtttattgggagtatatagattattttcgattaaaaagtggaattattggtccccttccaattgtaattatcttgaatttttatacattagtttctcaaatatatagaatgccaattt

SEQ ID NO: 1179 - DNA, 2440 bp, Homo sapiens
ttttagagtcatggaattacagtgcaaccttgatttttattcccctcactgctatgagtgtgggcaggtactggtttatatgttataacttccgttttatctgtgttgtgtagttgaatggcttaatcgttgagtggtaaaataaaagattatattccaatacaagaatcctggaaagatttatgtgaatgacattttaagtaggcgcatctttgctgtttcttgtattctcgccattgctctgaccactcccttgcttgccctgtatatatacaaaaacttgtaggtgtgcacgtgtgcttgtacttctgtcttccatttctatcttaatctcttaaacatattgcttaagccactaagatgtccttgtttcaagtaaatcgtcacattgtgacacctggtgtattgtattatagtttcatttcctctggtgcctgcagagctatctgtcattggcatcataactcggtttctcaggatagttttgatgtagtcagctcttcaactcatgaccttcccaaggttttaagtttagtgtcattcatgattttattatttgaaactcaataccaccatcaaaaagttagtgctctagacaatgaagccaaagcacaggcatcttaggtcagtgaaaaggatccagacataaattagccaggtgtggtggtacacagctgtggtcccagctacttgggaggctgaggtggtagaatcacttgagcccgggaggtcaaggctgcagtgagccatgatcatgctgatgcactccagcctgggttacagagcaaaaccttgtctcaaaaaaacccccagatacctagaagaaaggattcgataaatctgggtggattataaactgaactcttaatggtcattttaaaaaataagaaagcaagggtccagtttctttgaggtctttgaatttagacaagatttaactataaggccttgcatggattactaactataattaaattagctaaacttttctggttgctgtcaggcattgtattaagtattctatataaattatttaatcatcacagtgactgtgaggtgaaagtataccacccattttataggtaatgcagctgagatacagatatttggtatttgcccaggtcacatagtaagtagcagattatttgcaatcatctttgatgcagtcatcttccttgtgctcttaatcccactactatatgacttctaatttgtttcttagtatttatcccaagccctagactagattgcttatgaggtgtgatttcttaggaaaaacatcagttttggctggtttgccaagaaaaaaaaaggccaaattggtttttgtttattttttgtttgtttgagatggattctcgccctgtcgcccaggctggagtgcaatggtgcgatcttagctcactgcagcctctgcctctgggttcaaacgattctcctgcctcagcctcccgagtagctgggattacaggcgcccgccaccacgcccagctaatttttctatttttagtagagacagggtttcaccatgttggccaggctggtcttgaacccctgatcccatgatctgcccgtctcggcctcccacggtggtggtattacaggcgtgagccaccacgcccggccgcaaattgttttttgtttttttgttttttggaggattaatggtaatatactgtaaattcagtaaagcactgggcattaccagatacaccttagcactatgaataacatgaactatcattttagcagtttaagtgtaccttgtaatcagccctagggcaaacggtatcaaggtgttttatttccagaagtctcaaaatagactggaataaaaatttggtgaattcatcaacacagacaatgggtccacgtcttgcagctacagctgctgcagctactcctgctgtccgcaccgttccacagtataaatatgctgcgggagtttgcaatcctcagcaacatcttaatgcacagccacaagttacagtgcaacagcctgctattcatgtacaaggtcaggaacctttgactgtttccatgttggcatctgcccctcaagagcaaaagcaaatgttgggtgaatggctgtttcctcttattcaagccatgcaccctactcttgccggtaaaatcactggcgtgttgttggagattgataattcagaacttcttcatatgctcaagtctccagagtcactccattctaaggttgatgaagctgtagctgtactacaagcccaccaagctaaagagactgcccagaaagcagttaacagtgccaccggtgttccaactgtttaaaattgatcagggaccacgaaaagaaacttgtgcttcaccaaagaaaaatatctaaacatcgaaaaacttaaatatggaaaaagatatcaaaatataaaagaaggaaactgaaaaaaaaaaaaaaaaaaaaaaaaag

SEQ ID NO: 1180 - DNA, 2762 bp, Homo sapiens
gaagagaagtaggaggaaggcgccgccgtggccgcggccgcagtgctcgggcgcgacaagccatgagcagcgaccccgcgggcgacgccgccgtccctggcagccgctgagcccgacccccaggcagctcgccgctccctagcaccttctccagtcgacactctcgcgcccggagaaacatgattcccgtgacagaattccggcagttctctgagcagcagcctgccttccgagtgctgaagccatggtgggatgtgtttaccgattacctctcagtagccatgctcatgatcggcgtgtttggatgtactttacaggtcatgcaagacaagataatctgccttccgaaaagagtgcagcctgctcagaaccactcttccctttcgaatgtctctcaagcagttgccagtaccactccactgcctccacctaaaccatctcctgctaaccccatcactgtggaaatgaaaggcctgaagacagatttggaccttcagcagtacagctttataaatcagatgtgttatgagcgagccctccactggtatgccaagtatttcccttaccttgtcctcatccataccctggtctttatgctctgcagtaacttttggttcaaattccctggttccagctccaaaatagaacatttcatctccattctggggaagtgttttgactctccttggaccacacgggctttatctgaagtgtctggggaggactcagaagaaaaggacaacaggaagaacaacatgaacaggtccaacaccatccaatctggtccagaaggcagcctggtcaactctcagtctttaaagtccattcctgagaagtttgtagttgataaatccactgcaggggctctggataaaaaggaaggtgagcaggctaaggccttatttgagaaggtgaagaagttcaggctgcatgtggaagaaggtgatattctatatgccatgtatgttcgccagactgtacttaaagttatcaaattcctaatcatcattgcatataatagtgctctggtttccaaggtccagtttacagtggactgtaatgtggacattcaggacatgactggatataaaaacttttcttgcaatcataccatggcacacttgttctcaaaactgtccttttgctatctgtgctttgttagtatctatggattgacgtgcctttataccttatactggctgttctaccgttctctacgggaatattcctttgagtatgtccgtcaggagactggaattgatgatattccagatgtgaaaaatgactttgcttttatgcttcatatgatagatcagtatgaccctctctattccaagagatttgcagtgttcctgtctgaagtcagtgaaaacaaattaaagcagctgaacttaaataacgaatggactcctgataaactgaggcagaagctacagacaaatgcccataatcgactggaattgcctcttatcatgctctctggccttccagacactgtttttgaaatcacagagttgcaatctctaaaacttgaaatcattaagaacgtaatgataccagccaccattgcacagctagacaatcttcaagagctctctctgcaccagtgttctgtcaaaatccatagtgcggcgctctctttcctgaaggaaaacctcaaggtcttgagcgtcaagtttgatgacatgagggaactccccccctggatgtatgggctccgaaatctggaagagctgtacctagttggctctctaagtcatgatatttccagaaatgtcacccttgagtctctgcgggatctcaaaagccttaaaattctctctatcaaaagcaacgtttccaaaatccctcaggcagtggttgatgtttccagccatctccagaagacgtgcatacataatgatggcaccaagctggtgatgctcaacaacttaaagaagatgaccaatctgacagagctggagctggtccactgtgacctggagcgtattcctcatgctgtgttcagcctactcagcctccaggaattggacctgaaggaaaacaatctgaaatctatagaagaaatcgttagctttcagcacttaagaaagttgacagtgctaaaactgtggcataacagcatcacctacatcccagagcatataaagaaactcaccagcctggaacgcctgtcctttagtcacaataaaatagaggtgctgccttcccacctcttcctatgcaacaagatccgatacttggacttatcgtacaatgacattcgatttatcccccctgaaattggagttctacaaagtttacagtatttttccatcacatgtaacaaagtggaaagccttccagatgaactctacttctgcaagaaacttaaaactctgaagattggaaaaaacagcctatctgtactttcaccgaaaattggaaatttgctatttctttcctacttagatgtaaaaggtaatcactttgaaatcctccctcctgaactgggtgactgtcgggctctgaagcgagctggtttagttgtagaagatgctctgtttgaaactctgccttctgacgtccgggagcaaatgaaaacagaataacttatttttcgttaaagtttgactgaaacacgcttctaccaaatacagtataaataattaggtagtcttaatgcctttcctatttttttttccttttcacacaaaatgtacacaaagatcgcgtaaggagtatgtatttttaataaaaatttaattgtattttttcaatat

SEQ ID NO: 1181 - DNA, 2473 bp, Homo sapiens
aggctttctggtgtaggttccgacgcacctgccttccattcccgcctatccatttaggctgcgacctctggtagttctccactttctctaattctgagttacttcatccttaagaagtggtgcataactcacaccttgttaggattgtatgagtatgtgtgcatacaccgtttaaagcaatgtagggcacagagtcaggaaatgcaaaatattaagttgaggtcatttttcttttgggaggacaaggacagggcacgggctggggccctagagtagtaattagcgatgggcttttcctcccagccttccttttgggaaacgcagtgtgctaaaaaagtgcatgcagcccaggctgtggcctaggccgtcggttcccggccatgcctagctcctctgaggtcgcccttagtgaggacacgaggtgccctcacctctttcactctagacacctccagaacactcgccccccgcgcgccggagccccgggtcgccaccaaccgcccgcggagccagacctcccagctctgcgccccaggactgcgcggtgcaacctgcgcatgcgcacccgcgtgccgctgctgtttagccgtttccaaggctacgaagcccatcggccggggataagagagcaagaaaatgaagctcaagagcctcctgctccggtattacccgccaggaattatgttggaatatgaaaaacatggagaattaaagactaagtccatagatttgcttgatcttggtcccagcactgatgtcagtgcgttagtagaagaaatccagaaggcagaacctctactcacagcttcacgaacagagcaagtcaaacttttgatacagaggttgcaagagaaactcggccagaacagcaatcacacgttctatctttttaaggttctcaaagcacatatattgccactgactaatgttgcacttaacaaatcgggctcatgctttatcacaggaagctatgatcggacgtgcaagctctgggactctgcgtctggagaggagctgaacacgctggagggccacaggaatgtggtttatgccatagcattcaacaatccttacggtgacaaaatcgccactgggtcctttgataaaacttgtaaactctggagtgtggaaacaggaaaatgttaccataccttcaggggtcatacagcagaaatagtgtgtttatcatttaaccctcaaagcacattggtggcgactggaagtatggacacaacagccaaattgtgggacattcagaatggcgaggaagtttacaccttaagaggacattctgccgaaatcatctccttgtcatttaacacctcaggagacagaatcatcacggggtcttttgatcataccgttgtagtgtgggacgctgatactggaaggaaggtaaatatcttaattggtcattgtgctgagattagcagtgcctcattcaattgggattgctctctaatattaactggctctatggacaaaacctgcaagctgtgggatgctacaaatggaaaatgtgtggcaaccttaacaggccatgatgatgaaatactagacagctgctttgattacactggaaagcttattgcaactgcttcagctgatgatggagtctcgctctgtcgcccaggccggagtgcagtggcacgatcttggctcactgcaacctgcgcctcccaggttcaagcgattctcctgcctcagccgcccgagttatgtcacgttcttggtaatcatgtttgatgttatccggtgtgttcatctctttgatcactggacgtgatgctaaactatgcctgtgtcatctgctgtcaacaatatggaacagcaagaattttcagtgctgccacaagaaaatgcattgccaaactggaaggtcatgaaggtgaaatttcaaagatttctttcaaccctcaagggaaccatcttctaactggcagctctgacaaaacggctagaatctgggatgctcagactggccagtgcctccaggttcttgaggggcacactgatgaaatcttttcatgtgctttcaactataaaggcaacatagtcattacaggcagcaaggataatacctgtaggatatggcgttgactgaaggaagctggtcagtgagcaaccttgctagcaatggtaatcaagaactggaacttcacagacagcagctctcttaatatttcttatactttctctttttctgcaagtcaactatttctacaactgtccttcatttcacagatatgaccattaaacatgacaaagttatgccactccaatattattatttgatggcgatggcaggacacagcataatgtttggctaatgccaccagttatttcagttgtgtttgttttttaaaagcattatgatactgaaaaaggagaccagaacaacttaacaacgtgtctcctggattttactttgaagcctattgttataatttctgttgaataaagtgtttggagg

SEQ ID NO: 1182 - DNA, 1567 bp, Homo sapiens
tgctcctggggagtagaagcaataatgtatttctaatttgtgggtcccacttcggctatgcgggtttctagggggtgggggcttgggaccaaagccttgccccgcccctatgccccttgggggttttggctgtgtaagggggtgaaggactgcccctcccttccgagacccctccttcctggtttctgttcctttttcctggcagtgaattatgcaaagggggccggcaaaggaagggtaggtgggggaaagccaggtggaagcttgaaagactgggggactgggcctgtaaggaaggagccatcccagtccccctccgccctgctcccggcgctgagtcatggggtcgtggagaagggggcggggtggcctgattggctcgcctgcccctgggggcagtagaggggccccgcccagctaggggagccgctccgttccactcccctccctagccctccctccccacggccctgggcagggaatgtcttgttcccgccgctccctccccggggccagagggcagggcgggccgggcggcgtcctaccctcttctcctcctccccatctcctccccgcccaggtgcgagccggagccgccgccaccgctgccgcccctgactcacgccgcccccgggctggcgcagcgaagggtgtgggacagggtaaggggttggaagagccttgtggagagcgggcgagccggcgccatctggcggccatgctctgagtgggcgagcgccccccgcggccactggagcgagctgtcttcacgctcctcatccaccccagctggtgagcggcgcccccttgccaaggcagtgggcacagaacttctcgcttggccgcaggggaaggggctgcggagctgtgggaaagtgatccccttcccagatccttgccagccgggcttcctgtcaggcaggggagaataatccccactctgctcttaggattgaatccacccccattctgtacatagcctcttctgttggtcttgttgaaatctagtttcagatttttaactacccaattctgctgggggtgggggacaccccccccttcctcgctgggtgctggaccccttttgcagcctgggctctgccttgcactatttccccttcctggcctgacggctcctccccctccttaaaaggggcaggttcaggggcccggtgctcttcctcccttccatgcacccccatgcccatttgcacagctgcccaggtacccctaacagtggggaggggtcacagggagggggtagcgggaccagtccctgttatctatttaaaaagtgatgatgtaatatattggggtggcggggagatcgggttgtcctgggcctcatcttagcatttcaggtgatggggggagcccagggctggggagacctggggcccagccccagaaagtggggacaatgtggcctcccttctccctactttcggctttcccagtcagtgccttagggggagaggcactccccccctcctattcccttccccccaccccaactcccccacctcgggtgtaagcgacaggaagaaataataataatttaagattc

SEQ ID NO: 1183 - DNA, 1556 bp, Homo sapiens
actggagaggcagagaggagtgaccacagaggcagaggggtgggcgggctggcccatggctgagacctctctcccagagctggggggagaggacaaagccacgccttgccccagcatcctggagctggaggagctcctgcgggcagggaagtcttcttgcagccgtgtggacgaagtttggcccaaccttttcataggagatgcggccacggcaaacaaccgctttgagctgtggaagctgggcatcacccacgtgctgaacgccgcccacaagggcctctactgtcagggcggccctgacttctacggcagcagtgtgagctacctgggggtgccagcccacgacctccctgattttgacatcagtgcctacttctcctctgcggctgacttcatccaccgtgccctcaacacgcctggggagctggtccttactccctgccatggggctctgccactttgccaccctggcactgatcctgctggtgctgctggaggctctggcccaggcggacacacagaagatggtggaagcccagcgtggggtcggccctagagcctgctactccatctggctcctcctggcgcctacaccccctctcagccactgtcttcagtctccgcagaaacagcatcaagtgtgcggagacaggcggctgaaagccagcagcacgaactgcccgtcagagaagtgcacagcctgggccagatacccccacaggatggactcactgcagaagcaggacctccggaggcccaagatccatggggcagtccaggcatctccctaccagccgcccacattggcttcgctgcagcgcttgctgtgggtccgtcaggctgccacactgaaccatatcgatgaggtctggcccagcctcttcctgggagatgcgtacgcagcccgggacaagagcaagctgatccagctgggaatcacccacgttgtgaatgccgctgcaggcaagttccaggtggacacaggtgccaaattctaccgtggaatgtccctggagtactatggcatcgaggcggacgacaaccccttcttcgacctcagtgtctactttctgcctgttgctcgatacatccgagctgccctcagtgttccccaaggccgcgtgctggtacactgtgccatgggggtaagccgctctgccacacttgtcctggccttcctcatgatctgtgagaacatgacgctggtagaggccatccagacggtgcaggcccaccgcaatatctgccctaactcaggcttcctccggcagctccaggttctggacaaccgactggggcgggagacggggcggttctgatctggcaggcagccaggatccctgacccttggcccaaccccaccagcctggccctgggaacagcaggctctgctgtttctagtgaccctgagatgtaaacagcaagtgggggctgaggcagaggcagggatagctgggtggtgacctcttagcgggtggatttccctgacccaattcagagattctttatgcaaaagtgagttcagtccatctctataataaaatattcatcgtcat

SEQ ID NO: 1184 - DNA, 1224 bp, Homo sapiens
cttccatgggaggagcccaaatagtccacacccactttccctgcctcccttgcagctagggcatggcatgtgactggactctgccaatcagaggcacctgctctggagtttgaattggaggcttgtcctgtccaggactctttctggggggagcctgggccacatggagttcctggcagctgtgaagaaggaggacttcaccaggctggctctgtggtaggaataggggtgacgtcttgcctccccttttccatgggatcctcctgccttcctgggagttttgcataccccaatatctgtttaataccttttcttctgcttgaatgagccacatttggattctgtcacttgtcactaagaatcctggaggccccccttgggggcaaccactcggaccaaccttgaaggaggagcccatgttgatgggaaggacagcaagtgcattcggggtgtgggaaacagctgaccagggtcaaggtcaggcttccgggacacgacagggagtgttggggatgatggctcatctgggtcagattgtggggttcggtggggacctgttggcagggggtagatccaaggcagctgatcctgaatgccagggcgagagcaagcttggatgccagcctgcgggcagtgggacccagtgacatactgtaagtggaggtgggacgtggtcagatttgggttccagaaagctcagtctgctgctaggaggaaaagctagaccagatggggcaagactgggagagtaggggaccaggcaaaagactacggcaatggtcccagcagacagtcctggaggccagaaagaagatcaaggcagtggcaatgagcaagggcagacctgggattcagtgtgactggccctggggagccattgaaggcttgggtgacctaccatgatcgtaagaaagtggggttgagctgagcatggtggctgatgcctgtaatcctggtacttcgggaggctgaggtggaaggatcgcttgagcccaggagtttgagaccagcctgggcaacataatgagaccctgtctctacaaaagctaaaatattagctgggtgtggtggtgtatacacctgtagtcccagctactcaggaggctgaggcaggtgaatcccgtgagcccaggagttcgaggctgcagtgagccaaggctgtgctgctgtgctctagcctgggcaacagagtgaaagcctgtctctaaaaaaaaaaaaaaaaag

SEQ ID NO: 1185 - DNA, 1351 bp, Homo sapiens
agctcattcctttgattctagtctaccagttgccacttctggtccatttgcatataacactggagaagtgttcctttatctttgtgaagcccttaacattcaaggagccactactgcttctatgctgctgaaaaatacaagacactgcctctacctctgcatctgtcctttgctttttgcttggaaactatcacatcaaatcacactgagatcagttcctactgagctctcactggcaaactatcagtagaagaagcctggacaaaactgagttcaatgcttcacaattgctgcgctcttcttctccccagtggaaaaaaaaatgctctctgcaccacatggccgctggccgctgccagaggatggaggaaggggtgatgttggtcattcaagactgtttttcctacctcttcagtgcctctttcaactgtatgaagttaaaaccagcttggcaggctctagagagactgacctctgcagatggtttaaagggagaagctcaagggtccacagttcacagggctgccaatcaggcctgtgcagaaaactcaacagtctaaaagaatatatgaagacagaacctcaacctagaagaaatggacaaattcccagacacatcaaggaattcctagacaaactatcaaaactgaatcatgattagatagaaaatctgaacaaccaatataagtaaagagattaaagcagtaataaactctcccatcaaagaaaagctcaggacctgatggcttcactgctgaattctaccaaacgtttaaagaactaacaccaatgattctcaaactctttttaaaaattgaagatgagagaacacttccaaattcatatcacgaggccagcattaccctgataccaacgccagacaaagacactataagaaaaggcaattatggaccaatatccctgataaacatggatgtaaaaatcctcatcaaaatactagcaaatgaaattcaaccacaaatttaaaaaagcattcaccatgatcgagtgggatttatccctgggatgcaggaagtttcaacatacacaaatccataaacatgatacaccacatcaacaagatgaaggacaaaatctttataatctcaatagatgcaggaaaagcatttaacagaattcagcaccctttcatgatttaaaaaaactcaacaaaatatagaaggactgtaccccaacacaataaagaccagatatgacaaacccacagctaacattctcaacagtgaaaagttaaaagcttttcttctgagatcaggaacaagacaataatgctcactctctcgacttctgttcatcgtaacgttggaagttctagacagagcaattagac

SEQ ID NO: 1186 - DNA, 2164 bp, Homo sapiens
aaaaacagcaaaatcctccattccccatcagcggtcgattgggggctctttcgaagcggcagctctgtaggaccgctcttctaccccaagatccctcggcttcggccccctaggtgccagggtctgcgggaccccacgctcaaagccgccggccggggtcgacaactgcagagagggtcgggataggaaattgcgggtagcggcagatgcgggtccccaggcatcccggaggttcccacaggtctgcagtgggcctactttgcgaaaagggcccggctgcgccgagcctcgttcaaatcagatgccagacagtgtttcttgggatccatccaaataggtcccttatttctctttgtgggagccctgggcctccttccaggccggaacccaagtgcttaggcagccgggaaaggccggtcccctttttcagttctctcgcgacctctagccacttccggttgctaacggttcccaaacagcccccgaaaacgctacgtgagctgggccctgggccagaggcagaaaacggacggaagaaaaggtctggccggttcatcaagctctctctccagatcctccagtaccgtcactgcctcctctccagtctctggatggtgtgcacgcacccatgcttgcaggtctttaggaagaatgctcaggaactgttctagcaccagcaggtctaaaatctgctccttggtgtggcattctggcctcagccactgacggcagagctcccacagctgggagatgggtctcactctgtcacccagactggagtgcagtgagtggtgcgatcatagcttactgcagcctgaaactcctgggctcaagtgatcttctcgcctcagcctcctgagtagctggagctacaggtgtgagctacccagcatggctcatttgagatttctgagtagagaagtaacatgattaaacttgggtattgagattattattttggctgctatgttaacagtagacttgaatgtgaaggggttgggcaagggcagaagcagggagacaggttggaaagttggagtgggaagggcctttttaagaataacacaaacccctaaagacataaaactgaaaaggccatggaggaaaagataaatgaaactggccttgtaaaattgaaatatttgaatgaaaaaagtaaaaataaaatataaactaaaagtaaaatatgccacacatctaaaagacacagctgattttcctgatatacaaagaccttttatcttaccaaaaaataaaaatatgaacaagccaatagaaaaatagacaaagtacttaacctgcatgcatttattgtcaggcctctgacaatatgatactaagccatcatagcccctgtgaccgccacgtatacatccagatgacctggagcaactgaagaaccacaaaagatggcattccaccattgagatttgttcctgccccaccccaactaatcaatcgaccttgtgacattccccctgcccccgacagtgagtctcatgatctccccacccagcaccttggcaccttgtgacccccgcccctgcccacaagagataaccacctttaactgtaattttccactacctacccaaatcctataaaactgccccacccctatctccctttgctgactctctttttggactcagcccacttgcacccaagtgaaataaacagccttgttgctcacacaaagcctgttggtggactctcttcacacagactcacttgacatttatagaacacaaaattaagaatagtgaatatgaaaaggttcactaataagaatttaaacaaaacaagaaagatttttaagattgctaaagacaaacgatttataatattcagtgttaggaggtgtgtggatatacaggcatacttagttttacatttttagaaggtaagacttatttagaaggtaagaagttgtccataccccttgattcaacaacttagcttcttggaattatccatatagaaatgcttacataaatgtttgaacgtatgtacaaagaagcactatttatttaaattgggaaacttgaatgcctaacatttggaatttaaatttttatatgtctattcattaaaataccacccagtttttagaaactaagagatgctaaaggtatattgagtaaaataaaaagttacaaaagat

SEQ ID NO: 1187 - DNA, 2482 bp, Homo sapiens
atctaagaaggtctcagtctttaccaaccaccttattgagcccagtaagggttgtgtcctctgtcaatgttcgattatcccaggaaaagagaccagatgcagcccaccttccttcacctataagtacacacctgaagaggagcaggaattggaaaagcgggtgatggaacatgatggtcagtctttagttaaatcgaccattttcatctctccatcatctgtgaagaaagaagaagccccccagagtgaggcgccgcgggtggaggaatgccatcatggaaggactcctacctgttcacggcttgctccaccaccaatgtctcagtctacctgttcccttcattccatccactctgagtggcaagaaaggcccctgtgtgagcacacaagaactctgagcactcacagtgttcccaacatatcaggggctacttgtagtgccttcgcttcccctttcgggtgtccttactcacatagacatgccacctacccttaccgagtgtgctctgtgaatcctccttcagccatagaaatgcagttgcgaagagtattacatgatattagaaactcactgcagaatctttcacagtaccctatgatgagaggacctgatcctgctgctgctccatatagtactcagaaatcatctgttctacccctttatgaaaatacttttcaggagctccaggtaatgaggcggagcctgaatttgtttagaacacaaatgatggatttagaattggcaatgctgcgtcagcaaaccatggtttatcatcatatgactgaggaggagaggtttgaagttgatcagctccagggtttgagaaattcagtccgaatggaacttcaggacctggaactgcagctggaggagcgcctgctgggcctggaggagcagcttcgtgctgtgcgcatgccttcacccttccgctcctccgcactcatgggaatgtgtggcagtagaagcgctgataacttgtcatgcccttctccattgaatgtcactgaactgatgcaggagcagtcatacctgaagtctgaattgggcctgggacttggagaaatgggatttgaaattcctcctggagaaagctcagaatctgttttttcccaagcaacatcagaatcatcttctgtatgttctggtccctctcatgctaacagaagaactggagtaccttctactgcctcagtgggcaaatccaaaaccccattagtggcaaggaagaaagtgttccgagcatcggtggctctaacgccaacagctccttctagaacaggctctgtgcagacacctccagatttggaaagttctgaggaagttgatgcagctgaaggagccccagaagttgtaggacctaaatctgaagtggaagaagggcatggaaaactcccatcaatgccagctgctgaggaaatgcataaaaatgtggagcaagatgagttgcagcaagtcatacgggagattaaagagtctattgttggggaaatcagacgggaaattgtaagtggacttttggcagcagtatcttcaagtaaagcgtctaattctaagcaagattatcattaaacagaaattataggttggcatggatcctattagctgtgtaatactggaattatcaatgatatgcactggtggaggtgttatttgtgctttagaagatacttgctgttgagctgggctactgtatacagtgtacaatgtgtatttcttcaaccatatattttaaaaagacgtacatagaaacttaggcactttgctatttcttttctaaactatcaaaaactctagcagtttgaaaagcctaatatttatttgtatgtcaatatttttcatttgattccctattagaattaattttaaaacttgaagacttccagacttatccaacttataaataacatatttcttcagactaacatcttaaaacactgacctctatgaggtatttactgtgcaataactgattcatttttttcagagcttgaagcatccaatgatttttccctccactgctgttaattaatgtcacttccaagaagaaaaactgttctgttgtaaaaaatataattgctcttaattcttggggaggttactaatagcagtaggatagaattttatgaggttacctacaactacttaatgtacttacactgtaagccttgttgctttacccaagacaaatgtaattttatcattgcttatgtagtatttttcttttggaaatgtgccttatgttaaacactatgtacttttactttttgcattgtccagacttctttattagatggagatgtttctttttctgtcttctagactaaatagagtatcatccaaataatggggcctatgacttgaatgaatagaaatgaataagctggtgtttgttttttcaaaatggaagtaatttagatttgttctcctcatacataaaatgattttagttcagttttaaccagtgaaaactttgtttttatg

SEQ ID NO: 1188 - DNA, 2461 bp, Homo sapiens
agatttgtcggcttgcggggagacttcaggagtcgctgtctctgaacttccagcctcagagaccgccgcccttgtccccgagggccatgggccgggtctcagggcttgtgccctctcgcttcctgacgctcctggcgcatctggtggtcgtcatcaccttattctggtcccgggtaagacccacggctgcactcaatccgtccccattcccatctctgagtggtcctagtcctaccctgccccctcccagtgtcttaccctcttgggttttcttgtttcccgccgcccccaggcctgccctgcagcctgcccctttttcactcctctctgcaggctggtggccgcgctctctgtcaccctgggcctctttgcagtggagctggccggtttcctctcaggagtctccatgttcaacagcacccagagcctcatctgtatcctttctgcctgcccacctttcccacacgacccacttctatcaggactcccttcagccacctgacacaatagtgtctgctgtagccaatccttccagttcaaagatcttcaacgatgtgctaaatcctgctgtttactaggcacttaaaatcccaaaatgagagtaaaatacagtttttggccaggcatgttggctcacgtctgtaatcccagcactgtgggaggtgcaggcaggaggcaacatagtgagaacccaagtctacaaaaataataggaataataaaaaccccaccgtttctttttacaatgaggaggaggtagatacaaatctgtaattcagtgtgataagcactgtgctatagaagtgtgtgaagatagaaagcacaggcagggcgcgatggctcacgcatgtaatcccagcactttgggaggccgaggcaggtggaccacctgaggtcaggagttcgagaccggcctgaccaacatggtgaaacccccgtctctactaaaaatacaaaaattagtcgggcgtggcggcgcactcctgtaatcccagctactcaggagactgaggaaggagaattgcttgaacccgggaggcagaggttgcagtgagctgagatcgtgccactgcactccagccagggcaacagagcaagactctgtcaaaaaacaaacaaaagatataaagcacaatgggaactcagaagaggcaacggaagcgagcactgggaactcagaagaggcaaaggagatgaggcacatgggtcagagaattgtggaccaggaggaccaggacactggaggctgattccagcgcatattaagtcgctgtcagcactcctttgtggcatagcagaaggagagcctactcttacctctcatctgaaggatccaggctggcccacagataaggggtagggtagcctgaggtccgatctgtgcagtcacttctggtctctcctcacatgactgtcctaaaattcagaagtcagagctgctgactctagcccttgaaacatggtgagggagcaagggatgaacctgaatgcagatgccagccccaccactggccttttctgacccatcactgtctgtcgatccaaagactttccttaatctcgtgccttcccaagccattggggctcactgtagtgcatccgtggccctgtccttcttcatattcgagcgttgggagtgcactacgtattggtacatttttgtcttctgcaggtgtggtagcatccaatatttggggatgagggaggaaggttggccctaaacctgaaggtttttcccctacccagccctttcctccatgtgtgagataccagatccactcaacatcctgtaggcttttaaagtttcatcccctaccccccatgccacctgccctacactttcagaggtggggtctctggtttggagatttgggtatttatactgaaagggtttctgaatctaccacttgccttggtagtgcccttccagctgtcactgaaatggctttattcgtcaccgtctttgggctgaaaaagaaacccttctgattaccttcatgacgggaacctaaggacgaagcctacaggggcaagggccgcttcgtattcctggaagaaggaaggcataggcttcggttttcccctcggaaactgcttctgctggaggatatgtgttggaataattacgtcttgagtctgggattatccgcattgtatttagtgctttgtaataaaatatgttttgtagtaacattaagacttatatacagttttaggggacaattgagatggctgaactactgaataaaaaaaaaacaacgctgttttctagtcctgcagaccgtaagatacttggtatcgcttctattttggttactacggtaggtgcctggcggaagggagtgggcggagatatgtaaatagaaagtgcgtacagttagaacgtccggcacgtaactgatcggagcattctgggaagaagtaatttattccttttcggcagccgaatgaaaaaaaaattt

SEQ ID NO: 1189 - DNA, 2259 bp, Homo sapiens
aagtaatacctgttgcaggttcaaaaccagttaaagtaatatatattaattcaccacttccccaaaagaaaatgactatgagagagagaaatcaaatctttcatgaagttccattaaaatttatgatgtccaaaaacacatctgttccagtctctgcagtctttatggacaaacctgaagagtttatatctgaaatggacatgtcctgtgaagtcaacgagtgccgaaaaattgagagtcttgaaaacttgtatttggattttgatgatgatgtcacagaacttgaaacttttggagtaaccaccaccaaagtatcaaaatcaccaagtccagcaagtacttccacagtacctaacatgacagatgctcctacagcccccaaagcaggaactacaactgtggcaccaagtgcaccagacatttctgctaattctagaagtttatctcagattctgatggaacaattgcaaaaggagaaacagctggtcactggtatggatggtggccctgaggaatgcaaaaataaagatgatcagggatttgaatcatgtgaaaaggtatcaaattctgacaagcctttgatacaagatagtgacttgaaaacatctgatgccttacagttagaaaattctcaggaaattgaaacttctaataaaaatgatatgactatagatatattacatgctgatggtgaaagacctaatgttctagaaaacctagacaactcaaaggaaaagactgttggatcagaagcagcaaaaactgaagatacagttctctgcagcagtgatacagatgaggagtgtttaatcattgatacagaatgtaaaaataatagtgatggaaagacagctgttgtgggttctaacttaagttccagaccagctagtccaaattcttcctcaggacaggcttctgtaggaaaccagactaatactgcttgtagtcctgaagagtcatgtgttttaaaaaaacctatcaaacgagtatataaaaaatttgatccagttggagagatattaaaaatgcaggatgagctcttaaagccaatttccagaaaagtaccagaattgcccttaatgaatttagaaaattctaaacagccttctgtttctgagcaattgtctggtccttcagactcctctagttggccgaaatctggatggccttctgcatttcagaagccaaaaggacgattgccatatgaacttcaggactatgttgaagatacatcggaatacctagctcctcaggaaggaaattttgtttataagttatttagcctgcaagacctgttgttactcgtacgctgcagtgtccagaggatagagacaagaccacgttctaaaaaacggaagaaaatcagaagacaatttccagtttatgtactaccaaaagtagagtatcaagcttgttatggagttgaagctctgactgaaagtgaactttgtcgcttatggactgaaagtttattgcattccaacagctcattttatgttgggcatatcgatgcatttacttcaaaactttttctactggaagaaattacctcagaagaattaaaagaaaagctttcagcactcaagatttccaatttatttaacatcctccaacacattctaaagaaactaagtagcttgcaggagggttcctacttgttatctcatgcagcagaagattcttcactcctgatttataaggcctctgatggaaaagttactaggacagcatacaatttgtataaaacacattgcggccttcctggtgtaccttccagtctctcagttccctgggtcccattagatcccagcctgttattaccatatcatatccatcatggaagaataccttgtacttttccaccgaaatcactggataccacaacacaacaaaagattggtggaacgagaatgcctacacgcagccacaggaatccagtttccatggaaaccaaaagcagttgcttgcctgctcagcaagttgaaactgagggagtggctccacataaaagaaaaataacttgaggactgtaccatggaaaactaaatttaaaaaaacagttataacagtgtttaatttagataagtttgagggaaaataatcagtaggcaagaggaacatttttcctgtagtagctagagtgccttgaaaaaatgtgttggctatgtgaaggaatatttcaactaaaatggaatggtatgcttttcacccttgaagtttgaggaggatcttgatatgttttaacattatcatggcagg

SEQ ID NO: 1190 - DNA, 2119 bp, Homo sapiens
gcacttgcagtcagaactccgggcccctcggggcgtgactgcccagctgtgtcacccggagcagctcatgctgcttctaagctcagcttccttgttggcaaagggccctactgtgtggcacacgccgtgcacgtcaggacaagcacaacgcatggcgcacaccacctgctgggagaggcaattgtgcactctacagccacagggacaggacacagcgcggtgagcccacccggtccaggagcgctgggaaagggccccaggagaggcagcagagctgagacaggacgacgaccaggagcgaccaggaaggggaggaggagagtgctctgcgcagaggggacagcgtgtgcaaaggcccggagtctcagtgtgccacattgaggtgtcacgcgccacactccatggcatccacgctacagatgccaaaggccacgggaaagcgagttcgccattctgctgaggtgggcaggctactattccccgggacgtggctgacacccctcacctgccccgatgtgcagctgaagagacccctcgtccggccttggcctcaggggagggacgatgtccagcaagcttctgtctgaccctgtgtctgccacatcaactggagcagagacaactggatacagaaaatcccattcaccaaggtgggtgccctcaggaggaagggcctgcgcacgctgcaacgttggggatgcattctgagatctagctgcattctcggagacagagccactgccccaacaatttcagcggcacagtctggaagggctccccacagattcttaatttaccctctgcagctgacaaaacacaatccccaccctccaccagaggggtccacaacctaaccccagagcctgggaatgtcacctacgacgggtccacaacctaaccccagagcctgggaatgtcacctacgacgggtccacaacctaaccccagagcctgggaatgtcaccatacgacgggtccacaacctaaccccagagcctgggaatgtcaccgtatgaagggtccacaacctaaccccagagcctgggaatgtcacctacgacgggtccacaacctaaccccagagcctggaaatgtcaccataagaggggtccacatcctaaccccagagcctgggaatgttaccataagaggggtccacaacctaaccccagagcctgggaatgtcactgaacgaggggtccacaacctaaccccagagcctgggaatgtcaccgaacgaggggtccacaacctaatcccagagcctgggaatgtcaccgttaagaggggtccacaacctaaccccagagcctgggaatgtcaccgaacgaggggtccacaacctaaccccagagcctgggaatgtcaccgaacgaggggtccacaacctaatcccagagcctgggaatgtcaccgttaagaggggtccacaacctaaccccagagcctgggaatgtcaccgaacaaggggtccacaacctaaccccagagcctgggaatgtcaccgaacgaggggtccacaacctaatcccagagcctgggaatgtcaccatacgaggggtccataacctaaccccagagcctgggaatgtcacctacgacgggtccgcaacctaaccccagagcctgggaatgtcaccacatgaggggtccacaacctaaccccagagcctgggaatgtcaccgaacgaggggtccacaacctaatcccagagcctgggaatgtcaccgtacgagagtcccacaacctaaccccagagcctgggaatgtcactttacatggcaaaagggacctttctgatgtgggtaaattaaacgtctggaggtgggaggtgatcctggattagccacatgtatccagtgtgatcccaaggatcttgacagagggaggcaggagcagaggagggggaggcacagaggctggggtcaggggaacggattcgcactgcaggttcaagtgttcatccgcactgactataatagtcaatataaaaataagcctggtagattacagcagcaggcaatgagttaacgttggaactacatcgagagctctcagaagtcactaacaaaacaaacactccactggagaaatcaggaaagaaggtgcttacaacat

SEQ ID NO: 1191 - DNA, 2373 bp, Homo sapiens
gtgctctggcctgagtgccacagccagggcctctgctctgtacacagaccgggcaaggtcccccaggccaggatgtcaggcctggtgttggggcagcgggatgagcctgcaggccaccggctcagccaagaggagatcctggggagcacacggctggtcagccaagggctagaggccctacgcagtgaacaccaggccgtgctgcaaagcctgtcccagaccattgagtgtctgcagaccattgagtgtctgcagcagggaggccatgaggaagggctggtgcatgagaaggcccggcagcttcgccgttctatggaaaacattgagctcgggctgagtgaggcccaggtgatgctggctctagccagccacctgagcacagtggagtcggagaaacagaagctgcgggctcaggtgcggcggctatgccaggagaaccagtggctgcgggatgagctggctggcacccagcagcggctacagcgcagtgaacaggctgtggctcagctggaggaggaaaagaagcacctggagttcctggggcagctgcggcagtatgatgaggatggacatacctcggaggagaaagaaggcgatgccaccaaggattccctggatgacctctttcctaatgaggaggaagaggaccccagcaatggcttgtcccgtggtcaaggtgctacagcagctcagcagggtggatatgagatcccagcaaggttgcggacgttgcacaacctggtgatccagtacgcagcccaaggtcgctatgaggtggccgtgccactctgtaagcaggcactagaggacctggagcgcacatcaggccgtggccaccctgatgtcgccaccatgctcaacatccttgctttggtgtatcgtgaccagaataagtataaggaagctgcccacctgctgaatgatgcccttagcatccgggagagcaccttgggacctgaccatcctgctgtggctgccacactcaacaatttggctgtgctctatggcaaaaggggcaagtacaaggaggcagagcctctgtgccagcgggcactggagattcgagaaaaggtcctgggcacgaatcatccagatgtggcaaaacagctgaacaacctggccctcttgtgccaaaaccagggcaagtatgaggccgtggaacgctactaccagcgagcactggccatctacgaggggcagctggggccggacaaccctaatgtagcccggaccaagaacaacttggcttcctgttacctgaaacagggcaaatatgctgaggctgagacactatacaaagagatcctgacccgtgcccatgtacaggagtttgggtctgtggatgatgaccacaagcccatctggatgcatgcagaggagcgggaggaaatgagcaaaagccggcaccatgagggtgggacaccctatgctgagtatggaggctggtacaaggcctgcaaagtgagcagccccacagtgaacactactctgagaaacctgggagctctgtataggcgccagggaaagctggaggctgctgagaccctggaggaatgtgccctgcggtcccggagacagggcactgaccctatcagccagacgaaggtggcagagctgcttggggagagtgatggtagaaggacctcccaggagggccctggagacagtgtgaaattcgagggaggtgaagatgcttctgtggctgtggagtggtccggggatggcagtgggaccctgcagaggagtggctctcttggcaagatccgggatgtgctccgcagaagcagtgaactcttggtgaggaagctccaggggactgagcctcggccctccagcagcaacatgaagcgagcagcctccttgaactatctgaaccaacctagtgcagcacccctccaggtctcccggggcctcagtgccagcaccatggacctctcttcaagcagctgacattcaacccggcccccaggtctgctgggtccccccacccccacagccctcacagcattccccattgctcctggctcttccccacccctaggtgggacagtgaaggggagcagtttaaccagaagattgctgctgcccttagggtctcagctccctcctcaggaatccctcttaggaaggaccctcaggacaccctctctgcaccctgtggtcctctagagtagctagctctgaggccccaaggtgggtacaaagcaggtatggccctcagagatgcagcctgctgctggcttttcagtcagagggttgggggctggccagccaagctgccttgccctggccgctcttactccctccctctgctgtctcacttcaggtccatgtatttcacttttcttaaataaaagaatcaggtaacctttc

SEQ ID NO: 1192 - DNA, 2202 bp, Homo sapiens
catttattgtgccctttatttctattattattacattgtaatatataatgaaataattacacagctcaccaaaatatagaatcctcattatggtgggagccctcagcttgtcttcctgcaactagactgtcccatctagcggtgatgggagacagtgacagatcgtcaggcattagattctcataaggaacacgcaacctagatccctcgcacgtgcagctcacaacagggtttgtgctcctgtgagaatctagtgccaccgcagatctgaaaagaggtggggctcaggcagcagtgctcactagctcactgcacacctcctgccggacacggactggaactggtccagcctgggagttggggacccctgatgtaaggaatagtcagaggctaacatgcacacaggcacgggaaatggacaggacctgcccaggctgcatgagggctggattgtgtggccctggaatgatgtcccaccctctcctatcgcggtttgcaggtctagggaactcagtctcctggaatgggtcagtgtatcatcagtcatcctccctgtgtctttaaccagttttatttctgcttgcattttactgatgttttcttcttcttctcctttttgttttttttggtcagaaattatccagcaagctttcattaacgtggccaaaaaacattttggcgaatttttcaaccttaaccaaactgttcaggtaagcacccagagttcacttgctagtcacctggaccactggctgtttaaccttgagagaagttggatattcactgtcatttggaaccatgaggccagggatgtaatggcaggctggcgaggctggcagggctggcggggctggtggagctggtgactccaggagcacctgcctgcctggcttctgctcaggaggcggcttcactccccaggagaaatgaaatgcggcccgtgccctgccatctgttctgcacgaccttacgcaggatgtggggctccaccgaggactggctgagcacgattgaagacataaaagtgaaacacacagcaaaggcagaaaacatgatccaacttcagttcagaatggagcagatggttttttgtcaagatcagatttacagtgttgttctgaagaaagtccgagaagagatttttaaccctctggggacgccttcacagaatatgaagttgaactctcattttcccagtaatgagtcttcggtttcctcctttactgaaataggcatccacctgaatgcctacttcttggaaaccagcaaacgtctcgccaaccagatcccatttataattcagtattttatgctccgagagaatggtgactccttgcagaaagccatgatgcagatactacaggaaaaaaatcgctattcctggctgcttcaagagcagagtgagaccgctaccaagagaagaatccttaaggagagaatttaccggctcactcaggcgcgacacgcactctgtcaattctccagcaaagagatccactgaaggacggcgatgcctgtggttgttttcttgtgcgtactcattcattctaaggggagtcggtgcaggatgccgcttctgctttggggccaaactcttctgtcactatcagtgtccatctctactgtactccctcagcatcagagcatgcatcaggggtccacacaggctcagctctctccaccacccagctcttccctgaccttcacgaagggatggctctccagtccttgggtcccgtagcacacagttacagtgtcctaagatactgctatcattcttcgctaatttgtatttgtattcccttccccctacaagattatgagaccccagagggggaaggtctgggtcaaattcttcttttgtatgtccagtctcctgcacagcacctgcagcattgtaactgcttaataaatgacatctcactgaacgaatgagtgctgtgtaagtgatggagatacctgaggctattgctcaagcccaggccttggacatttagtgactgttagccggtccctttcagatccagtggccatgccccctgcttcccatggttcactgtcattgtgtttcccagcctctccactcccccgccagaaaggagcctgagtgattctcttttcttcttgtttccctgattatgatgagcttccattgttctgttaagtcttgaagaggaatttaataaagcaaagaaacttttt

SEQ ID NO: 1193 - DNA, 2064 bp, Homo sapiens
ttatttatttattcatttatttagcagagatggtgttttgccgtgttacccaggctggtcttgaactcctgggctcaagcaatctaccctcggctcagccctgcaaagtgctgggattacagccatgagcccttgtgtcccgcctaaaaagttgtttaaaagaagtttggactctgaagcctaacagaccagggtttgaactctggttcctgtcattcactaactgtgtgactccagacaagttacttaaactctcaaagcatcagttttctcattagtaaaaaggggctactattaaatgaaatggtccctgtagcacaggacctgacatagagtaagccctcagtaaatgttagctcttgctgttggaatgatgatgatggtggtggtggtggtggtgactaatatcatcattattttctacttcttactgctggtctccatccttctgggaaccaaaagacaaattacccagccctcattctatccaaaattctcatcttcaactacacccaagctttacacagccacacagttgccaagcagccaggctggcttttatgccagcatctgctagaggagtcagcttcctttccactggctctacctcttccatctcctcactcttctttcttgcctctgcctcctcctcctctaggaggcctgcagtatccctgggattgggaagcggatggctgagaaaatcatagagatcctggagagcgggcatttgcggaagctggaccatatcagtgagagcgtgcctgtcttggagctcttctccaacatctggggagctgggaccaagactgcccagatgtggtaccaacagggcttccgaagtctggaagacatccgcagccaggcctccctgacaacccagcaggccattggcctgaagcattacagtgacttcctggaacgtatgcccagggaggaggctacagagattgagcagacagtccagaaagcagcccaggcctttaactccgggctgctgtgtgtggcatgtggttcataccgacggggaaaggcgacctgtggtgatgtcgacgtgctcatcactcacccagatggctggtcccaccggggtatcttcagccgcctccttgacagtcttcggcaggaagggttcctcacagatgacttggtgagccaagaggagaatggtcagcaacagaagtacttgggggtgtgccggctcccagggccagggcggcggcaccggcgcctggacatcatcgtggtgccctatagcgagtttgcctgtgccctgctctacttcaccggctctgcacacttcaaccgctccatgcgagccctggccaaaaccaagggcatgagtctgtcagaacatgccctcagcactgctgtggtccggaacacccatggctgcaaggtggggcctggccgagtgctgcccactcccactgagaaggatgtcttcaggctcttaggcctcccctaccgagaacctgctgagcgggactggtgacccatggctgggggtgctgaggagagccgagttggactggctacccctcctggccacccagtactccctccagcctcagctggctgaacctcgccgctccaaccaccagcttcctcagcgagcagggcccagggctctgggcctgaagcaagagccagcccggctcccagtgtctgcccggctcccagtgtctgcccagccctctcccagacaggagcaggctgccaccccttctacctcaccactgcccctcgaagaattttgcaaatggccccttgccccattttaagcaggagcaggtggctggtttgaagccccaggtatcccccttccctgctatgggaaaggccaagctgctgggtggggacagaagctgcaggggagagggaagcagccgtgctgtcaacatcatccggcaccctctggggtaggagaacagccattccacatgtgttccctctatccgtcctgcttcccggtcagctggtggtgctgggaatggggtgccccagccttggtgaggacagtgttgggaggcccaggggcccagtaaagtgcatttgacattg

SEQ ID NO: 1194 - DNA, 2281 bp, Homo sapiens
cagcacgctgtgtaccactcttgatggctaggcccactctgcccgcaccttgaaacctgaccaggtcttctcccaccccatgaatgtaaacattttaacaactagcctgactgtgaaaagcctggagaatccttcctacaggggacagtggtgcaaagagaagctggacaggcgcccacacctggctggcacgcacacctgtgtgcaccgagggggaactgacgagcacctgaattgccgagccaggctgcagtaagtcattaggatcggggtgagatgcccccacagggacaagggaggggtgagaatcagaggggtttcttttctcagctaagaaaggccccaggggcagcctctgccccacatggctctcagtaccagcgatgggcagggtcccttcgttctcattgcggtttccccagggctcccacaccaccagctgcctcttctagaaactccccatcaggccttctcccccgcgaatcttggtaacgtccttgctgcctctctcacaccctcctgtcctcctcttcctacaaacatgctcctgtctccatcccaccttgaagaaacccttggccgatacggcacccacccatggtcccaggataaccccttttcttccctaggctaataaaacagagaaagtaagtgcatcgggcactccagaccaaagccatttgcagaatggagtcacaggctgacatccaagactttagccagctggcttcaggcagcagatgcaaaggagaggtcatgagcaggccaggccctggctaggcaggtgagaggtgacggcgaccttgtctaggatgagggccccaggaagcccttgggaacccagggtggttaggccaggccagttggtgagagcctgaactctggaaggaaagaacaggctgtagtgtggacgagaccatccctcctgcattgtagctgccttgtaatcccatcctcctgactcaggctgggctctgcatcaggcaccccagagtccaggcaccccagtttgtcaggcctgtgtgggacagcgcctgagccgggagggctcccttccctcctccgggatgctctggccttgtctctgtcatggccatttattgcaaccacggtcaataaaggaggcaggagagggcacagtggctgtgaaaacgtttggctcacgaggaacaggaatcctaactgcgtgggacaaggaggcgggtggtgtcgtggttaaagcacaggcctgggatcacactgcaggggctcagatcccagatctgcaacaatgtggctgcgatgaccctggctgggcgcggtggctcaagccccccagtctccgatttgccagcctggctgttcacacacaggggatgcaccggcttcccaggcatcctgggcaccccctccaggtggcatcggggctccccagcactgaagggtgttcagcagcctgcaaaccaactgactcacagagcccagatagtgacgccaagaccagccgctccggggccaacatcagagctggagagctgagccagtggcacgccagtcactgaggaaggcctcttgttgataaagacagggcatgaattcttggggggctgttacgtaccttcccaaagggagaaagaaaccccttgttcagtcaccgcacagctgtctctggagacaggagcacaaagctgccttctgcccagggcactgcttccttggcaagtgaccagcagctgggaccgcacgtgccaaaggcagcagctgccatgtttgacaaactggaacggagctatgtccaaattaaatccccccaaccagcctctgccatactccctttggggacaggggtggtcggtcgttacgcttgcaaaattccaacagcacctagagtcccaggaaatggggctgctggccaatagaggtgggacccagggtgacaggccacatgctccttagagagccaacagtgtttcctgaattccatgggagtttgctgaggggacatggaagctaggattccggaacacccgctgggagcctagtcctgggctaggggctgcatttatcatttcatcctcacaactaccgttgcagtttcgcctaacagagaaggagacaaaactaacccggtggccacgtggccgaaggcacagagccgttgagtggcagcgtggcatttgaattcaggccagtgatgctgaagtccccaggtctttttttttttgatgcccacaacaatgtaactactaatagcctgttattgatgcaggccttaccaataacataaatagttgatgaacac

SEQ ID NO: 1195 - DNA, 3107 bp, Homo sapiens
ttacttttcggtctctcctatccatctgaccaaacctgggcatgagaagggagtatgactcaggacatgatgcactgttgggacacaccaagctcagtgtcccctccgggtcactggctcaatatcctctcacaacaggctggtttacaacaaaacatccagggccacccagtttcctgatggtgtggatgtacgtgtccctggctttgggaagaccttctcactggagttcctggaccccagcaaaagcagcgtgggtatgtagcccttactcaaggcctccgggagctgggatgggggttctgccggactggagctggagctggaggaactctgctggtttgtagggacagcctgtgagctgtctctgatcagtgtgggcacagagccctgtagcattcttccaaggacctgctagctgtcacagtctccatgctgggcatagtgtaggtggccggcactagctgtatcttttcttatcctctgtatttctgtctacaggttcctatttccacaccatggtggagagccttgtgggctggggctacacacggggtgaggatgtccgaggggctccctatgactggcgccgagccccaagtaagcaggcactctcattccctccctgaagtctcgggaggtaggggtgaggtgatcatgggcaccacagaccttgggctctccccttgtccttggctgtctcctgtccctgggcctctggcatccagtctagtggtcacagccaccacctttggtcagtcttatcctgtcctccatttcccaccctgggacctctgggcctgtgagccctggggagaaatataaggcttcctcccttcatggaaggcggggggacccagaccgctctgtttgaatgtgagcaccctcccctccccctctcgtcttgtgtctggcctgagaaaagctcagtggttccggctccaggacccttcccacctgacccctgcctggctctggcccgcagatgaaaacgggccctacttcctggccctccgcgagatgatcgaggagatgtaccagctgtatgggggccccgtggtgctggttgcccacagtatgggcaacatgtacacgctctactttctgcagcggcagccgcaggcctggaaggacaagtatatccgggccttcgtgtcactgggtgcgccctgggggggcgtggccaagaccctgcgcgtcctggcttcaggagacaacaaccggatcccagtcatcgggcccctgaagatccgggagcagcagcggtcagctgtctccaccagctggctgctgccctacaactacacatggtcacctgagaaggtgttcgtgcagacacccacaatcaactacacactgcgggactaccgcaagttcttccaggacatcggctttgaagatggctggctcatgcggcaggacacagaagggctggtggaagccacgatgccacctggcgtgcatctgcactgcctctatggcactggcgtccccacaccagactccttctactatgagagcttccctgaccgtgaccctaaaatctgctttggtgacggcgatggtactgtgaacttgaagagtgccctgcagtgccaggcctggcagagccgccaggagcaccaagtgttgctgcagcgagcacatcgagatgctggccaacgccaccaccctggcctatctgaaacgtgtgctccttgggccctgactcctgtgccacaggactcctgtggctcggccgtggacctgctgttggcctctggggctgtcatggcccacgcgttttgcaaagtttgtgactcaccattcaaggccccgagtcttggactgtgaagcatctgccatggggaagtgctgtttgttatcctttctctgtggcagtgaagaaggaagaaatgagagtctagactcaagggacactggatggcaagaatgctgctgatggtggaactgctgtgaccttaggactggctccacagggtggactggctgggccctggtcccagtccctgcctggggccatgtgtcccccctattcctgtgggcttttcatacttgcctactgggccctggccccgcagccttcctatgagggatgttactgggctgtgggcctgtacccagaggtcccagggatcggctcctggcccctcgggtgacccttcccacacaccagccacagataggcctgccactggtcatgggtagctagagctgctggcttccctgtggcttagctggtggccagcctgactggcttcctgggcgagcctagtagctcctgcaggcaggggcagtttgttgcgttcttcgtggttcccaggccctgggacatctcactccactcctacctcccttaccaccaggagcattcaagctctggattgggcagcagatgtgcccccagtcccgcaggctgtgttccaggggccctgatttcctcggatgtgctattggccccaggactgaagctgcctcccttcaccctgggactgtggttccaaggatgagagcaggggttggagccatggccttctgggaacctatggagaaagggaatccaaggaagcagccaaggctgctcgcagcttccctgagctgcacctcttgctaaccccaccatcacactgccaccctgccctagggtctcactagtaccaagtgggtcagcacagggctgaggatggggctcctatccaccctggccagcacccagcttagtgctgggactagcccagaaacttgaatgggaccctgagagagccaggggtcccctgaggcccccctaggggctttctgtctgccccagggtgctccatggatctccctgtggcagcaggcatggagagtcagggctgccttcatggcagtaggctctaagtgggtgactggccacaggccgagaaaagggtacagcctctaggtggggttcccaaagacgccttcaggctggactgagctgctctcccacagggtttctgtgcagctggattttctctgttgcatacatgcctggcatctgtctccccttgttcctgagtggccccacatggggctctgagcaggctgtatctggattctggcaataaaagtactctggatgctgt

SEQ ID NO: 1196 - DNA, 2371 bp, Homo sapiens
tcattcaccatttactgaagttgtgtgtgcgtgtgtataccagaccccacgctaaggactggggaaaaggatgatcatacctggcttgttcctgatagagcccagagaccacctgggaagacaagtaatcaggtccagcttcggtgtgaggccctcaatccagaacatcatggctctgactcaccagccttcagctgctgcactctgctctcctcagtggctgccttgcacctggaactcaatttttttttatttttatttttttgagatggagtcttgctctgtaacccaggctggagtgcaatggcgcaatctcggctcactgcaacttccacctcccgggttcaagtgcttctcctgcctcagcctcctgagctgggattacagttgtccaccaccatgcccagctaatttttgtgtgttttttttttagtagagacagggtttcaccatgttggccagactggtcttgaactcctgacctcaggtgatccgcctgccttggcctcccaaagtgctgggattacaggcataagccaccacacccagccaattttttaattttttaaattttttgtagagacagggtcttgctatgttgcccaggctgatcctcaaactcctggcatcaagagacactcctgactccacctcctaaatgctgggattagagatgtgagccattgttcctggcccctattgaattttttagtccactgttgagacctattgatcagaaaaaaggttgctttcaaaaggttattactaaaaaaaaaaaaaaaagaagaagaagaagaagaaagaaaaaagattacaaagattactgctcatactcattcacaatgcatttagtcacccaagagctctaatggagatgtacaaggagatgaatgttgttttcatgcctgctaatacacatcctttctgcagcccatggatcaaggagtaatttaaacctgcaagtcttattatttaaaattacatttcataaggctatagctgccatagatagtgattctgctgatggatttgggcaaagtacattgaaaaccttctggaaagggttcaccattctagatgccattaagaatatttgtggttccagggaggaagccaaaaaccaacatttacaggagtttggaagaaagtgactctataactcatggatgactttcagaggggctcaagacttcactagaggaagtaactgcaggtatgatagaagtagcaagggaactagaattagaaatggaacctgaagatgtgactgaattgctgcaatctcatgataaaatttaaatggatgcagagttgtttcttatggatgagcaaataagtgatttcttcttctttccttttttttttttgaggtggagtctcgctctgtcacccaggcttgagtgcagtgatgtgatctctgctcactgcaaccttaacctcccaagctcaagcgattctcctgcctcagcctcccaagtagctgggattacaggtgtccaccaccatgactggctaatttttgtatttttagtggagacagggtttcaccatgctgaccaggctggtctcggactcctgacctcaagtgatcctcctggcttgacctcccaaagtgctgggattacaggtgtgagccaccatgcccagcctctttttttttttttttttttaaatagagacagagtctcactgtgttgcccaggctggcaatcatggctcactgcaaccttgacctcctagactcaagccatcctcctggttcaaccttccaagtaactagtactacatgtgtgcaccaccctgctcagctaattaaaaataatttttgtgaggagatgggggtctcactatgttgccaaggctggtttagaatgcccaagctcacgtgattctctcactctggactcccaaagttctgggattacaggtgtgtgccatcgtgcctagccagaaagtggtttcttgagatggaatctactcctgatgaagatactgtgaaatgtagaatggtagaaatgacaacaaaggatttagaatatgacataaacttagttgataaagcagcagcagggtttgagaggactgagtccaattttggaagatattctactatgagtaaaatgctatcaaatagtactgcatactacagataaatctttcatgaaaggaagtgtcaattcatgcggcaaatgctacattgtcttattttaagaaattgtcacagctggcatggtggcacacacctgtaatcccagctacttgggaggctgaggcaggagaatcgcttggacccaggaggcggaggttgcagtgagacgagatcgtgtcattgtactccagcctgggcaacaagagggagactcggtctcag

SEQ ID NO: 1197 - DNA, 2961 bp, Homo sapiens
tttttgaggcccaagggggagcgagccggtgctgctgcaggctgaggctgcggcagaggcggcgaggcgcgggcggtgaggacggacagtcaccgacttagcccagttccctgtgatctcaaaacaattgttgcagcaggctcctggcagtctcaagcagttcatcttcttggtgtactggtttcctattgtgattttatcatggaaaatcaattggctaaatcaactgaagaacgaacatttcagtaccaggattctcttccatcactgcctgttccttcacttgaagaatcattaaaaaaataccttgaatcagtcaccagaacatgctaccagataaggggtcttgatccagatgctaagagagggttcttggatctcacgcgggaaggaattcaagtgaaaccatttgcaaatcaagaagaatataagaaaactgaagaaatagttcaaaaatttcaaagtgggattggagaaaaattgcaccagaaattgcttgaaagagcaaaaggaaaaagaaattggctggaagagtggtggctgaatgttgcctatctggatgttcgtataccatcacaattgaatgtcaactttgcgggtcctgcagctcattttgaacactactggcctccaaaggaagggactcaattagaaagaggaagtataactctttggcataacttgaactactggcagctattaagaaaagaaaaagtgcctgttcataaagttggaaatactcctctagatatgaatcaattccgaatgctattttctacctgcaaggttccaggaattactagagactccattatgaattattttaggactgagagtgaagggcgttccccaaaccacattgtagtgctgtgtcgaggccgagcttttgtctttgatgtaatacatgaaggatgtttggtcaccccgccagagcttctcagacaactgacatatatccacaagaagtgccatagtgaacctgatggacctgggattgcagcattaactagtgaggagcgaactcgatgggctaaggcacgagaatatctgattggtcttgatccagagaacttggctttgttagaaaaaattcagagtagtttactggtatattccatggaggatagcagtccacatgtaacaccagaggattattctgagattattgcagccatccttattggagatccaacagtacgctggggtgacaaatcctataacttgatttccttttctaatggagtatttggctgtaattgtgatcatgctccttttgatgcaatgattatggtgaacatcagttattatgtggatgagaaaatttttcagaatgaaggaagatggaagggttcagagaaggtacgagatataccacttccagaagagctcattttcattgtggatgagaaagttttaaatgacatcaaccaagctaaagcccagtatctcagggaggcatctgatctacagattgcggcttatgcctttacatcttttggcaaaaagctaaccaagaacaagatgcttcacccggatacgtttattcagcttgcacttcagctggcctattacagacttcatggacaccctggttgttgctatgaaacagctatgacaagacatttttatcatggccgtacagagactatgcgatcatgcacagttgaagcagtgaggtggtgccagtccatgcaggatccttctgtcaatcttcgtgagcggcagcaaaagatgttacaagcttttgcaaagcataataaaatgatgaaagattgttcagctggaaaaggatttgatcgtcaccttttaggtctcttactcatagcaaaagaggaaggtcttcctgttccagaactctttacggacccacttttttccaaaagcggaggaggtggaaattttgttctctcaacaagtctggttggctatttacgagtccagggagtggtagttcccatggtacacaatggttatggatttttctaccatatcagagatgacaggtttgttgtggcctgttcagcctggaaatcctgtcccgagactgatgcggaaaagctagttcagctgactttttgtgcttttcatgatatgatacagctgatgaactctactcatctttagagatgaatcatctattaagcacttaccaaaacatatcattaaactgagtgctgggagtgagttggtaatatgagatgggaaggaatgttgacttgctaacattcctttaacaagttaagaaaacttgttaaatgtagaaattagtagaatcatgctctctaaatttattctgccatagaaggtagaaatatttttaagctcctctgatgcagcagcaatgcaaattatgacatagtgaatatagaactatgcagtatttaagcctcaacaatccaaatctacaaactttaacaatgcaagtcttactctaatttttaagtatttttgttggtacttacatgggttataaatcctctctctggacatcaatgtagagtccatctttcaagcactttaatttttttagctgccaaagggtatgaattacattattgtatgctaatttccctgaaatcaatgccttctatgttcaccacagggatacaagcctgttatgtttgatgggaaagaccactacaatctaatggtgatctaaaataacttttttgggctgggtgcagtggctcatgcctataatcttagcactttgggaggccaaggtaggaggattgcttgaagctaggagtttgagaccagcctgggcaacagggtaaggtcctgtctctacaagatcaaaaacttagccgggtatggtggtgcatgtgtgcctgtagtccaagctacttgaaggctgagacaggaggatcggttgagcccaggaggttgtggctgcagtgagctgtgatgtgcccttatgctatagcctgggcaagagcgtgagaccctgtctcaaagaag

SEQ ID NO: 1198 - DNA, 3249 bp, Homo sapiens
attattaatgtgtttgctttcatttttggtgctaggcagctgggacaccaaggagagttctgtggcaagccacaagtatgaaggcccagaacttcccctgagggcatagcttccatttcagtttggggcaagaataaaatctgctcaaggatattagtttgggaacttcctggtggttcagatttcaagcagagtttgtgcttaatcctcacccaggcaccaaggctcagagtcagcaggagtgagttcaggaatcctcgggacaaggcactttcctgagcactggaccagcgacctcttggcttccagggaggacacacagccatcatggaacccaaacctcagaagagtccaggcaaacaatttacattttcttatgaaaatgaagtctgcaaacaagattactttattaaatcaccaccttctcagctgttctcctctgtgacctcttggaaaaagcggtttttcatcctgtcaaaggctggggaaaagagctttagtctttcctattataaagaccatcatcaccgaggttccattgaaattgatcaaaattccagtgtagaagttggcataagtagccaggaaaagatgcaatctgtgcagaagatgtttaaatgccaccctgatgaggtcatgtccatcagaaccactaacagggaatacttcctcattggccacgacagggagaagattaaagactgggtctccttcatgtcatcatttcgccaggatataaaagcaacacagcagaacacagaggaggaactctcattgggtaataaaagaaccctcttctactccagccctctccttggcccttccagcacatcagaggctgttggctccagctcaccaagaaatggtctccaagacaagcatttaatggaacaaagttctccaggatttaggcaaactcacctacaagatttatcagaagccactcaagatgtgaaggaagagaatcattatcttactcctcgaagtgttcttttagagttggataatatcattgcttccagtgattctggtgaatccattgaaactgatggtccagaccaggtctctggaagaattgagtgtcattatgagccaatggaatcctattttttcaaagagacatcccatgagtctgtggatagcagcaaagaggaaccccagacccttccagagacccaggatggggacctccacctgcaagaacaaggctcaggaattgattggtgtctttcccctgccgatgtggaagcacagaccacaaatgaccaaaaggggtcggcctcactaactgttgtgcaattgtctatattaatcaataatatccccgatgaaagccaagtggagaaactgaacgttttcctttctcctcctgatgtcatcaactatcttgctctcacagaagccacaggacggatatgaaattaaagcttaccatcggcaggatcccaaattcagagacattccatgctgcatcctatatgtgtccctcaaaatgccaaagtgctgcaccttctcagctggataagcctagactgaacagagctcccaagaggagtccggccattaaaaagagccagcagaaaggagccagggagtaacgcaccccagacccatggcagcagaaccaggatggagctgggactgtccagctctgccccctgctgctgccatgtgataggagacagtcggcacccccctctgaatttctgcatctgcatcttaacaatggggatgactatcccctctctggttattgtatcagagatgctaagagggtcatgtggcatgattggagaacctgggggaattggaaggccttattatctcagctattgtcccaaacaccacagacacagattgggtcagtccttcatgtaatacatgctgtgttctgtgaggatgtggtccacacaattccttctttgttaagggacatacagttgcaaatactcactgcatgaaggcaagattcccaagggagatgtgatagctgatcaggcttcccagacacctccttcccaaacacctccttcccaacacctccttccccaacatccttcccaacacctccttcccaacacctccttcccaaacacctccttcccaaacacctccttcccaacacctccttccccaacacctccttcccaaacacctctttcccaaacacctccttcccagacacctccttcccaacacctccttcccaacacctccttcccaaacccctctttcccaaacacctccttccccaacacctccttcccaacacctccttcccccttccccaacacctccttccccaacacctccttcccaacacctccttcccaaacccctccttccccaacatccttcccaacacctccttcccaacacctccttcccaaacacctccttcccaaacacctccttcccaacacctccttccccaacacctccttcccaaacacctctttcccaaacacctccttcccagacacctccttcccaacaccgccttcccaacacctccttcccaaacccctctttcccaaacacctccttccccaacacctccttccccaacacctccttcccaacacctccttcccccttccccaacaactccttccccaacacctccttcccaaacatccccttcccaaacacctgcctctcttcaaccccacaggccagagtgctgagacagagtggccttttggattcaataagtatcttgttctcttaaagactcagcaacgattttagaagtcgcagcagttttacatcacatgcagccaagatcagcttgctctacaagcaataacagaactacttagcacttcaaggttgaaagttcttcactaatggatccattgactaattgatcctggaaggccaaaggaataaaattcttttatataaataggaaaacaaaggcagagagctaaagcactaatcaaatcggggggtgttagagcaaaaacaggcttcagaaagagtattttaccatgcttcacatggaaaaaatcgagccccggagcgatgaaaggcatattttctttgtttctccaagtttcataaccgttcagttgcagaaccaagaatctaaaaccagctctgggaaacaaatgtccagatgccagcctcatagttgaacttggatttgaaaataccttcagcacttagaagagacattcaaatacatttcatttcctgttacccagattgttcggaaagtattaaaaatttttcatttacatgctg

SEQ ID NO: 1199 - DNA, 2129 bp, Homo sapiens
gattagtgacctgggggggtttgcgggagtgcgcagcgcggcgggacgcgactggaggcccttttggcttggagggcttcggccttcacggctggcgcagcctggattcccgtccggaggacctggcggcacccggtgtttgcgtgcctgcgagcaaggggtagaacgcggcccaggaatgtgggagggggcggccttcgctcggggtaatggcggcggcctcttttgtgtggtgctgggcggcgctgtggctcacctccgggagacggcgggtctcgggcgggcgaaggcctggaaaggaggatggaatgggtttcttgttttttcccgggttccttccgctggctttttcgcttcagcccaggttccgcagggtccgggggccctgcgccgcagccggggaggctgcgtttccggagtggaaagttttgtgacgcagaagattggggaggagtgggggaggggtgggggcggggaggggaggcaggaattggccgctgcgcgctgggccctggagatagaggttggacgtggcggggaggttagggagccagcgaggccctttctcctccttgcttgccccagattgtccctgtgtggtatgttagccgggagtcccgcgttgtttttctggggtggaggggtcatcgcgggttgtggtagtgtcttcgtgttagtgactgtgatccaggaatccgccattggaaaaacacccggcttaggggggaagtaaacagttttgttgttgacttgttgctatctgtggagtagaatcttgcaatgggtcccaggcccccgggttttttctcttagccagaatcccctcttctaagggtttaggggcagaggagagaaagatgtgtgatttgagaggagaaggttatggactttggtggcaggaagtctgcatcccaccgcaacagtggcaccaggcttcagataagctcttgtgtgggttatgcggagcttttaaataaactactgtctactgtgattaggggagcgttgatttcacaaactccggaataatcctgagacgaagtttagtggcacaaattaattgaatacatagtttaatgtagtcatatgtaatattttttaggaattgatctgttcctttggaagcattttctacccgttaatgaaccaattatattaaatcctctaattgctgacacatgttgaattgaacagacactttaacaacctaccagcagcacagagtattcccagttttaccattttccatttagctatagtgtccttttaaggattctaggcaacagtgaaccttatttaaaaagcaaaattgtgctataacaagtgcaaaaggaaagtttgtgttcctaccgtgctttaaagtattgatggtagcaagagaaagcgcagtggtgtttttgctcatagaaattctggaaattaggtgcctgaagtcttacactcattttttaaaagtatagcatctgcttccagttttcagtgactccattgatgatgcatgcggtttggccgtatcatactgagctttaaacacaagatttataaacatggtatgtagtgcatcttttgcaaacaggttggcagcggtactgtgtgacttggtcttttgtggcttttttgagaaaaatgaaacactttgcatgtatagttttttctcccaactacttgtgagtagttcctggttataaaacgttatgaaggtagcacataacccttttctagaatgaagaggcttttgagctaccagtgtaaggggataggtagaaatagagatgaaaggcactaagatgtcctactctttaagagcattgaacgccagttgtgccatttattcaaagtcatctttgaacttatgttaaaatggggtaaaaacaggtaactacttcaggccgggctcatgcttgtaatcccagtgctttgggaggccaaggcaggtggttcacctgacctgaggtcaggagaccagcctgggcaacatggcgaaaccccatctctactaaaagtacaaaaagtagcctagcgtggtggcgcacccctgtaatcccagctactcggggaggtggaggttgcagtgagccgagatcacatgactgaattccagcctggatgacagagggagactctgtctc

SEQ ID NO: 1200 - DNA, 2401 bp, Homo sapiens
attgtatgttactttttttcttttctctggatgattttaggatcctttctttatccttgacttttggaagtttgattattaaataccttgagagatggggtttcaccgtgttagccaggatggtctcgatcgcctgacctcgtgatgtgcctgcctcggcctcccaaaatgctgggattacaggtgtgagccagtgcacctggccgaggaaaaaaggaaggacaggaactagcctcaatccagcccaattagccttcccccaagtgcaacgaggccaatgacaaccaatgatgaaggcagtgtttacaaggaccaatctcttgacggatcatttaaaaactctttaaagattcagggaaaccacccagccagaatgttgatatcaagacatgatggatctactgtgtctccaagctttggaatcccaaagcccaaagaggaagtgaggggaagaattgttgtcatcctttctctacgactccaagagaaactttatactggaggaagaatattctaccactttgggatgcttccaaagaaatgggataccaaaggagtgaacttcaggtcattggaagtggccaagctggagggcgacctatggagacatgcaggttgtgaagtctcatgtcctatgaagagaaaatagggggaggaagggagaagaagaagaacaacagacaaaagaacaatcctggaaaatcaataggccacattactctgaaatccatacatcagcaggaagacagtgctgcagcaactctctgtgcatacaaatatttgtcagtatctctgacatttcctgggaatggattcctagaaaggagattactaaattaaaggaagtgaatttctacggagcttgatgattcctgccaaactgctttccagaagtgatgtatcagttttcattcctattaacattgggctcaggccagcattgaatattatattttaaatcttttcaaagagacatttcttgactatctctgatactggtgatcattactggctcaggaattggatgtaaagtgagctagctggactggtgacaccttccctttacctccatgggttcctacaccttcagaagctgcacccttgatgaaaggggacaacatgttctggtgaggaatctagcatccttcagtcaagagcttgggggaagtatgttgcttaaaaattaaatacatcctgagtaaacacgtttcgcacaagaaaaagtactgttcctatatcagaaatatagaaacggaaataaatagaaagcaagtgactttcccaggtatagctagcaagtccctagcagggtcacacttagcatttactttcctaaaattttccatcatgatttaagacatttcaaagcatctatattgtgccaaaaattagattctgcatcacacataggaaagcacaatttttggcttatttcttaaatactaaatcacattaattggctgtttcccattgcaaatatttgaattaataaggatctttttatcacacgtaattttaaatgatcttttagattttcagctttgctgcaacacagatggaactaaaacaaaattgtataatgctgaagtgacccaaggagaaaacctctcacataattttgtgcagagagtgagtaagcagtctatgccacatcttccccaaatttatattttagctgaaatgtaatggttagacagatagtcagtaattggtacagtgagaagagaaattagttctgacttatcttctctccaaactgcaaagtgtatttttatatacaatttcagaatgataataaaatgatctagtttccatttatcaaaatgagcgatgctgaatgtctgatgactggcttgctttctgaaatcttattttagagttatcagactgtctgagatctttgggaaacttctgcattaagtgagccaattggcaaataaacatctacttaacatgtacaaaactatacaaggctgagatacagaggatgtggcagagatgatcagtggtcatctcagaatggtctctgaaccagcagcatcagcagcaccttggaactgatcagaaatgcttaccttacacatattggatcagaaactctatggagaggctgggcagttgtgttttaacaagccccatgatgtacgctaaagttatctaagaactctgatcccaagaaacaacttaaaatacgcacacacacaggagtcagctctggaaaagaggaaatattgtgtcattagcatatcagaaaatttgaagaagccctgaaagagcaaagctgatgtgttcacattcgcagaggaaaccatagcccaatagaaaaaaaatatattagtaagggaatgagaatgttttaggaggaactccagaataggagaatactaaaaatggcaggggc

SEQ ID NO: 1201 - DNA, 2354 bp, Homo sapiens
agcactggaggccacccagtcatgggggacaccttcatccgtcacatcgccctgctgggctttgagaagcgcttcgtacccagccagcactatgtgtacatgttcctggtgaaatggcaggacctgtcggagaaggtggtctaccggcgcttcaccgagatctacgagttccatgtgagtgtggggacggaggagggacagggacccaccgttccagctccaccctttgggaaggaccttagcccagaaaaccttaaaagaaatgttccctattgaggcaggggcgatcaatccagagaacaggatcatcccccacctcccagctcccaagtggtttgacgggcagcgggccgccgagaaccgccagggcacacttaccgagtactgcagcacgctcatgagcctgcccaccaagatctcccgctgtccccacctcctcgacttcttcaaggtgcgccctgatgacctcaagctccccacggacaaccagacaaaaaagccagagacatacttgatgcccaaagatggcaagagtaccgcgacagacatcaccggccccatcatcctgcagacgtaccgcgccattgccaactacgagaagacctcgggctccgagatggctctgtccacgggggacgtggtggaggtcgtagagaagagcgagagcggtcagacctcccaccttacggggctccttcccctggtgctcaggaacccacagccacaagccccctgccaaggctcaggcagccttgcccctgggaggactccggctctgttaggggccctaaatgtcctccccacactgtgggtcgccttctgtcttagtgtgcaccctgtggtggctgtgggcatctgtgcatggcaggccggggcggggcatgtctgcgtgttctgtctggatgggtatgggaccgtctgttcattatgaagtgggctcagagctgtgattctgtgagcatgtgtgcatgcatgcatgtgacctcattgtccagtgtggtgaaggtgacatttccaaatctgagcattggacatcagtgtgtctgtgtccctgtgtcctcaccatccctgatggctgcagggagccgctgggccctgcccctcagtcacattcccgcacctctggcacaggttggtggttctgtcagatgaaagcaaagcgaggctggatcccagcgtccttcctcgagcccctggacagtcctgacgagacggaagaccctgagcccaactatgcaggtgagccatacgtcgccatcaaggcctacactgctgtggagggggacgaggtgtccctgctcgagggtgaagctgttgaggtcattcacaagctcctggacggctggtgggtcatcaggaaagacgacgtcacaggctacttcccgtccatgtacctgcaaaagtcagggcaagacgtgtcccaggcccaacgccagatcaagcggggggcgccgccccgcaggtaagcgggggtccccggggctgggcggggtcgagcggggcgcaccacgggttcgctctgtctaggccatagcttggcagtgccggggcgggggctctcagcctggcaggagaggcaggaccctcacgggggaaaggggttggacgcgcctggccgcggtgtggggctggcacgggggcggaaggaaagcggcgatgcccgggggctttggggatgggcagtccaggggggctccccggagagggggacgacagaccgaaggctggtgaggggcgtggaaaaccgcccaggctctgctgcagggcaagggtccttgtcgtgacgggggcagccgcctcttgtcccgccggggtcgtgcagactaccggccccctactgccccccacttcctcggaccaggggtgcccatctgagtccctgggggcaggggcgccctcgggctttgacgacgccccgtcccgctgggccaggtcgtccatccgcaacgcgcacagcatccaccagcggtcgcggaagcgcctcagccaggacgcctatcgccgcaacagcgtccgttttctgcagcagcgacgccgccaggcgcggccgggaccgcagagccccgggagcccgctcgaggaggagcggcagacgcagcgctctaaaccgcagccggcggtgcccccgcggccgagcgccgacctcatcctgaaccgctgcagcgagagcaccaagcggaagctggcgtctgccgtctgaggctggagcgcagtccccagctagcgtctcggcccttgccgccccgtgcctgtacatacgtgttctatagagcctggcgtctggacgccgagggcagccccgacccctgtccagcgcggctcccgccaccctcaataaatgttgcttggagtgg

SEQ ID NO: 1202 - DNA, 2423 bp, Homo sapiens
ttgaccttttgaatttcctccaactttcaggtcttccctcatcttcccaacctcttaatgttggggtgttccagggatgagtccttggatcatttttcttctctttgtggttaacctgttagtgatctcagccagtcccataactttgaatatatggatagcgaatctgtgatctcatctccattgcccctgatgctcctgtaactcaggccttatcaacccccttaggcagtctcctaggtggctgtcctagtctgtttgtgtttttacaatggaatacctgaggctgggtaatttagaaagaaaagaaatttatttggctcacgattctgcaggctgtacaagaagcatggtgccggcatctgcttctggtgagggcctcaggctgcttccactcatggtggaaggtaaaggggagccagtgtgtagagatcacatggtgagagaggaagcaagagagaggggagagggtgccaggccctttgtaacaaccagctgtctcgggaactaatagagaactcactcacacactcccccatccaaggagggattaatttatttatgagggatccacccccatgacccaacacctcccattaggctccacctccaacatcggggatcaaatttcaacacgaggtttaggaggacaaacatcccaacaatagcagtagcctttctgcaacctagctctgtctaatccatcgtccccattggagccagatggagcattccaaacaacagattggatgctgccactccacagtgtgagtccctcagcaccttcctgtagcacacaggtttatgaacaaactcctcagtgtgcactcaaagcccttggtgatctggccctagctacatctccagcctcacctctcatcttctttcccttgccccgtctaagcctcagctgtgcccagctacttgtggcttccttagtgttccccaccacattgccactggttatcaattcctggctacctgggaagcaggcatctccctgtccttcaaggtttatctcaaatgaaatgtcctttatgactatgactcacatgactgtccctccctgttccttcccctaccccatcctaggatggttcactcattcccttgtgctcccaccatacccactgcatacttggaagcccttggaacactttattgcccttgtgatttatacatctttgtcccttgactagaccacaaatgaattattcatcaagcacaagtacagtgtctcatttgctctggtctcctaggggcctagccaaggaccgggcctctaccagacaccatgacaatgtctgacattccgagggccaggcatgatgccttgcacacgccataggagttccatggctatctgttgaaagaatgatcctaaattgtgaactgtcagtgtaaaacagttccctaggtgccttaaatactgaacagcaggtcctacaagagattttatagtggggcaatgcatggagctactatggagaacagaatggcggatactcagaaaattaaacgtggaactaccacatgatctgacaattccgctgatgggtatataccccaaagaagggaaagcaggggcccaaacagatatttgtacattggtgtccatagtagctttattcacaatagcccaaaggtggaagcaaccccagtgtccatcagcagacgaatggaaaaacaaaatgtggtctatatatacagtcatgtggtgtgtgatgatgaggatacattctgagaaatgcatcattaggtgattttgtaattgtgtggacatcatagaatgtaccttacagaaacctagatggataacctgctaacatctaggctatatggtacagcctattactcctaggctacaaacctgtgtggcatgtgactatactgaataccgtaggcaactgtaataccatggtaagtatttctgtatctaaacgtagaaaaggtacagtaaaaatatggtattatagccttatgggaccaccattggatatgcagtcatcattgactgaaacgtcgttatgtggcacagttaagtggcactgtaagactaacatacagtgcaatgttagtcttaaaaagggaaattctggcatgtgctataacatggatgaaccttgaaaacatgctcagcaggccaggcgcggtggctcacgcctgtaatcccagcactttgggaggccgaggcgggcggatcacgaggtcaggagatcgagaccatcttggctaacacggtgaaaccccgtctctactaaaaatacaaaaaaattagccaggcgtggtggcgggcacctgtagtcccagctactcgggaggctgaggcaggagaatggtgtgaacctgggaggcagagcttgcagtgagccgagattgcgtcactgcactccagcctgggcgacagagtgagactccatctc

SEQ ID NO: 1203 - DNA, 2282 bp, Homo sapiens
tcccggaagtgcgcccggagccggcgccgcgggccgagtgtcctggtgaagacctagttcttgccggagacaattccactgcagaagcactttacttaaaaggacttgccaggctggacaatgcccgttgacttggggcaggccctaggcctgctgccatcgctggcgaaggccgaggactcccagttctcagaatcagatgctgcccttcaagaggaactctccagccctgagaccgcacgccagcttttcaggcagttccgttaccaggtgatgtctgggcctcatgagaccttgaagcaacttcggaagctctgtttccagtggctacagccagaggttcacaccaaagagcagatcctagagatcctcatgttggagcagtttctgaccatcctgcctggggagatccagatgtgggtgcggaaacagtgtccaggaagtggagaagaggcagtgacccttgtggaaagcttgaagggggacccccagagactgtggcaatggatcagtatccaggttctaggacaggacatcttatcagagaagatggaatctccaagctgccaagtgggggaagtggagccccatcttgaagtggtgcctcaggagttgggacttgagaattcatcctcagggcctggggagcttctgagccacatcgtgaaagaggaatctgacacagaagcagaactagccctggctgcctcccagcctgcccgactggaggaaaggctgatcagagaccaggacctcggagcctcactgctctcagcagcacctcaggaacagtggagacaactggattccactcaaaaggagcaatactgggatctcatgctggagacctatgggaaaatggtctcaggagcaggcatttcccatcccaaatctgacctgactaattcaatagaatttggggaagagctggcaggaatataccttcatgtcaatgagaagatcccaagacccacctgcataggagatagacaagagaatgacaaggagaacctaaatttggagaatcacagggaccaggagctcctgcatgcttcctgtcaagcttcaggagaggttccttctcaggcttccttgaggggcttcttcactgaggatgagccaggatgctttggagaaggagagaatctccctgaggctctgcaaaacattcaggatgagggaacaggggaacagctgtctcctcaagaaaggatttctgagaaacaactaggtcagcatttgcctaatcctcattcaggagaaatgtccaccatgtggcttgaggagaagagagagacctcccagaaggggcagccaagagcccccatggcccagaagctccccacctgcagggagtgtgggaagaccttttataggaattctcagcttatttttcaccaaagaactcacaccggagagacatactttcagtgcaccatctgcaaaaaagcctttctgcggagttcagactttgtgaagcatcagagaactcacacgggagagaagccctgtaaatgtgattactgtgggaaaggctttagtgacttctcaggattgcgccaccacgagaaaatccacacaggagaggaaccctataaatgtcctatctgtgagaaaagtttcattcagagatcaaactttaatagacatcagagggttcacactggagagaaaccttataaatgttcgcactgtgggaaaagtttcagctggagctcgagccttgacaaacatcaaagatcccacttaggaaagaagccctttcaatagccagtaaccaaactctctttccccatttctatctcccagcccagtcacaaaaatactcagctccatcaagaggaattgtgtctaagaggatacccctgttaatctccttttttcttggattggagaggagagaatctggacatggctttggacttggaggatatcttggattggattgcacaatggcttaaattcttgattctgcctcaggagaaagaatagtcttcatgtttccactcatccttcctttggacccatcggggaaaaagtctaaattggagatccagttttagaagtgctttctgggaagcatttaatgggattagctgtagtcactgcttatgggaagaacctcagatcagccccttaaaatgagttctagagcaggtcttctgttccagaaggggagaagcatagagggcctgtgagctcacgtgtgttctttgtcataggggtgaaaaactaacttcaagtgtcccttgtttgaaataaacttagcagagtcactttct

SEQ ID NO: 1204 - DNA, 3060 bp, Homo sapiens
actattttttaaatgaaattgttcagcaaattgtacttaattatatttttaattttaagttctgggatacatgtgcagaacatgcaggtttgttacattggtatatgtgtgccatggttgtttgctgcacctatcaacccgtcatctaggttttaagacctgcatgagagggtggagccaagatggccgaataggaagagctccagtctagagctcccagcatgagcgacgcagaagacaggtgatttctgcatttccaactgaggtactgggcttatctcactggggaatgttggaaagtgggtgcaggacagtgggtgcagcgcacccagcatgagccaaagcagggagaggcattgcctcacctgggaagtgcaaagcgtcagggaattcccttttctagtcaaagaaaggggtgacagacggcacctggaaaatcgggtcactcccaccctaatactgcacttttccaaaggtcttagcaaacggcacaccaggagattatatcccacgcatggcttggagggttgtatgcccacagagcctccctcattgctagcacagcagtttgagatcaaactgccaggcggcagtgaggctgggggagggacgcccgccattgccaaggcctgagtaggtaaacaaagcggccaggaagctcgaactgggtggagccaaccgcagctcaaggaggcctgtctgcctctgtagactccacctctgggggcagggaatagccaaacaaaaggcagcagaatcctctgcagacttaaatgtccctgtctgacagctttgaagagagtagtggttctcccagcatgcagctggagatctgagaacggacagactgcctcctcaagtgcgtccctgacccctgagtagcctaactgggaggcaccccccagtaggggcagactgacacctcccacagccaggtactcctctgagacaaaacttccagaggagcgatcaggcagtaacatttgctgctcaccagtatctgctgttctgcagcctccgctgctgatacccaggcaaacagggtctggagtgaacctccagcaaactccaacagacctgcagctgtgggtcctgactgttagaaggaaaactaacaaacagaaaggacatccacaccaaaaccccatttgtacatcaccatcatcaaagaccaaaggtagataaaagcagaaagatgaggaaaaaacagagcagaaaaactggaaactctaaaaatcagaacgcctctcctcctccaaaggaatgcagctccttaccagcaatggaacaaagctggatggagtacgactttgatgagagaagaaggcttcagacaatcaaactactctgagctaaaggaggaagtttgaacccatggcaaagaagttaaaaaccttgaaaaaaattagatgaatggctaactagaataaccaatgcagagatgtccttaaaggacctgatggagctgaaaaccaaggcacgagaactacgtgatgaatgcacaagccccagtagctgatttgatcaactggaagaaagggtatcagtgatggaagatgaaatgaatgaaatgaagcaagaagagaagtttagagaaaaaagaataaaaagaaatgaacaaagcctccaagaaatatgggactatgcgaaaagaccaaatctacatctgattggtgtaactgaaagtgatggggagaatggaaccaagttcgaaaacactctgcaggatattatccaggagaacttccacaatctagcaaggcagggaacattcaaattcaggaaatacagagaacgccacaaagatactcctcgagaagagcaactccaagacacataattgtcagattcaccaaagttgaaatgaaggaaaaaatgttaagggcagccagagagaaaggtcaggttacccacaaagggaagcccatcagactaacagctgatcctctcagcagaaactctacaagccagaagagagtgggggccaatattcaacattcttaaagaaaagaattttcaacccagaatttcatatccagccaaactaagcttcataagtgaaggagaaataaaatcctttacagacaagcaaatgctgagagattttgtcaccaccaggcctgccctaaaagagctcctgaaggaagcattaaacatggaaaggaacaaccagtaccagccactgcaaaaacatgccaaattgtaaagaccatcaaagctaggaagaaactgcatccactaacgagcaaaataaccagctaacatcataatgacaggatcaaattcacacataacaatattaaccttaaatgtaaatgggctaaatgctccaattaaaagacacagactggcagattggataaagagtcaagacccatcagtgtgctgtattcaggagacccatctcaagtgcagagacacacataggctcaaaataaagggatggaggaagatctaccaaacaaatggaaaacaaaaaaaggcagggattacaattctagtctctgataaaacagactttaaaccaacaaagatcaaaagagacaaagaaggccattacataatggtaaagggatcaattcaacaagaagagctaactatcctaaatatatatgcacccaatacaggagcacccagattcataaagcaagtccttagagaccaggaagagacttagactcccacacaataataatgggagactttaacactccactgtcaacattagactgatcaacgagacagaaagttaacaaggatatgcaggcattgaactcagctctgcaccaagcagacctaatagacatctacaggactctccaccccaaatcaacagaatatacattcttctcagcaccacaccacacctattccaaaattgaccacatagttggaagtaaagcactcctcagcaaatgtaaaagaacggaaattataacaaactgtctctcagaccacagtgcaatcaaactagtactcaggattaagaaactcactcaaaaccgctcaactacaaggaaactgaacaacctgctcctgaatgactactgggtacataac

SEQ ID NO: 1205 - DNA, 2523 bp, Homo sapiens
gagtcacgcgcctgggtctcggcggggctgcgggaccgcgagtgagtgtggtcgctcctggttctgccagctcccctgagagcctgaacccgggcttgagagcctcgccaccccgggtgacatccctgccgtgggcttgggggctctgggtgtgattccgccggtccgggtcccgcagcgaccacctacccagcgcagtcaggggtggggctgggacccagagcgggaccccggctgccgagtccaggtgtcccgcgggcctcgatttggggagcagaaaacgccaggtcttcaagggtgtctgccaccaccatgcctgacccatttggcagcagcctcgtgtgtggtggtctggtgtggacggtggaagcgtgattctgctgagtgtcagtgtgaccactcgtgctcagccgtatctcagcaggaggacaggtgccggagcagctcgtgcagctaagcagccaactgcagaaacgtcaggcctgttgcagtctccaaggcaccatgaatgccatcgtggctctctgccacttctgcgagctccacggcccccgcactctcttctgcacggaggtgctgcacgccccacttcctcaaggggatgggaatgaggacagtcctggccagggtgagcaggcggaagaagaggaaggtggcattcagatgaacagtcggatgcgtgcgcacagccccgcagagggggccagcgtcgagtccagcagcccggggcccaaaaagtcggacatgtgcgagggctgccggtcacttgctgcagggcacccgggatatatcagccatgataaagagacctccattaaatacgtcagccaccagcaccccagccacccccagctcttcagcattgtccgccaggcctgtgtccggagcctgagctgtgaggtgagccttgtggccacagagcctgtctctgtgggagcccacatgctcccaggtgctctgggtgggctcggagccagcattgcacagggaggcaggcactggtcctctctcagggcggacccgcagatcagcacagcacagggtacaggacgcctcccttgtccagaattgcgggaggagtcatgttggacttgctgagcattttctgattgagtgctagcttttgcactttaagcaccgaacttttattatttgtcctttctttattattattgttttcttttttccttcttttgtgtcagggtctcgctctgtcgtccagactggagtgcagtggtgccgtcatggttcactgcaacctcaaactcctgggctcaagcgatcctcccgccttagcctcccaggtggctgggaccactggtgtgtgccaccatgctcaactggggtttgttttttgttgttgttaagacagagtctcactcggttgcccaggctggagtgcagtggtgcaatctcggcttactgcaacctccaccctgggtttaagtgattcttctgtctcagctatcctgagtagctgggacaacaggcgtgtgccaccatgcccggctaattttttgtatttttagtagagaagagatttcaccatgttggccgagctggtcttgaactcctgaccttgtgatttgcccgcctcggcctcccgaagtgctgggattacaggtgggagccactgtgccccacctttttaaaatttttttgtagagatgaggtctcagtatgttgcccaggttggtctcgaactcaagcaatcctctggctcatcctcccaaagcactaggattacaggtgtgagccgccatgcccagccatgtgtgtctattcttgatggatgtattcctaagataggaagcatttctaggttaggtggttcattgcatcaacatcacctttttttattatctcagtcctcattccaagtctcagtgatgatcccgtgctgctctcagcctgctgaggtgtggatgatttcttcctaaactacgtcgctgctgctgttgctcttgactctgagctcaggtctttgttacaaagaattcgtcgttcagttactaaacttccttgtcattggtgtccacccagttcgacacaccaagctcccttactgttctcattcagtgtggctgtgtgcctgccctcaactgtcctctccttttaatttcctaccgctggtctgctagcaggcagctcggcatgtctgttagaattgtgtgttaaggaagagtaagtatgtaatgaggagggactgaaatcctcttataagaataaagtatgtggggctgggcatggtggcccactcctgtaatcccagccctttgggaggccgaggccggcagatcacctgaggtcaggagttcgagaccagcctggccaacatggtgaaaccccctctctaaaaaaaatgcaaaaaaattagccaggcgtggtggcacactcttacaatcccagctactcaggaggctgaggcaggagaattgcttgaacccaggagacggaggttgcagtgggccaagatcacaccactgcattccagcctgggtgacaagagcgagactccatctc

SEQ ID NO: 1206 - DNA, 2261 bp, Homo sapiens
agcaggcttcgtgagctggggaagtgccagaagcagccttcgaattagacagacctggacccaaaccctttctcttcccccagcccattttggcatcttggcacgagactgtccccatttctggaaagggtgttcacaagaacagtctggctgggttgttgggatgaccgagtgtgatcatgcgtctctatggctggccatggtgtttattcgatggcaggtattaccaggatggagcgagtcccagtaggaagggcctttaggatgtcatctggttccacccaacagggatgggaactgtaattccccactctccctgtggagaatcagggcgggctccggatggatggccaaaggctgcacagaggcgctcctgtgaagaggaagcctcaggagggagtgagagcagaagggagcccacctgtggttgtctcagcaacagcagaagaacctgggccgctgggagtggagttggagagaaacaggttgatttggaagttcttctgcaggtagaacggaaaggcgaattctgcaagatgctctggggtccactgagctcagctgcttaggctcagctctttctgtggcttcttcttgagcagcctgttgaccaagatgtggcccatgccactccctatattcggagtccattttctgatgccctctttcagctcttcgcctgcactcatctgtgactgcctggtactgctaggaagcctctgtttgtgtctcatctctccaggtggactggagctcctgggggtcctttcctttgtgggggttctcaatatcagaatggagtcgcttatgtcaaaccctaacaaaatggaggtggaggtcacgaattggagcctatatgcgtgcctgtaacaggacttgtcacaaggaatccctgcacatatgtgtatgatggggactatgccaggaactcctcacatatggaggattcgaggtaagccatttgctcaaggacacttacccagcaatggcagcctccactaatgagacatcgccaactcctgtaatcaatggtctttgtttctaaacagcttatgtggaattctccgtttttttgtctgtaaaagttttctttagccccaatctctttggatatgcctatgattcatcatagcacatgtttcccaggttgcaatcccctgcaattcccaaataagctccttttgtggagatcctgtctctctctgtcattatttaggttgacaccttttatgtcctgcattgctgttgatgacacccacatttgtacctcctgcttgaatgtcccctcccccaactccaaaattcctctctctgtctaccctgtacctctatttgaaccactaagaggcatctcagacttaaagtgtcccaaactgagcccctgtgatgcccccagagctgctcctccccaccacctcctcctcagcaatggcagcttgattcttctttgggctttattcagtcccccaactttggagctttcttgacccctctctattgctcacatgccatattcaatgtgtaggcaaatcctttggccctgccttccaaagacatgcagaatctactcacttctcgccacctcgctgtctcactctgcgtcaggccaccctgtgtgtccttgcacaattgcgggagccttggctcgagtcctccagaccttctacctctttgacttcatctagtgctgctccaagccccgtgctcttccttggacacaccaggcatgctgccagcagagcctttgcatgtgctgttccctttgtcgggaagccttttccccagctatctgctcagctcatccgctgtctctttcgtcctcgctcagattccccttctctgtgaagcctttctgaccatcctcattaaaatcaaataaccccacccctccactctcttgcccattttcctcatccatttccccctaggactaatcactctctaacattctctatatatttttctgatatatttgtttatatgtcttgcataaacaaaatgatttggtttatggtctatctcttcttgctagaatgtgagctctacaagggtagggatgcttattttgtcaccgttgtgtccctgactcctaaaatgctgacggtgtggccagctgcatgccctgctgtctctattttgaaactctaacaaaattttggacaagaccctcctctttcattttatgctggacctggaaaattacagagcaggttctgacttccaggcacatggtacgcattcaataaataatctcttgaatg

SEQ ID NO: 1207 - DNA, 2422 bp, Homo sapiens
ccctggctgtctacatgcaaaccccaagccagcccctgcccacttacgatgaggtgctgctctgcaccccggcaaccacctttgaggaggtggcactgttgctgcgccgctgcctgaccctgggctccctggggcacaaggtctacagcctgctgttcgcagatcagctgagctacgaggtggcacgccaagcggaggagcttttccacaatctgtgcacgcagcagcaccgagaagactaccagctcgtcatggtctgtgatggggactgggagcactgctacctcccctctgccttcagccagcacaaggtcttcgtcaccccccaggcacccctcgaggccatccaagcctacctggcaggtcactaccgggtcccgaagcagaccctgtcggcggcagccgtgttcaatgaccggctgtgtgttgggatcgtggcctcggagcgagcaggtgttggtaaggagagcggcagggtgggcaggccccgtctcccagggactgcccggggcccttcccccctccagcagatgaagcctgtctgcaggtggagaaaccgaggctcagggagggtgtgattcatctgtgggtgtcaatcagggtctgtgccagaaccaggcaccctggtcacctggtctcccacaatgggtattccctgggagccccattcccttcctcctctcagcaaacatctctgcagtgtactttgtggtttttttttttttttttttttttttttgagacagagtcttgctctgtcacccaggctggagtacagtggcgtgatcttagctcactgcaacctccgttttctgggttcaagcaattatcctgcctcagcctcctgagtagctgggattacaggtacccaccgccatccctggctaatttatttttttttgttttttgttttttgtttttttgagacagagtctcactctgttgcccagattggagtacagtggcgtgatctcggctcactgcaaccttcgcctcccggattcaagcgattttcctgcctcagcctcccaagtagctaggactacaggcatgcaccagtacacccagctaatttttttatttttagtagagatgtggcttcaccgtgttagccaggatggtctcgatctcctgacctcatgatctgccctcctcggcctcccaaagtactgggatcacaggcatgagccaccgtgcccggcctaatttttgtatttttagcagagacagggtttcaccatgttggccagtctggtctcaaactcctgacctcaggtgatccgcccacctcagcctcccaaagtgctgggattacaggtgtgagccaccacgcccggcctgaagtttacttcttctgcccttaaatgccactggcctctttggggttgatgttggtcgtgtgagcaaggggaggtagaattgaagagaaagccatgcctcttgacccacccttcgtttgccatcttgtttcccttaaaaaaaaatagtagcttctgttctgttgactttatcctatcaacagtacctcgtcctgttgggataaacattactcttcccctccctgctgaagcctctccttttgctgtgacttttattagctagtcactcaacacataatgacatttcagtcaacagcagaccacgtatatgaccacggtcccataagattagaaaactgtactttaaaaattagccaggcatggtggtgcatgcctgtgatcccagctactaggaaggctgacttgggaggatcgctccggcccaggaggtcgaggctgtggtgagctgcaaatacgacactgcactccagcctaggcaacggggcaaggccttggtcttttaaaaaaagagaaagaaagaaagaacaaaagattataataccatattttttactgtaccttttctacatttttatttttatttttgagatggagtctcgctctgttgcccaggctggagtgcaatggcacgatctcggctcactgcagcctctgcctcctgggttcaagcgattctcctgcctcagcctcctgagtggctgggactacaggcacgcgccaccacacctgactagtttttagtagagatggggtttcaccatgttggccgggctggtctcaaactcctgaccttgagtgatcacccgcctcagcctcccagcacttagggaggccgaggagggcagatcacgaggtcaggagatcgaaaccatcctggctaacacggtgaaaccccgtctctactaaaaaatacaaaaaattagctaggcgcagaggcacgggcctgtagtcccagctactcaggaggcggaggcaggagaatggcgtcaacccgggaggcggaggttgcagtgagccaggattgtgcgactgcactccagcctgggtgacagggtgaaacgccatctcaaaaaataaaaatt

SEQ ID NO: 1208 - DNA, 2325 bp, Homo sapiens
taacactttcaaattagagaatgattagttttgtctgggtcttaaaagtaacgaatgtgaagatagacaagatcatttagaaaagatatgttggagaacacaacctatcattgctcagaccctgaaaagtggctgcaatgctgcggcgttccaactaaaaagaagcttcaaaaatcctgccctagttacagaacacaaggtctggcaaattcaaaacataactgtagtgatgtatccaaacctacgttttcagtaacacttctaaaaaaacagaacaaactgcatctcatataatatttatgttctctttgaaaacacacaaatatttcctatgaccagcatggttgccaaacttgctctttcctgccaaaccatggccttttctttcctgaacaagccactgaggaaaatgctgagattctcttggcttatgtggctgaggaagaggaagccctgccccaggccctggtatccagtcctcaaccttcccgctgagcagaccaaggacaaatgtgaaatgaacactgtcatagttcccagggcaaccaaaagcactgaacagatacactataaggtaacattggtcttttttgtaaaatttaagtacaggcatttagagtttcctgaaatctcaaatgcggtgttaggtgcctcactggtagacattcttttatcattccttaacaaaaagaatatttcctcgctacagcaataatccctcttgcctttttttttttgagatggagtcttgctctgtcgcccaggctggagtgcagtggtgcgatcttggctcaatgcaacctctgcctcctgggttccagtgactctcctgcctcaggctcccgagtggctgggattacaggtgcccgccacccccatgcccggctaatttttgtacttttagtggagatggggtttcatcatgttggccgggctggtctcgaactcccggcctcaggtgatctgcctgccttggcctcccaaagtgctgggattgcaggcgtgagccaccatgccccaccttgcctttatctctctcctgcttcacgtacattctcagggtctaagaccaagaagagacaacatccacccagctggtatgagatatcttcaggtaggatagagggagaaggcagcctatgatagtccttggatccttgctaggggcagaaacatggtgggtcatgattccttcacttcttccagactacactgctaaacgtgaatgttagcaaatgctcagattattttttgacacttgaataatttcactcgactactttatgaccaacaatttctttgtgtgtgtgtgtgtgtgtgtgtgtgtgtgtgtgtgttcttttttgttgttggagaaagggtcttgctctgtcacccagggtggagtgcagtggcacaaacatggctcactgtagtctcagcttctcaggctcaagtaatccttccgtctcagcctcccacgtagctgggactaccagtgtgtgccccatacttggctaaactttctgtatattgttattgatgtggttggaagaaatgacagcttttacaaagtacataaaggcactaatactacttgtataacttctaaggagacccctaaagtttcctatatttttatcccaaagggatgctctataacttatatataaaagtacctggggccaggtgaggtggctcatgcctgtagtcctagcactttgggagactgaggcaggcagactgattgagcccgggagttcaagaccagcctgagcaacatggcaaattcccaactctgcagaaaatgcaaaaattagctgggcgtggtggctcatgcctgtagtcccagctacttgggaggctgaggtgggaggattgtttgaggccgggaggtggaggttgcagtgagccagggtcatgccactgcaccccagcctgggccacagagggagaccttgttttttttttaaatgcacctggcatataacagtgcttaataaaaactttaagacaacttaagaaaaacaagcccctctaagattatctacattgactttgtgcaatccctctcattatgtattggtgaactcagaggaacaaaatgtttcaagtctaagtcacataatcagttgataaatctccaaagcaaacccgtcccctcccattatctagaaggctactttataactgaataaaaatcatgtttgacttgtccttttggcacggctagttacgttaaaggtacgtaatggaaaataaactagagctggccggctatggaggaaagagatagatctaactccgagcaagcaataccattcgcatggtagggcaagcacatgc

SEQ ID NO: 1209 - DNA, 2543 bp, Homo sapiens
tcttcctataatctctgctgctgctaaaaacaggtatcatcatgcacttctcaggtgacgtgctgtccataccttacagttcccttagctgagacaataacccatggggtttatagtacagactttcctcggaaatgttacgctgattgaaagaagccagtcgcggccgggcgcggtggcccacgcctgtaatcccagcactttgggaggccaagtcgggtggatcacgaggtcaggggatcgataccacggtgaaaccccgtctctactaaaaatgcaaaaaaaattagccgggcgcggtggcgggcgcctgtggtcccagcaactcgggaggctgaggcgggagaatggcgtgaacccgggaggcggagcttgcagtgagccgagatcgcgccactgcactccagcctgggcgacagagcaagactccgtcttaaaaaaaaaaaaaaaaaaaaaaaaaaaaaaaaaagccagtcgcaaagatcatgcactgtatgatccatttaggtgaaagtccagaaaggagaagtctacagagacagaaaattgagtagtacttgcctacctgggagtggggtactggcgggtagagagataggaaggtgagatgaggtttctttttgaggtgttggaaatattctcaagttgactggagtgatggttgcacatatctgtgaagatactgagaaccactgaactgtatactttaaatgggtggctcatgcctgtaatcccagcactttgggaggctggtcaggagttcgagaccagcctggccaacatgtagaaaccccagctctactaaaaatacaaaaattagccgagcatggtggcacacatctgtaatcccagctactcgggaggctgaggcaggagaattgcttgggcctgggagttggaggttgcagtgaaccgagactgcgccactgcactccagtctgggcaacagagtgagactctgtctcaaaaaaaaaaaaaaagggtgatttgtatggtatgagacctgggttcaaatgttccttctgctgcttgctagctgagtgaccttgaacaaatgactcaccctctccaagtctgtttccttatcagaaacttgttggtatgaggacctactgcataaggggggtgtgtgggttaaattagataaagcatagaaagagcccaggactgggtctggcacatattcaccaagtgacttccccattggttctttgaaaataaggtgcccagaattggtcagaatcacctatattttgcccctagtttgcttaggtgaaaagcgaaaggcaagggagggcaaagcctggggacatcagcattaaagggtgtgtggcacccagggagacatagccccaccccagcaacctggagagggagaagcttccgtggtgtggaaggggatgtccgctgtggaaaacctgggctctgtggacatcaaaatgagcaaagaaacaataaaaagttgtagtagactcactcactctatctacacaaaaagacgtctttggggcccgcatgctttccctggacagaaaccggacctcctcatcttgcaagcctgttgccctctcagaagccgtggatcgtctttcctaagtacagagttgaccttgaagttgtgaaagtggaagctcaagtggagcttacttcaaagctttggagattatctcactaaccagcattactttgcagaagtgggactaaggctcggaggctgggttgcttggaggccaagccagttccagaacccaggattttgactctgccccatttagctcaatgcagtgccgccttccttctttgactgtggacacttaacttgcctttaaaacttggccacatttattttcatagtttatgacattgacatacctgtgcataactctgtctcagcattttaaggccctggtggtgcacaggaagccgtgactaaaatgataggtacactgttcctaatacgggatataaaagactcaacaccacacctgacaaaagaagctgttgtcttaaagatgcatcttcctttaaagtaaatgaataacaaaggtaggccataaggagcttcttatctactttaagctcttggctggcttttccaggaagtttgaggagataaatcatgactcattttctgcagggtcagtggggaaactggagaggtggctgtccctgttcctgccggtgcctgaagctttcagtgttgttccatcacactctggctccatacctttcctcctgtcctccctccctgttggctggagtctaatgtgacacttcttccaaaacacagaaccgcctacattgtgtaagaagactctcaaaaaccattgattgaaatgctgctgatgccaaaaaaaaaaaaaaaaaaaagaggtggagagagggtagtttagatcaccaagaataagaaccaactggctgggcgttgtggctcacgcctgtaatcccagcactttgtgaggccaaggcgggtggatcacttgaggtcgggagttcgagaccagcctggccagctggcgaagccttgtctctactaaaaatac

SEQ ID NO: 1210 - DNA, 1997 bp, Homo sapiens
ttttgcatgtgggaggcaaggcaaacctgcctgtcttgggattgccaggcccaccctccggcagttcctggtggaccttccatctccccaccccccacccacgctcacagccctgatgcttttggggctggagattcaggagagcatttggagaggaagcacacgggccatggtagggggctgttgggctcggctcaggtgagtctgggggtctgtggcacttggctctgtgctgtctacgtgatcagagaagccgcgcaccactatctcaggtcctgcaggaagtggttggagctgggccagggtggggctgggtgggaggcggcgccctctgcattgtagtcaggaagggtactcagagatggctccaggttctctcctccacacggcggccatccttgcccatcagcacggccaggaaagagacaggactcaggccagattgcctgggcttgcctgccagttctgccatttggattgtctcaggcaggtgacctcccctactggagcctcagcttgctcgctctataaatgggaatgagcagcgccactctgcaggacgttggagggattcgtacactatgggtaagggtctgaaacactgagcagggcctcagttattattaggtgatgggatttacacgcaggaccctcaactgatgtggcttcagtgtttctctctccacccagtgcctcccagggcactgacagggttcagatgtggttgcatcagaggcacatgcagctgggacagtagctgtctctgggagcaggaccagggctcctgggaaagtccatggacctggtgttatcccctcgtgttggggagcagagagtgcttcccagcacaaggaagtagaggagcaggcatgagactcaggcaacctgatagaggaaaacttcaaggagaggaatgtctgttcactaagatttcaaatacagtttgcccttttccctttaggacaccttatttaatgccgtcagcttctaaatatccttagagaactttcatgacatcgtagtttcacactagagttgcttataaaagccaaacttcctttcttttctttctttttttttttttttgtaagacggactctcgctctgttacccaggctggagtgtagtggtgtgatcttggttcactgcaacctccgcttcccgggttcaagcgattctcctgcctcagcctcccaagtagctgggattacaagtgcgcaccatcacgcctggctaatttattgtatttttagtagagatggggtctcatcatgttggccaggctggtctcggacacctgacctcaagtgatccacctgctttggcctcccagagtgttgggattacaggcgtgagccatggagcccggcccaaacttccatttttaagcagttcacgaatcccgcctacttcctgcagatcacccggtccttcgttctcataaccccaagaagcagggaggggcacatgcacctgagggccttgcttctgctggctctgggtcttacgaaggaagagtggatcttcctaagcattcaggtagcaacattaccccagctggaggagaacaatcccatttgaaggaagggaggtgatggagtcctgggcgtgggaatgacagggacaatggaaagccctgaaagctcctgtgaggcagcagagccaggaatgctaagcgaggctcgtttcctgagcaggaaggaactgaatcatgattccgaggtgatgtggtttccatcaagccctgtagcctgcctaggtgtatggttttatctgatgggagtgtgactcagccgagctctgagggtgtgtgccccaggcccactgccagcttcctgggaaggggtgccagcccaactctgtacagagaggagaaaacacagctgccgtttctagagctacgagaagggaggcgaggtcaaaggactctgctcaactccagctgcttggttttgcttcagctgtctcagtctttctagtaaacttgacctgttgcc

SEQ ID NO: 1211 - DNA, 3136 bp, Homo sapiens
atgggctgcctggccctgtcttggggacatgaagcctggtttgccaagtgggaaccgagggacatgtgctccaagagacacatccagggactgcaatcaatttccaaagggccttttctcctttcagcgatgctgttaagaaaggcaatgaatcatgtgccacaagaatcttgggagaacccacgagcttgggagctggtgacagacccccattcggagcgctctctgcacagctacacagcgaccccgcccccgcctgcccatcaggacggctctgcagctgcaaagggcgagtgcttggttcccaaggcagggcccagctccatggttctcctcgcctcactctcctccgtgagcctcagggacccggtggccacagcaccctcagttctccccagagttgctgttcccacctctggctgtgaggagcccgcctggcacagctgcgtgagtgccgggcgtccttgcctgaaacaaactgcaattcagcgcgggattccaggattccatggcaactgctcgtgccctgtgttccggccccagctggggcttgggagcagctgctgtgtcatgggggatccacttgtttaccgacagccccaaggacccggacatggtgccagcttcccatgccttggccctgagatctgggaggcccatcgcggccggtgcttcccccaaccccactgagcatctccttcccgccctgtgtccacccacctcctgcccaagacccctgagtgttcgtgggctctacctggtgggatgctctttggcttgtagacaggggttggttggcagcatagtgttccctatcgatgtccacatcctagtgggagcctgtgactacctggctcgggggatccaggttgcagatgaaataaggttggatcagctgactttaaactagggtggtgaccctggagcatcccggggggcccagtgtgatcacaaggtccttaaaagtggaggaggggccagcgtggggctcacgcctgcaatcccagagctttgggaagccgaggcagcaggatcccctgaatccaggagttcgaagccagcctgggcaacaaagtgagaccgagtcttcaaagccagcctgagccacatagtgagactgagtcctgtctctacaaaaagtaaacaaaaatcagccgagtgtagtggtgcacgcctgtggtcccagctactcaggaggctgaggtgggaggattgcttgagcctaggtcaaagctgcagtggccatgatcacacccctgcactccagcctgggtgacagtgagaccctgtcaaaaaaaaaaaaaaaaagtggaggagggaggcaggcgagccgggctcagtgaggagggcccaggctgcagtgggtgccagaatctatcctggaaaaaggaatgacatgaacacgagggaagccccgaagggccattcagtgcagcactgagtgagaggggacgtcctcaaggagccacgagccctggtgatgaggctgtggtgggtgggggcccagcgggtagcaggcgccccctgtgtgcgcagcggggctggttgctccacatatcgccctggtgcatccgagtcccgagctgccactcctgcaggcctgctctagggcggggcggggcttgcacaagcagcacctgtaggtcccgagtgcgtggctcccccagccccaacacaccccccagcccaagtggtggagtaaaggtctccgcacatggccttggggtggggttaggaccccagtccctgccaccacccaacaggcagggctttgggcaagctactcagtgcccgagacccaatttctggtcggcaggtgagaggggccggggggacaagagcctgttcccaagctctccagaagtcaggcccctgaggtggtgcagtgtggctgacatgaccatccccacggacccttgcctcccactcgccccgcaggaccatgcccaggcccgttgcctctgctgtggcttccacaacattccccctggctcccaatccctgcacggaccttcctgcttgggaaaaacctcaagggacaggccatgacctgcagagcggagtgtgatctggaaacgggagcctttcaagaattggccagacggggacaggcgtggtggctcacgctgggaggctgaggcaggtggatcacctgaggtcaaaagttcgaaaccagcctggccaacatggcgaaaccccgtctccaccaaaaatataaaaattagctgggtgtggtggtacagacctgtaatcccagttatttgagaggctgagacaggagaatcgcttgaacccaggagatggaggttgaggtgagccaagatcgtgccactgcactccagcctgggtgacagcgtgcgactccatctcaaaacaaaaagcaaacccaaaaagagttggccagagggatatgcagatgtgattagggctaaggacccacacagcccgaggtgggtacggcccctaggcctggaaacacttctggcctgcatgagaagtggtgacggtgggcgtgggtcagaggccctgaactggaggaaggggccacgagccaaggagagtgggggcctccagaagtggggaggagcggggaagcggcttctcccccaggaactctgacgtggcccagatttcaatgcagacttgaatggggcctctaaccgtgagaggataaccgtcattttaaagagaaagacacgtgtctggcctacgtcacaagatggctcttgccacacagtacgctccctgatgtggggtctgcgccacagggctgggggcactgcctgggagaaaaggaccgagacctttgcacactcgacgtgccaggtcccctgtggccacagtgcctgcctggagagcacccgggacgcagagctgctggtggccctggggacagcaggggggacccgggcaacgtccccccaccccccagagctctgctctgaccgatgcccccctgcggtggggtgggcagtttccttaaagacacagccgccagccgcggagtctgcgcgtgttgtttactgttggtcactctctgctcttagcttcacattaccatttcgtgttttgtcaaagtccgtctcaattcgcgtttggtaaaataaatagataatgagcctctaggccggcgctc

SEQ ID NO: 1212 - DNA, 1564 bp, Homo sapiens
agtgctttctgagagtcatggacctcctgcacaagaacatgaaacacctgtggttcttcctcctcctggtggcagctcccagatgggtcctgtcccaggtgcaggtgcagcagtcgggcgcaagactgctgaagccttcggagaccctgtccctcacctgcaacgtctatggtgggtccttcgctggtttcacctggatgtggatccgccaggccccagggaagggtctggagtggattggtgaaatcgatcatcgtggaaggtcgaacaacagcccgtcactcgagagtcgagtgaccttgtcaggagacatcttcaagaaggagttctccctgaaactgacctctctgaccgccgcggacacggctgtgtattactgtgcgagaggccggggtacggtgactacggcgattccctttgacttctggggccagggaaccccggtcaccgtctcctcagcatccccgaccagccccaaggtcttcccgctgagcctctgcagcacccagccagatgggaacgtggtcatcgcctgcctggtccagggcttcttcccccaggagccactcagtgtgacctggagcgaaagcggacagggcgtgaccgccagaaacttcccacccagccaggatgcctccggggacctgtacaccacgagcagccagctgaccctgccggccacacagtgcctagccggcaagtccgtgacatgccacgtgaagcactacacgaatcccagccaggatgtgactgtgccctgcccagttccctcaactccacctaccccatctccctcaactccacctaccccatctccctcatgctgccacccccgactgtcactgcaccgaccggccctcgaggacctgctcttaggttcagaagcgaacctcacgtgcacactgaccggcctgagagatgcctcaggtgtcaccttcacctggacgccctcaagtgggaagagcgctgttcaaggaccacctgagcgtgacctctgtggctgctacagcgtgtccagtgtcctgccgggctgtgccgagccatggaaccatgggaagaccttcacttgcactgctgcctaccccgagtccaagaccccgctaaccgccaccctctcaaaatccggaaacacattccggcccgaggtccacctgctgccgccgccgtcggaggagctggccctgaacgagctggtgacgctgacgtgcctggcacgcggcttcagccccaaggacgtgctggttcgctggctgcaggggtcacaggagctgccccgcgagaagtacctgacttgggcatcccggcaggagcccagccagggcaccaccaccttcgctgtgaccagcatactgcgcgtggcagccgaggactggaagaagggggacaccttctcctgcatggtgggccacgaggccctgccgctggccttcacacagaagaccatcgaccgcttggcgggtaaacccacccatgtcaatgtgtctgttgtcatggcggaggtggacggcacctgctactgagccgcccgcctgtccccacccctgaataaactccatgctccccc

SEQ ID NO: 1213 - DNA, 589 bp, Homo sapiens
atgcagcggccgccagcctggagcgcgggccctggggccgcaacccgcgccgggcgaggtggcagcacaccctgggccccccactccccgccgcaagtcctgaggatggccagcagagaaacaagaaaatggactccctggctgctggagagttgaatgccagccaccagccatgggtgccagagtttgtagcctattggaggaaaacacaccaagatcacctctgcagcctgcacagccgggcctttggactcctggatgctagagtgacctgggcgctgaggagggcccccgagccagtaccaggaaaggatagactcctgcttgcagcattcccagcagaggcatcgcctgtggacaccgcgtctgtgtctgtatatggcagagctcccagatatatgcacaagggagtgaaaaaatgtgtttgcaccccagtctctaaaaattcaacagcctggttacttctgggtggtatatcgtaggtggctttaatacgtgttatttgctcatctgtatttcttactctttgcacaattaaaccatgttccttttacttatgtacatttttaataaaagaaagttgttaatg

SEQ ID NO: 1214 - DNA, 2177 bp, Homo sapiens
agctatttgggttttcttgcggtgtccggctcccgtctccctggctcccccgcccgccctgcggccccagcgcccctcgctctcatccagcccgcgaggagtgcgggcgccgcgccgcctttaaagcgaggccagggagcgaggcggtgaccggccgagatccggccctcgcctcctccctcggtggcgctagggctcccggcctcccttcctcagtgcgggcggagaagcgaaagcggatcgtcctcggctgccgccgccttctccgggactcgcgcgcccctccccgcgcgcccacccacccagtccggctggactgcggcagccgcgcggctcaccccggcaggatgttcgcagccgggctggctcccttctacgcctccaacttcagcctctggtcggccgcttactgctcctcggccggcccaggcggctgctccttccccttggaccccgccgccgtcaaaaagccctccttctgcatcgcagacattctgcacgccggcgtgggggatctgggggcggccccggagggcctggcaggggcctcggccgccgccctcaccgcgcacttgggctcggttcacccgcacgcctctttccaagcggcggccagatccccgcttcgacccaccccagtggtggcgccctccgaagtcccggctggcttcccgcagcggctgtctccgctctcagccgcctaccaccaccatcacccgcaacaacaacagcagcagcaacagccgcagcagcaacagcctccgcctccgccccgggctggcgccctgcagcccccggcctcggggacgcgagtggttccgaacccccaccacagtggctctgccccggccccctccagcaaagacctcaaatttggaattgaccgcattttatctgcagaatttgacccaaaagtcaaagaaggcaacacgctgagagatctcacttccctgctaaccggtgggcggcccgccggggtgcacctctcaggcctgcagccctcggccggccagttcttcgcatctctagatcccattaacgaggcttctgcaatcctgagtcccttaaactcgaacccaagaaattcagttcagcatcagttccaagacacgtttccaggtccctatgctgtgctcacgaaggacaccatgccgcagacgtacaaaaggaagcgttcatggtcgcgcgctgtgttctccaacctgcagaggaaaggcctggagaaaaggtttgagattcagaagtacgtgaccaagccggaccgaaagcagctggcggcgatgctgggcctcacggacgcacaggtgaaggtgtggttccagaaccggcggatgaagtggcggcactccaaggaggcccaggcccaaaaggacaaggacaaggaggctggcgagaagccatcaggtggagccccggctgcggatggcgagcaggacgagaggagccccagccgttctgaaggcgaggctgagagcgagagcagcgactccgagtccctggacatggcccccagcgacacggagcggactgaggggagtgagcgttctctgcaccaaacaacagttactaaggccccggtcactggcgccctcattaccgccagcagtgctgggagtggtgggagcagcggcggcggcggcaatagtttcagcttcagcagcgccagcagtcttagtagcagcagcaccagtgcgggttgcgccagcagccttggcggcggcggcgcctcggagcttctccctgcaacacagcccacagccagcagcgctcccaaaagccccgagccagcccaaggcgcgcttggctgcttatagactgtactagggcggaggggatccgggccttgcgtgcagcctcccaaccatgggctgggttttgtgcttactgtatgttggcgacttggtagggcaggagacgcagcgtggagcctacctcccgacattcacgcttcgccccacgctgctccgactggctgcagcggacactgcccaaagcagaggggagtctcagtgtcctgctagccagccgaacacttctctccggaagcaggctggttcgactgtgaggtgtttgactaaactgtttctctgactcgccccagaggtcgtggctcaaaggcacttaggacgccttaaatttgtaaataaaatgtttactacggtttgtaaaaaaaaaag

SEQ ID NO: 1215 - DNA, 2654 bp, Homo sapiens
gcatattagtcagcggaggagtcaggcccagaatgggagaggagcctgcggagtactagaccagcttcagagttgagcaacataaagaacaaaaaatgcagttggatttagcactgaagatatctgaacctgcccaaagcagcatcaggagaactagagggggagaagtctagaaatctgttgctccccagccagggtaaaaacacatatcaaagcctgtagaacatacaaccatgaaggactcttgcggtttttcatgggcacaggccatggaatcttagagatcatgtagtcaacatgttcattttactcgtgaggaaaaatgaagttaaatgaagaggttaagcaacttgtccaagatggcaaagtcaccaggtttcacacctctcagcccaggtgtgtggtgtggttaagagcatggggttggggccgggcacgggggctcacgcctgtaatcccagcactttgggaagccaaggcaggtggatcacctgaggtcaggagttcaagaccagcctggccaacacggcgaaaccttgtctctactaaaaatacaaaaattagcccggtgtggtggcacaggcctgtaatcccagctacttgggagcctgaggcaggcgaatcgcttgagcctgggaggcagaggttgcagtgagctgagattgtgccactgcattccatcctgggcgagagagtgaggctctgtctcaaaacaaaagaaaacaaaacaaaagcatgaggttggggtagggtccgggtttgaccctttccagctgtgtgggctgggccaggttacctggtctctctgtgactccttttcttcatctttaaatggagatagtagttcctgcctcagagggttgctgtgaggattcagtgagttaatacatgtcaaatattcagaacagtgtcctacacataggaaaagctatgtgtttgctgctgttgttaatccatatgtatgtgtgtatgtgtatatatacacatatgacatacatgctttagggaagggatgatgacaatatattgtgtgtatgtaaggaaactttgaatattttagaaagagatttgggtgattgtcggttctgaatcaaaaattgttagaaaagttgggaaatttacttacatggtatgattgaaaacagcatttttagtaagaaatgcagcaccttcattcttgagaacggaaaacatgaaagcattctgacgttaaccctgtaaaagggtttcttttagtcagataaccagaattttaacctatttacaatggaaatccctcgagtttgacttcagaatgtcattgtgacttttctaaaggtagaatgaactataaagtaagaaaaaactatgggttatgactttcacacatttggctcctatgaaaaaagagtgatttgtgttatttagaggactataataatttttttagtgtttctagttgagcaaatctaatttttagctactaaaacacatgagaagcctgaatggtattatccaaatggacttgggtgacatgcaatatagacaacttaggaataagtgacactgtggacttgattagaacgcagtaatcctggaagaatataaattgaattggatttatggtctaataaaaacgtgggaggaaaagataatgcttactgactcatgaaactttaacaatgtttgtaagactccgagttgttgtaatatttggttgagagcgctttcccatttgtctcagcctgcttccagaacagcctgctgtgcacctccgtctggaagtgaagcctgacttgggtctccttcttgggtatacttaggaagcagagatcatcacatactctgcccttgtgaacccatgacctcgagcagcacttggttggtttaggcaaatatgtattgagtacctattaactgtaagagtttgggggagaaaaaagtaccatgggaaagtcctagctcattgcttatttgcactcagaaagcttttttagaggactacttgtttctggccttgtattctcctttctgtgatactgcaaaaaagtagagagcataccacagctacctactcctccctgaatacaccatagaaataatagcacctgccattttattgaactcggaggcatgtgttaggtgcttacatacagtcatgtacttaatcatagcaactctaggaggcatgtattattatacccattagtcaaatggggagactgaagctcagagaggcaaatggctcatggtcacacagctaataactagtgaagccaggtctgtgtgactgctaaactctttcctgcttttgctccagagctgtggttcctcattccctgcctccttgcctttgctttgcagttacttctgtgtcctgtgttgcaggatgcagaggcacctttacccaccgtggaagtctcaccctttctgatgactcccctcaaaacctactgcctcttgagaagccctcccatctctcttacctctgggctcccagagcacctgattacaaaaattgaagccatggatgtgggtgaggtcacccagggagaatgtgtggagtagaaagagcagaaagggcagagagcaagcccaggaacagaggaggagtcaggcccagaatgggagaggagcctgcggagtactagaccagcttcagagttgagcaacat

SEQ ID NO: 1216 - DNA, 2716 bp, Homo sapiens
aggctaatgtgaacatcttttgaatgagccacacttctctacataggcagaaaggttagctccaaaacaccgtttctaggaataaatgtcctatctatgggtggcccaaggtgagttcaggaccaagctcctagaaacacagggaaaatcattcaggtcatcaggtagtcacaggaaaccagctgttctaaagcagggtgcctgtgccccctttgctaattctctgttcgagggatgtgttagggttgagagtttttcctcagatcaggcctgtctgacaatctatcagcaatgaaaaggttatgcttgcaagtggggagctggcttagggagcatccaggccacccaaggcagaacacttcagagaatggccaacccggggtcactgtggggggcacagatgagggtgtcagccattggcgggacttgcagccaagggaacaggccctggggttctctgcaattcacgttcacagcaggacttggtctctccctagaaccggcaggcacagccacaccagctgcttccagtgctgcccagggaggtggtccaaacttccccaggcaccggtggccttgggccccgtgccctctggatttggcttctttacctcagatttcttcctcagttctccttctgcctccccatcaggctgcggtccctcagccccacgtcccatcacgtcactacccccagcccaggccccgaaacatcatcctgaacttagtcccattcttcccaccacgactgtcccacactttccaccacagcacagcagaatcgctggcagggcccttaggcatgcctggcttatcctcctctgtgcccagctctggctgttctccatgctcctctccatgctccttctccattgactaatggtcaaagaccatatcttcttccaaggtggacctcacttgtcaccccaagacaaggcaatctctgccatcaccaggctgagaagaatgatggttagctcatgctgataaaaaagtcgttagtctctgtgttttatgtctattagtgcatccagctttcagagtgatcttaggagatagataacaacacagatgaggaagcttaagttcagtgaggttcaattatttgccttaaatcctatggccagtaggttgactcaggcctaggccgaggcaaggagcccagaatttaaggcatagaatttaaggaggctggcctgcccttgcacaacctgaaagttggtgtgtctttaaactgcatgcctgtcagcctcgcttgcctcattccagtcatgccctgggttgagtaaccaggagatgcaaacaagggagaaggacaatgagcctggaggaattcctgggagcacacatttaggcgccagctgcagctgctggagtgggtaggctgaggacccactgtcctgcttgaaccaggcagggtgcacagagccgtagccaaccttgtctgtccaaccctgcctgcagtctcagccatgtggctacaccccattcctcctaccagagctcatgtgcctctgtctacactttctggtggccctgggctcttcacagaaattgacattgcgattttcagttcttgtttgcctcttacttgattttaggcttcctgaggacaatttgtgtctaagtcacaatgacacttaacacttggaagataaggaataaatgttggaaggacaaatgaaccaaatggtgtatgggccaagtgtggtggctcatatctgtaatctcagcactttgggaggccgaggcaggaggatcatttgagctcaggagttgggaccagcctgggcaatatagtgagacctggtctctactttaaaaaaaaaacttaaaaattaggtgggtgcattggtgtatgcctgtagtcccagctagtcaggaggctgaggtgggtgaatcatttcagcccgggagatcaagaatgcagtgagatacgatcacacactgcactccagtctgggcaacagagcaaggccctgtctcaaaaaaacaaaacaaataaaaaacaaaaatagtgggtgaacagagtagtaaaccaatggccagtgcaagcttgccacataggagatgaagaaggaccacccactgccccataattcagaactagggccaggggttagagccctctccacagtctactggacataacctaagcaatgactgcagggcacggaagatggcatagaggatgtgttttgtcctttctggaggccctttcctctttgtgcttagagcacacgagccatttaggtatcaaaatcacattgtctaactttgactctacactcaaagccatctgatgctcacatttcatgtagtcagaggaggccatctggtttgaatcaacatccggaagttacagggtgatgcttagagagggcttgtgcttccccagccacacatctccataaagatgtaagaggtaattatttcagctgggtgcggtggctcatacctgtaatcccagcactttgggaggccaaggcaggcagatcacctggtcgggagttcgagaccagcctgaccaacatggagaaacgccatctctactaaaaatacaatattagccgggcgtggtggtgaacgcctgtaatcccagctactcaggaggccgaggcaggagaattgtttgaacctgggaggcagaggctgcagtgagccaagatcgcaccattgcactctagcctgggcaacaagagtgaaacttcaactc

SEQ ID NO: 1217 - DNA, 1728 bp, Homo sapiens
acacagccacggtggcgacccacagccctggtaatcgctcgctccatgcccgcagggatgtttgtgggggtggcgtcagcccagggagcgaacccctgcaggactcccgaggagacctttgagtcgggcgggctcgacgtgcagggcacggcgggctctctggatgaggaggaggaagaggaggagcgattccacactgtgctggagcagctgggggtggccccggtcctgggcgagcagcgggctgtgaggacgctctgggccaggctgcagcgcgagcgccccgagctgctgggctctttcgaggatgttctgatacgcgcgtcggcctgcctggaggaggcggcccgggagcgcgacggcctggagcgggcgctgcggaggcgcgagagcgagcacgagagggaggtgcgcgctctgtacgaggagacggagcagcttcgggagcagagccggcgcccgccgagtcaggtgggcttcgggccccgcccctcccgccaggcccaatcccacctcgctggcctccctggctccgccttctctgaattaatccctccccgacggccccacctccgcgggtccaggctgccctcagcccgaggagatcccactgggcctcatgtatcacccccgtccggtcttctccacccgaccccgctccgcccgggcccactcccagcccctggccctccgtgtacctcttttgcatggccgagcggccggcggaggctcagtggtcctccgtgcgtcccagaacttcgcccgcggggagcggagaagccgtctggagctggagctgcagatccgcgagcaggacctggaacgcgcgggcctgcggcagcgggagttagagcagcagctgcacgcccaggctgcggagcacctggaggcacaggcccagaactcccagctgtggcgggcgcacgaggcgctgcgaacgcagctggagggggcgcaggagcagatccgcaggctggagagcgaagcacgaggccgccaggagcaaacccaacggtgccgtgggacggggctgggcgggccccggtgcgtgtcccgggggcggggccgacgggcgctcaggtctgggccactttcatccccatttcaagtcccaggcccgccccgtgggaaggaggatcttctagggggtccgggggctccccaaggagccttcctgcagccgggtcaccacctcccatccacagagacgtggtcgccgtctccaggaacatgcagaaagagaaagtcagcctgctacggcaactggagctgctcagggagctgaatacacggctgcgggatgacagggacgcctgcgaggccaggcgggcgggcagcagctgcaggaaggctctgacaacagcccgcctgcctgggcccacctgctgctgctgctgttgctgggctcggccccccagacgcggctctggccaccttcccagtgcccggtgaccagccccgagtgactcacggaccatgagctagaagctgcccttgcaggaggcttgtcatgggtcgggggtgcccactcaggatgcaggctctccccagggggccccaggctcgcctgactgaagacatgaaggacctagcctaggagtggtcagggtcccgggagtggccagggtcccgtgtgtgccctctgccagtcttcgctctgtccccgttcaatcaaccccatctcagttcagcagaaaaccccctcgtcaaataaaacccactgactgc

SEQ ID NO: 1218 - DNA, 3340 bp, Homo sapiens
agggcgatgttgacagacagacagaggggcggatgcagcctacctcctgggcagtgagctgcggtctgaggcccctgcccagctggaaaccacagggaggggaagggaggggaggagaggagaggagaggaaccgtcatggggccttggagtcgagtcagggttgccaaatgccagatgctggtcacctgcttctttatcttgctgctgggcctctctgtggccaccatggtgactcttacctacttcggggcccactttgctgtcatccgccgagcgtccctggagaagaacccgtaccaggctgtgcaccaatgggggactcagcagcgacttatccaacatccagagagcgggagcgagggccagagcctgctggggccactcagggccttctctgcggggttgagcctggtgggcctcctgactctgggagccgtgctgagcgctgcagccaccgtgagggaggcccagggcctcatggcagggggcttcctgtgcttctccctggcgttctgtgcacaggtgcaggtggtgttctggagactccacagccccacccaggtggaggacgccatgctggacacctacgacctggtatatgagcaggcgatgaaagtttctgtgctgtgggaagaagtctcctttcagccgtctggggagcacagaggctgacctgtgtcagggagaggaggcggcgagagaggtgagggggggacctggatgctggccaggcaagaccctcgggggctggacaccctggggcccaaccccaagacccagggccatcctcccaccccaccccttggcctccccagacccttgggaactgccgctgaagggctcagggaaggttctgatgtgatcggaggctagttagggttcatggtacgccaagcccattgggtggccaggctgggctcaagacataaacacaggcccctttgcccagctggacgcaggccccatgcgccattcactccttcaagccagttccagcctggggacttcccaaggccagctaagtccacagaagcctcttggagtgcacccatgagggctctgtgccaagggctgcagggctggtgtggtgggctctgtctagggggaagggtgcaggcgtcctggggggcatcagaaggagttgaagggcactcagaggagaagaagccaggctggagggtcggcgtaggccagggtgtggccagggcttcagcaacaacagagcggggcccgaggccaggaagcctttcctccccagggccctgggagagactgggccctcctctctttctcctggtgcccggcagccctcccccagcccaccctgccccctccctgctcccctccccgctcccctcccctactgtcctggaaacaaacccaccctatctcacagtgggaggcacctggcgaccctccaagaaacagaggggaggagagcaaatggctggaggcctggtgaggggtggagccacagccaaggctctgagggcagaagggctggcgctgaggatggtgctggggagggaccagcggcattgggggcagggctaacagtcaggacccctgtgccacccaaggagagactgaaaaggcccccgactgaaaagcaggagcgagggcctgcctcgagcacccttgggatggcagggccatgggcccgactgcaaagcctcctggggagccggaagagccagcacaggcggcaggcacggagccacccagatgggctggcatgggcgggagggaggcagacctgcctgcgggggacaggagggtgagccctgagaccctgcggaggcctccacaggccgccccagttgccatcatctccagggttcagagacaggcctgccacctcccttttctgaaaagatgcctctgggtgccatgccctggggtggcactggaagcctgggatggaaccaggaacctgggactgtgcggggacccccctcacacccctccaccagctggcttcctgccctccctgttagccatcaccctctggtcaccaaggtgctgtgcccggccctgggctggatgctgggaacccagagtgaattcgaagtggcccggcccaggggagccaacgtgtggcccaacatggacgctcaggacagctgggagacggcaccggccgggcccagggcagtgccagagtgcccacagaggccagccctgtcccactgggcttcacctgctcgtgctgcctttccctagagccctgggggcttcctaggaatgtgccgcacccgccgccctgctgccctggcattggcctaggtgggcgctgcagctccatggccccacagaggccgcttgtccaggcagggagggccgctcagggcgggtaccatgcctgctgccctctcacaggactgccttcagggcatccggagcttcctgaggacacaccagcaggtcgcctccagcctgaccagcatcggcctggccctcacggtaccctctcgcctccctcactgccccttcccacctcctgcccctcagcctgcccagcccccgactcagatggaagggtgacccgggacaggatctctggtcttgagcctcactggctgccaacctcagggagctgctctggtgtgacagggcctgcctcctacagctgggccgcccccttacactgcagagtcctgatgcttcctggggaggggcgcccgcaccctggggcagtggggcagccgcgggtgtctccctcccaggtgtccgccttgctcttcagctccttcctgtggtttgccatccgctgtggctgcagcttggaccgcaagggcaaatacaccctgaccccacgagcatgtggccgccagccccaggagcccagcctcttgagatgctcccagggtggacccacacattgtctccactccgaagcagttgctattggtccaagaggatgctcgggtagtcttcggtggctgcaggagagcgatgctgcgcctctgcccctctcctgccacctggctgcccacagagctctccagggcagaagtcgcggtgggctcagtgggtgccctgagcggggtctctcagactgacgtcaggccttggtgggctgcactctcacctggaggctccggggaagcatctgcctccaggaccattcaggctgttgacaagtcaactcctcatggctgtaggactgaggttcccaagtccttgtccctggtcctgtggtccctccaccttcaaaccagcaatggtgcattgagcaaattgtggtcaaatatacatcacatcaaatttaccatcttaaccattgttaagtgtatggtttgtggcattaaatacattcacattgttgtgcaaccatc

SEQ ID NO: 1219 - DNA, 2332 bp, Homo sapiens
tataacagattgttttcttacagcacttggcagtgcctttaccacagtgtttatgcccttcacaagaaggggttgtgagcagggcagctgggctggtactgggcattttgaacttccactgagaggttaaatatgatctcttccacctgcttaagtgcatcttatgcctggcacagtgcctcatgcctgtagtctcggtaactcaggaggctgaggcgggaggatctcttgagcccaagagtttgagattgcagtggtatagtctgggctcactgcaacctctgcttcctggcagttctcccacctcagcctcccaagtagctgggattacactacaactggctaatttttgtatttctagtagagacaggattttgccatttgcccaagcttgccaggctggtcttgaactcctgatctcaggtcttccacctgcctcggcctcccaaagggctgggattacaggcatgagccaccttgcccagtcatattaggttatttttaatgctggttggcattgtgagcttgcaagagaagatggagcatagtggtcttctcaaaccaccaaatgccacatgcagtcctgatagggctttggcttattgctgagtgctgtgtgggcagcatcttatttaatcctcatgacagcctcgtgcaccccatgagctatgatgagtcccattctgcaggtaaagagcccatgccccagaaggttaagggacttgacccactctgtggcatctaggaagtttggggctgggacttgtgcccaggtgtgtctgacccttcgcacctcctggatccgcggtgctggagggatgctgcggtttgtcctcttggataactctgcttttctcttcgccagcgccacgatcatgtctctcgaagactttgagcagcgcttgaatcaggccatcgaaagaaatgccttcctggaaagtgaacttgatgaaaaagagaatctcctggaatctgttcagagactgaaggatgaagccagagatttgcggcaggaactggccgtgcagcagaagcaggagaaacccaggacccccatgcccagctcagtggaagctgagaggacagacacagctgtgcaggccacgggctccgtgccgtccacgcccattgctcaccgaggacccagctcaagtttaaacacacctgggagcttcagacgtggcctggacgactccaccggggggacccccctcacacctgcggcccggatatcagccctcaacattgtgggagacctactgcggaaagtcggggtaagaccacactttcctggcgtttggtgccttcctgcctgtctttcaggatgtgtgaagggggttgatctagttccttccctctcttctttttttctttttttttggagacggggtcttgctctgttgctcaggctggagtgtagtggtatgatcacgactcactgcagcctcaaaatcctgggttcaagcgatcctctcaccttagcttcccgaggagcttggaccgcaggtgtgcgccactatgcctggctgatactttcatttttttgtagtaatgtgggtatcgctgtgttgcccgggctggtcttgaactcctggcctcaagtgatcctcccaggttggcctcccaaagttctgggattacaggcatgagccaatgcgtccagcccctttcatagcagtgtggtgagttttaggtgtggctgctcctttagcatccctgggaatcattagagcttcctgtgggagttactgccagacactcagagctctgactcgaagccctgctctgaaccctatgtatgtctctttccttttaccgtttttcctctaggaaatttgggaaattagggtgatatgtgtgttttttccttaactcgaaaaattaaggagcacttggaaactgccttctcttttggccgggtgctcatgcctgtaatcccagtgctttgggaggccaaggtgggtggatcacctgaagtcaggaattcaagaccagcctggccaacatggtgaaaccccatctctactaaaaatacaaaaattagccaggaatggtggtgggcacctgcggtcccagctacttgagaggcttatgcaggagaattgtttggatccgggaggcggaggttgcagtgagctgagatcgcaccgctgggtgacaaagtgagacttggtctcaaaaaaaaaaaaaaaaaaaatcttgaaagcctagggcaaagaatttggcctttcagcctttatgttaattacagggagggatccttttgtgcttaagtaaaaacataggtattctttgtagtttatttttaaaaaaaaaaaaaaaaaaaaaaaag

SEQ ID NO: 1220 - DNA, 1811 bp, Homo sapiens
atagaatgctccactcaacaacagaatatagaacacttcacctaacaacggaagatagaacactccacccaacagaatatacaacaatccccccagcaacagaatatagaacgcgccacccaacaagagaatatagaacgcgccacccaacaagagaatatagaacacactacccaacaacagaatatagaacactacaccaacaacagaatatacaacacgccacccaacgacagaatatacaacacgccacccaacaacagaatatacaacacgccacccaacaacagcagaacaccccacccaacagaagatagaacactccacccaacaatagtagaacactccaaccaacagaatacagaacactccaccaacaacagaatatagaacaccccaccaacaacagaatacagaacacgccacccaacaacagaatatagaacactctacctagcaagagattatagaacacaccacccaacaacagaatatacaacacgccacccaacaacagaatatacaacactccacccaacaacagaatatagaacactccaccaacaaaatatagaacacgccacccaacaacagaatatagaacacgccacccaacgccagaatatagaacacgccacccaacaacagaatatagaacacgccacccaacaacagaatatgcagcactccacccaacaacagaatatagaacacgccaccaacaatggaatatagaacaatccacccaacaacagaatacagaacacaccacccaacaacagaatatgcaacactccacccaacaacagaatatagaacatgccaccaacaacagaatatagaacacaccacccaacaacggaatatacaacacacaatccaacaacggaatatagaacttgtcacccaacaagagaatatagaacaatctacccaacaacagaagatagaacactccaccaacaacagaatacagaacatgccacccaacaacagaatgtagaacactccaccaacaacagaatatagaacaccacaccaacaacagaatatagaacaatccacccaacaacagaatatagaacaatccacccaacaacggaatatagaacaatccacccaacaacggaatatagaacacgccacccaacaacagaatatagaacactgcaccaacaacagaatatagaacactgcaccaacaacagaatatagaacactacaccaacaacagaatatagaacactacaccaacaacggaatacagaacaatccacccaacaacagaatatagaacaatccacccaacaacggaatatagaacacgccacccaacaacagaatatagaacacgccgcccaacaacagaatatagaacactacaccaacaacagaatatagaacaatccacccaaaaacagaatatagaacaatccacccaacaacggaatttagaacacgccacccaacaacagaatatacaacacgccacccaacaacagaagatagaacaatccacccaacaacagaatatagaacacgccacccaacaacagaagatagaacaatccacccaacaacagaatatagaacacgccatcaacaaaatatagaacacgccacccaacaacagaatatacaacacgctacctaacaacagaatataaaacacaccacccaacaacagaatatagaacaatccacccaacaacagaatagacaacattccacccaacaacagaatatagaacactccacccaacaacagaagatagaacaatccacccaacaccagaatatacaatccaccc

SEQ ID NO: 1221 - DNA, 2247 bp, Homo sapiens
gcattctatcatcagatgattttccttgcttccctcctcctcttgcccacaaaaatagaattccagcatttctaagctataggctattgttcaagatgccagctcttctcagggagtcattaagggtcaccttctcttcttccctcttacagagcaggaattgaattttaattggccaatttacagaggggactggcattgagagtccctcccacttgcgctgagctgggcaagttcaaggcgattcaggccgtccaactggaggcacatgtagtacttgtgaggcttttaccatgctgtggggagcagaaagagcagtagcagggcagaatggctttttattccacgcctgaatatgacatccaattggccagagggttgctatctgggatgtttctatttgccacaaggcgcagtgagcctgcaggccgacctcactcgtggcacacaactaaatctggggagaagcaacccgatgccagcatgatgcagatatctcagggtatgatcggccctccttggcaccaaagctaccattccagctcctctactagtgacctctccaactatgaccatgcttatctaaggcggagccctgaccagtgcagctcccaggggagcatggagagcctggagcccagtggggcatacccaccctgtcatctttcccctgccaagtccaccggcagcattgaccagctcagccacttccataacaagagagactcggcttacagctctttctccaccagttctagcatcctagagtatccacaccctggcaagcgggtgaagacaagagatcttccaggctctcagagccctgggagggcgatttccaggaagaccacaatgccaacctctggaggaggctggagagagaaggcctaggccagggcctgtcaggcaactttggcaagaccaagtcagccttctcatctctccagaacattcctgagagtctgagtagacacagcagcctggagctaggccggggaacccaggagggttaccccgggggcaggcccacctgtgcagtcaacaccaaggcagaagaccctgggaggaaagccgctcctgacctcgggagccatctggaccggcaggtttcctacccgcggcccgaggggaggaccggtgcctcggcttctttcaacagcacagacccaagtcccgaagagccgcctgcccccagctcagcaaaggtgtacttgccggttctgtatcagagctgctctggcagagaggccctcagagctcggtgctgggaaaggagcaagtggaagtggtgagcgtggccaacgtcttgccaagactgagaggggaagggctttgtaaggaggagagcctagagaaatagattcgtgtactacactgacccttacctctgaggcattaaggtgggtgttggcgcaaatcctgaaaatcaggaaaggtctgagtaggagcgcactgtctggtttggcccagtccgtgagcctctgcttctgaagctccttgagccagccatgtaacacgtgtcccagtgtgcagtctgtgcttttcatttctcctgggttactgcagtattttcttgcatgttttatttccttaaaagactactatgagaaagactgagtagctttcattttctcttaaattttcagtgaaatctttgtggattgacagtctgggactcagcagttagtggcttccagactaaataaaaacagaacattttatccaaatttgggattgcattttaaaaatttccaactgatcctaactaaattactaacaggaacaccacggttcattttatgggggagagagaaaggaaagagctatgtgatacttacaagctatttgtcacattgtcagaggctcttctgattcaaggccttaactgtcaccttgtccatttcactgcttttattttcagatttgggaaacagactaattgaggtgaagtgatttatccagggtcatgtctttagcaaacacatactgagcacctacaatgtgcaaggcaatccactgggtactatggggaccccaaagataagatttttgtaggtgtgccagtcagttcaccatgggtggttgcagtatggtcattctgttctctgaccactggctgaaggaccaaagtaacatccttagcaaagtatttcctagcattaccactggaaatatatgtttgctccgtcagtttaaaagcagaatggtcatggagcttttgcagcactgagaccttcctggggattt

SEQ ID NO: 1222 - DNA, 2159 bp, Homo sapiens
agctgggaccacaagcatgtaccattatgcccagctaattttttttttttgtttttttggtggtagaaatagggtgtcactatgttcctcaggctggtctcaaactgctgggcttgagcagacctccctcctcggcctcccagtgttaggattatgagcatgagccagcatgcctggcctctgccacattttttttttctttttcttttttttatttttagtagaaacggggttttgccgtgttggccaggctggtcttgaagtcccaacctcaagtgatccgcctgccttggcctcccaaagtgctgggattacaggcatgagccactgtgcccaaccaccctgtcacatttctaatgatcaaaagtttttactccctgttctgggaaattggagaggcatttcttatagagtccattgcacagtgccatgcttatgctcagtgattagtaatctgctgctgcaaatcaaatgactccaaagttaggagtttaaaacaacaaacatatactgtctctggggcaggaatttgtgtgtgacttagctgggtgcctgcagctcagggtctctctcggggctgcagtcatctcagggccccacgtggggagaatctgcttccaggtttgctcatgttgctgttggcaggccccaggtcctccttggctgttggccagagacatcagttctttgccacatgggtctctccctagggcagctaacaacacggcagttggcttctctcagagtgaatgagcgagagagagagagattgagattgagagagggcgtccaagactcaagccacattctttttgtaacctaatcttagaagtgacactaggtccagcccacactcaagggaggcacatcatagaggccattcgcctcatgcagccttgaaagatgatgggcaggaagtaggcattgaagagggtaagagtgggattggcaagcccagcaaaagaaactgcccgggcaaagccctcaaggcatggaatggcagggagtgtttctgaagggcaggagcctgtcttgtgacctgtgttttcttcctgggccccaggtggggcagggaatcagaaggggctggcatcagcagctgtacctcacccaatcccttaacttagacaaggaagaactgagcaggagctgaccagccaaggccacggtgactggcaagttgctgttgggttttagcatctgcttttcccaggtggaaaagaattccatgtgggaatttgcattcaagcctggttgtcccttgcacatctcctaactgatctctaagctcccttctgttctctcctcaccctgctccagtctttacttttcatagactgcactagaaggattgttctgaagcctggagtaaccaggccatgcccctgcctgaaacttgtcttggctcccagtgcctgagagtacaagctgggcctagcttcttgatgtggacattcaataccccactccccctgcctattgcccctgcctgtgtgctgaggaaacagcctggaaaggctgcctttccctgaactcctgctgggtcatgcctccagccacactgtccaggctgccccctgccttgaggccgctcctccagccgggcacagtggctcacgcctgcaaccctagcactttgggaggccgaggcggacggatcgcttgagttcaggagttcgagaccaggctggccaatatggtgaagccctgtctctactaaaaatacaaaaattaggccaggtgcaatggctcatgcctgtaatcccagcactttgggaggctgaggcgggtgggtcacttgaggtcaggagtttgagatcagcttgaccaacatggtgaagccctgtctctattaaaaatacaaaagttgggccgggcacagtggctcgtgcctgtagtcccagcactttgggaggccgaggcgggcagatcacaaggtcaggagatcgagaccatcctggttaacattgtgaaaccccgtctctactaaaaatacaaaaaattagccgggcgtggtggcgggcgcctgtggtcccagctgcttgggaggttgaggcaggagaatggcgtgaacctgggaggcggagcttgcagtgagccgaggtcgcgccactgcactccagcctgggcgacagagcaagactccatctcaacaaaac

SEQ ID NO: 1223 - DNA, 2646 bp, Homo sapiens
actgacgggagaacattggcgtgaaggctgctggcgactgggccagcattcattgtgaagaccggagggacacaccctgctgctcatgtctgcagggctctgagaggaggaagcctggggcaggacctgcgccagtggccgctgggcacagcatggagcaccccagcaagatggaattcttccagaagctgggctatgaccgggaggatgtgctccgggtgttgggcaagctgggcgagggcgccctggtcaacgacgtgctgcaggagcttatccgcacgggcagccgcccgggtgccctggagcacctggctgcacccaggctagtgcctcggggctcctgtggggtcccggactctgcccagcgtggcccggggacagccctggaagaggacttcagaaccctggccagttctctgcgacccatagtgattgatggcagcaacgtggcgatgagccatggaaataaagaaaccttctcttgccggggaatcaagctggctgttgactggttcagggacagaggacacacctacatcaaagtttttgttccatcctggaggaaggactcaccaagagctgacacccctatcagagagcagcacgtgctggcggagctggagcggcaggcggtgctggtgtacacgccgtcccgcaaggtgcacggcaagcgcctggtctgctacgacgaccgctacatcgtgaaggtggcctacgagcaggacggcgtcatcgtctccaacgacaactaccgggacctgcagagcgagaaccccgagtggaagtggttcatcgagcagaggctgctcatgttctccttcgtcaacgaccggttcatgccgcctgatgaccccctgggccgccatggaccctccctgagcaacttcctgagcaggaagccgaagcccccagagccatcctggcagcattgtccttatggcaagaaatgcacctatggcatcaagtgcaagttctaccacccggagaggccgcaccacgcgcaactggcggtggccgacgagctccgcgccaagacaggggcccgactgggtgtccgcgggcgacctcccgcctccgcccggcctgcagctccagccgcggggcgaacaccgccctagggacctgcacggcgacttgctttccccgcgcaggccacccgacgacccgtgggcccgtccaccccgctccgaccgcttccctgggcgctccgtctgggcggagccggcctggggcgacggcgccactgggggactttcagtgtacgcgaccgaggacgacgagggggacgcgcgcgcccgggctcgcatcgcgctctacagcgtcttcccgcgtgaccgggtggaccgcgtgatggccgcgttcccggagctctcagacctcgccaggctcatcctcctggtacagagatgccagagcgcgggggcgcccctgggcaagccctaagggaccgacacgcacttgcagggaatggcccagcctcgccttgcgtcttggacgggtggacctgtggttgccagcctggacctgagtgggcccatcatggtgcccccttttctttaaagatggtcagggaagcctgcttcctcctcctgagcggggttgtgggggcctggtggcacttggtgatcctcactgaggccggggcctgctgcggggaggtccacccacttccgtggagggaatgattttccatgtgcacggagactgcgggtccaagctgcagtagaacccacaagtgggtcacaaaatcaatttagtgggtcaccaccacaaacacagtggactgggacagggcaaagcgcaccctgtgccatcaggctgagtctgaactcttgttacctatcctgtgtccccacccccttggcagccatgtaactaacctcaatgtgggtcgtagtcagaagtttaaaaaagactgtgaatgctcttgaatttcattgcttcaggtaatgtttgaaatatgtagtcaggtggccaggggaggtttgctatctggaagttttcatgttagctattgctaaccccacccgcaagggcagcccagcctccaggtgtgggctctcctgtgctctgaattgtgtggctgtcctatgctggggacaagtggtaggagcgctttgtcccagggccaccttctggggccttcacacacatacccccaccacacaaacacacacacacacacacacacacacacacagtctatcatacatgtacatactcacacacaccacacagacacatactgtttggctaagggttaagtatctccaatattttattagccatccatcatggcagtttccagaataggctttctactgtaccagctgagctgccttcttttacttcttcttcttcttctttttttaaacagacagagtctcagcctcccaaagtgctgggattataggcgtgagccaccgcgcctggccccgggcctttatttttatttttaaccttttgacaagacacgctttctattagagctgctttttgtctccctggttcgatttcctgatgtagaatcattgtgttgctgatttttcagttgaaaatgtttaaactgcttcctttgagaacaagtttgagttttagtaagctgtaaagctgttttatttgattcactgtgaataagacaagtac

SEQ ID NO: 1224 - DNA, 1969 bp, Homo sapiens
attcggttttaaaagaaggtggatttgtgtagattggtaatgcccagggactggctacggggagccacctttaggagagagatgtggccacactggtgtgcagtggtgagagcatgaaccagaggtgtggcctggagaagcaaaagacggatgtgaagccatcgtggcatccaagtgacagaacttggtaacagtcatgtatcaggagcgggtgggtcagtggtgatggtccagtgtccagcatggacgtgagtggaaggacggcagcgacactgcgtgagagaggacatcctggaggaggagcacagggaagggctgggcatgtgtggagtgctcactctgtgccaggccaccggattgctcccatggtgtggcggagcctgtctgttgcttccttgcctttggtcacttggctagaccccagcaatcctgagaacttggaaaagccagtgggtaggtctggctgttgcgtttctctcagcacagagcccagctgtagcactgaggaattgtgtgccaaaggcgcctttgctggggctggttgatgcagcatccatgatctggtgctccaggaaccccagtgagagtagggtaaggccatggtggttttggtgggagctttgtcctgtccagctttcactttggccccagtggtgctgagagggcgccttcctgggcttccccacatccctggggccttggccatgctgtgactatgttggttgtggtgctaggttctggcttctactgcggccaaatgctgtgactctgcagtgacaggagttcagagtctgctgcatcatggccacctggagcctcagtgcacgccttccaatttgtggactatttttgacattctgtcagggtcctttctttataatcagcggtttgtgaggatgcctgtatacagcatatgccctcttatcccaaattcctttatttgcaatttttacagtttttccagaggtgagatgtttcagttgttcatgaagtaattgtcatacattgggattttttcccaagtatgtgtgtgagatagtcaccagtgaccaacactttgctttaccagaactcctgctttaatctttggcaaggtctggctggtgaaggaaccaacctgtaaagtgtcacatctacccacggaagcacagctgcccacagttcagacattggcccctcagagtttgctcttcttcagaatccttcttgcttctgcccatttctttctccttcctttttaaatttttttttaaagcatccagagatgctcagtgtatactctgttgcttaattctataatttccagagaaaagctgtagcttgactcaaacagtgggaccctgaaaatttgttctttttttaaattttttcttgagatggaaccttgctctgttacccaggctggagtacagtggtgtgatcttggcacactgcagcctccacctcccaggttcaagcgattctcctgcctcactctcctgagtagctgggactataggtgtgcgccaccatgcccggctaagtgtttgtatttctagtagagatggggttttgccatattgcccagctgatctcgaactcctggcctcaagtgatccacctgcctcagcctcccaaagtgctgggattacaggcggaagccaccatacccggccaaagatttgttcttgaagtcaggagtttgagaccagcctggccaacatggcaaaaccctgtctctactaaaaatacaaaaattagccaggcatggtggcacatgcctgtaatctcagctacttgggaggctgaggcacgagaattacttgaacccgggaggtggaggttgcagtgagccaagatcctgccactgcactccagcctgggcaacagagcaagactgcctcaaaacaaaactctgtcaactccaaattcctatttggtgaaatgatccttcaggattgatggggtaataaaaacattctcggttgat

SEQ ID NO: 1225 - DNA, 2374 bp, Homo sapiens
attgcagcagtgaatccacactgagcccttgctctgtgtcagtgctggggtgagcattttgtatcatcataatatgttgttatagtttgtgtgtgtgtgtgcatatacatatcggcagacctcattttattgtggtttattgcgttttgcagatattgtgttttctgaagttgaaggtttgttgcaactctgtgttgagcaagtctatcagcaccatttttccaacagcatgtgctcacttcattagcattttttagcaataaagtattttttaattaagatatgtacattttttagacataatgctatcacacacttaacagactacagtatagtgtaaacatgacttttatatgcactgggaaaccaaaaaaatttgtgagttgctttattacaatgttagctttattgtggtggtctggaaccaaacccgccatatctccgaggtatattatattattcaggggaatattgtatagcttttcacaattttgtcttcaatttcagaggtccacagacccctcaaaaccagctctggataccaggttgggaggcattgcatgccaggaagttttgcggttattcacccccaggtgcttcacaattgggctgagaagcaggccctgttgtccccattgtacagttgagcatgagggaggagagtggggaggtagggagggttgggggaggcctggagccaccaggctgtggtgcctggagaaggcattttcagtggctgtgggaaagctccaggacaggaaggccaggctgcagggcccacatggagccaagggcctgcaaccctgataggcacgcaggagctggatgcctgctggagtcccacagggcacttctggaactccacgcatctttatcatgtgaataagagagcaaaaataagagagcaaatccctgcagcaccagatcggagagggaacacagccaagaagccaagactcagggagtcaactccctgccctactctcagctcctctggactggctgccccccaccctgtgctctccttgacacccacaatccttctgtcctcctctccagaagccactctgctgttctaactccacctgagaaccacccaggatgccctgtggcgtcatctgaagggagagagacaggctggcttcctactggcctgacctccctcctgttgggtaggacactcagatcttaggcctaagtttcattcagcctcccccatggcccgccctggtgctagtctggtcacgcaggtgaaggggtgtgtgcagacacagctggttaggccaggtccagctcctgcactgaatccacctctggaataccctcctggggcagcctcctcctccttcccaggtgtgccccggctgcctgggatacactgcactcggatctgggtggacctggctgagcttcagggtggacttcatagtcttgaggtcctggagcttgtgaggggtgaccgagccaacagtgagggttacaacggggaagtcattggcccagcccccacctggatgatggtgccagcaacgggcaggaaaaccttgaagctttcctcccgcaaatacaccctgcccttcaccctggcctggactttgtttctggcggtggttgtgcctgtttctcttccttttggctcttccaggatgcatggggactgaactgcagcctccggcctcctgctgcaggtccctgttgtctgcctccccgtggctcacctcaggtggggagagggaagcctggaggtgcactggggcctgccctcctggcctctgcacacgaaggctggacttggagggcctgggcctcagagaccctccatccccattggatgagggcggcagccacaccagcactccctcacctcctcccctgccctagtcttaggggggaacttgttccctgggcctggcagggcaagcaggccccggcccgcccagccccagcgtcgctggctcaggtttcctcgctttctggttttctcatctcccctgccccaggcgctgttgcctgctctctggcccagcccccacccactaggaactggatcccagggagggggagtgttgggaagggggctggagagggggctcggggcaggcggttgggtggcaccaggaggaggcaggccatggggactcactgaggttccgtgtgcagccttctcctgcccagcctgccccaggggctggctctgagccgatcaaaagctggaatgacctggcctctccccaaagctgcctccaagccgtctctgctgttgttccctctaccacaaatgttcttcccggacttcagcaccagtctaaaccctgtgtttcctctagacgtgggcccttagctgcctctttcaccaataaacactgcccttttc

SEQ ID NO: 1226 - DNA, 2307 bp, Homo sapiens
tgtgccattggcgatgcggggaggctggccccatcgaaggctggtgggactggtggagactcctgtccactgctcagcactaggcctgcagcagacaccatgagccccaaacttcccaaagcccttccccagtcccacaagatggtgtctgcggaccgtgctcgtgagagatggcagccaggcagtccccacagggcacccattttcagctgcccccgcttctcagacaaggaaactgaggccagaaagccaggtggcccaggagctggcttccccatttcctgctcctgtgggccccactgcagtgcccatgggccgggctgatattacccgagacttcggagctctcacgggtgcgagtaatttaggctgcatggacacaagctgctggcttgagtcgccccgttatgaatgtgtgtgggtctgtgcccctttcatgtgctgccacagggcccacgagtgtgctgaaagggaaggacacggccaaggggccatggtggacaggagaccttcttgggggttcggtggtgtccttgaccccactctgactgagcactgccccaaggcactgccattccaggcccccttccctgagcctcccaccccaggcccacccacctgctgggtcctcccacctgcggggcccgccatgcggggtcaccatgcgagtctcaccatgcagggtcaccacacgagtctcaccatgcagggtcaccacgcgagtctcaccatgcagggtcaccatgcggggtcaccatgcagggtcaccatgtggggtcaccatgcggggctcaccatgtggggcttcaggagcttgctgagcaccctccccacccatggtcactctccctggggtctgtaagcctccctgggcctgagcagctcccagccttgctgctgcctttccacttcctggcagtgaggtctcctgggtgccttctctcagccctttgggatgttttttgtgaggaagggaggctttgatgctgtggagcatctgtagtgcccactccagtggcttcacaggagcagcaggctgtttgttctgagctgttccaccttgtgcctgccagaggggagatagtggacaggcctccctccccccaagtggtggggtggaccccctgcccgctgtggccccatacctgggggccacacaccactgccctgggccgtgcagctgctatgaagagtgtgctgctgagaccctggaagagacggaggatgaaattgtgttgccagatagtccatttgttgttctgagactcgcatgcctgggagaatcctgggaattaactagctccttctctcccatcccattttacagaaaagtgagacccaaggtggtttctgacttgcccagaggtcataactgcttggacagtcatggtcctcagagcccacgtttgctgaccagtgcaggctctcacagccactcagctcctgcagccgtggcgtggcagaggagggaagcacttcctgggatttatgctgcctccctgacatttcaaggcccttcatttctctaaatattgggggggttgaattatttttagttgagcctcaagggatcagagaataagcttgcagcaacgttggcagatgggcttcttctagcagagagtggttattcggggcctcttattgagagaatcgggtgatttgaggaaatctggggtgtcctgaggcataccagaggacccccaagtttttcctgtggctcgtctgccatcaggaaaccaaaatgactcccctcgtcctgagctctccagggtgtggacctggaatgcttaaggggaggcaatggcatatctttaagatgagcacagctccggagccactcgagcacccaaggccacgtcctgctcagggcacttcgggcctcagtttccttatctttaaaatggacagagttggccgggtgaggtggccctgcctgtaatcccagcactttgggaggccaaggctggcagattgcttgagcccaggagtttgaagccagcctgggcaacatggcgaaaccccatctctactacaagtacaaaaatttggccgggcatggtggctcatgcttgtaatcccagcactttgggaggccaaggagagcggatcacttgaggccagaagctcgagaccgcctctactaaaaatacaaaaattagccaggcgtggtggctcacgcctgtaatctcagctactcgggtggctgaggcaggagaatcacttgaacctgggaagtagaggttgcagtgagctgagatcgtgccactgcactctagcctgggcgacagagcaaagccctgtctc

SEQ ID NO: 1227 - DNA, 1784 bp, Homo sapiens
gattttgtagaagattccgccaaagactcaacaacataaagaaatatatatacctttcggtttggatatctctcaacaaaaccttctactgcttctcagccagccatgctgtctgcttcctgctcaggacttgtgatcttgttgatattcagaaggaccagtggagactcggttacccagacagaaggcccagttaccctccctgagagggcagctctgacattaaactgcacttatcagtccagctattcaacttttctattctggtatgtccagtatctaaacaaagagcctgagctcctcctgaaaagttcagaaaaccaggagacggacagcagaggttttcaggccagtcctatcaagagtgacagttccttccacctggagaagccctcggtgcagctgtcggactctgccgtgtactactgcgctctgagagacagagtgggagggactgcagcgagagcccagcacaaaccctggggaacgcagtatccagcatggctcagaaggtaactcaagcgcagactgaaatttctgtggtggagaaggaggatgtgaccttggactgtgtgtatgaaacccgtgatactacttattacttattctggtacaagcaaccaccaagtggagaattggttttccttattcgtcggaactcttttgatgagcaaaatgaaataagtggtcggtattcttggaacttccagaaatccaccagttccttcaacttcaccatcacagcctcacagcctcaggaacctacaaatacatctttggaacaggcaccaggctgaaggttttagcaaatatccagaactctgaccctgccgtgtaccagctgagagactctaaatccagtgacaagtctgtctgcctattcaccgattttgattctcaaacaaatgtgtcacaaagtaaggattctgatgtgtatatcacagacaaaactgtgctagacatgaggtctatggacttcaagagcaacagtgctgtggcctggagcaacaaatctgactttgcatgtgcaaacgccttcaacaacagcattattccagaagacaccttcttccccagcccagaaagttcctgtgatgtcaagctggtcgagaaaagctttgaaacagatacgaacctaaactttcaaaacctgtcagtgattgggttccgaatcctcctcctgaaagtggccgggtttaatctgctcatgacgctgcggctgtggtccagctgagatctgcaagattgtaagacagcctgtgctccctcgctccttcctctgcattgcccctcttctccctctccaaacagagggaactctcctacccccaaggaggtgaaagctgctaccacctctgtgcccccccggcaatgccaccaactggatcctacccgaatttatgattaagattgctgaagagctgccaaacactgctgccaccccctctgttcccttattgctgcttgtcactgcctgacattcacggcagaggcaaggctgctgcagcctccgctggctgtgcacattccctcctgctccccagagactgcctccgccatcccacagatgatggatcttcagtgggttctcttgggctctaggtcccggagaatgttgtgaggggtttatttttttttaatagtgttcataaagaaagacatagtattcttcttctcaagacgtggggggaaattatctcattatcgaggccctgctatgctgtgtgtctgggcgtgttgtatgtcctgctgccgatgccttcattaaaatgatttggaagagc

SEQ ID NO: 1228 - DNA, 1890 bp, Homo sapiens
acttcccttcaactccagctggagcgcctgcttggctttgggttcgttctgcagccttcgccccgctcctagcctcagggccggactccagcgcagagcccagcccagcgcagcctgccagcagccacccagccgcccagccgcccagccccgcacgaaacccggccagagcttcctagcagcccgagccatgaacaccgaaatgtatcagacccccatggaggtggcggtctaccagctgcacaatttctccatctccttcttctcttctctgcttggaggggatgtggtttccgttaagctggacaacagtgcctccggagccagcgtggtggccatagacaacaagatcgaacaggccatggatctggtgaagaatcatctgatgtatgctgtgagagaggaggtggagatcctgaaggagcagatccgagagctggtggagaagaactcccagctagagcgtgagaacaccctgttgaaggccctggcaagcccagagcagctggagaagttccagtcctgtctgagccctgaagagccagctcccgaatccccacaagtgcccgaggcccctggtggttctgcggtgtaagtggctctgtcctcagggtgggcagagccactaaacttgttttacctagttctttccagtttgtttttggctccccaagcatcatctcacgaggagaactttacacctagcacagctggtgccaagagatgtcctaaggacatggccacctgggtccactccagcgacagacccctgacaagagcaggtctctggaggctgagttgcatggggcctagtaacaccaagccagtgagcctctaatgctactgcgccctgggggctcccagggcctgggcaacttagctgcaactggcaaaggagaagggtagtttgaggtgtgacaccagtttgctccagaaagtttaaggggtctgtttctcatctccatggacatcttcaacagcttcacctgacaacgactgttcctatgaagaagccacttgtgttttaagcagaggcaacctctctcttctcctctgtttcgtgaaggcaggggacacagatgggagagattgagccaagtcagccttctgttggttaatatggtataatgcatggctttgtgcacagcccagtgtgggattacagctttgggatgaccgcttacaaagttctgtttggttagtattggcatagtttttctatatagccataaatgcgtatatatacccatagggctagatctgtatcttagtgtagcgatgtatacatatacacatccacctacatgttgaagggcctaaccagccttgggagtattgactggtcccttacctcttatggctaagtctttgactgtgttcatttaccaagttgacccagtttgtcttttaggttaagtaagactcgagagtaaaggcaaggaggggggccagcctctgaatgcggccacggatgccttgctgctgcaaccctttccccagctgtccactgaaacgtgaagtcctgttttgaatgccaaacccaccattcactggtgctgactacatagaatggggttgagagaagatcagtttgggcttcacagtgtcatttgaaaacgttttttgttttgttttgtaattattgtggaaaactttcaagtgaacagaaggatggtgtcctactgtggatgagggatgaacaaggggatggctttgatccaatggagcctgggaggtgtgcccagaaagcttgtctgtagcgggttttgtgagagtgaacactttccactttttgacaccttatcctgatgtatggttccaggatttggattttgattttccaaatgtagcttgaaatttcaataaactttgctctgtttttctaaaaat

SEQ ID NO: 1229 - DNA, 1949 bp, Homo sapiens
aggcggcgggcgcggctgggatggcgaagagcaacggagagaatgggccgcgcgcgcccgcggccggggaaagcctgtcgggaacccgggagagcctggcccagggccccgacgccgcaaccaccgacgaactcagctctctcgggtctgactcggaggccaacggcttcgccgagcgccgcatcgacaagttcggcttcatcgtgggctcgcagggcgccgagggcgcgccctgccctctgctccacaggctggaggaagtacccctggaggtgctgaggcagagggagtccaagtggctggacatgctcaacaactgggacaaatggatggccaagaagcacaaaaagattcgtctgcggtgccaaaagggcatcccgccttctctgcggggccgtgcttggcagtacctgtcaggaggcaaggtgaagttacagcagaaccctggaaagtttgacgagctggacatgtcccctggggaccccaagtggctggacgtgattgagcgtgacctgcaccggcagttcccattccatgagatgtttgtgtcccgggggggccacggccagcaggacctattccgtgtgctgaaggcctacacgctgtaccggcccgaggagggctactgccaggcccaggcgcccattgccgctgtcttgctcatgcatatgcctgctgagcaagccttctggtgcctggtacagatctgtgagaagtacctgcccggctactacagcgagaaactggaggcgatccagctggacggggagatccttttctcgctgttgcagaaggtgtcgccggtggcccacaagcacctcagccgtcagaagatcgacccgctcctctatatgacagaatggttcatgtgcgccttctcccgaaccttgccctggagctctgtgctgcgtgtctgggacatgttcttctgtgaaggggtcaagatcatcttccgggtggggctggtgctgctgaagcacgcgctgggctcccctgagaaggtcaaagcctgccagggccagtacgagaccatcgagcgactgcggagcctcagccccaagatcatgcaggaggcctttctggtccaggaggtggtggagttgcccgtgacagagcgccagattgagcgcgaacacctcattcagctgcggcgctggcaggagacccggggtgagctgcagtgccgctccccgcccaggctgcatggtgccaaggctatcttggatgcagaacctggtccccggcctgccctacaaccttcaccatccatccgcctgcccctagatgcccccctccctggctccaaagccaagcccaagccacccaagcaggcccagaaggagcagcggaaacagatgaaggggagagggcagctggagaagcccccagccccaaatcaagccatggtggtggccgctgcaggagatgcatgtcccccacagcatgtgcccccgaaggactcagcccccaaggactcagcccctcaggatttggctccccaggtctcagcccaccaccgctcccaggagagcttgacgtcccaagagagtgaggacacctacttgtaaccctggcagctaaggcctccagggcggggtctccatataactacacggttcatgaactgacattccacatcctgcccaccctctgagggccaagctgcctggccactgggctgggctggagtctggctggtccaacacagattctgcctggtccaacacagattctgcctgagcctccttatttattttctttacagtggcactcaggctggcccagccagggcaggcagaagctagggcctggggggtggggcctccttcagccccctcctcctgggggatgctccccagggttagggtgctggtgtgaggggaaagggtggggtgttctttgtgtaaaatagaaacatggttttgtacagaaataaacagccttgttag

SEQ ID NO: 1230 - DNA, 2490 bp, Homo sapiens
tccggcgccggcccaagttcgccgggggggcccggaggaagcttgggggacgcgacgggggaacgcggaaaccccggggatctgcaggcgcgcccgggccgtgtgccttctctccgcgtgtccaaaccgtgtccccagccgcgcgccatgcgctctgggggcgtgcgcagcttcgcgctggagctggcgcggggcccgggcggcgcctaccgcggcggggagcggctgtgcggccgggtgctgctggaggcggcggcgccgctgcgggtgcgagcgctcgaggtgaaggcgcgcggcggggcggccacccactggttggagggtcgcagcgtgggcgtcaacgccgtatccagcgactacgcggccgcggagacctacctgcggcgtcggcagctgctgctccgagataccggggagaccacgacgctgcctcctgggcgccatgagttcctgttcagcttccagctgcccccgaccctggtgacatccttcgagggcaaacacggtagtgtccgctactgtatcaaggccaccctgcaccggccctgggtcccagcacgccgggcaaggaaggtgttcactgtcatcgagcctgtggacatcaacacgccagccctgctggcacctcaagcgggggctcgggaaaaggttgcccgatcctggtactgtaaccgtggcctagtctccctttcggccaagatcgaccgcaagggctacaccccaggagaggtcatccctgtctttgccgagatcgacaacggctccacacgtcctgtgctgcctcgggcagccgtggtgcagacacagacgttcatggcccgaggcgcccgaaagcagaaacgggcagtggtggccagcctcgcgggcgagccggtgggccccgggcagcgggcgctgtggcagggccgggcactgcggatccccccagtgggtccttccatcctgcactgccgcgttctacacgtggactacgcactcaaggtctgtgtggatatcccaggaacgtccaagctgctgctggagctgccactggtgatcggcaccattcccttgcacccttttggcagccgttcctccagcgtgggcagccacgccagcttcctgctggactggaggctgggggccttgccggagcggcctgaggctcctcctgagtactcggaggtggtagccgacactgaggaggcagccttggggcagagccccttcccgcttccgcaggaccccgacatgagccttgaaggcccgttcttcgcctacatccaagagttccgctaccgcccgccacccctgtactctgaggaggatccaaacccactcttgggggacatgaggccgcgctgcatgacttgctgaacggcacagggacccctcgaggaacaaggttgcacaccagctttcagccaccatgactgtggggagtggctggaccaagggctgacctccccgactgcatcaaagttggggaaccaagtctcagagtgaggcgggggcctttcggatatcacatgggacagaggaagagcccggctggaatctgacttacctggaccgctgtccttgtgaggcattgaatgcccagtgcagtatccgagagactgtttaataacctgtcttcccagccaattggtggtgctggaatcccctaggagccttcagtctgggagaaacagagccagacatagacagttccagcatcacagaaccagaagaagagacctgcaactgtgagagtccagacaggaagcagagaaggcgtccttgcggaaagggcattttagctgaggctttggagtacgaataggagctcagcaggcagacgaatgaggaataaaggtcagagaaggtcagagctgagtgacgtttggaatccaccccgtttattgtagaactgggggttcagagggcaggtgcctcagagttgaggccacacagtgaggtctggtgggtgaaaggacccaggaacgaggcgttcaggaaagcaggttgtcagagctatgtggagtctgtgggtggcaggggcagccgctccagcctttgaagactttgaaagccagagattcctggcgcaggcttggacttcctgggagctcctccaagtacccaggggcatcagagctgcctgggtgttacatggcccagggaacccaggttcagggtaggacaggcaagaccagatacccaatgtgcaaagtgaaaacactgggctccctgttaaacgatgaagaattcaagacagtgacagcattacgtcacccctggggacagaggtcagcctaaggtgacacacggggactactgtgcttccggaggctccctgtgtcctggaggagaaaagcattagagggggcagctggacaagctcccaactgcagagtcccagccctggctggggcagggccccggcctgggactcagcatttctgatatgccttaagaattcattctgttttgtacaattattttttaaaagtaaacgtgtggagaaag

SEQ ID NO: 1231 - DNA, 3361 bp, Homo sapiens
agtggcccaggtgccccctatcccagcggaggcccgctatggcctctgacccccaaagcctcagccttggacaggtggctcatggagctccaggcacagagaaggccctggaggacgcagctggggtggggcgacactctggctgggttttgcagtgggtccctggtgacactctggctgggttttgcagtgggtccctgcaccacgctcaggaggtgacagcttgtttcctcccagccagaggcagccattctagtggacagagccctctgtgttagagcaggtctgggcgtcaggcctcactgtccctggctggaggtgctcatggtaccgtagacaacagggagaacactgtaattctgtgttggggagggccggggacagaagctttctgctagtgggagcatcccgggatgagccgggcagggctgttctggagggaaggagtcccccatcatgggagacatccaagtactgacccttctcccactccctcccgcccgccccgagagcacaatgcctgacccatttcccctcctcaggagcatggggtcggcctttgagcgggtagtccggagagtggtccaggagctggaccatggtggggagttcatccctgtgaccagcctgcagagctccactggcttccagccctactgcctggtggttaggaagccctcaagctcatggttctggaaaccccgttataagtgtgtcaacctgtctatcaaggacatcctggagccggatgccgcggaaccagacgtgcagcgtggcaggagcttccacttctacgatgccatggatgggcagatacagggcagcgtggagctggcagccccaggacaggcaaagatcgcaggcggggccgcggtgtctgacagctccagcacctcaatgaatgtgtactcgctgagtgtggaccctaacacctggcagactctgctccatgagaggtgggcccgaagagggcagggcagggcagggccccacccaccccaagcaaccctgcttttatttatttatttatttaaattattttttgaggtgaggttttgctatctcggccagggtggtcttgaactcctggcctcaagcagtcctcctgcctcggcctcccaaagtgctgggattacaggggtgagccactgtgccaggtcccagccttgctcttgggaaggtcacaaccttggggcatcaggaaagtcccagaggcaaaagagcgctgtggccggaaccagcttgcaggaaggaagctgcaggggtcatctggggcctccgctgccaggactggatcctaaggaccggactgagccccaggctgctgtgaggacaaggggtggtgtgaacacgggggcccaggtgagggggccgcacctcgagtctggacttggagtccccgagtccaccttccctcatggggtcccgtccccgtggggagcgcacggagaggctgccggtgccccggcacccacagacctctggagggcccctctgcaccacctcccccggtggcgtggggctgtcaggggagggaagacgccttcaggggctgcggcccagcgagctttgctgctcctcggacacaggcacctgcggcagccagaacacaaagtcctgcagcagctgcgcagccgcggggacaacgtgtacgtggtgactgaggtgctgcagacacagaaggaggtggaagtcacgcgcacccacaagcgggagggctcgggccggttttccctgcccggagccacgtgcttgcaggtgtgtagccagccccgggccacgcctggccccccacgtgggcacgcggcggcgggtgacggaggcggcgggctgggctccgccaaggcccctcggagcagctcccagccctgcgcttggctgcggagccgaagtcacctggcggcgggcctgcccccggcacccggcccgcacccgcaccccacggcccggtgccagggcccagccccgagcccatctccatgcctcagggtgagggccagggccatctgagccagaagaagacggtcaccatcccctcaggcagcaccctcgcattccgggtggcccagctggttattgactctgacttgggtgagctggagttgggggtgtctcgggcccaggccctggcagagaagcagggaggcctggggagagctacccgccagcttgggctgccgtgggcccctggctgaacaacgtcctgtgtctggcaggtggctgaggtcctgtgctctggtgtgtgggtgattgggcagggcctgagctggacaggggagctcctagtaggggaggggaggggatgctgggatctaggtgacatgcctgtccctgtctgctcccgtctggctgccagacgtccttctcttcccggataagaagcagaggaccttccagccacccgcgacaggccacaagcgttccacgagcgaaggcgcctggccacagctgccctctggcctctccatgatgaggtgcctccacaacttcctgacagatggggtccctgcggagggggcgttcactgaagacttccagggcctacgggcagaggtggagaccatctccaaggaactggagcttttggacagagagctgtgccagctgctgctggagggcctggagggggtgctgcgggaccagctggccctgcgagccttggaggaggcggtgagcgggggagggtgcccggggcacacaaggcctgcccagccagccagactcacctgcccttcccgtgcccacagctggagcagggccagagccttgggccggtggagcccctggacggtccagcaggtgctgtcctggagtgcctggtgttgtcctccggaatgctggtgccggaactcgctatccctgttgtctacctgctgggggcactgaccatgctgagtgaaacgcagcacaagctgctggcggaggcgctggagtcgcagaccctgttggggccgctcgagctggtgggcagcctcttggagcagagtgccccgtggcaggagcgcagcaccatgtccctgccccccgggctcctggggaacagctggggcgaaggagcaccggcctgggtcttgctggacgagtgtggcctagagctgggggaggacactccccacgtgtgctgggagccgcaggcccagggccgcatgtgtgcactctacgcctccctggcactgctatcaggactgagccaggagccccactagcctgtgcccgggcatggcctggcagctctccagcagggcagagtgtttgcccaccagctgctagccctaggaaggccaggagcccagtagccatgtggccagtctaccatggggcccaggagttggggaaacacaataaaggtggcatacgaagg

SEQ ID NO: 1232 - DNA, 3498 bp, Homo sapiens
gtctcggtgtcccggcccctacagcgcccggcagccgcggcgggaggagcggaaactgtcgggtgcgtcccgttcggagccgcgccggccgagaaggcgccgaggagcagcgaggcggcctctgtccggcccggacccgccgagcggcgtgcgcgccccctccccgtagcctcgcggcgcggcctcgccccggcccctcccgagctcatcgcgggcccacggagcggccccggaggcccgagcgcgcccacctgagcccccgcgctggcgccatggcggagcaggagagcctggaattcggcaaggcaggcttcgtgctgatggacaccgtctccatgcccgagttcatggccaacctcaggctcagatttgaaaaagggcgcatctatacgttcattggagaagtcgtcgtttctgtgaacccttacaagttgttgaacatctatggaagagacacaattgagcagtataaaggccgtgagctgtatgagagaccgcctcacctttttgctattgcggatgctgcttacaaggctatgaagaggcgatcaaaagacacttgtattgtgatatcaggggaaagtggagctggtaaaacggaagccagtaagtacattatgcagtatattgcggccatcaccaaccccagtcagagagcagaggttgaaagagtgaagaatatgttgcttaagtccaactgtgttttggaagcttttggaaatgccaaaaccaaccgtaatgacaactcaagcaggtttggaaaatacatggatatcaactttgacttcaagggtgaccctattggtgggcatatcaataactacttactagaaaagtctcgagtgattgtgcaacagccaggagaaagaagctttcattctttctatcagctactccaaggaggttcagaacaaatgctacgctctctacatctccagaaatccctttcatcctacaactatattcatgtgggagctcaattaaagtcttctatcaatgatgctgccgaattcagagttgttgctgatgccatgaaagtcattggcttcaaacctgaggagatccaaacagtgtataagattttggctgctattctgcacttgggaaatttaaaatttgtagtagatggtgacacgcctcttattgagaatggcaaagtagtatctatcatagcagaattgctctctactaagacagatatggttgagaaagcccttctttaccggactgtggccacaggccgtgacatcattgacaagcagcacacagaacaagaggccagctacggcagagacgcctttgccaaggcaatatatgagcgccttttttgttggatcgttactcgcatcaatgatattattgaggtcaagaactatgacaccacaatccatgggaaaaacactgttattggtgtcttggatatctatggctttgaaatctttgacaacaacagttttgaacaattctgtatcaattactgcaatgagaaactgcagcagctatttattcagctggttctgaagcaagaacaagaggaataccagcgggaagggatcccctggaaacatattgactacttcaacaatcagatcattgttgacctcgtggagcaacagcacaaagggatcattgcaatccttgatgatgcttgcatgaatgtcggcaaagtcaccgatgaaatgtttcttgaagcacttaacagtaaattgggcaaacacgcccatttttccagccgaaagctctgtgcctcagacaaaattctggagtttgatcgagattttcgaattcgacattatgcaggcgatgtagtctattctgtcattggttttattgacaaaaataaagatactttatttcaagatttcaagcgccttatgtataacagttcaaatcctgtgctcaagaatatgtggcctgaaggcaaactgagcattacagaggtgaccaagcgacctctgactgctgctaccttgtttaagaattctatgattgctctagtagacaaccttgcatcaaaggaaccatattacgttcgttgcatcaaacccaatgacaagaaatctccacagatatttgatgatgaacgctgccggcaccaagtagaatatcttggactactggaaaatgtgagagtgcgtcgggcaggatttgccttccgccagacatacgagaagtttcttcacaggtataagatgatctctgaattcacctggcccaaccatgaccttccttcagacaaagaggctgtcaagaaactaattgaacggtggttttcaggatgatgtagcttatgggaagaccaaaattttcattcgaacaccccgaacattgtttaccttggaagaactccgtgcccagatgctcataaggattgtcctctttctacaaaaggtgtggcggggcaccctggcccgcatgcggtacaaaagaaccaaggcagctctgacaataatcaggtactaccggcgctacaaagtgaagtcgtacatctacgaggtggccagacgcttccatggcgtcaagaccatgcgagactacgggaagcacgtgaagtggccaagccctcctaaagttcttcgccgttttgaggaggccctgcagacgattttcaatagatggagagcatcccagctcatcaagagcattccggcctcagacctgccccaggtcagggcaaaggttgcagccgtggaaatgttgaagggtcaaagggctgacctcgggctccagagggcctgggagggcaactatcttgcttcaaagccagatacacctcagacctcaggcacttttgtccctgttgctaatgaattgaaacggaaggacaaatacatgaatgtcctcttttcctgtcacgtctgtaaggtaaatcgatttagtaaggtggaagacagagcaatttttgtcactgaccgtcacctgtataaaatggatcccactaaacagtacaaggtgatgaagactatccctctatacaatttgactggtctgagtgtctccaatggaaaggaccaacttgtagtgttccatacgaaagacaacaaagacctcattgtctgcctcttcagcaaacagccaacccatgagagtcgaattggagaacttgttggagtgctggtgaatcatttcaagagaaaccatctgcttatactctgaataaaattcaagaaagcatagattctacataaacaggcccaagattacatggcaaactgagatgaagaggatgctggctgagaaacaaacaaaagtgttcaattatttgaatgaagtaaggaaagatattttaaaatgtaaatcaacattaaaatctgaaaatggcacagttgatattgcagaaaatagaattgatgtgaaaggaaagtttgaagtctctcagtgtgcagaatttactgttataatgggcaacatgttaactttcttagcaatatacaaaataagggtacatcttacagagaaggcatcttatattcaataaaatatggtaatttaaaacat

SEQ ID NO: 1233 - DNA, 2886 bp, Homo sapiens
gtcgcgagccggtggaggacccgcgcgcggaggagccggggagtcagcgcttcttccctccctccccctctcccctccccgctccctgcccccctccccaagaatgttccgctacgagtctttggaggattgtcctctggatgaagatgaagatgcatttcagggactgggagaagaagatgaagagattgatcaattcaatgatgatacatttgggtcaggtgcagttgatgatgattggcaggaagcacatgagcgcctggctgaattggaagaaaagctaccagtggcagttaatgaacaaacaggcaatggagagagagatgaaatggacttgttgggtgaccatgaggagaatctggcagaaaggctcagtaagatggtgattgaaaatgaactagaagatccagctattatgagggcagtgcagaccaggccagttttacaaccccaaccaggaagtctgaattccagtatctgggatggatctgaagttctgaggcgaatccgaggaccactgcttgctcaggaaatgcctacagtgtctgtattagaatatgctttgcctcagaggcccccccacggtccagaagatgatcgggacctttctgaacgagcattaccaaggcggtcaacttcacctatcattggcagtcctcctgttagagctgtccccataggcaccccacctaaacagatggctgtacccagcttcacccaacagattctgtgtccgaagcctgtccatgttcggcccccaatgccacctcgttatcctgctccctatggtgagaggatgtctccaaaccagctctgcagtgtcccgctacagcctggacggatgtctcccagccagtttgcacgggtccctggatttgttggtagtccacttgctgccatgaatcccaagttgctacaagggcgagttgggcagatgcttcccccagcaccaggcttccgtgccttctttagtgctccaccctccgctacaccacctccacagcagcaccctcctggcccaggaccccacctgcaaaacctaagatctcaggccccaatgtttagaccggacacaactcacctccatccacagcaccgtcgactcttgcatcagagacagcaacagaatagaagtcagcatcggaatctcaatggtgcgggagatagaggaagtcaccggagcagtcatcaagatcatctccgaaaggatccatatgccaatctcatgttgcagcgggaaaaggattgggtctctaaaatccagatgatgcaactgcaaagcactgatccctacctggatgatttttattaccagaattactttgaaaaactggagaaactgtcagctgctgaagaaatacaaggtgatggccctaagaaggagcgcaccaagcttatcacccctcaggtggccaaactggagcacgcctataagccagtgcaatttgagggctctttgggaaagcttaccgtttctagtgtgaataatccccgaaaaatgattgatgctgttgtgacatctcggagtgaggatgatgagacaaaagaaaaacaagttcgagacaagaggagaaaaacccttgttataattgagaaaacctacagcttactccttgatgtggaggactatgaaagacgttatctcctaagtctggaagaagagcgacctgccctaatggatgacagaaagcacaaaatttgtagcatgtatgacaacttaagggggaaattgcctggacaagagaggcctagtgatgaccactttgtacagatcatgtgtatccgaaaagggaagagaatggttgcccgtattcttcctttcctctccacagagcaagcagctgacattctcatgacaacagccaggaacctccctttccttatcaagaaggatgcacaagatgaggtgctgccatgcttactgagtcccttctctctccttctctatcatcttccatcagtgagtatcaccagccttttgcgacagctaatgaacctacagagttcagaccctgctacagaatcaacacaaaataatcagtggacggaggtgatgttcatggcaacacgagaacttctgcggattccccaagcagccctggccaagccaatctctatacctacaaacctagtgtccctcttttctcgctatgttgaccggcagaaactgaacttgctggagacaaaactgcagctagttcaggggatacgataaaagatctccaaatgtgtcctgtacctccttttggctgccacctgcactgctgccatcaccaatggagtgtttttaatgagggaaggaaggtagctttttccccaaagcaaagtcttgtgggatcgattcctgtttacaggggttgtctctctaaatgtcagatatttccccactgctctatgaaatttggctgggtgatacttctgctggtttctttaccttctgtgttacagttctgcatgtcctacttttactcagttctgttttgcattttctttgccctagagacacaagtgtaatctctccctttatccctccactactccacctcagagtagattgtagcctgccaaaggattccttccctcatcctattgaagttgttttttcattgccccatattaatatgactatagaagagccaattaagtagaaatcaagatatacacacacacatagatacacacacacacaccccatatatgtatttatgtggtcttcagagggtccttaaagaatgaattttagattgaaaaatatttagttgtctcattacctcttctaaacacaaaccagctgatgtattttaatctgtttctgttctatcttgtaattaatttggtgggttctacttgttttaacataaataaagagtatgcagcacgtttaat

SEQ ID NO: 1234 - DNA, 4054 bp, Homo sapiens
agaatggggtttatcaagtcctcggcgagctgcccaacgggcagcagctggcgcaagtagcctagctggagaggctcaccccaggaaggagggaggccaccgacctactgggccgacggactcccacacaggtgagcccagagcagacggctggtctgcacccccacagatgcgctcgcagttgcactccctccctctcctggcgcccgggagggttaggggctggtggtgcagacgcgggcccttttgggagttgagtctcgcacaggggagcggacctaggaagagccgaggtggtttcgcacggggctcgccagggtctaagcctgccccccaccgggagaggcctgtggagcgtagggggcgctggatacgggatggaggccctgggagacccctcttgctggctttctcggaggtccagccagaaactgctgcaaggaatggaggcctcctcggggttgagagggagccgggctcccaaaggacctcagagactgggcagaaaaggacgggatctcagggatgactgtcccgccctgatgcgagtcagggagaggggcggccaacctcctagacccctctgagcttccctgaccccaaccctgcggccacgccgcgacccagagccgggctgccaggataacgactgcctcggcccttcctgggccggctaagaagcggtgcttggccccttccctcagtctggcagggggcggggcctccctttagacggcggaccagagaagggggcccctgattcgtgggaggcggggcactactctccaggagaccagaggtcgcctcaggtcaaagtccctttttccacacaaaggggacccacggctggcgtctacgttagggggtgcagagccagatctggtgctgccccctgccaacctcggagtaccacagcacctcctgatggccgaacggggcaacgcctcctcctattccccccccccccttcccgtccccctgccttgtccctcacactgtctctttaaagggctggcggcgccgcggagctgggaggactgaaccaccggcctcgggctgcaggggaaacatttcaggctgactggcgctcgtggctgagactcccatagaaagcccggctcagaggggcattagggtcctaaatgggcggccacgtccctctgcagaggacctggggctcttcgagcccgaaacgaggcaccggcaccgagaaaggtggaccacaccttcccgccccgtccgcaagtccaatcccgggcccacctccgcactggagtcttaaagggccagcgtgcctgggggcggagccagcagaggcgctgagccgggccgcgcctgggcgaacggccggagcgggctgggctgggcccgggatggcggtggccctggcgccggtcccggtggcgccccgcgcgaggtgagggcgggcggtgcaaacctggcggctctctccccttgggctggggtctgaatccccgggggtgctcgcggagaggcgtcccagaaaccccacccccacccgaccgggcgcaggccccacgtgtggggcgggggcggggtcccgcacaaagacccggcggagcgcgctctagccctgagcggccgggcgggggaggcgagcgcgcgcattcccggtggcggtggagggaagggccgggcggccggcgccgccgtgggaggtccgctgcccctttgtccctacggggcctcctccaagccgggagagtgtcagcgctcgagagaaagtccggagagcctcactcttctgccgggcgagtgttacacggatagaagcctcccggcagcgttccttccagtttcgtagcctcttgacgagctgttccctgctttacccaaatgctgtcgtttctctggatcaagggttcttcacggtgtacagggtgggcatcagctgttcagggttctctgaaaccatgtactggatggtatgcaggcatatatgtgactctggtgagcccaaattatctagttcttagaagggtcacagacctaatagagatttgtgccgagccacaggctacctgctccagaaaagagccctgtgcttctggcagtgagttcccagggtgccttgtctgccctgcagtggcctgtggtctctcaaacctattacagccatgagcacagtgcccccacacagcatgggctttgggagcatagatgggcttgaggtgggcacttccagtattccctagactgacttgttctccccaacccttcttccagttcctgagctggtgccaggcaggtgacacctcctgcagcccccagcatgcgggcaggcccaggccccaccgttacattggccctggtgctggcggtggcatgggccatggagctcaagcccacagcaccacccatcttcactggccggccctttgtggtagcgtgggacgtgcccacacaggactgtggcccacgcctcaaggtgccactggacctgaatgcctttgatgtgcaggcctcacctaatgagggttttgtgaaccagaatattaccatcttctaccgcgaccgtctaggcctgtatccacgcttcgattctgccggaaggtctgtgcatggtggtgtgccacagaatgtcagcctttgggcacaccggaagatgctgcagaaacgtgtggagcactacattcggacacaggagtctgcggggctggcggtcatcgactgggaggactggcgacctgtgtgggtgcgcaactggcaggacaaagatgtgtatcgccggttatcacgccagctagtggccagtcgtcaccctgactggcctccagaccgcatagtcaaacaggcacaatatgagtttgagttcgcagcacagcagttcatgctggagacactgcgttatgtcaaggcagtgcggccccggcacctctggggcttctacctctttcctgactgctacaatcatgattatgtgcagaactgggagagctacacaggccgctgccctgatgttgaggtggcccgcaatgaccagctggcctggctgtgggctgagagcacggccctcttcccgtctgtctacctggacgagacacttgcttcctcccgccatggccgcaactttgtgagcttccgtgttcaggaggcccttcgtgtggctcgcacccaccatgccaaccatgcactcccagtctacgtcttcacacgacccacctacagccgcaggctcacggggcttagtgagatggacctcatctctaccattggcgagagtgcggccctgggcgcagctggtgtcatcctctggggtgacgcggggtacaccacaagcacggagacctgccagtacctcaaagattacctgacacggctgctggtcccctacgtggtcaatgtgtcctgggccacccaatattgcagccgggcccagtgccatggccatgggcgctgtgtgcgccgcaaccccagtgccagtaccttcctgcatctcagcaccaacagtttccgcctagtgcctggccatgcacctggtgaaccccagctgcgacctgtgggggagctcagttgggccgacattgaccacctgcagacacacttccgctgccagtgctacttgggctggagtggtgagcaatgccagtgggaccataggcaggcagctggaggtgccagcgaggcctgggctgggtcccacctcaccagtctgctggctctggcagccctggcctttacctggaccttgtaggggtctcctgcctagctgcctagcaagctggcctctaccacaagggctctcttaggcatgtaggaccctgcagggggtggacaaactggagtctggagtgggcagagcccccaggaagcccaggagggcatccataccagctcgcacccccctgttctaagggggaggggaagtccctgggaggccccttctctccctgccagaggggaaggagggtacagctgggctggggaggacctgaccctactcccttgccctagatagtttattattattattattttggggtctcttttgtaaattaaacataaaacaattgcttctctgcttggattttgt

SEQ ID NO: 1235 - DNA, 3411 bp, Homo sapiens
tggagaccctttcagccccgggaggaagcggagcccagaccgagccagagcggagcagcgggagggagggcggggaggccgccgggcaggaagcggggtcccgcccgggcctctggagccacgtgcgcttgtttccgtgctggggcgatcacgtgacccgcgtcagctgacccgtcacggtggagcccggtgctcgcgcccggcagcctctgccccgccgcgcccggagcgcaggacccgcggagggatacagcctgcaagatggtccgctggctgtctgccaagctcggccccacagtggcctctcgccacgtggcccggaacctgctccgcctgctgacgtcttgttatgttggacccactcggcagcagttcacagtgagcagtggcgagagcccaccgctgagcgccggcaacatctaccagaagaggccggtcctgggcgacatcgtgtcagggcctgtgctcagctgcctcctccacatcgcccgcctgtatggggagcctgtcctcacctaccagtacctgccctacatcagctacctggtggccccagggagtgcctcaggccccagccgactgaacagccgtaaggaggcggggctgctggccgcggtgacgctgactcagaagatcatcgtgtacctctcagacaccacactcatggacatcctgccccggatcagccatgaggtcctgctgcccgtgctcagcttcctcacctccctcgtcacggggttcccaagtggggcccaggctcggaccatcctgtgtgtgaaaaccatcagcctcatcgccctcatctgcctgcgcattggacaggagatggtccagcagcacctgagcgagcccgtggccacctttttccaggtcttctctcagctgcatgagcttcggcaacaggatctgaagctggaccctgcgggccgtggtgagggccagctgccacaggtggtcttctctgatgggcagcagcggcccgtggaccccgccctgctggacgagctgcagaaggtgttcaccctggagatggcatacacaatctacgtgcccttctcctgcctgttgggtgacatcatccggaaaatcatccccaaccacgagctggttggggagctggcggcgctgtacttggagagcatcagccccagcagtcgcaaccctgccagcgtggagcccaccgtgcccggcaccgggcccgagtgggacccccatggtgggggctgccctcaggatgacggccactcagggacctttgggagcgtcctggtggggaaccgcattcagatccccaatgactctcggcctgagaaccccggaccgctgggccccatctcgggggtgggtggcgggggcctgggcagcgggagcgacgacaacgccctgaagcaggagctgccgcggagcgtgcacgggctgagcggaaactggctggcgtactggcagtacgagatcggcgtgagccagcaggatgcccactttcacttccaccagatccgcctgcagagcttcccgggccactcgggggccgtcaagtgcgtggcacccctgagcagcgaggacttcttcctgagcggcagcaaggatcgtaccgtgcgcctctggccgctgtacaactacggcgacgggaccagcgagacggccccacgcctcgtctacacccagcaccgcaagagcgtcttcttcgtgggccagcttgaggccccgcagcacgtggtgagctgtgacggggctgtgcacgtctgggaccccttcacagggaagacccttcgcacagtggagccgctggacagccgggtgcccctgactgtggtggctgtcatgcccgccccccacaccagcatcaccatggccagctctgactctaccctgcgctttgtggactgcaggaagcctggtctgcagcacgagttccgactgggcggtgggctgaaccctgggcttgtccgtgccctggccatcagccccagtggccgtagtgtcgtggccggcttctcctcaggcttcatggtgctcctggacacccgcacgggcctggttctgcgaggctggccagcccacgagggggacattctgcagatcaaggcggtggagggcagcgtcctggtcagctcctcctctgaccattccttgaccgtctggaaggagctggagcagaagcccacccatcactacaagtcagcatccgaccccatccacacctttgacctgtacggcagcgaggtggtcactggcaccgtgtccaacaagattggcgtctgctccctgcttgagccaccctcgcaggccaccacgaagctcagctctgagaacttccgcggcacgctcaccagcctggccttgctgcccactaaacgccacctcctgctgggctcagacaacggggttatccgcctcctggcatagactgaggcaggagctggccgggcaagggtgggaagacatctgcgggcgcgtgtccactcaccctgttccctgagcagcagctccctccagggaggccctgggtcccacgccctgggtgcccacatggcctgccaactagggcctgcaaatggagtgggggagtcctggcccctgaatcaccagagccaccaagcctgccagaggggtctcattcatggcttggggacacagggctcctagcaagcaggaagttaagagcaggaggaagcgttgctaccttcacttctccccagctccgccctctgggtccacatgaggacagggaagctcgggaaggggaagggagactggccctgcccagccggtctctagcccctcagcccccgctgggcactctctgtcccatccctctaggacagggaagctggcctggtccagggcactgatggtgcttggattccagcctaaggaaggctggccgtggtccaggagttaagggcttgggtctggggtttaagtggccacccatccaggccctggccagtgtgggaccgggacgggaaggaagaaggaggctaggagcagggggaaaaggtgcacttggccagtggcgcctgccaggagtgagtccatgcgttgtctgcccacccctaccacagtgtttgtgccttcagctgagggggcagcctctgggccctgaacccctgctggggctccacgaccctgagagaaggggtgagaagaatcatctctgcacctcgggtctctgccagaggaagacttaagcatccctgcgacctcacattctagacagagatgaggtccaggggttggcccctgctgccttctcacaatttgcaatagatgtaaataggaccaataaatcctttggaagagccatggggtgaaaaaaaaaaaaaaaaaaaaaaaaaaaaaaaaaaaaaaaaaaaaaaaaaaaaaaaaaaaaaaaaaaaaaaaaaaaaaaaaaaaaaaaaaaaaaaaaag

SEQ ID NO: 1236 - DNA, 2474 bp, Homo sapiens
aaaaaaaaaaaaaaaagaggactagcgaggaggagttgagagaacggagcggacgccatggcgaccaacatcgagcagatttttaggtctttcgtggtcagtaaattccgggaaattcaacaggagctttccagtggaaggaacgaaggccagctgaatggtgaaacaaatacacccattgaaggaaaccaggcgggtgatgcagctgcctctgccaggagtctaccaaatgaagaaatagtgcagaagatagaggaagtactttctggggtcttagatacagaactacgatataagccagataaggctcaattacttgaaatagccaaagctaatgcagctgccatgtgtgctaaggctggtgtccctttaccaccaaacctaaagcctgcacctccacctactatagaagagaaagttgctaaaaagtcaggaggagctactatagaagaactaactgagaaatgtaaacagatcgcacagagtaaagaagatgatgatgtaatagtgaataaacctcatgtttcggatgaagaggaagaagaacctcctttttatcatcatccctttaaactcagtgaacccaaacctatttttttcaatctgaatattgctgcagcaaaaccaactccaccaaaaagccaggtaacattaacaaaagaattccctgtatcatctggatctcaacatcggaaaaaagaagcggatagtgtttatggagaatgggttcctgtggagaaaaatggtgaagaaaacaaagatgatgataatgttttcagcagcaatttgccctcagagcctgtggacatctctacagcaatgagtgaacgggcacttgctcagaaaagactcagtgagaatgcatttgatcttgaagccatgagcatgttaaatagagctcaggaaaggattgatgcctgggctcagctgaactctattcctggccagttcacaggaagtacaggagtacaggttttgacacaagaacagttggccaatactggtgcccaagcctggattaaaaaggatcagttcttaagagcagccccggtaactggaggaatgggagccgttttgatgagaaaaatgggctggagagaaggagaaggattaggaaaaaacaaagaaggcaacaaggaacccatcctagttgattttaagacagaccgaaaaggtcttgttgcagtaggagaaagagcacaaaagaggtctgggaacttctctgctgcaatgaaagatctgtcaggcaaacatcctgtgtctgctttgatggagatctgtaataaaagaaggtggcaaccacctgaatttctattggtccatgatagtggccctgatcatcgcaaacattttctctttagggtattgagaaatggaagcccttaccagcccaattgtatgtttttcttgaataggtattgataaatggaagcgcttaccagcccagctttgccagccctaataagaagcatgctaaagccacagcagctactgtggttcttcaagcaatgggccttgtaccaaaggacctcatggctaatgccacttgcttcaggagtgcctcacgtagatagattgaggttttataataatcatttcagaattttactctgcatcacaatgtatttcctctttaatgttgtaaatatttggcaatttaagacattgtgtaaaaagcaatctgtaaaaacatctccaggctttgatttttgtaccatggaaattgtatttaaccatacagggttttggtatgtttatattgtttaccttagtgatgtatttgtttaagtggctaacatccaaacgactgtttgaaggcatcagagtaatcttcagtgtggaatgttaaataacgcttttatactgtattttgtactatgatgtaactccccttccttatggctaggctactgtaacacttgcctgtaatcagtgaagggctgtgcaccttgtactatttcacaatgggttctgctggacagataatgggccagtgttattgaggtgatcaagatctgttccacagggctaatgccaccatctcccctcaaaattttgtagaggttctaaaaagaaagtggtatgttgtgtgatgatcagcactaagtcctgcattcctgttaaagccacttgggtcataagaagggagtaaaaaatgaagtctgactagaattctattgcagaggccaagtacatttagtatggcattgagttgtgatatagttttactttgatgtgcattttgaatttcagctacacctagatagacgtaaaatgataattaaaatgctgtaaccaacttatctaataaaattggcaaccagccactattttgttgactatgagaaagttaaaagtttatgttaatttttagggtctgatagaatatttcatgtgtattacagtggtattcatatgctatgtctctaaactttattttcaaaagcttaaggcccaaatacaaacttctctgg

SEQ ID NO: 1237 - DNA, 2710 bp, Homo sapiens
tacgcctcctggggttgtcaatatggctgcgttgggatctgttcaccttcaggctgagtcgagactgaggtgaaaaagcggaaaaacgcgagaaaaggtttccccgttgtacagaggctagagtgaggctcggctgaatcggttgcaggcgttggtgcctctgtcagcgtccaggtcactgccgctcccgccccgctcttccctggctgtgctggcggaggctgcgccgatgaacctgactgagggttcatagcagtggcagcaatgcttatggatgctggacaggattatatggtttttgaggacgtggccatacatttctcccaggaggagtggggaattcttaatgacgttcagagacacctgcacagcgatgtgatgctggagaactttgcacttttgtcctcagtaggttgttggcatggagccaaggatgaggaggcaccttccaagcaatgtgtttctgtaggagtgtcacaggtcacaactttaaagccagctttgtccacccagaaggcccagccctgtgagacatgtagctcacttctgaaggacattctacacctggctgagcatgacggaacacaccccaagcgtacagccaagctttacctgcaccaaaaggagcatcttagagagaagctcaccagaagtgatgaagggaggccttcgtttgtgaatgacagtgttcacctggcaaagaggaacctcacatgcatgcagggtggcaaggattttactggtgattcagatcttcaacaacaggctcttcacagtgggtggaagccacacagggacactcatggtgtggaggcctttcaaagtggacagaataattacagctgcacccaatgtgggaaagacttttgccaccaacatacactgtttgagcaccagaaaatccacacagaggaaaggccttatgagtgtagtgaatgtggcaaattgtttaggtacaactccgaccttattaaacatcagcgaaatcatactggagaaaggccttataagtgtagtgaatgtggaaaagccttcagcctcaaatacaatgttgttcaacaccagaaaattcacactggagaaaggccttatgagtgcagtgaatgtgggaaagcttttcttagaaagtctcacctacttcagcaccagaggattcacaccaggccaaggccttatgtgtgtagtgaatgtgggaaggccttccttacacaggctcaccttgttggtcaccagaaaattcatactggagaacggccttatggatgcaatgaatgtgggaaatactttatgtacagttcagcactcattagacatcagaaagttcacactggagaaaggcctttttattgctgtgaatgtgggaaattctttatggacagctgcacactcattattcaccagagagttcatactggagaaaaaccttatgaatgcaacgaatgtgggaaatcctttagataccgttccacactcattagacatcagaaagttcacactggagaaaagccttatgagtgtagtgaatgtgggaagttctttatggacacttccacactcattattcatcagagagttcatactggagaaaagccttatgaatgtaacaaatgtgggaaattctttaggtattgcttcacactgaatagacatcagagagttcactctggagagaggccttatgaatgcagtgaatgtggcaaattctttgtggacagctgtacactgaagagtcatcagagagttcacactggagaaagaccttttgaatgcagcatttgtgggaaatcctttagatgtcgctccacacttgatacacatcagagaattcacactggtgaaaggccttatgagtgtagtgaatgtgggaaattctttaggcacaactcaaatcatattagacatcggagaaatcactttggagaaaggtcttttgagtgcactgagtgtgggagagtttttagccaaaattcccacctcattcggcaccaaaaagttcacactagggaaagaacttacaaatgcagcaaatgtgggaaattttttatggacagctccacactcattagtcatgagagagttcatactggagaaaagccttatgagtgcagtgaatgtgggaaagtctttagatacaactccagcctcattaaacatcggagaattcacactggagagagaccttatcagtgcagtgaatgtggaagagtctttaaccaaaattctcatctcattcagcaccagaaagttcacaccagataaagaatgtatatataaagcagatggggaaagacttcacacagaaatctacactgatttagcactgggacctacgttttaaaaaaagtattcttgtagaatacagataacataaaatctaacatcttaaccatgttaaagtgtatagttcagtaccgttaagtcattcacattgtgcaatgaatatctagaagtcttttcaacttatgaaactaagtctataccttttaaaaccttattcctcactccatccagcctcttgacaagcaccgctctgtatgaattttactagtccgggtacctcatataagaaaacttaagttttggtcttcttgtggtttattttgtggcttattttgcttaacgttatatttttaaggtttcatgttctaatccattagaatttccatcctttttaaaggctgaataaaattctgttagtcatgtgttgctt

SEQ ID NO: 1238 - DNA, 2941 bp, Homo sapiens
gctggctgtcccaggagcagagcagtctccctgtccagatcaccaggatccctgcttgctggagaatgacccagatgtcccaggtgcaggagctcttccatgaggcagcccagcaggatgccctggcccagccccagccctggtggaagacccagctgttcatgtgggagcctgtgctgtttgggacctgggatggtgtgttcacatcctgcatgatcaacatctttggggttgtgctcttcctgaggactggctggctggtgggaaacacaggagtgctcctgggcatgttcctggtgtccttcgtcatcctggtggccctcgtcacggtgctgtctggcattggcgtcggggagcgcagcagcatcggcagcggtggcgtctactccatgatctcctcggtcctgggtgggcagacgggaggcaccatcgggctgctctatgtgtttggacagtgtgttgcaggtgccatgtatatcaccggctttgctgaatccatctcggatttgctgggcctcgggaatatctgggctgtgcgaggaatttcagttgcggtgcttctggccttgctgggcattaacctcgcaggtgtcaaatggataatccgcctccagctgctgttgctgttcctgctggccgtgtccacactggactttgtggtgggttctttcacccacctggacccagaacatggtttcattggatattcacccgaactgctacagaacaacacgctgcccgattacagcccgggggaatcttttttcactgtctttggggttttcttcccagcggctacaggagtcatggccggcttcaacatggggggcgacctcagggagcctgccgccagcattcccctgggctccctggcagctgttggcatctcgtggtttctgtacatcgtcttcgtcttcctcctgggcgccatctgcactcgagaggcccttcgctatgacttcctgatagcggaaaaggtatccctcatgggcttcctgttccttttgggcttatacatctcgtccctggcttcctgcatgggaggactttatggagctccccgcatcctgcagtgcattgcccaggagaaagtgatccctgcacttgcctgtctgggacaagggaaggggccaaacaaaacacccgtggctgccatctgcctgaccagcttggtgaccatggcctttgtttttgtgggtcaagtgaacgttctggcccccatcgtcaccatcaacttcatgctgacatacgttgcagtggactactcttacttctccctgtccatgtgttcctgcagcctgaccccggtgcctgagccggtgctcagggagggcgcagaaggcctccactgctctgagcacctgctcttagagaaagctcccagttacggctctgagggacctgcccaaagagtcttggagggcacgctactggaattcaccaaggacatggatcagctcctccagctaaccaggaagcttgagagtagccagcccaggcaaggagagggtaacaggaccccagaaagtcagaagaggaaaagcaagaaggccaccaagcagaccctacaagatagcttcctcttggacctcaaatcccctccttctttccctgtcgagatctctgacaggttgcccgctgcctcctgggaggggcaggagtcctgctggaacaagcagacttccaagagcgaagggactcagcctgagggaacatatggagagcaacttgttcctgagctgtgcaaccaatcagagtccagtggagaagatttcttcctgaagtccaggctccaagaacaagatgtctggagaagatccacttctttctatacccacatgtgcaacccctgggtctccccgttgggggctgttgggtcccttctcatcatgtttgtgatacagtgggtgtataccctggttaacatgggtgttgctgccatcgtgtatttctacattggccgggccagtccagggcttcaccttggatcagcctccaacttcagctttttccggtggatgaggtctctcttgctcccctcctgcaggagcttgcagtccccccaggagcagatcatcttggcgccgtccctggctaaggttgacatggagatgactcagctcacccaggagaatgcagacttcgccactcgggatcgctaccaccactcctccctcgtgaaccgggagcagctgatgcctcactactagatgcagtgctgggaccttccccttttggagctgtcccatgtacagtggacccaagcccaggaccttcgtggagctgcttctccaacctgagaaactcaagacccatcctcccgctgtcactttggacaatggaaatctacattttcttttccctttttttttttttgagacagagtctcgccttgtcacccaggctggagtccagtggcacaatcttggctcactgcaacctctgcttcccgagttcaagcaattctcctgcctcagcctcctgagtagctgggattataggcatgcaccaccacacccagctattttttgtatttttactggagacagggtttcaccatgttggccaggctggtctcgaactcctgacctcgtgatccacccgtctcagcctcccaaagtactgggattacaggcgtgagccaccatgcctggccagaaatctatgttttcttagaacatgtggaagaaggaaaaagacaaaaaaggaagtctggattctgaggaccacgtctcacccagggtgacatcaggaatggtgctagcctctgcaacacgacacccagtctgaagagctctatacaggtactaagactagcaggggacaccaagactctgcacaaccagattgcttgtgcagagggccacaataagtgtatgttttatattttattgtattatttattcaaaaataaataatacactcacatgtttccacaccc

SEQ ID NO: 1239 - DNA, 2778 bp, Homo sapiens
gggctcgggtgcgggcgcggctggggctgcggcttcagggtgcctctgacagctgctgcaggaaacatggccaagtttgccctgaatcagaacctgcccgacctgggcggcccccgcctgtgcccggtccccgccgccgggggcgcacgcagcccgagctcgccctactcggtggagacgccctacggcttccacctggacctggacttcctcaagtacatagaggagctggagcgtggccccgctgcccgccgcgccccgggacccccgacctcgcgccgtccccgcgcgccccggcccggcctcgcgggcgcacgtagcccaggcgcctggacatccagcgagtccctggccagtgacgacggtggagcaccgggcatactctcccagggcgcgccctcggggctcctgatgcagccgctgtcgccgcgcgcgcccgtgcgcaacccgcgcgtcgagcacacgctccgggagaccagccggcggctggagctggcgcagacacacgagcgcgcgcccagccccggccgcggggtcccgcgcagcccacgcgggtccggccgcagcagccccgcccctaaccttgcccctgcttcgcccggccctgcccaactgcagctggtgcgcgagcagatggccgcggcgctgcggcgcctgcgcgagctcgaggaccaggcgcgaacgctgcccgagctgcaggagcaggtgcgcgcgctgcgcgccgagaaggcgcggctgctggccgggcgcgcgcagcccgagccggacggggaggctgagacgcgcccggacaagctcgcccagctgcggcggctcaccgagcgcctggccacctccgagcgcggcggccgtgccagggccagcccccgggctgacagcccagacggcctggctgcagggcgcagcgagggcgcgctccaggtcctctacggggaggtcgggagtctcgatgggacgccccagacccgggaggtggctgccgaggccgtgcccgagacccgagaagcgggtgcccaggccgtgccggagacccgggaggccggcgtggaggctgcccccgagaccgttgaggcggacgcgtgggtgaccgaggcgctgctggggctgcctgcggccgccgagcgcgagctagagctgctgcgcgccagcctggagcaccagcgcggggtgagtgagcttctgcggggccggttgcgggagctggaggaagcccgcgaggctgcggaggaggcagcggcgggggcccgggcccagctacgcgaggccaccacccagaccccgtggagctgtgccgaaaaggccgcgcagaccgagtccccggcagaggcgccctccttgactcaggagagctcgcccggatccatggacggagacagggccgtggcgcccgcgggcatcctcaaatccatcatgaagaagagagacggcacacctggtgcccaacccagctccggacccaagagcctgcagtttgttggggtcctcaacggagagtacgagagctcctccagcgaggacaccagcgacagcgatggcgacagcgagaacggtggcgccgagcccccgggtagctcctcgggctccggggatgacagcggcgggggatccgactcgggcacccctggccctcccagcggcggggacatccgggaccctgagcccgaggcggaggcagagcctcagcaggtggcacaggggaggtgcgagctgagcccgcgtctgagggaggcgtgcgtagcgctgcagcggcagctgagccggccccgcggagtagccagcgacggcggcgcagtgcgcctcgtggcccaggagtggtttcgagtgtccagccagcggcgctctcaggcggagcccgtggccaggatgctggaaggggtgaggcgcctgggacccgaactgctggcgcacgtggtgaacctggcggatggcaacgggaacacggccctgcactacagtgtgtcccacgggaacctggccatcgcaagcctgctcctggatacgggggcctgcgaggtcaaccgccagaaccgagccggctactcggccctcatgctggctgcactcacctctgtgaggcaggaagaggaggacatggctgtggtccagagactcttctgcatgggtgatgtcaatgccaaggccagtcagacggggcagacagccctcatgctggccatcagccatggccgacaggacatggtggcaaccctactggcgtgtggggctgatgtgaatgcgcaggatgcggatggggccacagcgctgatgtgtgccagtgagtatgggcgcctggacaccgtgcggctgctgctcacccagccaggctgtgaccctgccatcctagacaatgagggcaccagtgccctggccatcgccctggaggctgagcaggatgaggtggccgctctgctacatgcccacctgagctcgggccagcccgacacccagagcgagtcaccccctggctcccagacagccacacctggtgaaggagaatgcggtgacaatggagagaacccccaggttcagtaagctgcctcgtctggctcactacacctagctgtggggagatctcctcgtcagtcacctcagcctttggcgcacagaagggtccagggtcccctgctaacactggccgaagagaaaggcaatttcagttggggtgactgtggcaggaaggggctcactctggccccaccaaggtgaggtggggaccaagtgatagagccctgatccacccactctctgaaacttctttgctaataaaacattcctact

SEQ ID NO: 1240 - DNA, 2094 bp, Homo sapiens
cttccagggcaggctggaggttccgggcattctcacacccagaagcaagtgcagcaatgactgagggagttagtggctctgtagccctgtgtaccctggcttccttgccccagcacgggacagttccgaggtgtgctccattcagtgtcccagagctccaagaccagccggactctcagttgcccacagcggtaacatctcacagacacacctggtatgggtggcctctcttcccctgctcactcctccatcccctcctggtacaatctgggttcaccgcctatgtttgtttgtgaaggctgctgtgacaaattacatgcttgcaggcttcaaacaagagaaaggttttctttcactgttgtggagtcagatgcccgcactcaaggtgttggcagggccagcttccctccggaggctcgggagaatctttcttctctcttccagcttctgtggctgctggccatccctggcatctcttgtcttgtagctgcatcactccagtctctgcctctgccttcacgtccccttctcctcggtgacttctcctctgtctcttataatgacacttatcactggacttaggacccacccaggtgatccaggatgatatcaagatccttgctaacacctgcaaagatcctctctccaaatgagagagcattcgcaggttccagggattaggaaatggacacatcttttaggggtagggacaccattcaacctgccctaatatacttcttgcagtcaaatcttggggttggcttttgggagatccaggcctaaggtgggtgaccttagcaagccacatgccccagtctgagccttgactttctcattactataacaagaagacaggcttgatggttttctggtctcatggtgatgtggttttcagttgttttttgagcaaggggctaggggagggctgctctgagatgcaagaccctgccaggtggcagcaaggggccgatagccagcagttctgcagctcccagggagaattcccaccactcaaagaggcgtgtgatcaagtggttctgtggggagatgattctcaccatctggagtgccagggaaaaatgtaattaccatttgtttctaaatacaaaggaagtgtttaaaggcaaaacacccgaacaggaatatctttacttctgggcgcttggctgggaaggcaggcctcctgtttgtgctgtcttgcgctaggcaggggagggatcattcactaggactgcctcctgaacggggagctgcagaacccgaaggaggaaggggctctaactgcggctgctcgctccttttcaacagctgagcggactgctccaagtgtgtgtgcgaacgggaacagagacgcaagccaaattcacctccgtggagctgctcagggaatacatttcggtaagaaattagtgcatcagagaggagggacaagttaattttggcaggacttgggcaaatactggatctttttagatgcgaaaggggtctttttaaaaaacggaaatcgggccgggcgtggtggcttacgcctataatcccagcactttgggaggccgaggcgggcagatcacctgaggtcaagagtttgagaccagcctggccaacatggtgaaaccctgtctccactaaaaatacaaaaattagccaggcatggtggcgagcggtggtaatcccagctactcgggagactagagcccaggaggcggaggtttcagtgaatcgagatcgtgccattgccctccagccaggacaacaagagtaaaactccatctcaaaaatcaaaaacaatagcaacgacaaaaaaccccaaatcggacgagtcatccctcttcttaaaacctgtatttacaatacattctgaagttcttgttgttgaatgtgaggttctttttaacaaggtttccttaagggctgttttgatacacagaaaaatacaattcagtggcttactttggtttctaaaaattaatattttgccaggctcagtggctcacacctgtaatctcaacacttttggagaccgaggcaggaggaatgcttgaagccaggagtttgagaccagcctgtgcagcacagtgagaccctgtctctacc

SEQ ID NO: 1241 - DNA, 2175 bp, Homo sapiens
gacccgaggccccggtccaatatggcgacctccacgggtcgctggcttctcctccggcttgcactattcggcttcctctgggaagcgtccggcggcctcgactcgggggcctcccgcgacgacgacttgctactgccctatccacgcgcgcgcgcgcgcctcccccgggactgcacacgggtgcgcgccggcaaccgcgagcacgagagttggcctccgcctcccgcgactcccggcgccggcggtctggccgtgcgcaccttcgtgtcgcacttcagggaccgcgcggtggccggccacctgacgcgggccgttgagcccctgcgcaccttctcggtgctggagcccggtgggcccggcggctgcgcggcgagacgacgcgccaccgtggaggagacggcgcgggcggccgactgccgtgtcgcccagaacggcggcttcttccgcatgaactcgggcgagtgcctggggaacgtggtgagcgacgagcggcgggtgagcagctccggggggctgcagaacgcgcagttcgggatccgccgcgacgggaccctggtcaccgggtacctgtctgaggaggaggtgctggacactgagaacccatttgtgcagctgctgagtggggtcgtgtggctgattcgtaatggaagcatctacatcaacgagagccaagccacagagtgtgacgagacacaggagacaggttcctttagcaaatttgtgaatgtgatatcagccaggacggccattggccacgaccggaaagggcagctggtgctctttcatgcagacggccaaacggagcagcgtggcatcaacctgtgggaaatggcggagttcctgctgaaacaggacgtggtcaacgccatcaacctggatgggggtggctctgccacctttgtgctcaacgggaccttggccagttacccgtcagatcactgccaggacaacatgtggcgctgtccccgccaagtgtccaccgtggtgtgtgtgcacgaaccccgctgccagccgcctgactgccacggccacgggacctgcgtggacgggcactgccaatgcaccgggcacttctggcggggtcccggctgtgatgagctggactgtggcccctctaactgcagccagcacggactgtgcacggagaccggctgccgctgtgatgccggatggaccgggtccaactgcagtgaagagtgtccccttggctggcatgggccgggctgccagaggccttgtaagtgtgagcaccattgtccctgtgaccccaagactggcaactgcagcgtctccagagtaaagcagtgtctccagccacctgaagccaccctgagggcgggagaactctcctttttcaccaggaccgcctggctagccctcaccctggcgctggccttcctcctgctgatcagcactgcagcaaacctgtccttgctcctgtccagagcagagaggaaccggcgcctgcatggggactatgcataccacccgctgcaggagatgaatggggagcctctggccgcagagaaggagcagccagggggcgcccacaaccccttcaaggactgaagcctcaagctgcccggggtggcacgtcgcgaaagcttgtttccccacggtctggcttctgcaggggaaatttcaaggccactggcgtggaccatctgggtgtcctcagcccctgtggggcagccaagttcctgatagcacttgtgcctcagcccctcacctggccacctgccagggcacctgcaaccctagcaataccatgctcgctggagaggctcagctgcctgcttttcgcctgcctgtgtctgctgctgagaagcccgtgcccccgggagggctgccgcactgccaaagagtctccctcctcctggggaaggggctgccaacgaaccagactcagtgaccacgtcatgacagaacagcacatcctggccagcacccctggctggagtgggttaaagggacgagtctgccttcctggctgtgacacgggaccccttttctacagacctcatcactggatttgccaactagaattcgatttcctgtcataggaagctccttggaagaagggatggggggatgaaatcatgtttacagacctgttttgtcatcctgctgccaagaagttttttaatcacttgaataaattgatataataaaagg

SEQ ID NO: 1242 - DNA, 1801 bp, Homo sapiens
actatttcagaaagcagccacaggccctgtctggggcatcctcagatgtcagcatctcaaggcagcacaggtgacaggctctctgcaaagagaaaggaatttgttaattgtcgttgctgaagcccttgacttggacactgtgcagctggcagatcctagaccctcccagaaatgagcacctctggtcctccctgcagtcaaggcaacagacaagaaggcagtgagtttgccaagcctggaggggggtggctcaggagcactgcagactcactctgcagggtggctgcctcagtgttcccatctgaaaaaggggaacaggtaagacggctcagattatttcagaggtgcttctagcagtgacctcctgccaagctggcttttggaagatgtgttaagtctgcggtttcacaggacacatcgccactttctcctcggaaggcagagagagcctcagcatcagaggagggacactgtgtaggtgcgaggggtgtaggacctgtgaactctacctctttgcctcagatcttccctccggacctgctcctcgccttaacccatgccctgggttcccggctctcttgtgtggcagatcctggctcactcctgcttctccaggaagtggttctccttccttctgcagcggccatatccaaagatcttgcagatcctggagctgatgttgaagaaggacctggaaggaaggctccaggtagaaggcaggtggcggggctccagagacaaaggagggtcaataagaagatggtcatcacagcggtctacacagcaagcagcagaaacaaccggcatggccaagcatggtgactcacacctgtaatccgaacactttgggaggccgaggtgggtggatcacctgaggtcaggagttcgagaccagcctgaccaacatggagaaaccctgcctctactaaaaatacaaaaattaaccaggtatggtggcatgtgtctgtagtcccagctactcaggaggctgaggcaggagaattgaaggaggcggaggttgcagtgagccgagatcatgctactgcactacagcctgggcaacagagtgagacttcatctcaaaaaaaaaaaaggtccacctggtgcccctggcttcatcaccaatgggcttaccatggccacacgggtcctctttcaggcccttgtgtcactctctcccatgctgaccagctctggccacaaagctgcctcttccatcactgggagctcttccccacctcggagctgttcccgtcacctggattgtcttccctccacattcctgccacctccttctgctcagcctaaaggtcactttctcacagaagctgtccctgagcctcaatctaaattgcatccccacaaggacacaaagatgtgagcaataaacactaaggattccagaaggggggatggaggagagcaaaagttgaaaaactacctgttgggtactatattcactgcttgggcgacgggatcgttggaagcccaaacctcagcatcatgcaatacacccgtgcaacaaacctgcacacgtactttctgaatctaaaagaatttctaaaataaaataaattgtacccccttagttctttctgagcaccctctttttatcttcataacaccatcatttgtatttatggaatgattatgcatcattatttggtaaatgacctcaccagctagactctaaatcaaaaagggctggggctgtatctgacatattctcagttgtatcagcagcacctagcacggcatctaacataaatgatacttatttgtggtttggcttaactaatac

SEQ ID NO: 1243 - DNA, 1889 bp, Homo sapiens
acaataagtacagctggatgcgcaagaaggaggagcggatgtaccccatgaagtcctcctggaggacatggacgtcctggaactggacttcagaatgtggcgggccgaggtccagcaccagtacaaggagaagcagcatgagctggtgaagctgcagcggcgccgggactccgaggacaggcacgaggagtcccatggaagcttggcacgcaggccgtggaaacagacccacgcccccgagcgccctgtcgcccgcccgcaagagggggaagaactgcaacagtagcggaaagctgagcagcaaatctctgccgacatcagatgactatgagctgggagcaggaataaggaagagacacaaagggcccaaggaggaacacaatgcccttattggaacagggaaagccagggagaggaaccagacttgggatgaacacgaggcttcgtctaagttcataagtcagctgaagattaagaagaagaagacggacagcgaccaggagcagttggcaagcaagctcgacaaaggccctctccctcaccaagcaggacaagttgaagtcacccttcaagttttcagacagtgctggggggaaatcaaaaactggcaggggctgcagcaagtacttaactccttatgacagcctgctgggcaaggacaggaaggtgctggccaagggcctccggcctgtctctgaaatcttccagagaaggtaaacacaaaagggccgccaaagccaggaagataggggtggggttcaaggccagaggccagcccaagtcggcccattccgcgtttgcctccgaagtgagcagctactcttacaatacagactcagaggaagacgaagaattcctgaaggagagtggcccgcccaaggcccctccggctagctccaaactgatgccttccctcctgtgtggcatggtggcaaaggacagcaaggcagctggcggcccctagctgaccaagagggcctggcacacaccccctcctccgccccctcccggactctgaaacctaagccagccaccagcaggaagcagtggttttgtttgctgcttcgagaggctaaggtgcattcctccttcagcgactcttcggaagattcatttgactaaggttactatctccaaacacaaaatactttctgtgtttcctagcgagagagtgcctgcgagtgagcgagaaggaagcgagtgggcgcacgggagagatggggggtgaggaggcccgtgcggatggccgcaggaaggccgccatctgggttcttggcagtgtagcctgctgtatcggccaaattatttttatttttgctttgatttgtactgtatcgttgtgataatatcgccggctagctctttttgagctgttatatggactgcttctgagtctgcatttttctccactttccttcctctccgccctcctcccactaccccgagttcctccccacccccatactcaccttttctgcccacccagagaccccaggctgtggtcaggctctctttgggcacgggcccagtgggggcttcccgagaaacattttataaatggaattctgtcatgtgggcgtgtgacttgatgtttgtactgcgattttgataataccaaactttattaaacatactgagttcatttttaacaacaacaataaaacaaaaagtggaggtgataaaaatggttgcaaattcctggggagtaggtattgataaagaggtcaaaggctcacaaaggcactctttttaaagcctctgttttaatacactcatgtaactgtttactcagatcaaaagatagaacgtgctagcaacctggaagtgccccttgtgcccctttcatatcactgtccatccaaccatggttaataaatctccagacttct

SEQ ID NO: 1244 - DNA, 1813 bp, Homo sapiens
caccaaggagaagcttaaggactggagtcgggtagatatgtatatgctggtgctatggagtaaatacatccagggtgtgtttacttttcaccagccaaatactcactacctgaacaccatctccctgagtacctcgcttcttaaatgactccgcttactgcataacatatggaaattgaaagcagcactcctctgggtatcaggacctctgaatcctataaaacctaaaggtgcagggacaagaagcacacattctaaagaagctagattctcatatctgcccctgtattcaatctcctgtggcattatataccatgcagcctctggaaaacttcactgtgccttcatgccagaatgagaataaaaagatgaggaagctgaagcagaaagaagccaagcaacttaatgacactcttcagggtgtttgtccccactgctggttttctagaccactccctgcctacagttcctctctgttctcatctcacgccatcctgcaaaaagatggccatgtgccggacagctctgtatgccgccccactgctgtgctttacaggatctgtctgtgcatgcaggtaggcttatttatcagaaagaacccaatctcacatgccatagagtatgagaaggcaacatttagaggatgttggaaaacatacttttagagttcagtgcattgtcaccttttggatcctcagatcaacctcagatgggtgcacaagaatctctcttctcttggcctccctgctgtctgctttccttttatcgtccacccctcccatcgcttcccagtatcctggttgcaggcatcctgcccctgctcttgtgtcagtctaagccagtgagaactgttcacgctagagaatttattcatggtggagaacagaagtgagctattaagtttttcagaatggagcacccaccagaaaagcaaatctcttgcttgctaattttaaaccattttcctaaaagcacgagcctaatgtgtttcaaagtaaaatttactttaaaattaacaaagttcagaagattattttaatatttgaaataattcttgcctgctatagtttatctgtcatctgtatttccaagaaactttacttttaaactcttttaaaaatatgccgttattgctcctttttatgactgagagtatatggaaagattggcgatacatctgcaaaacctttcctgtgcctgtaataaaacatatggtttagacctctgttctctccctcctccacctctagttttagtcacctagaaatagcttctctatttgtccaaattaccaagtatttaccttctctgttctcctctagagcctgatttagttacaatatatttatatcagttttttttttctgaggatattaaccttagactttaggaagtatgcttctaatctcccctgcttatacacacatgctttaggagggcaagaaaagtgttttattcagatttataacacttgtgcctagaggggcctggcatgtagtaatatactcaataaaaacatgttgagttgactctaatagaaataattcttaaaattcctttcttcttttcttccttccttctttccttcctttcatcatgcaataaacatttattgaatttctcttatgagccagacgccatgttaagtaagtcccaagtttgtagatattatcaactctgacctcaagaagcctagaacgggcaaagccgtacagttggaaaggtaggtagtgttcccaccttttgggttttcaagacaatttggggaggttttattaaggttgtatcctgagcacacatttctcttgttgcc

SEQ ID NO: 1245 - DNA, 1818 bp, Homo sapiens
aaaagtcgccgagccctgtttcccgccatccaggggcactaagcctccccgcagagtagctgcgcggacagggggtctgacgaccgcacgtggcccgctcagcactgccgcggccaagggcgcgactcacctgccagtgtctttcccgaggacacgcgaatcctggggggctcactccggcaaagaggacgagacactgcaccaaggacagggcctgacctctctggccgccttccccggggcctcagtttcccccgatggtgagagtggagccgaccatgcgccctgctgtggactcacccggcgccctggcgtcgagtggcggcggagacctgacagacagcgtgggaaaaatcaagatgtctgcagatttcgagagatggggtgcggtggcgtgcgatggcgaaggacggcgagggacggcgaaggactgaggccacacgacaaggaagctacgctcgtttcgcgccggcggaaatacagacgagagcgcgagctgcggcctagagcggtaggaaccgacgcgagcagtcctgcagcgtcccctggcggagcggaggctcaacgccagactctggaggacttgggataattttcgaaaactatctggaagtttagaagtaaacttctcccacttgctttgcttttctgtttgttctgaagatgttccttggtcactgattcattattaatctgtaggaatggccaattttccatgataggagctgttactacgatgaggggactgtgcttagtttggacttctttctgcaagggtccaaaggcatctgtctttgattcaccactgtactcagtacctagttcagtgactagcacagttgaatgaatgaattctacccctgccccattcctttttttctgaacaatgtcagaccgagatgactgagtcatggcctgagactggaatgtgagcgtgagaagatgagccaagagagatgcacagcgggtaactgctttgctaaactccagcctcaaagtacacgggatggagggtggaaagagtctctgaagcagaagagacctgaccagactggcatctgaggaacctgatcagatttgcacagtgacagagactgtagacagatgtcccatgttccctgcaacatactggagacaatcttgggaggggactcatggcccacaaatcctcataagcattggcactgcctgcaccctgggcaggatgtgcctcttcggcctgagacagccctgctactgactctgcccatgttctggagtgcaagcagcccacccttgggcctgatgaggagcccacgccccaccctccgccccgctccagtcagattcttggtactcaataggtcagaaggacaagaaaatccagtcctgatctatgcaaccatgagggaaatgggggtccctgaggtgagatctgctccatattttgtacctgggagaggcccatgggattctcagactgtgagaacactgggagtctctgtgatggggaggggctgtgggatgctgctatggtttggctgtgaccccacctaaatctcatctggaactgtacttcccataattcccacctgtcgtgggaggtaatggaatcatgggggtggttacccccatgctgcggttcttctgatagtgagtgagttctcatgagacctgatggttttataaggggctttacccacttttgctctatacttctccttgctgccaccatgtgaagaaagacatgtttgcttccacttccgccatgattgtaagtttcctgaggcctccacagccatgctgaactgtgagtcaattaaacctctttccttcatg

SEQ ID NO: 1246 - DNA, 3019 bp, Homo sapiens
acttcttgccattgctctggttgagcaaatgcctgcccgagatgtcttctccccctccccatcccctgctcaaaccacctgggctccaggcccttcctggcagaggtggccttcgaaagatcagaaattttgagcagggggccaagagtgccatggtggccacgtgggcatgcagctaaggattcctgctcctgcaaagccctggctcccatccctcaggctcccaggtgggctcatggcgtgcagcccacaagccctggagtgtaaggcaggcgagagatcatcccagggcagagatgctgaggatcgtggggaaggggatgcaagaggcgagggtgtagccctcacccgtggctttggagcagggaacccagtccacctgggtttatctgagtcctttccccttctcctctgcctgcctctgaggcccgaggacatcagatgcagcacacctgatttccctgggctgttgagtgtcttctcctggctctctagggatgacctccgtgtcagcagatggggtgcccaggtgagtcagaacccctgacccagcccagcccctcctccaggcttgaaggggggtggcggtggggtataggactaaaacccaggcttaagaccccagggaccttcaggtccatgaagaggtgggagtttgggctcattctgtagaggacggaggagctgtagctgggtgggggaaatcaagggctatggtccaaggccaggatgaggcctgccaggcaaggtgccagcaggtccatcccttcatgtcagggagccctctggctccagagactctcactgagtgactctgggcaggtcatacagaacaggctgaggcccaaggagggaatggaagtaagaggcttctggaatcatcgagtatggcaacggagggccaaagatgttttgttttgttttgtgggttttgtttgctttggttttttgagacagcctctcgctttgtcgcccaggctggagtgcagcggcatgattatggcttactgcagcctttgcccctcaggctcaagaaatccttccacccagtgtcctgaggagctgggactacagacatgcaccaccacacccagcaattttttttttttttcctgtagagatggggtttcgccatgttgcccaggctggtctcgaactcctgagttcaagtgatccacccacctcagcctcccaaaatgctgagattacaggtgtgagccaccacgcctggccccaaacatgtttaaatcataggaccatgtgctcatggctgacaacacagaagagtctagaagtaggccagggttccaatcctggctctgccacttcccaggtgcccactgtggccctcagaggatgagtgggtttgggggacagaataagaaggtagtcaaaggcgagagctgggagaagagggtttcagaagggggatcagtgagggcagaggccctgcagaaggagcccgggctggggaagtgcgggtgagagagtgaaagctgctggagaatccaggacgaggagaagagggaggggaggggtcacagagcatcgtgtagactctatgcagagtgtagactctatgctggggacagtgggaggctgtggaggaggagaggctgcctccaccttctcaaaagatccctctggctgctgtgtggggaatgactgtcgggatggaggcagaggcctggagaggaggcacgggaggtggtctaggggagaagggggagaatctgggctgtgtagtggtggccagatggcttctgaaattgagtactgggatggattagccatctctgtcatggaagtggaaaaggcgtttggtagcacgaatgttctgtggaagacagagcccttctctttatgggcatgcacagctgcctgtcctcccagtctgtctcccaccctgctagcgctgggcctccccagagacgggaaagagctggcagagcagggctccctgtggactgtacttgagcctggaggagactggagccacagtcagagccagctgggaacccctgggcgcgggaaaggagctctaggtttttagtctggagcccagcccgctgccactgcttgatttgtggccatgggcctcagtttctccatttgtcaaatgggctggcagtgctcccagggctgatgcaaagcctggattcgaggccagaaggaaagatgttttgagacagatgggagtgtgcaagcccattaagcccaagacagcctgtgtgggaactcatcactgggagcccaaggcgggcatccaccctccctgcagaccgtccttcccacttgcccatgtttatgtgtttccttcccatcacctgggccaccatgactcaccccaggcctggtgggtgagtgagtaactggctggggctggagccaggcccttgggcaagacacttcccttcctgggcctcagctttcctatctgtagaacggccagacaagtcctgctctgctcaccccactggggaatccggggtgaatacagggctgaggatgtgaaagcaagaggctgcaatggagtggggacaaagcagggtgtggcctttctgcaggaacagaaaccaggccctctcgacatcagtcccaacttggctcccagcagagttttaaatgctcatttgcctaggctgaccagcccagcagatccccattgctctgaggggggaccccatgcctgggagggcttggaatggagggcagggtggggcccaggaccttggtgacctcatgggagatgggacttcaatgatgaaagggaggctaatctaggggaagaagccacagaggtgaagccccaccctagaccctgcaggctgaggtgcccttaagtgggtagagggtagaaaatgctggacttggcccggtgcagtggctcacacctgtaatcacagcattctgggaggctgaggcgggaggatcacttgagcccaggagttcgaggctgctgtgagctgtggccaaactactgcactccagcctagatgacagagcaagaccctgtctc

SEQ ID NO: 1247 - DNA, 2494 bp, Homo sapiens
ttgatacatgttttcactagaatgttatatgaagttaagtgatggcacctgaagctaggagaacctgggatgttttacgaagtgagatctttgtgtttggtttcaaagatagagttgaaaccagcctccataggaattctgttttattctgccactgcagtgctatcagtcctacctagttcaaagcatatttagccggctgcaatagcctcctgtcactagaattctacctccacaatttggttgaagtaatttttaagatgcagtaagattgtgtcagtctattgaaaacatcagtgtgttctcatcacagtaaaacacaattcaaactccttttcatgatatggccccatgtgacctggttcctgctacctcttcaatctcttggcctttcacagtggtcttcctgctgtttgtgaatatgccagctttgttctggtctttgtctttgcattggctgttttgtcagactcaggctcttcccatggctccatgtcattcaagtgtcagcccagtctttgcagaggagccttccttgaccatcctcttcaaaatagcacccatcccccatctatcccattacctgttacacttcgttttatttatgacacacctcactaatttgatttgtatgtctctacctggcattcatctccgcctcaccccccaccttcaccgccattgaatatgtggtcagccaacaggagtcctgtttaccctattcactactgtgtccctagtgtacatcacatagtaagtgttctttacaaaagaataaagaaaaacttactcatttaatctcatgcataccatgtcagagcatatgtcaccataactttcctttggatgaatcccaaattgtattcttcccacctacctcctccaagattccaccttcatctttataccctttctgaattgccctttgtaatattggaactatcttaactctaaatatataaatataatatatgcaagtcttatttaagaatgcgttgaagtttagaaaagtaaggtgcccaaagtaacacagctataagtggtatttctaggatttaaacttagatctctctctaactaaagctcctctgctatgctggtgtggaggctgatgttcttggtaagtgggaggtataaatccagaattagaataggagccctgtccattggagtagaaatagcaaacattcattgtttgtttctataagaagaactgggtgatatttgctaacagaacctttaaaaagtaacctgaattttttttggactaaagttaatgtatgcttgttataaaatacatggaatatatgaaaaaatgtaaagaagtaaagaccatccatagttcttccactgagagataaccactattaacattttagaatattttaatcaagtattttttatgtaaaaatattgtgatgatttttgtgcataaatcttgaattttgaaatcatttcctaatgtaattactagatcaaagcatactgtcaaatttgtttccagaaagatgatgccaatttatatttccaatatatttagtttccatttctggaattttttaaatattaaacttgtaatatatgtttgttattaattacctgctctatctataggcatacctcagatattgtgggttcagactatcacagtaaagctaatatcacaataaagcaagtcacgtgaatcttttggtttccccatgcatataaaagttatgtttgcgctgtactgtagtctattaagtgtacagtagcattatgtccaataaaaacaatgtacacactttaatttaaaaatactttattgctgaaaaaggctaacagtcttctgagccttcatcaagttgtaatctttctgctggtcgagggtcttgcctcagttgatggctgctgactgatcagggtgggggttgctgaaggttgggtggctgtggcaatttcttaaaataggataacaatgacatttgctgcattgatggactttccctttcatgaaagatttttctgtggcatgtgatagtgtttaatagcatttttatccacaggcagaacttccaaaattgaagtcagtcctctcaaaccctgctttatcaaccaagtttatgtaacatcctgaattctttgttgtcatttcagcagtgttcacagcatcttcaccaggagtaaatttcaactccggaaaccactttctttgctcatcagtaagaaggaattcctgattaaatttgagtgttatgtggacaagtttcatggcgccccagacaattacaatagtatcattaaagatcactatcacagatcaccataacaaatacaataattaaaaagtttgaaatattgtgacagttatcaaaatgtgacatagagataagaagtgagcagatgcagttgggaaagtggtgccagtagacttgctaggtgcagttgccacagaccttcattttgtaaaaaaaatgcagtgtctgaaaagcacaataaagcaaggcattcctgt

SEQ ID NO: 1248 - DNA, 3611 bp, Homo sapiens
tccgcatcctcttcgcgcagtccgagccgcttgtgccctcggccgcggccctggcccgcatggacgcctatgccctggctccgtatgccggggccgggcctctcgtgggcgtccctggggtcggggcgccaacccccttctccttccctaaacgagcgcacctcctgttcccgccaccccgggaagagggcctgggcttcccctccttcctcgacccggaccgccacttcctgtcggccttccgccgggaggagccgccgcggatgccggggggcgcgctggaaccgcacgcggggctgcggccgctctcgcggcgcctggaggccgaggccgggccggctggggagctcgcgggcgcgcggggcttcttccaggcgcggcacctggagatggacgccttcaagcggcacagcttcgcgaccgagggcgcgggcgccgtggagaacttcgcggccgcgcggcaggtgtcgcggcagacgttcctcagccacggcgacgacttccgcttccagaccagccacttccaccgtgaccagctctaccagcagcagtaccagtgggacccgcagctcacgccggcgcgcccgcaaggcctgttcgagaagcttcgcgggggccgcgcgggtttcgcggacccggatgacttcaccctgggcgccgggccccgcttcccggagctcggacccgacgggcaccagcggctggactacgtgccgtccagcgcgtcccgcgaggtgcgccacggctcggaccccgccttcgcgcccggaccccgcggcctggagcccagcggagccccgcgccccaacctgacccagcgcttcccatgccaggccgcggcgaggccgggcccagaccccgctcccgaggcggagccggagcgcaggggcgggcccgaggggcgggcagggctgcggcgctggcgtttggcctcctacttgagcggctgccacggcgaggatgggggcgacgacggcctaccggcgcccatggtagcggaggcttatgaagacgacgtgctggctcccgggggccgggcacctgccggcgacctgctcccctcggccttccgcgtcccagcagccttccccaccaaggtcccggtgccaggcccgggcagcggcggcaacggcccagagcgcgagggcccggaggagcctggcctggccaagcaggactcattccgctcgcgcctgaaccccctggtccagcgcagctccaggctgcgctcctcgctcatcttcagcacgtcacaggccgagggcgcggccggggctgcggcggccactgagaaggtgcagctgctgcacaaggagcagacggtcagcgagacgctggggcccggcggagaggccgtgcgctccgcggcttccaccaaggtggcggagctgctggagaagtacaagggcccagcccgtgatcccggcggcggcgcgggcgccatcaccgttgccagccacagcaaggccgtcgtgtcccaggcgtggcgggaagaggtggcggccccaggtgccgtggggggcgagcgccgcagcctcgagagctgcctgctggacctgcgcgactcctttgcacagcagctgcaccaggaggcggagcggcagccgggagccgcgtcgctcaccgcggcgcagctgctcgacacactgggccggagcggctccgaccgcctgccttcccgcttcctctctgcccagagccactcaacgtccccgcaagggctggacagccctctgccgctggaagggtccggagcgcaccaggtgctccataatgagtcaaaagggagccccacctcggcttaccctgagcggaaggggagccccacgcctgggttttccactcgaagaggaagtccaactacaggatttatcgagcagaaggggagccccacctcagcctaccccgagcgcaggggtagtccggtgccccccgtgccggagcgcaggagcagtccggtgccccccgtgccggagcgcaggggcagcctcacccttaccatctccggggagtccccgaaggccgggcccgcggaggaggggccgagcggccccatggaagtcttgcgcaaaggctccttgcgtcttaggcagctgctgagccccaagggcgagcggcgcatggaggatgagggtggcttcccagtgccgcaggagaacggccaacccgagagcccgcggcgtctgtcactgggccagggtgacagcacggaggctgccacagaagagcggggtccgcgggcgcgcctgtcctcagccacggccaacgccttgtacagcagcaaccttcgggatgacacgaaggccattctggagcagatcagtgcccacggccagaagcaccgtgcggtccctgccccgagccccggcccgacccacaacagccccgagctaggccgtccaccggctgctggcgtcctggccccagatatgtccgacaaggacaagtgttcagccatcttccgctcggacagcttggggacccagggccggctgagccgcacgctgccagccagcgcggaggagcgcgatcggctgctgcgccgcatggagagcatgcgcaaggagaagcgcgtgtacagccgcttcgaggtcttctgcaagaaagaggaggccagcagccctggggcaggggaaggccccgcggaggagggcaccagggacagcaaggtgggcaagttcgtgcccaagatcctgggcacgttcaaaagcaagaagtgagtcttctggcctggcaacccaggccagggtgcccgcatcgctgccccggtcatccagaagccccgcggaacagagagccctgctcatgtgcttgagcagcggctgtcaggccacggccgcttggggcttggctgagtgcgccagacctcggctccactggaggctcacctggcagctgccgtctctgccccctggcctccccaacgctggggctgcacccctcgccaccagtgcctttctcccctcagcaccttcatctctgcaccgtcagccttgcgtggcgcagcgtctggctccgccatctctttgtgcctcagtcccccccgccccctttatttttttgagatctagggctggagtgcagttgagcggtctgggctcactgcaacctctgcctcccgggttccagcgattctcctgccccagcctcctgagtagctgggattacagatgtatgctaccacgcccagtgtaataaaccctaagagggaactgatttaagaaacaaggccgccaaacaaaggcagcagttccgactccagcagctgggaaaggaaggaaagtgaccccactttcactcctgcacagcccactggttaccaaaaccaccgtgcaagtcgggatgacagcagggacttctggccaggtgggaaaggtgcctggaagcgggatgcgcctgtgcgtctcttggccatgatgttcttgtgggcatgttattcttggtgctgcctggggtgttgctgagcggacaggctctccagctggagtccatggagaggccagaggctggcggccctgcctgggccttcggagcctcctgcctgcaccctccacctcttctaaaccatgatgtggcacattttggtgttaataaaacacaacacacaaagt

SEQ ID NO: 1249 - DNA, 1652 bp, Homo sapiens
gtgtcttgcgcactcgccacagagggctgaaggtgctgctaatggctctcttggcgttgcgacgtcctggtcagcagttttcttccattctctccctccatttcttgagtgagcagccatgagttggactgtgtctgttgtgcaggccagccggagagtgagctcggcaggagcgaatttcctgtccctgtgtcccagtcaggcagcgcgcatgccgctcaagggcgcctggctcttcacccccgtgaagagtgagcttgttgagcgcttcacttccgaggagcccgctcatcacagtaaggtctccatcataggaactggatcggtgggcatggcctgcgctaccagcatcttattaaaaggcttgagtgatgaacttgcccttgtggatcttgatgaaggcaaactgaagggtgagacaatggatcttcaacatggcagccctttcatgaaaacgccaaatattgtttgtagcaaagattaccttgtcacagcaaactccagcctagtgattatcacagaaggtgcacgtcaagaaaagggagaaacgcgccttaatttagtccagcgaaatgtggccatcttcaagttaatgatttccggtattgtccagtacagccccctctgcaagctgattattgtttccaatccagtggataacttaacttatgtagcctggaagttgagtgcattttccaaaaaccgtgttattggaagcggctgtaatctggatactgctcgtttttgtttcttgtttggacaaaagcttggtatccactctgaaaactgccacggatggatcctaggagagcatggagactcaagtgttcctgtatggagcatggagtgaacatagctggtgtccctttgaagaatctgaactctgatacaggaactgataaagatcctgaacaatggaaaaatgtccacaagtgattgctagtgcctatgagattattaaaatgaaaggttatacttcatgggccattggcctatctgtagctgatttaacagaaagtattttgaagaatcttaggagaacacatccagtttccaccatcattaggggtctctgtggaatagatgaagaagtattcctcaatattccttgtgtcctgggagaggagggtatcaccaaccttataaagataaagctgacccctgaagaggaggcccccctgaaagagagtgcaaaaacactttgagaaattcagaaggaactgaagctttaaagttgtctaaaactaccattctgaaattattgaagagatcatagatatagggttatatatcaaaattttgaataaacttaaattcctaaaatatggaaacgggaaagtggataaaatgacttacctatttatttagtcctccagctcttttatttagcgtccaggtgctgggtgatacttatttacaattcctaaagaaagtgtttttggtacccctgatgtagcagcacttgccttgttatatatgtagttggcatttggttcccaaaaagtaggatgtaagtatttattgtgttctagatattctgattattttcattagatacatgctttcttcttgctggcttatacctatgttcatttatatgctgtaaaaaagtggtaacttcctctacaatgtaaaaataaaagtatatacgt

SEQ ID NO: 1250 - DNA, 1638 bp, Homo sapiens
gtgcagaccctgaccacggccaaagcttttgttctctctcagcttctttacccaccgtaaaacacgaatgctgagctagagtcagtgtaccttgtaaacatttatgtaggctgaaaactggagggtggatggcagtggaaaaaagctgaaaacttaaataaagaaactgtactcttgatgtaacaatgcgggtctcccatgagagctctgacagcagatctgagaagggttgcaaggagaaggaggcatgaattggcacgggcatcttcttctgaaggcatgggcaggtggattgggattttactcgcagagacgggatcgtccacagacccggaggctctgcactatgactacattgatgtggagatgtctgcaagtgtcattcagacagccaaacagaccttctgtttcatgaacaggcgtgttatatctgctaacccatatctagggggcacctccaacggctatgcccaccccagcgggacggcacttcattatgacgatgtcccgtgcatcaacggctcgtgggaaccggaagacggctttcctgcttcctgcagcagaggcttgggagaagaggtgctttatgataacgcaggcctgtacgataacttgccgcctccgcacatctttgcccgctactctcctgctgacagaaaggcctctaggctgtctgctgacaagctgtcctctaaccattacaaataccctgcctctgctcagtctgtcactaatacctcttctgtggggagggcgtctctcgggctcaactcgcagctcaagggtaaaaagccccccatggcgtctaatggggtcacaggaaaagggaagactctgagcagtcagccaaagaaagcggatcccgcggctgttgtgaaaaggacgggttcgaatgctgcccagtacaagtatggcaagaaccgggtagaagcagatgccaagcggctacagaccaaagaggaggagctgctgaagaggaaagaggccctgcggaataggctggcccagctccgcaaggaaagaaaagaccttcgagcggctattgaagtgaacgccggcaggaagccgcaggcgatcctggaggagaagctgaagcagctggaggaggagtgccggcagaaggaggcggagcgtgtcagcctggagctggagctgacggaggtcaaggagagcctgaagaaagcgctggcgggcggagtcaccctggggctggccatcgagcccaagtcagggacatcgagtccacagtctccagtgttccggcaccggaccctggaaaactcgcccatctccagctgtgacaccagtgacaccgagggccccgtgccggtgaacagcgcggccgtcttgaagaagagccaggctgccccgggcagctccccctgccgagggcatgtgctgcggaaggccaaggaatgggaattgaagaacgggacctaggggacagcagcaccactccagcctcagagactgcacacccccttgcctgtatcctcatctgtgtgacggcaggaagctctgcccagagtggcctcagctgcacgactccagaggctccacgactgagctctgaggccagtgcctgtcccccaggcccacttgtattctttctactgtaaaatggcgcctttaaaaaag

SEQ ID NO: 1251 - DNA, 1945 bp, Homo sapiens
attaatctgttttctcaactgcctcttcctcatccatctaattgcagtccccctccctgcctttttaatgacatcattttggacacttttaggacatcatacgtgagattcagcacaatttattttctattcaaattccatattactatgtgagttgccgtcttcccactccaacggagtaagatctccaaaggtgggagagaaagtctcaattgagtatgcctcaggtgcaatttagtattccaaataaaggaggcttttgaggtcttgcctctccttacctcctgagttttctttttagaaagaaaacagactttacattactgcttttgatgttgttctgggaactgcgatcttggaacaggtaaagaacccgccatgttgggcctgttggaagaaggaggaggaagccaccctcctaccgaggtgcccttgaacctggtgagagaaagtggagagatggggtctcactttgttgtccgactggtcttgaactcctggcctcgagcgatcctcccacctcagcctcctgagcagctgggaccagagctgctgtcactcaattggaaaaagaatgatgaataattttaaatgattttcctacaggaactcattatacaatgacaaatggaggcagcattaacagttctacacatttactggatcttttggatgaaccaattccaggtgttggtacatatgatgatttccatactattgactgggtgcaagaaaaatgtaaagacagagaaaggcatagatggatggagtctcgctgtcttcaggctggagtgcagaggcgcaatcttggctcactgcaacctctgcctcccgggttcaagggattttcctgcttcagcctcccaagcagctgggattacagaaaattactgacttgtggtgaattaaaacagaaaaagacaacaatgtaagagacaaggaatcactgcagaattaaacctttaaaaccttcaccaaagtgggagaagagtagccatggcaagcatgcgtttgagcaaggatattataaggatcaactaattgaagtccaaggcttgcagaaagtggatctctaaagaaaataaatttagacaatactttccggagacagacaggaaataatgcttttactcatcccactgaagagctatggcacttccaattcctgagcctttgtgaggttctgcgtgtcagtaagcttgcttctgggcatcacctccgaaaacacttgggtttcagttttctctgtgaggcttcttaaggagtggaggaaagtggatgttttcaagataacgcagctaacattcaaagaggttaagtgaattgtccaaagtcacacagcaagcactggaggtaagattcaaacctgaatagtctatcatttcagagtactttcaacactatgcaatactatctctctagcaatcagccagattgaataagatctgtagttcacagagccacttgcatttttaatcctagtttaattaacttaggaaatttgtatctaaaggatgcatcttttttttttttttttttcaatagaggcagtgtctcaccatgttgcccagactggcctcaaacttctgggctcaaaccatcctcccatctcagccttccaaatgctgagattacaggcgtgagccaccacgtcccaccgggatacataggttttacggtatcctctgaacctccctttaatcaagagagtggacaaaactgtgggtccctcattttcaaaatggccagtaaaagaggaaataaggatatgcaatgtttagttattttctgctgccctctttaagttgattggggatctctttgtcactactttgggaagataacttaccttcttatccactatggctaattggagcttttctcatgtctttatggttgctgggaaattttcaaataaaattcactgggaatggtttgaaattgc

SEQ ID NO: 1252 - DNA, 1545 bp, Homo sapiens
atctggagcgcgcttggaatccagcaggcggttgctgccgcgtcttccacaacctccgcggtctggagctggcctcccccaccgccgccccaaccaccggccccgccgccatcaccaccaccgtcacctccgccgctgcctccttggggccctcctccttcaccgcccccttagccacctctacacattctaggctttctgtcctggagaagaagctataatcggtttccttgtgggcccggtgcgcagccatggcggacggtggcggcggcggcagcggcggtgcgggcccggcctcgacccgggccagcgggggcggcggccccatcaacccggcctcgttgccccctggcgaccctcagctcatcgctatcatcgtggggcagcccaagagcaggggcctttttgacagcttccgccgggactgcaaggctgacgtggacaccaagccagcttaccaaaacctgagccagaaagcggataattttgtgtcgacacatctggacaagcaggaatggaatcctccagcaaacgacaaccaactgcacgatggtctgaggcagagtgtggttcagtcagggaggtcagaagctggagtggacaggattagttctcaggtggtggatccaaaactaaaccacatcttcaggccacaaatagaacaaataattcatgaattcctggtggcccagaaagaagcagctgtgccagcactccctccagagccagaaggccaggaccctccagctccgtctcaggacacttcctaagaatatgcctgacagcttttgaaagcgctatttaatttttggtgaagaaatggattcggttacataagagtgcagtttcagattgaagataagccaagttcatcactgagctcaagatttccacctcgaccatgagcagtgaccagattgaaagggaagcaagttcgccagagagaaagttgaccgtggcaccctcctgcattgcgctgccatttggccagcctttccaagggcatgacaccaaacacacactacagagagggaaacactaccgcgacccaggattgtcctgaaacagacatctatacttgaacatggagactgcacatggattttagggtttgtgctctgagataaacgaaagctacagcgagagaacataaccaatcccaaagacaatttcaaagaacaatgacagtaaaggttaactgggaggaatatttgacagtacttatctgatattgtctctcagagttgcaaactagattgtacacaacattagtgtcagatagctttgaagttgtgaccttcttgtacatgaatcttctagccagtttcctttcctttgtaagagataacaaagcatgaaaccctagaatgagtgagaagttcagacattaggtataaggaaactcatttgcagactctctgtccaagaatgcttcctgtcttgcaggggctagtgagtcttgggtgtgtttatgttatgctcacatttgtgttttatttgaaaagtggatggtcaataaatggcttatctttcaactgcaacaac

SEQ ID NO: 1253 - DNA, 1777 bp, Homo sapiens
agaggaagcgctgccccggcagccgcagccacggccaccgggagctaggagtgaacccctgcgggggagcagcttccccctcgcgatcgtggggacagccagtcctgtgaaacgaggaggcggttccggacgcccagaaacgcccagggagacctggagccgggggaagaggggacatgagcggccagctgagtccatccccaggcggctaggggcggacccagcagcccctcagctctcctcgtaaccacggaatctgagagaatggagccgagtacctgtaggaccatggaatcagaggaagactatgttgaggaaaaggaatctgagaagtgtgttaaagagggagttaccaacccctctaactcttcacagcaggctctcttaaaagctgactataaggcattaaaaaatggggttccctcacccattatggccacaaaaattccgaagaaagtcatagccccagttgacacaggcgacttagaagctgggaggaggaagagaaggcggaaacgcagatcactggccatcaacctgaccaactgcaagtatgagagtgtgcgtcgggcagcccaaatgtgtagcctgaaggaggtgggggaggatgaagagtggactctgtactggacagactgcgctgtctcactggaacgagtcatggacatgaagaggtttcagaaaatcaaccacttccctggcatgacagaaatctgccgcaaagatctgctggctcggaacctcaaccgcatgtacaaactctatccctctgagtacaacatcttcccccgcacctggtgcctccccgcagactatggggacttccagtcctacggtcgtcagcgaaaagcccgcacatatatctgcaagccagacagtggctgtcagggacgtggcatcttcattacccgaaatccccgggagatcaagccaggagagcatatgatctgccagcaatacatctccaagcccctcctcattgatggcttcaagtttgatatgcgagtctacgtcctgatcacatcctgtgaccctctccggatcttcacatatgaggagggcctagcccgttttgccaccacgccctatatggagcccagccataacaacctggacaatgtctgcatgcacctgaccaactatgctatcaacaaacacaatgagaattttgtccgggatggcgctgtgggcagtaagaggaagctgtcgacactcaacatctggctgcaagagcacagctacaaccctggagagctgtggggggacatcgaggacatcatcatcaaaaccatcatctcagcccattctgttctacgccacaactaccgaacctgttttccccagtatctgaatggaggtacatgtgcctgttttgaaatccttggttttgacatcttgctggaccacaagttgaagccctggctgctagaggtaaaccactctccaagctttaccacggactcatgccttgatcaagaagtaaaggatgcacttctctgtgatgctatgacccttgtcaacctccggggctgtgacaaaaggaaggtgatggaggaggataagcggcgagtcaaggaacggcttttccagtgctaccgacagccacgagaatctaggtgtgctaggtgtctggcatgtgtttagttcttcattattcctgagagtaaaagtcctcctttagatgaagaatgtggcctggggctgatttgctatcaaaaacaactttttgcatagataatatgttcatatttgcattaaaaaaatcacaggaccaggc

SEQ ID NO: 1254 - DNA, 2474 bp, Homo sapiens
aaaaaaaaaccccacagctcctaagaattctctcacctgccttctgcccttaagctccggtagattgcaaataacctgctttctttctgttcccgagctgcgtttggacccgtcggatcgtaaatcccatgtaaggtacctgccgtcggaagatttgatctttctacttggacacctaatacccacagtcctccaggtgggtcctaaggatcttaggatcaacgatgggggccctaagccagggggggaagagggtctggctctcagtccccgcctcacggggggtgcctcccccctctgcgatgggtgtcctaagagccagtgggggaacaggggctggctctcagtccctacctcgcggggggtgcctcccccaccctgcgatgggggtattaacagccaggggcggaagaggggatagctctcagtccccatcctcgtggggggtgccacaccctcctgcgatggggttcctaagagccagagggggaagagggactggctctcagtccccgcctcgtggggggtccctcccccatctgcgatgggggtcctaagagccagtgggggaacagaggctggctctcagtccctgcctcgcgggggggtgcctcccccaccctgcgatgggggtactaacagccaggggcggaagaggggatagctctcagtccccactctcgtagggggtgcctccccccctgcgatgggggtactaacagccagtggcggaagaggggatagctctcagtccccactgtcgtggggggtgcctccccctcctgtgatggggttcctcagagccgggggggaagagggactggctctcagtaatcccacgtaaggtacctgccgtcggaagatttgaactttctacttggacacctaccacccgcagtcctccaggtgggtcctaaggatcttaggatcaacgatgtgggtcctaagctggggggggaagagggtctggctctcagtccccgcctcgcggggggtgcgtcccccctctgcgatgggggtcctaagagccagtgggggaaccaggggttggctctcagtccctgcctcgcggggggtgcctccccccccctgcgatgggggtaccaacagccaggggcggaagagaggatagctctcagtccccaccctcgcggggttgcctccccctcctgcgatgggggtcctcagagccagggggggaagagggactgcctctcagtccctgcctcgcggggggtgcctccgcccccagcgatggggatcctaagagcaaaggggggaagaggggctcgctctcagtccccgcatcgcgaggggtgcctccccccctgcgatgggggtgcaaagagccaggggaggaaagggggaggttcgcagtccccgcctcgcggggattgcctccccccctgcgatggtggtcccaagagccagggggggaagaggggttggctctgagtccccgcctcgtggggggtgcctcccccaccctgcgatgggagtcccaagagccaggggggaagaggggatggatctcagccatcacaaaatggggggcctttatgttcaggttttgcccaagaatcagcttatttgcttcttgtactagcagggcagttgctgccaaggccctcaaataggggggccattctttagcaaccctgtctagttgtttagagacgtaggctaccggcctcagccagggccccacagtttgggttaaaagtccagctgccatcttttctctctctgacgcatacaatggaaaaggctttgtcagatcgggtagccccagggctggggctgccagaagattttcttataactaatgaaagacttgctgttgtcgggatccccatttcaaaggttccgggtccccgccccctttgtgacctcatacaaaggcttgactaatactgcaacgtttgggatccacagcctacaaaaccccacagctcctaagaattctctcacctgccttctgcccttaagctccggtagattgcaaataacctgctttctttctgttcccgagctgcgttcggacccctgtcgtattgtaaatcccacgcaaggtacctgccgtcggaagatttgagctttcttcttgaacacctcatacccacagtcctccagacagaaggacaacaggtacaaagccctaaggattataaaggtatgctgcttgccatcatcttagtgaccaaggtagcgaagctgtttctgtaccttggaacagtcttccctgacaagccagagaacagcgataaagccaccagccttgggatcaggactgaaaaggcaagagtgatggagatttctcctgcgctaagccaagagaaggtttcagcacctcggacagctcccaccgaagtagcggcgctcccagctgcttgcagatgtggaaaaggaaagcctcggtttgtcttgaggttgtcagcagttgcaagacacgtaataaaatgcaatgtgttcct

SEQ ID NO: 1255 - DNA, 1769 bp, Homo sapiens
tttcccacgctacagggctcacacgtgtctggcctgcgacgcgctctcccttcgccggggtcccagtttcccgcccaggagacctcggtccctcctccgaggccgccgggccctcctccagagtcccgccagtcccccagagtccaggccagtccccgccgtcacccggtgcgaacccgcgagaggcctagtgcagctggcagccccgccccggcacccgcctgctcttctcgcgggtccggaccgcgagcgcgggggccgacgggtcgccgctgcgccgggccgggatggcggccaccgcgctgctggaggccggcctggcgcgggtgctcttctacccgacgctgctctacaccctgttccgcgggaaggtgccgggtcgggcgcaccgggactggtaccaccgcatcgaccccaccgtgctgctgggcgcgctgccgttgcggagcttgacgcgccagctggtacaggacgagaacgtgcgcggggtgatcaccatgaacgaggagtacgagacgaggttcctgtgcaactcttcacaggtgcacaaatggagtccagaggaggctgtaagagccatcgccaagatccggtcatacatccacatcaggcctggccagctggatgttcttaaagagttccacaagcagattactgcacgggcaacaaaggatgggacttttgtcatttcaaagacatgatgtatggggattagaaagaactcaagacactcctgcttgatacagaacaaaaagagcttaacaggaccaacagggcttaagcccagacttgacgtaacagaaatgtgccaatagccactgtcagaccacggaatgatgtggcccacaagcagctctcagcttttggagagtatgtggctgaaatcttgcccaagtatgtccaacaagttcaggtaatacttactaatgttatttgggtctgggtcaagaaagaaccatgttcgcagggcatgtgggagtgggcagacttgtttcaaagaaactacagattcctccatcccaagcttggacttttctctcagcattaaaccaggtgactccagctgaagttagctgttccctcagtagctctttgttccctctcccctcactttcatgtgtgcaggtgtcctgcttcaatgagttagaggtctgtatccatcctgatggcgtcatcccagtgctgactttcctcagggatcacaccaatgcacagttcaaatctctggttgacttgacagcagtggacgtcccaactcggcaaaaccgttttgagattgtctacaacctgttgtctctgcgcttcaactcacggatccgtgtgaagacctacacagatgagctgacgcccattgagtctgctgtctctgtgttcaaggcagccaactggtatgaaagggagatctgggacatgtttggagtcttctttgctaaccaccctgatctaagaaggatcctgacagattatggcttcgagggacatcctttccggaaagactttcctctatctggctatgttgagttacgttatgatgatgaagtgaagcgggtggtggcagagccggtggagttggcccaagagttccgcaaatttgacctgaacagcccctgggaggctttcccagtctatcgccaacccccggagagtctcaagcttgaagccggagacaagaagcctgatgccaagtagctccagggaacgcatgtgggtcctagacagcgcctcatctatgattgagtgtccgtgtaaataaattcctacttagactt

SEQ ID NO: 1256 - DNA, 1820 bp, Homo sapiens
aagcgcgcccaaaccagcccgcgggccggctccccggcgacctcaaggatgccagaggccaggagctccggcccggacctcacgcgatggaggaagcagcagcagcctgtgcgccgcacggtcagccaggtctgcccgcccccgcggcggcccctgaccgtggcggacatccgttccggcatggagaacgagcggctgggggtcgtgcgggactccatgtttcagaaccctctcatcgtcaaggctgccggcccggcctcggtgggaacctcttattctgtttatgactcctcagcggtgcagaaagttattccttcccttgctggacaccacatcaaaggaggcccacaggctgaactcggcaagccccgggaaagaagctacagtctgcccggcattaattttaattatggactctacatccgagggcttgacggaggagtccctgaagccatcggacgctggaacgtgttcaagcagcagcccacctgcccccacgagctgacccggaattatatcgcaatgaaccgcggggcggtgaaagccggcctggtgactgcccgggagaacttgctctaccgtcagctcaacgacatccgcatcagtgaccaggatgaccggcgcatgaagaaagagccgccccctctccctccaaacatgacatttgggatccgggcacggccttccacacccttctttgatctgctgcagcaccggtacctgcagctgtgggtacaggaacaaaaggccacccagaaagccatcaaactggagaagaagcagaaggtggtccttgggaagctgtatgagacccggagcagtcagctgaggaagtacaagccgcccgtgaagctggacaccctctggcacatgcctcacttccagaaggtgggccgccaccttgatacgttccccacggaggccgatcgccagagagcattaaaagcccaccgggaagagtgtgccgtgcgccaggggaccctgcggatgggcaactacacccacccctagcccctccctcccctgccacaagaagccatcttgacatagtggaaaattcccagaaggactccctatcttgccccaaccctgacattcccccatttttatgcaggttctgcttcaaggagctcagattcaagtcttaggctaattgtttttggtaaaagtccccccttttaggttagccaacattagtctccacttagccccagtgaccctctacctggagcctcctcctctcctcctccttctcctcctagggcaggctcaccctgcctcttctcaagccctcacctgccaagacaagcccaaattacaagacaattttttagactccaggctaagggtcgattccatggctctgcccattaagtgttaagaacgacctgtgtatttgctgcagaaagcatgacagtgacgtgctttgaaagacctcattttctattccaaacatgagttttaattgctctttttgggatgcctgatgtctcatcacggcagtattatctctctgggacctctgacagcaggaagagccaatggttcattactcgagcctgcccccgcctcctcagtgctggggccccgtcaatcaagcaggccaagttggactcctcccccaggactgactttggaaggtcaacccactctggaaaaagccttccaggccagcgggtagactgctgaacacaggctgctgagcttctcagccgaattcctggacacttcctcactcggtctttccgtgtgttctttggattctctctgaaaattttatgctgatctattttaaattaaaaatgctatttgtcatcctc

SEQ ID NO: 1257 - DNA, 2138 bp, Homo sapiens
aacaggttgcttctgcagtctgagctgagcgcctttcgcacgacttggagttacggtttatctgataccccggtacccctacgcaagcaagcccacatcgacacacattcacacacgcccttcagcaccccctcccagcaccacgaccatggacgacgactatgaagcgtaccacagtctgttcttgtcgctgctcggactctgcccgtctaagactcccatcaatgaaaatgctcccgtctttgatcctgaaccggtctttgcccactgcttcaagcagttccagcagaaggacttccgcctgcctcagacccgccggcgaatcatcatggtgcctcgcaaggaggatcagacgccccttaatcctgcatcccaacctcaggctcccccaaagcccatccccagcttcaaagttctggaagctagagatatccaagagcagccagaggacaggaagacctggctgagccagaggtcgaagctgcggcaggagctagagtcctttggtgatgtaaagaggtggctggagaacaagcccagcatcacgccttcagaggccaaggtcttacacatgatccacgaggagcagagtgcccagccaaatgcctcccaggcaactaccaggaccaccaggaagaaagcccccaggctctcccggctgtcccgccagatggtgccccagctccagctgcccgagccccctgccctgtcggtcatgtactcctacctgcatagccgcaagatcaagatcctggagatatttcacaaggtgggccagggtgagaaccagagaatcaccagggaggagttcatcgcggctgtaaaggcagtcggagtccctctgaagaaccaagaggtggaggatatagtgatctacctcagctctcttgggaagcacaacaccatcaccatggatatcctggccaatacctacaagcagtggtctatggctcagcaaaggagcagcctggccactgcaagggagcattatatcttggccaagcacagagattccctgaagggtccgctcaagaagcaggaggtggattcagccccacagcttcccaaagtggacctactgacggtgcctgcagtcgacacgcagatggagacgcggcccatgaccctggaggagatggaggaagtgggcaagcggtaccgcgagtggcagcgacagcacaagctcacgatcccctccatccagtacacggagcaatgtcacctggtgcgctgtgggaatcggcactttgatgagcactgcctcccgtccaccatccacggggatatgagggagctcattgactcggcccgcaggcacaactttctggtctacctgcaatgctggaagctctgtaagtcctatggcctcccgctgacagaggacaccctcatgaaagccttgctgtacccaggagacaagatcattttccagatggacaaagtgtgccccatccggcagccgggaggctactactctgactggaaggtcttttctccgaatctggctctgctccggtcccagggccctggcaagtctaagaggactgacaagaaaacgccaaagaaaagcaagaaaatgcgctttaaggagtttgaggaatttaccaggaagctgaaggtgaagaggtccagtggtctgcagcaaacacaccccaattccttctggccgggtcatcttctggataagctgcagctctacctgcccactgtggccacagaccggagcctggcgctcttcagttgtgttcaacaccagccccatgtctacccagccacctaccaccctgaccactggtggccccttaggaacaagaactacatgacccacgcccattatgatgccgccaaggtgtactacatcaactagagctagccaggtgttgccggacccagccttcctgggccaggggccagtgcagccagcggcccagagcccagacacaagaggagtgtcaaagagtcaaactaaagaaatcctttcaaagagggatggaccgggggccagttccctctggactcaaagtgtccagtgtctcagagggtagatgtgtccaaggaatgacgtgcagtttttgactatttccctcccctgacctctgccctttctacataaagcaggttggagtttttctcatttc

SEQ ID NO: 1258 - DNA, 2539 bp, Homo sapiens
acaaaaccccacagctcctgagaattctctcgcctgcctttggcccttaggctctggtagattgcaaataacatgctttctttctgttcccgggtggcttcggacccctgtcggatcggaaatcccaaggaggcgtcggaccccgtccgatagtaaatcccaagtaaggtacctgccgtcggcagatttgagctttctgcctggacacctaatacccacagtcctccaggtgggtcctaaggttcttaggatccacgatgggtgtcctaagccagcgggggaagagtggctggctctcagtccccacctcgcgggtggtgcctcccgcctctgagatggtggtcctaagagccaggtggtgaagaggggctggaactcagtccccgcctcgtgggggctgcctcgccccgctgccatgggtttccgaagagccaggggtggaagacgggctggctctcagtccccgcctcgcgggggtgccctccccaggtgcgatgggggtcctaagagccagggggtgaagaagggctgtctctctgtcccctcgttgcagggtttgcatcccccctcttgagatggccgtcccaagagccaaggggggaaaggggctggctctcagtccccgcttcgcgggggtgcctcccccactgcgatgggggtcccaagattcgggggggaagagggcctggctgtcagtacccgcctcgcggggggtgccttcccaccctgcgatgggggtcccaagtgtcagggggggaatacgggctggctctcaatcctcggctcgcgggggctgcctccccctactgcgatgggggtcctaagagccaggggggaagaggggctggttctcagtccctgcctcatgggcggtgcctcccgctctgcgatgggggtcctaagagccagcgggggaagaggtgctggctctcagttcctgcctggcggggggtgcctccccccctctgcggtgggtgtcctaagagccagggggggaagaggggctggctgtcagtccccgcctcgcggggtgtgcctcccgcccctgcgatggtgatcccaagagtctgggggggaagagggggctgtcagtccccgcctcgcgggggtgcctccctcaggtgcgatgtgggtcctaagagccaggggtgaagaggggctggctctctgtcctctcgtcgcgggggttgcatccccccctgcgatggggttcccaagaaccaaggggggatgaggggctggctctcagtccccgcctcgtgggggtgcctccccccctgcgatgggggtcccaagagccagggggggaagaggggctggctctcagtccccgcctcgcggagggtgcctcccccccaacgcgatgggggtcccaagagccagtgggggaagaggggctggctctcagccaccacaaaacggggggcctttatgttcaggttttgcccaagagtcagcttattttcttcttgtactagcagggcagttgctgccaaggcccccaaacagggtgccatcctttagaaaccctgtctagttgtttagagatgtaggccaccggcctcttccagggccccacagtttgggttaaaagtccacccgccatcttgtctctctctgacgtgtacaatctaaaaggctttgtcagattgggtagccccagggctgaagctgccagaagtttttcctttaactcatgaaagacttgctgttgttgggatccccattccaaaggttcccggtccccgccccctttgtgacctcatacaaaggcttggcttatactgcaaagtttgggatccacagtctacaaaaccccacagctcctgagaattctctcgcctgctttcgacccttaggctctggtagattgcaaataacctgctttctttctgttcccgggcggcgtgggacccctgtcggatagtcaatcccaattaaggtacccgccgtcggcagatttgagctttcttcttggacacctaatacccactgtcctccaggctctggtagattgcaaatgacctgcttactttctgttcccgggctgcgttctgacacctgttggacagtaaatcccaagtaaggtacctgccttcggcagatttgagctttcttcttggacacctatacccacagtcctccaggagggtcctaaggataacttcaggaagtgggtattaattctcactgtataagtgaagacattaagcaccagagtttaagtagcttgatccactgaaagagattcaactgtgtggaacctatgccgcggagaattgctttctgccattgttattgtccagcagttgccgaatagctctgacctgagcaaagcagtgaaacgcggtgctgttgagtgggttgccactgcacctttttcaactactctagtcttgtggagaaaacaccccttctaaattttttcttcattgaatactctccctcagctccagggtaccatatagagttttcttgtattttagagttactgttttatcaaagtgtaccagtcttttgtattacatttctcctgtct

SEQ ID NO: 1259 - DNA, 2172 bp, Homo sapiens
aagccaaccgcgctcagcggacgactggccggatcccaacgcgctgccccttgcccagcctgcgagcgcgtggtacgaaggcgcgtctgcatccatgccccagcccggggagctggaggcgctcgcagtcagaggcgagtgatgctaggctgagcgcgtggcggcccgtgtcgtgccccgctgagccaagtgcggaagggcagcggcgcgctccagctctgctcgccgcgcgcagggcgggggggcctggccgcccgctgggagctgcggacgagcaggcgcgctgaggacccgagggaggacacggttaaagcattgctatcaactgtgaacccagagagccctccttagccaacacgctaactccgaagcctcccttacgcccccgaaccaccgaaggcggcgacacctgattcagcgcacaaacacaggtcccttctgtcccggatacaattacgcggcagacacacactcagactcgcgcggggcagccaagagacgagctatgaagtcttacactccatatttcattctcctgtggagtgctgttgggatagcgaaggctgccaaaatcatcatcgtgccgccaattatgtttgaaagccatatgtacattttcaagacgctagcctcagccttgcacgagagaggccaccatacagtgttcctcctctctgaaggcagagacatcgccccatctaatcattacagcctccagcgctacccagggatctttaacagtaccacctcagatgctttcctacagtccaagatgcggaatattttctctgggagattgacagcaatcgaactgtttgacatactggatcactatactaagaactgtgacctgatggttggcaaccatgccttgatccagggtctgaagaaagaaaaatttgacctgctgctggtggaccctaatgatatgtgtggatttgtgatagctcatcttttaggggttaaatatgctgtattttcaactggcctttggtatcctgctgaagtgggtgctcctgctccattagcatacgtcccagagtttaactcactcctcacagaccgcatgaacttgctgcaaaggatgaaaaataccggtgtttacctcatttccagattaggggtcagctttctggttcttcccaaatatgaaaggataatgcagaagtacaacctgctgccggagaagtccatgtatgatttggttcatgggtccagcctgtggatgctgtgtactgacgtagcactggaattcccaagacccactctgcctaatgttgtttatgtaggaggaatcctaaccaaaccagccagcccactaccagaagatctccaaagatgggtaaatggtgctaatgaacatggctttgtcttggtgtcttttggagctggtgtcaagtatctgtcagaagacattgctaacaaactggcaggagctctggggagattgcctcaaaaagtgatttggaggttttctggacccaaaccaaagaatctaggaaacaacactaaactcatagaatggttaccacaaaatgacctgcttgggcattcaaagattaaagccttcctgagccatggtggtttgaacagtatttttgaaactatgtatcatggtgtgcctgtagtgggaattccactctttggagaccattatgatactatgaccagagtacaggcaaaaggcatggggatattgctagaatggaagacagttactgaaaaagagctctatgaagcactagtgaaggttatcaataatcccagctaccgtcagagggctcagaagctttcggaaattcacaaggatcaacctggtcaccctgtcaatcgaactatctattggatagattatattattcgtcacaatggagcccatcacctacgtgccgctgtccatcagatctccttttgtcagtattttttactggatattgcctttgtgcttttgcttggtgctgccttgttatactttctcttgtcttgggtgacaaaatttatctacagaaaaatcaaaagtctgtggtctagaaataagcatagcacagttaatggacattaccacaatggaatcctcaatggcaagtacaaaagaaatggccatattaaacatgaaaagaaagtgaaatgagccaacagcccaggtgatagaaataaattggttcactcatt

SEQ ID NO: 1260 - DNA, 1831 bp, Homo sapiens
attcggattgagccgttactaggtgccagttgtatacatgaagcaggaattactattctaccgccgtttctttccttttttcttttttttttttttaattcccaaagagttcttccaatcgtcagatatttgtacatgtgctgccctggcgggcactataccctcattttaagacgaggaaacagattcagacgcgagaagagaccagccaaggtcactggggctcaaaccgaagtccagctggctcctccgctgccccgaggacgggcccggaggtctccctggagcgtgcccatttccctcagcattgaccgtctggagtttgaccttctgtatcctgccatcaagggtgacaccattcagctctacctgggggccaagttgttggactcacagggaaaggtgaccaagtggttcaataactctgcagcttccctgacaatgcccaccctggacaacatcccgttcagcctcatcgtgagtcaggacgtggtgaaagctgcagtggctgctgtgctctctccagaagaattcatggtcctgttggactctgtgcttcctgagagtgcccatcggctgaagtcaagcatcgggctgatcaatgaaaagctgcagtaacacaggagaccaaaggctgccaggctgcagataagctgggatctacccagatcgtgaagatcctaactcaggacactcccgagttttttatagaccaaggccatgccaaggtggcccaactgatcgtgctggaagtgtttccctccagtgaagccctccgccctttgttcaccctgggcatcgaagccagctcggaagctcagttttacaccaaaggtgaccaacttatactcaacttgaataacatcagctctgatcggatccagctgatgaactctgggattggctggttccaacctgatgttctgaaaaacatcatcactgagatcatccactccatcctgctgccgaaccagaatgactggaaaaatctcaaagtatagaaacctctgctggggataatgggagcccctgatggttcttgagcaagagcgtaagagaatgcaaattaagatctggggtcccagtgtcattggtgaaggccttgggattcgaggcagctgagtcctcactgaccaaggcaagccatgcttctgagtgcttgaggccaccgaaatgaacaaatggaaaacactcccatctttttcaagcctaccttttagtagaagaggcagatacacaagccctaaagatgtaacatcaggctgagtggaggaaggctgagaagaaaaataaagcaggctcaggaggagagagtgatgtcagggaagggggtgctgtttcagatggggtggccagggagggcctctctgaggaggtaacatttgagccaatgcctgaggaggtgaggggtgagccctgtgggtagctgggagaagtgtcccgtcagagggacagcgtattaggccgttctcacactgctataaagaaatacctgaggctgggctcagtggcttgtgcctataatgccagcactttgggaggccaaggtgggcagatcacctgaggtcaagagttcgagaccagcctggccgacatggcaaaacccagtctctactaaaaatacaaaaattagctgggcgtgatggcgggtacctgtaatcccagctactcggaaggctgaggcagaagaattgcttgaacccaggaggcggaggttgcagtgacctgagatcacgccattgcactccagcctgggcaacaagagtgaaatccatccccccccccaaaaaaaaaggaaagaaaataaatacctgagactgggtaattcatg

SEQ ID NO: 1261 - DNA, 2266 bp, Homo sapiens
gtctctgaggcccgatttctctgacgagggcccaaaatgaagaggtccctgcgcggggggctccgggttcaaccgaccgcctcgtggagttggggcggcctgcgtcctgcagccttggggtctgtccgctcggttaccatgcactcgagacctgtcgagcgtcccctcttcttccgtaggagagaagtgtgtttagaatcttaagggtaagcttgatgattaccaggaacgaatgaacaaaggggaaaggcttaatcaagatcagctggatgccgtttctaagtaccaggaagtcacaaataatttggagtttgcaaaagaattacagaggagtttcatggcactaagtcaagatattcagaaaacaataaagaagacagcacgtcgggagcagcttatgagagaagaagctgaacagaaacgtttaaaaactgtacttgagctacagtatgttttggacaaattgggagatgatgaagtgcggactgacctgaaacaaggtttgaatggagtgccaatattgtccgaagaggagttgtcattgtttgatgaattctataagctagtagaccctgaacgggacatgagcttgaggttgaatgaacagtatgaacatgcctccattcacctgtgggacctgctggaagggaaggaaaaacctgtatgtggaaccacctataaagttctaaaggaaattgttgagcgtgtttttcagtcaaactactttgacagcacccacaaccaccagaatgggctgtgtgaggaagaagaggcagcctcagcacctgcagttgaagaccaggtacctgaagctgaacctgagccagcagaagagtacactgagcaaagtgaagttgaatcaacagagtatgtaaatagacagttcatggcagaaacacagttcaccagtggtgaaaaggagcaggtagatgagtggacagttgaaacggttgaggtggtaaattcactccagcagcaacctcaggctgcatccccttcagtaccagagccccactctttgactccagtggctcaggcagatccccttgtgagaagacagcgagtacaagaccttatggcacaaatgcagggtccctataatttcatacaggattcaatgctggattttgaaaatcagacacttgatcctgccattgtatctgcacagcctatgaatccaacacaaaacatggacatgccccagctggtttgccctccagttcattctgaatctagacttgctcagcctaatcaagttcctgtacaaccagaagcgacacaggttcctttggtatcatccacaagtgaggggtacacagcatctcaacccttgtaccagccttctcatgctacagagcaacgaccacagaaggaaccaattgatcagattcaggcaacaatctctttaaatacagaccagactacagcatcatcatcccttcctgctgcgtctcagcctcaagtatttcaggctgggacaagcaaacctttacatagcagtggaatcaatgtaaatgcagctccattccaatccatgcaaacggtgttcaatatgaatgccccagttcctcctgttaatgaaccagaaactttaaaacagcaaaatcagtaccaggccagttataaccagagcttttctagtcagcctcaccaagtagaacaaacagagcttcagcaagaacagcttcaaacagtggttggcacttaccatggttccccagaccagtcccatcaagtgactggtaaccaccagcagcctcctcagcagaacactggatttccacgtagcaatcagccctattacaatagtcgtggtgtgtctcgtggaggctcccgtggtgctagaggcttgatgaatggacaccggggccctgccaatggattcagaggaggatatgatggttaccgcccttcattctctaacactccaaacagtggttatacacagtctcagttcagtgctccccgggattactctggctatcaacgggatggatatcagcagaatttcaagcgaggctctgggcagagtggaccacggggagccccacgaggtcgtggagggcccccaagacccaacagagggatgccgcaaatgaacactcagcaagtgaattaatctgattcacaggattatgtttaatcgccaaaaacacactggccagtgtaccataatatgttaccagaagagttattatctatttgttctccctttcaggaaacttattgtaaagggactgttttcatcccataaagacaggactac

SEQ ID NO: 1262 - DNA, 1871 bp, Homo sapiens
ctcctcttagaagctattctcttctccctgaagggaggcaacaccgtccgttcgcctgactggcagtgttttaaggacccatcgcgcttgacgggaaagtcagattaaaaatcaagaaatataaaccagatgtagcagtttcttgacgtggagaaccaagcccataatacgatgggaacttctccttgtgaggctgagcttcaggaattaatggaacaaattgacatcatggtaagcaacaagaaaatggattgggaaagaaagatgcgggctttggagacacgattagatcttcgggatcaagaattggcaaatgcacaaacttgtttggatcagaaaggtcaagaggtagggttacttcgacagaaattggacagtctggaaaaatgtaatttagcaatgactcagaattatgaaggacaactacaaagcctaaaggctcaattttccaaactaacaaataactttgaaaaactgagattacatcagatgaaacaaaacaaagttccacgaaaagaattaccacaccttaaagaagaaataccctttgaactgagcaatttgaaccagaaattagaggaatttagagcaaagtcaagagaatgggacaagcaagagatattatatcagactcatctgatttctttagatgctcaacaaaaattattatctgagaagtgtaatcagtttcagaaacaggcacaaagttaccaaactcaactaaatggtaaaaaacagtgcttagaagacagcagctctgaaattcctcgtttgatatgtgacccagatcccaattgtgaaatcaatgaaagaaatgagttcattattgaaaaactgaaatcagctgtaaatgagatagcactaagcaggaataaattacaagatgaaaatcagaagctcttgcaagaactgaaaatgtaccaaagacagtgccaggccatggaagcaggtctctcagaggtaaaaagtgagttacagtcacgtgatgatctcttgagaattatagaaatggaacgattgcaattacacagagaattattaaaaataggagagtgccaaaatgctcaaggaaataaaacaagacttgaatcatcttatttgccttctattaaagaaccagaaaggaaaataaaagagctgttttcagtgatgcaagatcaaccaaatcatgaaaaagaattgaacaagataagaagccaactccaacaggtggaagagtaccataactctgagcaggaaagaatgaggaatgaaatctctgacctaacagaagagcttcatcagaaggagatcactatagcaactgtcacaaagaaagctgcccttctggaaaaacagttaaaaatggaattagaaataaaagaaaaaatgttagcaaaacaaaaggtctcagatatgaaatataaagctgtcagaactgaaaacacacatctaaaaggaatgatgggagatttagaccccggacgatacatgagtatggacttcactaacagggaacagtcaaggcatacatctattaataaactgcaatatgagaatgaaaggctccgaaatgatcttgcaaaacttcatgtcaatggaaaatcaacctggactaatcaaaacacctatgaagaaacaggaagatatgcctatcaaagccaaataaaagtggaaaaaaatgaagagagacttagtcatgactgtgagccaaacagaagtacaatgcctcccttgccaccttcgacatttcaagccaaagaaatgacaagtcctttggttagtgatgatgatgtattcccactggtgagttgctggttgtgggctttttttttctttaatgggttattgctttactcttacactgatgtcaataaactgacgtacatagt

SEQ ID NO: 1263 - DNA, 2333 bp, Homo sapiens
ttaaatgtcttgagattaaaaaagatgttttgtagttatactcaagcttggaaccatagtgaccaactgttacggacagactggattgtatccccttccaattaagttacggtgctgctacagaaagaaaagaggttgagactgagctacagttaatctgtggcaaggtgctggatgcactggacaaacacctcattccagtagctgacactgaagttgaactaattgacacctaccaccgcttgctggaggttgaggacgcccagtgagtgtgcacccgggctggagaaggcaggaggtatggcctggaaaagagacacagaaaggtaacccaagagggctttctggaggaggtggcagctgagcctagaggtgaatttcgttggggaagagggagtgaggcctaggcagcttaggccatgacccccatggtgggagatggctgcataagggtctctctcctggcatccgtctttacccatgcctgggcatcctacccccatcaccctttaacccccgagggccttggctgggtcccagaaattcccaggagggtcagagaagaccatggggactctcatcacccccaccctggctcacttccaaaaaggctgcaagaaggatgttggagggtctcctggaggctgccaagggcattttcttatggagcccacatctctccccgatcgtggtggctgtgatcggtaattccagcttcatactggctacaggtggatgatgcccacctggctgccgatgacttctgcaccaagtgaggctgggtctctggagctgccccaggggctggacaagctgaccctgcctggagccaacctggagatgcagcctgagaacctcaaggaggacctggtctacctgaagaagaaccatgaggaggaaatgaacgccctttgaggtcaggtggacaaggatgtcagtgtgaagatggacactgtgcctggagtgaacctgagctgcatcctgaatgagatgcgtgaccaggacaagaaactggtggagaagagctgcaaggatgcccagggctggttcttcagcttggtgggtggccgtgtgtaagcaggtgtgcacacgtgtgggcacatacgccgtgtgctggtgcagttggaacaccggcagattcacaggctgtcccagttggaaggacttttggaaaccagtcggaccagcccttcatgtcttcgatgtaaaatgtgaggctcagagaggactcaagctcacacagcccttcactgtggcctgcaaaatagatccagttctctgcaagtctggtcttgggtttccaccacagctgtttacaggatgtgtgtatttgagtacatacacatacccttggcaagcacaggctgagtgtgtccggtgtcctagggacagcaacaggtgcaaaagaataacacccagtgcctgtctttgaggtgctgtagttcggtaggagtaagaaatgcaaacgaccgcagagcaggctgaattcctccaaggtccaacgtgggtgcagagagtctttgtgtgcagagagaggggctgaactgcgaggtggccaccaacacagaggccctgcagagcggcaggatggagatatggagctctacatctctgtgcagaacctgagccgtcccagctcagcaagaaagcattgctggagggcagcctggtggagacggaggtgtgttacaggacccagctggcccagctgcaggggctcatcagaagcatggaacagcagctgtgcgagctctgctgtgatgcagagcaccaggaccacgagcaccaggtccttctggacgtgaagacgcagctggagcaggagatcgccacctacagccgcttgctagaggttgaggacgcccagtgagtgtgcacccaggggaacctcctctgccagggcctgcttctccccagcagtgcttacaggggcctgggctggctggcatccctgggtcgatgggtgctcctctccctgcaggctggccactcagtactccttgtccctggcctcgcagcccacccgggaagccacggtgaccagccaccaggtgtgccatcgtggaggaagtccaggttggagaggtggtcttctgtaagcaggtccatctctccacccactgaggcccctttctgcctgtgacagccccacctcgagggtcacggcacagccatcagctccagctcctagcatgctactgccacgccccgagtgtccgtctgggcactggtccatgacctgttgtctttctgtatctactttctgcagcccctcactgaggaggcctcctgggtttgtccagtgcctgctattaaagctttgctccaagttc

SEQ ID NO: 1264 - DNA, 2018 bp, Homo sapiens
ggtgtcccgtctacgctctcaagggtggccgcgcctgaacctttactcgtgaagagtgacacacaaaccaaggccaaactaaaaaacaaaatacggaaaagtgaccccgcatgtttgggaaccatttaataagaggcctcaggtgcgggagccaactttttgaggctgcggagtccgagccattttaaccgctctgcatgcatccattctttcgttaatttaatatttactgcctcctccactaggtcttggctgaactaggttatggggaatgcgatgagcaaaactggcagccgtaccctcccgcaaactgaaaatcgtgtgagaaagcagatattaggaaattatcccttattaaataggccatgggtttattcagctaagtgctttgcagggaaggaatatgagaaaagacctgagtgggatctcgttgaagaggtagctttggggctgggatctgaagggcgtgggttggggacagagctctgcaggctgggggaagggtctggtggaggatgtgcagtatgggttgtatgcggaagactgacgagtatggctgagacttagagggaatggggaagagaggtggaaacaggctagagagggtaagcgagagtctggccatgcagggcctttcaggtttgtgctaagggtagccggggggcatttctgttttatgtgggaaggggattgaactgattgcttttcccttctgaaaggaccccttagctttgggaagtagatgggaagggtttaggataggcaagagtagaacaagcagggaggtgaggaagctactgagcattccaggttctaggtgtggtggcttgaatggtggtacagtaaataatgggaaaatgatggataataattatagtaatactcaaagctaacatttattgattgctcaccaaaagctttatactcattagtctgtttaatcctgagaacaatgcaattaagtattactagtaccattttacagatgaagtaatggaggtttaataacttgctcaagttctcacagttacaaaacggtagatttggaattccatctcatgctgtctgacgccttaagcttaccactataaattcaatgtgtactcagtggttttaaaaaagatacaaagcaaaccaaggtcaggaatgaattctttaaacaaaccacactgattatgtgatgtcgctagaggccacattaagatagtagaatttacaagttctttgtcacttcagcattttctgataggctaaagagggaattttgtgactgtcaacagactacctatagttatttttgagttgatgcactctgataagacttagtttttctggaaaaaaaaaagtcaattgataaagcacagtccacctaacagttgctgataggatacctttaaagaaggaatctgggatctagttataaacaccttggtggggcatgagtatcttagatattgtggagtgacagaaaagcttactagaaatgtaactccagatcagcttccaaatcttatttattgttggaaaacaaaggtttataaaatcacttggacttatgaaacctgatttcacccactgaaggaaaagaatggattcaaccaaggccaacaatgaaggcttttagcactggttatgagtaaatttctctaaggagccaaaagttcataaattttcagaatttgagtttaatcagtaagaatttcttgggtttgtaagtgatagcggaagacctggagcctccacattattgttttggttagagggagtcctgtcgaatgtctaggaatccctgagaactcactatggttgataccctctttgggagtgcctggctgactgccatgagctcagaggaccagtttagcctctaggtccagggcctacagtgctggggaagggagctctgcttgggaaaatatctggagtctggccaggaaaaatgtctacaaaaccaaaaaagaaaaaaaaggacactcatagcaaaattaatgaacatttattaaatgatcacaaaattg

SEQ ID NO: 1265 - DNA, 2456 bp, Homo sapiens
gagcctggccccacgtccaggcaccaggacctccaatccaatggtgtcttcttcctcccagtcacactgttcactttgccctacagcagcaagggctaaactaggagaggccaaaagcccaggcaagtcctggttgggcaagcaattgcgagtgaaactgaggaccatcctgactgagatgggtctttcataagtcccccaagagccaggtgaggcatcatcaacatcagcctctcctgccaccaccgcttccctgattcatgcacttcaggtttcagccagcagcacgcatccttggggttaggagccagcatctcaggtcggcagccatggtttctctggagaaagacccgtcagaggctcattcagagccttaaccctgagcctctgccacctacccaccgtgttgaagatgtcattgcttggaagggactacaacagtgagctgaactccttggacaacggacctcagtcaccctcagagagcagcagtagcattacttcagagaatgtccatcctgctggagaagctggactatcgatgatgcaaactttgatccacttgttgaaatgcaacattggcacagggctcctggggcttcccctggccataaagaatgccggcttgttggtcggtcctgtcagccttctggccatcggggtcctcaccgtgcactgcatggtcatcctgttgaactgtgctcaacacctcagccagagactgcagaagacttttgtgaactatggagaggccacgatgtacggccttgaaacctgcccgaacacctggctgagggcccatgcagtgtggggaaggtacactgtcagcttcttattagtcatcacccagctgggcttctgcagtgtttattttatgtttatggcagacaatttacaacagatggtggaagaagcccacgtgacctccaacatctgccagcccagggagattctgacgctgacccccatcctggacattcgtttctacatgctgataatcctgcccttcctgatcctgttggtgtttatccagaacctcaaggtgctgtccgtcttctcgacattggccaacatcaccacccttgggagcatggctctgatctttgagtatatcatggaggggattccatatcccagcaacctacccttgatggcaaactggaagaccttcttgctgttctttggtacagccatcttcacatttgaaggcgtcggtatggttctgcctctcaaaaaccagatgaagcatccacagcagttttcttttgttctgtacttggggatgtccattgtcatcatcctctatatcttactggggacactgggctacatgaagtttgggtcagacacccaggccagcatcaccctcaacttgcccaattgctggttgtaccagtcagtcaagctgatgtactctatcggcatcttcttcacctatgccctccagttccacgtcccagctgagatcatcatcccgtttgccatctcccaagtgtcagagagctgggcactgtttgtagacctgtctgtccgctcagccttggtctgtctaacctgtgtctcagccatcctcatcccccgcctggacttggtcatctccctggtaggctccgtgagcagcagcgccctggctctcatcatcccagccctcctggagatcgtcatcttttactctgaggacatgagctgtgtcaccattgccaaggacatcatgattagcatcgtgggccttttagggtgtatatttgggacataccaagccctctatgagttgccccaacccatcagccattccatggccaactccacaggtgtccatgcataattatctgtttttattctaatagctctcccttcctcccatccccagtttgacttccatgtggatgttatataccttcatcaaatcccaacatctctatattaattagtggcgtctttatctttccaagagaaatgcagatgagaaaagttagcactgatgtctctcaggctacacctcttttggttttatattttttggatggccttttgtacctctgaaccaaaattagattcaactattcatattatcagcctcattttatggaaaagggatgccacttaccccaatagcccttgaaacagagaccaagcataaatacaaaagtaactgttttctctacactgcagtagctgcccttaaagcatcagatttagaaaagtgtatgttgggcgaagggagttttctgtttagatattctaagtagaagagtcatagacagaacaaaaacagaactcagcagtaattttgtccaaccactggctccgccactgatttcctactggccctcaggcaagttcctccccatctctcagtctatgaagtgaacagttggactaactgattattaaggactctgtcaactctgatattctgaaagtgaataaaagaaattaacttatccaccaaccac

SEQ ID NO: 1266 - DNA, 3159 bp, Homo sapiens
gctgtccaccctggcagggccatggcggaggcccgagtctcccagcctggggcatctccacgctctgtaacgctgagctccaggcacccgtgaagccccacgggtcaaggctggtgggccggggctgggaggcctgcacgcctgggttctgggtccctaaaccagtacccatccaccacagccaccatgatctggcttcgaaacaggaggtgccttgagccgctccagggcaccccgaagtgggtccctgttctgggggagctgcaaaagaccctccagaagggtgacccatcaagggggcccagtgttcgtgaatcacagaaccaaccggctggccatgggcgtggccgcctccctgccaggcctggtgttgcctgacatcttgctgatcggccagcccgccgaggacagggactgctccggcctcgtgctgaccaggatgatccccctggacctcgtccacctctgcgtccatgacctctctgcctggcgcctgaagctgcgcctggtctcgggccgccagtactacctggccctggacgcccctgacaacgaggtgggcttcctgttccactgctgggtccgcctcatcaacctgcttcaggagccggctcccacctggacccccaggaccacgcgcacggcccccctggatatgccgctggccaaagcgcctgcctccacctggcacctgcagtcagggttgctgagcgcaactttccgcataagacggtggccgctcagagacagaggaaggccaaggcgctcaagcgcagtttcaagtctcaggccgtgggcgactctgtgcccctcatctggtcgcagctggagcatgccgacgtcaggaagaaacctgcagaaaagaagtcccactcagacccccgccccgacagaactcacacccaaatccgcttgcctggtaagatcaacccaccccaccccttgccatagtgtgtggctctggttcctgccccaaagggctcagacggctcccccatccagagaagaccagcatcaccacctggaccatcttcagcatcatttccagcaccgccaaccagacacagtcctctccaaaggcctgcacatctgcatctgatggagccacaggccagggacatgtggttgagagcccttcacactgtgtctcagctgacagccctgatggcttctttctgggctcctgcagctccctggacccgtgcctgtggcatcaggacacggaagacctcatggactctgggggcagcactttgtcgtctgctgcctccggtctggctccctatcccccggctgcctgcctctccacaccctactcttccatccccaggggcagggaaaaggccgggcctatgggctcccaccaggggccggggccaccaccctgccagaaggccccatctggccctgtcacatcttgtaaggcaccgttccttgttgaccagtcccagaagctcccagctgtacctgcttcatcgtggaaacccccacctggattggctcctccccagaaggccccagctgcgtcagctcctccccggaaggccccagctgtacctgctccatcccagaaggccccagccgtacctgctccatcccagaaggccccagccatacctgctccatcccggaaggcctcagctgcgtcagcttctccccgaaaggcctcagccgtacctgccccaccccagaagaccccacccccatctcagaaggccccatctgtacctaccattccccagaaggctgtgtcccccactgctccaaagaagaaatctctactcctccctgccccatcccagaaggctctgccaacctcacctacccaataccagatggcgctgagcccgcctgcctcacgggggaagctccctggcgattttgacgtgttgccaacaggaattcctggaagagccgtgctggagagaagccagtctggagggaaaccggagccggtggtgacggtgcgcacccaggagacagacgtggtggagatgacgactcaggccaagtccccggagtcgcccttcaccgtgaccaagaaggagtccaaggacatcctgattagccaaaccgaggaggtgaccctggaggccttcaggggccaggggaagttggaggactgggcccactgggcaaagcttgaagagaggtccccggacctgcctggcgtgagatccaaggagttggagcagcggaagagatgggtcaaggccaaggaactggccgtcgagggcccctcccaggagcacagcaggcccttctctgtggaagcgctcaccctcaccaagctcatgatcacggccaactccaaagagcagcgctcgaaatccgctttggtctcacttccctcctggctcttggcgactccgcaggcgtcggccacgtcaatgatggcttcagtgccctcccgccccggccagctgtccttactggaggggaagccagtggtggtcagagagcagccagagtcgcacacctgggtgaaggagggcaagcggccatggggcgagatgaaggagccaccctgggaccccaaggggccacccaaggtgccctttcgctccaagcccacctctgccagtctgaagagggaaggaatctcccaggcgcctatccccctgaccgcctcaccgtgggaggacttacggccatcgcccctctcggagaccctcatctcaaagatggaggccacagccagggcgtcccagcagcccaagagggtgtcgcaggagcccatgaggatgccagcccagcaccccctggccactgtggggtcgtcttcagaaattcttttgcccatgctcttaggacttgaaactgtgaggaacacggccaccaaggcagaggagatacaggaggaatcgggcgtcttgaaccttctgcccagcctgcagcactcccagcactccgagtggccggatgcgggggcttaacctcagttggaaactgtccagaggagcccagcgctgccaggccccgagggttctgtgcgcaccgactgtaggaagcggaatgttgaaagccgcttggggggatttgccccctctggtagataccagaactatggatatgcctttatatattggggggcgggggggggcgggggcgagcccgtggagccgcccaacttcgcagagattaaagcttgagcctgag

SEQ ID NO: 1267 - DNA, 2958 bp, Homo sapiens
ctcggaggaagtaaatgcaaatctaagcgagcgctgtggggcgcttttcaggatgtccagcaaagaatcctgtgggaaaaaagagacatctcagaggaaagacaccaccacctcatcacccaattttggtgaaaaagacaagaaagagagaaaaaccccagcaagttctactagttcatcttctataagatcagtttcatcagaaaagagaaaactgaaatcagatcatacagatgttctgtactataatataaaaagaagacaaggactgaaaagattgagtgtagaaattgacactctcagaaggagaccaaaaatcggttcttcatcccaaagacctattaaactcaaagaagcatcatattcaaatgataatcaaattattttgcagagtccttcttcaaatggaactaaaaaagacatacataaatgtgtagactttaaacctaaagatatcaaattgacaaatgctgggagcaagcttgaccatggagttaaaagccttagtagtcctaagattgccagtgatgtgaaacctaaagccgaaggccaggcaagtgaaaataaatggtctcatttacttgttcagagagagaagatgaaagaactcaagaaaggaagaaacagtaaatttagagacaattctgaaaaatgtgtcttagagaaatggaagagaaatcaattttctcaggattataactccaacaagataattaaggaacccttgggatctagaagacagaagatcagtttcaaaatccctataaaatcccgtgacaccctccagaaacttgtagaagaaaatgtcttcaacatagattctaataattcgaagactaagcaggaagaaagagaatacctggaaagctcccaggcttcattaaatgtgactaggcagaaaactgaacatttactttcagattttacatataagcggactgttcatgagtggaaacgaaaacatcattatgaccatcaagaaagtaatgattcacattctagggaaaacctaacccagagttttgaagcaccatgttgttccgtgtcatctgaaagtatccaggatgcagatcaagagatgcagatagtagaagagcttcatgctgcacgtgtgggaaaaagtgtggatttacctggagagttaatgagtatggaaattgacttagaagatgatgtacattcctcctctgcaaataatacttcagacagaaagcttctaattgttattgacacaaatattctgatgaatcatctcaaatttgttagaattttgaagacaacagaagtaccaggttttgacaaacttgtgttaataactccctgggtcgttatgcaagagctagatcgtatgaaggaaggaaaactactaaaacgtgcccagcacaaagctatacctgcagttcatttcatcaacgacagtctcaaaaatcaagatagaaagctatggggtcagtcaatacaacttgcatcccaaaaacattatggattgagtgatgagaacaatgatgatcgagtactaaaatgctgtctccagcaccaggaattattcccttgttcttttgttattctgtgcacggatgatagaaacttaagaaacaaaggcctaataagtggtgtgaagtcactcagtaaagaagaattgagtgcagagttattacgcttatctctgaacacagatgtgtgtcatcagccttgtattcctaagcaacagttgaaagcagaaacaacacccttgaaagagagctataaggaggaatctacaaattctggactgtccattctgcttgagagcgttgtatctgatcttgaaaaatctcttggaacaggtttatcttcaatattagaaacagaaatgaaaattgcttttggaaacctttggatggagatcctgtacctgaaaccaccatggactctactacatttactacagtgctttaaaaaacattggttggctgtatttggattagttatggaaaagaacttgcttttaactattgagagcctatacaaaaatctccgtaaagctaataaggcagtggattttacaacagtcaaattcttgcttcaggattctagaagtttgttacatgctttcagtacaaggtcaaattatgatggtattcttccacagacctttgctcaagtaaacaacctccttcagacatttgcagaggtcaagacaaaacttaagccaaattcttcagaaaacacagtgactaaaaagcaggaaggtacttcattgaagaattctcataatcaagaaatcactggtttctcgagttctcatcttccccaacccagcaggcatcaagaaatctggtctatcctagagagtgtttggattacaatatatcagaacagcacggatgtatttcaaagattgggctcaaattcagctctgactacttcaaatatagcatcatttgaagaagcatttatatgtcttcaaaagttaatggcagctgtgagggatattcttgaaggaattcaaaggattttggccccaaacagtgattatcaagatgttgagaccctctataacttcctaatcaagtatgaggtaaataaaaatgtcaaatttactgcccaggaaatttatgattgtgtttctcagactgagtatagggaaaagttaaccattggatgccgccagctggttgagatggaatataccatgcagcagtgcaatgcatctgtttatatggaggccaaaaacaggggatggtgtgaagacatgctcaactataggatataagtactgatttgtaactttaaaggaattgcatttgtccttaagaataacagagtagttttcaatctggtcactcttttgggccaaacccaagagaattttaagaaatgtttcataggtataaaaaggtgatcgcctattactgacagtctcattgtagctctaaaagcctaatgtatccactgtggaataaactccatagactc

SEQ ID NO: 1268 - DNA, 1810 bp, Homo sapiens
attcaggcctccgccagcttcaaggccctggggatggtctttcacctccctctttctgatctctttttcatgctcctccttgctccaaagaaaagccggatggcaaaagagcccagaacctattggaactgacaaaatcaagtcacggcgcctacaaagatgaggggcagattctggctgccttttaatttcgtccttcacctgatatctgtgccagagaatgataaaaatcataataaaggaaataatggaagaggagacttatgttactggggacatctaacataattattttcctgattcagtggcatggttcagtcttccaggagttctgctacagagaagagagtaacccccatccatcatggccaaagcacccagtcaggctccgctctggatccagcccgacaaatgcaacccttgaatagggtttgtgcaagcaaactggatgacgaccgaagaaaccctgtcgcttctgagaagacacccaatccaagaatgaaagcatcaggttcaatacctaggaactcctgtagagggtgttgtggaatcttctttaaaagaacaaaacaaggcaaaacaaagtttaatagggtagagcagccaggtgtggtgggtcatgcctgtaatctcagcaatttgggaggccaaggcaggatctcagcaatttgggaggcgaaggcaggcagatcacttgagcctaggagttcaagaccagcttgggcaacatagcaagaccctgcctataccaaaaaaaaaagtgaacctaggagtatgaggctgcagtaagctgtggttgtaccagtgcactttgggaggccaaggtaggcggatcttctgagatcgagagtttgagaccagcctgaccaacatggagaaaccccgtctctactaaaagtacaaaattagccggcatggtggtgcatgcctgtaatcccagctactcgggaggctgaggcgggagaattgcttgaactcaggaggcagaggttgtggtgagccaagatcgcgccattgcactccagcctggacaacaagagcgaaactccatcacaaacaaacaaacaataaacaaaaaccatagagtgatttctggccaacagagcaagaaagaagtgaaccaatgaaaaccggtccaagtctgggagtcaatatggaaaagctgcctaattaatgtggaagccccagggaaatgatataccatgaaaacctaacactacaaaaactagttgtcagacacatgtgagcagtgaacagaatcctaatatgctggtttaacattcaaaactggagagtgcttgtgtatcttctaaagactgtttggggtttatttgtggagttcagctgagtgtcatcagaacaaagattagtgcaaaaaatctttcagaaatcatgcccaaacatttgcatgcaccttaaataagaaatgaaatagcaagaagagtatgtcacaataaagtataaatagcaagtgatatgtctcatcgtactgagacagttttataaatgaggcaaaggccttgtcaaaaaataatgatgattttcaaaattctgaaacgcaaaggaggaaaactacttcattcagttaacaggaagcacacaagaatctccccatcaaccaagattttttttttctataacccacgctttgtaagacaataatagcaaaaactataaactagaatttgttgaaagaacaacttctagaatttgccctttatgtgctgttttaccattgtcatgtctgtctctggtatgacttcctcatctattagtagcctcctaataaatttgaacaaatgaatgaatg

SEQ ID NO: 1269 - DNA, 1609 bp, Homo sapiens
acatctcgcggcgaggaggagaggccggaagggcgccccagccccaaggctcctgccccgcctgggcctccggctttcgtttccccgcaacgcttcgctttcgtttcccgctggcgcctggctccctccgggtttcgtttcccgccggcgcctggctcccgccaggtttcgtttccgaggcggggccgagggcggcgtcgctgaggcgcccatggccttcgcccgccggctcctgcgcgggccactgtcggggccgctgctcgggcggcgcggggtctgcgctggggccatggctccgccgcgccgcttcgtcctggagcttcccgactgcaccctggctcacttcgccctaggcgccgacgcccccggcgacgcagacgcccccgacccccgcctggcggcgctgctggggcccccggagcgcagctactcgctgtgcgtgcccgtgaccccggacgccggctgcggggcccgggtccgggcggcgcggctgcaccagcgcctgctgcaccagctgcgccgcggccccttccagcggtgccagctgctcaggctgctctgctactgcccgggcggccaggccggcggcgcacagcaaggcttcctgctgcgcgaccccctggatgaccctgacacccggcaagcgctgctcgagctgctgggcgcctgccaggaggcaccacgcccgcacttgggcgagttcgaggccgacccgcgcggccagctgtggcagcgcctctgggaggtgcaagacggcaggcggctgcaggtgggctgcgcacaggtcgtgcccgtcccggagcccccgctgcacccggtggtgccagacttgcccagttccgtggtcttcccggaccgggaagccgcccgggccgttttggaggagtgtacctcctttattcctgaagcccgggcagtgcttgacctggtcgaccagtgcccaaaacagatccagaaaggaaagttccaggttgttgccatcgaaggactggatgccacgggtaaaaccacggtgacccagtcagtggcagattcacttaaggctgtcccccagcccatcaccctgtgtaccagtggccagaggacctgctcaaacctgaccttatcctgctgctcactgtgagtcctgaggagaggttgcagaggctgcagggccggggcatggagaagaccagggaagaagcagaacttgaggccaacagtgtgtttcgtcaaaaggtagaaatgtcctaccagcggatggagaatcctggctgccatgtggttgatgccagcccctccagagaaaaggtcctgcagacggtcccagctgggaggaaccttataccatccttctctccacctgctcggcagtgaagtttgtgggactggaatcttggattcatcacactcgagtcaaggcctggaatgacccctgacatcccagaagaacatctcagatatcagtgtgaaaagtctggggatttcaaactgaaaatccaaaagataagtaaatgagtgggaactctctgttcagttcaatcccacccttccttaccagatactaaagtcatttctacctttcctcttgagatttgctgttagatattagaacttctctttgtcacat

SEQ ID NO: 1270 - DNA, 2130 bp, Homo sapiens
tcatgtgtctcagcacagtcttttacagcaaaaatgcatgtcacctcctcctaaaggctttccgtggcccacccacccagattcctcctttattgtgcagactctttcctaacccacacctcatcttaatttatttgccttcaattctgggcggcggtgttggggagggtctcaattttcccatgtatttcccagtgtttattgaatacatgaggccatactcttctagtctctctgcttctcatgctaggaactgaaccgaccagcctatactttaaggcttgttatttcactgactaaggaaaggctacttaagagggcaagctcagacatacataatctggagtggatcttccatgggaaaacacgtatataacagaaattattggcaaaactataagtatggtctacagactttctttgccctcaaccaggaagtcagaggcaccaatgtgaggttccacctgctttccagcacattcttggtttcctcacttctgctagacaacgtttgatcagaaggaacagggaacgagaaggagctgctggatgacgataagcctgggaaagggaggctgggtgagcagagacagaaaagaaacacctacctgctgtgacctcacaaacacccaggctgagttttgataagacaggttgaatcacactggggtgacagcctcatccctccaggtacaaacaagaacaggccatggttaaccaaagctcccccatgggcttcctccttctgggcttctctgaacacccagcactggaaaggactctctttgtggttgtcttcacttcctacctcttgaccctggtgggcaacacactcatcatcctgctgtctgtactgtaccccaggctccactctccaatgtactttttcctctctgacctctccttcttggacctctgctttaccacaagttgtgtcccccagatgctggtcaacctctggggcccaaagaagaccatcagcttcctgggatgctctgtccagctcttcatcttcctgtccctggggaccactgagtgcatcctcctgacagtgatggcctttgaccgatacgtggctgtctgccagcccctccactatgccaccatcatccacccccgcctgtgctggcagctggcatctgtggcctgggttatgagtctggttcaatcgatagtccagacaccatccaccctccacttgcccttctgtccccaccagcagatagatgactttttatgtgaggtcccatctctgattcgactctcctgtggagatacctcctacaatgaaatccagttggctgtgtccagtgtcatcttcgtggttgtgcctctcagcctcatccttgcctcttatggagccactgcccaggcagtgctgaggattaactctgccacagcatggagaaaggcctttgggacctgctcctcccatctcactgtggtcaccctcttctacagctcagtcattgctgtctacctccagcccaaaaatccgtatgcccaagggaggggcaagttctttggtctcttctatgcagtgggcactccttcacttaaccctctcgtatacaccctgaggaacaaggagataaagcgagcactcaggaggttactagggaaggaaagagactccagggaaagctggagagctgcttaatatactttcgaaattctggaggctggaaactccaagattaaggcagatttcatgcctattgagggcctgctttctgattatagaaggtgacttcttgctgtgcccacacatggtgaaagggactaccaactctctggagtctcttttatgagggcactaattccaattatgaagcctcttccctcgtgacctaatcactgcccaaaggccccatgttctaatgccatcatcttggtggtttaggatttcaacatatgaattttggaaggacataagcattcaaccccctgcacatgtcttctttcctacttcctcaaggttctttctgtccagttgctccttcttctattgacccttttttgccttctctttctccttcactgcctcaagttacagccagaggaaaggaggaactaaaacttagcaaatctataatcacatgcaaatacacagaatggattgttacaacc

SEQ ID NO: 1271 - DNA, 2385 bp, Homo sapiens
tttcctccaatctattggggctgaaatggaatgttttcctgcctttggaatccctaaatcactggatttcttagatcatttttgttttgttttgttttgttgagatagggtctcactatgtggcccaggctggtctcgaactcctggactcaaacgatcctcccgcctcagccttctgagtagctggggctagatcactgttttcttaataacataaactactcctttggtgtgaagcaagcattcattgtgagccagtcgattctaaaatcacagtatgtcagcatgccatctcgattttattttttgtttcatttcttaaatactcaaagatgctttgtcctccacgacacagccaaatcctggaaggagctgtctatacctactctttcatagtaccttctacttattccatgaccttcaaactggtcaccatgaaccacgatgaatccttctcatctacttcttgcccaataactggagggactacggactttggccacatcgctccaaccacttccacccctgtcccaaccagtttagaaccagttatcccttcctcaaggaagccttccctggacaacctgattaagtcattgctgatgtattatcctgaaattcaccttcattacactagccacgattaatacattttcatttgtgtgtgtatgtgtgtgtgtgtgtgtgtttatttaatttacagacctggttaatctgagtcatgtgttttatgtaatgcatcaggaagaacaaaggatctttctaggtggttcagaaaataggtcaagactcactataggaactaggagttggaaagggctggggagtacagtctggtttctaggctcagctttaagttgactccatgtgtcttgtttgtttcaggcattttattattgatgtttcttgtttgttatccctaatctttcattttcttttaaatttggtctcccctgtaagtgaataagttactactagaacatcttaaaggcagcattttacctttgccgctggttatttatggcaacgtctttattcttattaggctaagccagttttcctagccagtgtctttatcagtaaaatggagcaatacttaacctctgtgagtttttatgaatattcaatatgtcaaatgctcagtacagagtccgttatatattagaatctcagtacatggtagctattctgattatttccagtttaatatcatttttctggcttacaattaatattttactaactagtttaaactcttggtatctgcaataaatacagcaagtctgtgatggagcaataatgctataatagtttctgttccagtcctctgcctagggggatgtgtaaacaattataaaccccagttttgcttttgtgatcatttcatatggattataccacgttcttggtaaggaccaactcttcctgttcagttcgttctgtttgaactttctttggtcttttcatgatggaaagtaggtcacaccaagcagaaagtattaaacttcaactttctaggttatcgtctttctgtgcattattttccgtagaaaaggatttacctttatatgaactgtctgtggcttgtccctccctttccagatggccggtcaaaccacgtgctctgaggtctaatcaggaatcgctctgaattccctgaaaattaatcagctcgagtacaggcagagccaagagttacgcttcccgccccgccccgccccgattacttagccctttactagggctaagtaagggctgaggaacccagggtaggaaggatcattcttatttgagattctgctgggtgaagcctaagggcatagatgaaaagttaggatttggaagggagccagaagccaaaagcagttcccagaggccaggcaaaaacagaagctgagtgtgggactgaagccaaaaagcggaagatgatgaattccacagcgaaccgtgggagctgtcctggaacaatgcctgagatgcgcgctggctttctgggagcagttagggcccctttaggtatgtgaacccgcctcactaaatggccatgagcagaactgaactgcctacctgtttctccacctgtgcaagacacagtttctcagagcacagacgaagctccttgaaatatacgtgcattgctggcccttgcctaagcctacagttaggacttggcctggtaaattgaagttcatgaaataatgagaccttttataaaagacagtggcataaatacaaaatataccacgaacatttcccttaagaaatgtttcacagagtagcatattggtgtaattacacataagactgattcagcattataattacaaaactgttttcataggattcagtgttaattcaggctctcaatatgttgccaaagtctgc

SEQ ID NO: 1272 - DNA, 2509 bp, Homo sapiens
aagatcatggccactaactacagtgccaaccagtatgaaaaggctttctcatccaagtatctgcagaactggtctcccactaagccaacaaaagagagcatctcttctcatgaaggctacactcaaattattgccaacgatcgtggtcatctactgccttctgtgccccgttccaaggcaaatccttggggttccttcatgggcacctggcaaatgcctctgaagataccccctgctcgggtgaccctgacctcccgtacaactgctggtgctgcctccctcaccaaatggatacagaaaaatcctgatttactcaaggcctccaatgggctgtgtcctgaaatcttaggcaagccccatgatccagacagtcagaagaaactcagaaagaagtctatcacaaagactgtacaacaagcacgaagtccaaccataattccaagctccccatctgcccacccactaaagcccatgtggcatgccatctctcgaacatccaggatgtcccagagtggatgtccatcaggtctgctggcagacaaaaatatctcttcaagtgccactcgagtgatagtgaagactgcaggcaaccagaaagactttatggtagctgatgacatctcggtaaggcagttcaaggagatgctattggctcacttccaatgccagatggaccaactagtgctggtcttcatgggttgccttctcaaagaccatgacacactgagccagaggggcatcatggatggccacaccatctacttggtcatcaagtccaagcagggctccagatctctagcccattccttccgggacctgccaacgaatgatccctgccaccgggacagaaacaccaaaggaaacagcagcagagtgcaccaaccaactggtatgaatcaagctccagtggaactggcccactttgtggggtctgatgcacccaaagtgcatacccaaaacttggaagtgagccacccagagtgcaaagcacagatgctggagaatcctagcatccagcggcttctgtccaacatggagttcatgtggcagttcatttcagaacatctagacacgcaacaattgatgcagcagaacccagaagtttcccgccttcttcttgataattctgagatcctattgcagactctggagctggccaggaaccttgctatgatccaagagataatgcagatccaacaaccttcacaaaaccttgagtatccactgaacccacagccatatctgggcttagagacaatgccaggtgggaataatgccctgggtcagaactatgttgatatcaatgatcaaatgctgaacagcatgcaagatccttttggaggaaaccctttcacagctctcctggcaggacaagtgctagaacaagtccagtcttcacccccacctccaccaccatcacaggaacaacaagaccagctcacacagcatcctgcaacccgagtcatctataatagctctggtggtttctcttcaaacacctcagccaatgacacccttaacaaggtcaaccacacttccaaagccaacactgctatgatttccaccaagggccagagccatatctgtgccactcggcagccagctgggataccagccttacctagcatagagcttacccagcagcttcaagaagaatacaaggatgccactgtttctctaagtagctccagacagacattaaagggtgatctccagctgtcagatgagcagagcagctcccagatcacaggaggcatgatgcagttgcttatgaacaacccctacctggcagctcagattatgttgttcacaagtatgccccagctgagtgaacagtggaggcagcagctgcccacattcctgcagcagacacagatttctgatctgcttagtgcttaggcaaccctaaagcattccaagcaatattgcagattgagcaggccctccagctgctggccacagaggctcctgttcttctgccttgggttgcaccctacctatggggcctgggttggcttcctgcccccagctgcagctatcctgacacagtgccctgttcctggaatgtttcagatacagctgagcccaagggacctgagtgctgccacaagcctggaacagtcctgcagaggctacaatccccggatggggacccttcccaccctctgcaagctcctgagatttgttttagcaaacagatggattctctccaggccatgggatttgggaaccaccatgccaatctacaggcactcattgctactgaaggggacaccaatgctgctatccgcaagctcaagagatcccagagattctaaccaccatgcctacttgtttgcttgctacctgcctgctgacccacctgaccatctcatttgccttttgcacctttcctgatgcttccagccaggagaagtcctggaataagagttatcaaccaatgtgtcttgtactgaataatagatcattggtcgtggctgaaacatctgtcaataaaatggctacactc

SEQ ID NO: 1273 - DNA, 1756 bp, Homo sapiens
aaatttgtttaactgcgtagattaaatggcaatatattttctataatgaaacttgttgaaatgagagggaatcagctatttacaatcatggcataactacctagggctctgttgtcagcttggtattataatggaaaacaattggatatgtcagagacttagtctattacatttccatggctatttgcattttaacatggagaatccggcctttctgtatagagcccacaaacatcgtgaatgtgaatcatgtcattcagagggttagtgaccatgcctctgccatgaacaagagaattcattactacagccggctcaccactcctgcagacaaggcactgattgccccagaccatgtagttccagctccagaagagtgctatgtgtatagtccattgggctctgcttataaacttcaaagttacactgaaggatacggtaaaaacaccagtttagtaaccatttttatgatttggaataccatgatgggaacatctatactaagcattccttggggcataaaacaggctggatttactactggaatgtgtgtcatcatactgatgggccttttaacactttattgctgctacagagtagtgaaatcacggactatgatgttttcgttggataccactagctgggaatatccagatgtctgcagacattatttcggctcctttgggcagtggtcgagtctccttttctccttggtgtctctcattggagcaatgatagtttattgggtgcttatgtcaaattttctttttaatactggaaagtttatttttaattttattcatcacattaatgacacagacactatactgagtaccaataatagcaaccctgtgatttgtccaagtgccgggagtggaggccatcctgacaacagctctatgattttctatgccaatgacacaggagcccaacagtttgaaaagtggtgggataagtccaggacagtccccttttatcttgtagggctcctcctcccactgctcaatttcaagtctccttcatttttttcaaaatttaatatcctagagataagatttcagtttccacagctgactggagtgcttacccttgctttttttattcataattgtatcatcacactcttgaagaacaacaagaaacaagaaaacaatgtgagggacttgtgcattgcttatatgctggtgacattaacttatctctatattggagtcctggtttttgcttcatttccttcaccaccattatccaaagattgtattgagcagaattttttagacaacttccctagcagtgacaccctgtccttcattgcaaggatattcctgctgttccagatgatgactgtatacccactcttaggctacctggctcgtgtccagcttttgggccatatcttcggtgacatttatcctagcattttccatgtgctgattcttaatctaattattgtgggagctggagtgatcatggcctgtttctacccaaacataggagggatcataagatattcaggagcagcatgtggactggcctttgtattcatatacccatctctcatctatataatttccctccaccaagaagagcgtctgacatggcctaaattaatcttccacgttttcatcatcattttgggcgtggctaacctgattgttcagttttttatgtgaaatacctcaactgtttttttcaagagctctcatgatattttgagccttgacaacagttctatataaattcacttgtaaatgct

SEQ ID NO: 1274 - DNA, 2548 bp, Homo sapiens
tcgcgcccccgtcccggcctcgcgccccggccgccctttgttgacgccggccaggccggtgcggtcggatgcgccgcggcagccccgggccccggctcggaggctcccggcggagaggaggcggcccgcccgggcccgggaccccgcgcgagtcggcgcccggccgaggggctgcgtaggccccgcccggccaggcccagccgggccctggacagagacagggcagggcattgttcatgcactgaccgacctcagcagccccggcatgacctcagggaacggaaactctgcctccagcatcgccggcactgccccccagaatggtgggacgctcgtccctgctggtggggaatctcaagaagaagtatgcacaggggttcctgcctgagaaacttccacagcaggatcacaccaccaccactgactcggagatggaggagccctatctgcaagaatccaaagaggagggtgctcccctcaaactcaagtgtgagctctgtggccgggtggactttgcctataagttcaagcgttccaagcgcttctgttccatggcttgtgcaaagaggtacaacgtgggatgcaccaaacgggtgggacttttccactcagaccggagcaagctgcagaaggcaggagctgcgacccacaaccgccgtcgggccagcaaagccagtctgccaccacttaccaaggataccaagaagcagccaacaggcactgtgcccctttcggttactgctgctttgcagctaacacacagccaggaagactccagccgttgctcagataactcaaactatgaggaacccttgtcacccatctcagccagctcatctacttcccgccggcgacaaggccagcgggacctggagctccccgacatgcatatgcgggagctggtgggcatgggacaccacttcctgccaagtgagcccaccaagtggaatgtagaagacgtctacgaattcatccgctctctgccaggcctccccagcagcttccctaaaggccatgagacttctatatacagtctctcaaagcaccttagacactcacgctttccacagagtccttctggctcctgcctgtggccagttctgaggccacgcccacatctatagagctgtttgatgtcagcactccttttccaggctgccaggagatagcagaggaattccgtgcccaggaaatcgacgggcaagccctgctgctgctcaaggaggaccacctgatgagcgccatgaacatcaagctggggcccgccctgaagatctacgcccgcatcagcatgctcaaggactcctagggctggtggcagccaggattctggcccagggcgcctcctcccgactgagcagagccagacagacattcctgaggggcccagaaatggggccggttggagggcaggggctctccctaggggcatagctggtgaggaggtctgggcacctcctccatggctctcaggggcctttcatttctgtgggaggggcagagaggtaggtggcacagaagatggggctttatgcttgtaaatattgatagcactggcttcctccaaagtcccaatactctagccccgctctcttcccctctttctgtcccccattttccagggggtatatggtcagggctccccaacctgagttgggttacttcaagggcagccagcaggcctggatggaggcctagaaagcccttgccttccttcctcccacttctttctccaggcctggttaactcttccgttgtcagcttctcccccttcagcctgtttctgcagcagccagggttctcccccctacaccctctgcaggtggagagagagaagctgggcccagccgggccgtgcctgctggcacagacgccttaacgctgtgtgtatgactgtgtgactgtgtgggagcctggactgacagataggccaagggctactctctggcatctccaggtgttttgtagcaaacagccacttagtgctttgtcctggactccactcagcctcaggatggggaatagccaagaatggcagcctcagcgcagaggcaaggtcagaaagagacggcgcttcagagtttcctttccagacacccctccccgcactgtgaagttcccctgaccgccctcctggttcacaaagagcattaagaaagctgcggtggtctgagcaacatagcccagagggctgagcctcctggcctgcctgcccgcccaccctgggagtcccagtggtgaggctcagagaacttctaaggggaaagaacagctggagtttctgttgatgtgaagaaggcagctcttggcctcccactcccacacttctttgcctataaatcttcctagcagcaatttgagctacctgaggaggaggcagggcagaaagggcgagggcctgcctctgacctgccgtgtcctttgcaggaaggaggtaggcacctttctgagcttattctattccccacccacacccccaggcagggttggaaatgaaggacttttttaacctttgttttgttttttaaaaataaatctgtaaaatctg

SEQ ID NO: 1275 - DNA, 1878 bp, Homo sapiens
ttaacctcactcatttctccatatagtaatcctcacttttctactccctgtcatctcagaaaaggaattctctctcctcttttccacagttagcttctcaaatttgtgcctttaattctacccctcccaaatattccaagacttgctccactaattatttcctctcttggaatcttaatctcatcctcttcccttgatccctcccctcagcctttaaaactcctagaccttaaaacactctctgtgatctgacagcccttcaaaccaatatactccccatctctctcccctggttcaatggcaagatctttggccaactgctttctactcggaccttgctattattttctactaggcacccacaaaccgttgcttgttaaactgatctccttcaagacttaagaaaagcgccatgcggctccctcccagggctctcctgccctctcctcaccgatgccaagagtggtcctgctggagaactgccgcgcctgcagttcgtgcaccttttcccgaagctgcaccaggaaattatggacgaactggaaggggccgagaagaagggtcttggcccccaactgtagctccaagcctttttgtgctttcagatttcggatcctccgcgtggagcaccttggggcgccccttggcaggttcccgccgcatagggccgacttttccacctctggctccagggcgggaagattgtagcggctttgagcttactacttgttttcttataatccctggcggagctgggtcaatttcaggcacagcccagctcagtcaggcgaggtccagaaaggcctgacttgcctggcagcctcaacggacttgtccccgcagcccttgcggacctcctggtcgtcatggcgactgtgaaatgtggggtggggagcatgcgttcgaagccatttgcgcgggcagtccctgcgtgtccccccacgtgctccccagcactcgcaggacccccgcctccgagattccctgagcgtgcagcttccagtgagggcagccccacgcacagccccccacaccctccccaacgccttcagcccccggtgcgcgtagtccccaagcccacacgtgcactctccaccttgcggcagctccacgtacagccccccacacgctcccagccccactggcgcagaacccatcaccgctcgcccttcacgcgcttcactgggagtgcagcccccaccccgagcgcgcagctccacgcagcctctccacactctccccagcgcctgcagcacccccagtgcgcacagctctgccagtcgcttccccgcgtgccgcccctgcaccacttcgggccataaccttgctggcgactaagtctgaagaacttcccgtgatttaattcttttcttcgagtttagtcttagctttgacattttaaccaaaaggttacacgttaatttatggtatgaggtcaccacttctcctattgtccttctcagtttctccccaacctctcctattccctattttataagacaggagaaaagggagaaagcaaaaagttagaaagaaacagaagtaagataaatagctggaggaccttggcaccaccacctggccctggtggctaaaataataataatattattaacccctgaccaaaactattggtgttatgtgtaaattccagacactgtatgagaaagtactgtaaaactttttgttctgttagctgatgtatgtagcccccagtcacgtttttcacgcttacttgatctattatgactttttcacgtagaccccttagagttgtaagcccttaaaaggcctaggaatttctttttcggggagctccgctcttaagacacgagtctgccgacgctcccggccgaataaaaaacctcttccttcttt

SEQ ID NO: 1276 - DNA, 1758 bp, Homo sapiens
aaaaggaggactgtgtagacaaagtctttgaatgaaaatggcctgttgtatttcttttttatgatcatggttttgtcaaggtttttcctaccttgctataaacaaagtgagtagattgaggcaggatagtcacaccaaggtgagtccagaactgtccagaactgcccagaacgtggtttcctgcagggcaggccccgcaagggccgggccttggccacctccctcctttcaccggggatcacagactcagagggttcagcacgtcccgtctctgctgcctctgggacaggaggggggatcaggcagagcacagacggaattaatgttttctgagaatttctccagttctttttaacacgatttctttcagccctcagagcctcgtgaccatggctggccatggtgagggtctgagcaggaggcttgttggcaccaggccgagaggcaccacatgcagtcacactgctcaggtgtctggctgccccaggcttgcatttgctgtggccgaagtcagcacgtggccattagtgtcgtctgcttcctgaggggtgtgtcaggctgttgcttccacgagtttcctggtcttattggccagcggatccatcttcagctcgattattgcgtcttagctgcacattgtggaagtaagtgagctgtgaacaggacaaccatccgtgtagcaatgctgggcattattccaagccttttgcgtagggcgctcctccaggtccacggcagcctgtgcagcatcggccgtcgcccaggtgatacaggtgaggcccgtgagaggggccaggtggcgcctccagactcactggcctgctgtgaggaaggcaggaatgggagccttgttccaaaggtcaggcccgaccgctgtgtcggggagcatgggcaacacccgggaggagcgggcagagccctggaacaggccagtcagtttcgcccatggccctcaccctggtgcctgttggcgtggccggggtttctgattcagcaggtctggcctggctgggattttgcttttctagagtgttccccgtttctcctgatgcttctggtccagggaccacactttgagaaccactggttcgcctcctcttctccttctccgtaggtgttaaacaggatccagtggagtcagatccccgtgtgacacgtgcttccctgtgacttttctctctgtatctccacgtttccggtgcacatgcctttactcagactccgacactggcgttgcttttgtctcatcccagctaggcgacgtctgcgtcagcgcctctcatctgtggcacgtgtgcccagcgggctccctatgtgacggcttttcccacctctgagtgttcatgtcactcgctgcatgttctgccacactcggcccctctgcagagcctctcacttgtttcaaaagaactttccatagtgacaagtgagggcgcagttagcctttggaaccctcgactcggctcctctgtcaccagcgttctctcccacccttctttcttggttttgaactacttactgttttaaaacaaaccccattttactactgaatagcacagtgtgtttctattaagatcaaaaatggaccattgtctcacataacagcaatgcttttcacatgtaacaaaaataacaatttcctgttattatttagtgcctagtccatggtcaaaggtctgttgacaaaatgccttttactttttttctctctttctaattggatccaaactggttccactcattaaatcaatctgctgc

SEQ ID NO: 1277 - DNA, 1761 bp, Homo sapiens
gagcaggaggagaagatgtgggagcaggaggagaagatgtgggagcaggaagagaagatgtgggagcagcagaggctgccggaacagaaggagaagctgtgggaacacgagaagatgcaagagcaggagaagatgcaggagcaggaggagaagatatgggagcaggagaagatgcgggaccaggaggagaagatgtggggccaggaggagaagatgtgggggcaggaggagaagatgtgggggcaggaggagaagatgcgggagcaggaagatgtggagacaggaggagaggctgcaggagcaggagaagcagatgtgggagcaggaggagaagatgcggaagcaggaggagaagatgcgggatcaggagcagaagatgtgggaccagaaggagaggatgtgggagcaggacgagaggctgcgggagaaggaggagagaatgcgggagcagaagatgtggcagcaggtggagaagatgcgggaggagaagaagacgcaggagcaggagaagaagacatgggaccaggagaagatgcgagaggaggagagcatgcgggagcgggagaagaagatgcaggaggaggaggagatgatgcgggagcaggaggagaagatgcaggagcaggaagaaaagatgcaggagcaggaggaggagatgtgggagcaggaggagaagatgtgggagcaggaagagaagatgtgggagcagcagaggctaccggaacagaaggagaagctgtgggaacacgagaagatgcaggagcaggagaagatatgggagcaggaggagaagatgcgggaccaggaggagaagatgcggggccaggaggagaagatgcgggggcaggaggagaagatgcgggggcaggaggagaagatgtgggggcaggaggagaagatgtgggggcaggaggagaagatgtggggccaggaggagaagatgtgggggcaggaggagaagatgtggggccaggaggagaagatgcggggggcaggaggagaagatgcgggggcaggaggagaagatgcggggccaggaggagaagatgcgggggcaggaggagaagatgcggggggcaggaggagaagatgcggggggcaggaggagaagatgcgggggacaggaggagaagatgcgggggccaggaggagaagatgcgggagcaggaggagaagatgcgggagcaggaggagaagatgcagggccaggaggagaagatgcgggagcaggaggagaagatgcggggccaggaggagaagatgcgggagcaggaggagaagatgcggggccaggaggagaagatgtggggccaggaggagaagatgtgggggcaggaggagaagatgtgggggcaggaggagatgatgcgagagaaggaggagaggatacgagatcagaaagagaagatgcaggagaggctgccagagcacgaggagcggtgctcagagccctgcctccctccctccaaagttctttgtaatatgagccacactggcagtgtggagcctgcaggaggagaggctggggagggttctccgcaggacaaccccactgcacaggagatcatgcagctgttttgtgggatgaagaacgcccagcagtgcccaggattaggcagtacctcctgcatcccattcttctaccgaggagacaagagaaagatgaagatcatcaatatctaaaagttggcactgtcaacaaggcctacagaagcataagccgccatgtcactgtgtgaatatagtctgagcacaaacttg

SEQ ID NO: 1278 - DNA, 2069 bp, Homo sapiens
agatcggagagggcacagggccagggactctggccagacataggcccaggtctgtggctggccaactgcggctgtggggcctggcatgtgtctcaacatggcactggagctctacatggacctgctgtcagcaccctgccgtgccgtctacatcttctcgaagaagcatgacatccagttcaactttcagtttgtggatctgctgaaaggtcaactcccactgctgcctggcaggcctggtcctggggggaggcaggacacacagattgcggcttttctttttttcttgttttttgatggagtctcgctctgttgcccagcatggagtacggtggtgctatctcggctcactgcaacttctgctgggttcaagtgcgtctcctgcctcagcctcccgagtagctgggattagaggtgcatgccaccacgcccagctaattttttgtatttttaacaggggtttcaccatgttggccaggctggtctcaaactcctgacctcaagtgatctgcccacctcagcctccagagtgctgggattacaggcgtgagccaccgcgcacagcctgataggggcgtttctgaggagcagagacagagacaagggaatcaccccagaggtccacagggaaggaaaagatgccacgcggcttgtaggctgcatccttgtccagcctaccttagtcagtgctcactaatgacagtccccacgccacagatgaacaggcttttcgaggagaagggggaaggaacagtagctgggactccctgggctcccaccaggcaccctggcttccttgtgggattctaggaccttgtgaactcagcacctgcccaccaggttggcaaagggggcagaagtgcacagtccgtctacacccatcctccccagtgttgagaaaggctcagggctccactaaccctgagtgagggtcagaggggtgggctccaactccacccccagcacagagggactccaaaagctcagcctgcaaaagcagaagcctctagaacacagaggaagagacagggaagctgtggaaatgaacgggctgcgagtggagcccccagaaatgtttccaactggaggcggctggtccaggaagagtttcagttcctgcccccacctcaggttccctgttaagatgaccctgattgtgtccgagaagcttccctttggatgtccagctgtgtgctgggcctggcttccttaaagtggagacagagtgagagcgatgggattgcggatgggacccaggccctcagggcttcaggtcaccaccacagcaaaggatacattgacatcaaccccctcaggaagctgcccagcctcaaagatgggaaatttatcttaagtgaaagttgctgatcccaaagataacaggggaggaagtttcagctgagaagatggagcatgcagtggaagaggtgaagaacagcctgcagctctttgaggagtattttctgcaggataagatgttcatcaccgggaaccaaatctcactggctgacctggtggccgtggtggagatgatgcagcccatggcagccaactataatgtcttcctcaacagctccaagctagctgagtggcgtatgcgggtggagctgaatattggctgtggcctctttagggaggcccatgatcgactaatgcagttggccgactgggacttttcaacattggatccaatggtcacgaggaaaatctgccgggcacggtggctcacgcctgtaatcccagcactttgagaggccgaggctggcaggtcacttgaggccaggagttcaagaccagcccggccaacatggtgaaaccctgtctctactaaaaatacaattagctgagcatggtggcacatgcctgaaatcccagctacccgggtggctgaggcacgagaatcgcttgaacccaggaggcagaggttgcagtgagcagagattgcaccactgcacttcagcctgagtgacagagaggggcaaagtcaaaaaacaaacaaacgatcatcccacacactctcacttttatcttgtttctataaattaataaatacagcctttgtgagttgg

SEQ ID NO: 1279 - DNA, 2456 bp, Homo sapiens
ttgcacttgctcgagggaacacccagctggctgagcggatacctacctcaccctgtctgatgaccctcatctctgctgaaggagagtcaaagcaaaaagccccaaaagaagacaagagacctccctgggccccacctcctcagcacaactttctgaaaaactggcagcgtaacacagccctgcggaagaagcagcaggaagccctcagcgaacacctaaagaagccagtgagtgagctgctcatgcacaccggggagacctacagacggatccaggaggagcgggagctcattgactgcacacttccaacccggcgtaataggaaaagctgggagaacagtgggttctggagtcgactggaatacttgggagatgagatgacaggtctggtcatgaccaagacaaaaactcagcgtggcctcatggagcccatcactcacatcaggaagccccactccatccgggtggagacaggattaccagcccagagggacgcttcataccgctacacctgggatcggagtctgtttctgatctaccgacgcaaggagctgcagagaatcatggaagagctggatttcagccagcaggatattgatggcctggaggtggtgggcaaagggtggcccttctcggctgttactgtggaagactacacagagtttgaaagaagtcagggaagctcctctgaagacacaacatacttaggcacattggccagttcctctgatgtctccatgcctattctcggcccttctctgctgttctgtgggaagccagcttgctggatcagaggcagtaatccacaggacaagaggcaggttgggattgctgctcacttgacctttgaaaccctagaaggcgagaaaacctcctcagaactgactgtggtcaataatggcaccgtggccatttggtatgactggcgacggcagcaccagccggacactttccaagaccttaagaaaaacaggatgcagcgattttactttgacaaccgggaaggtgtgattctgcctggagaaattaaaacatttaccttcttcttcaagtctttgactgctggggtcttcagggaattttgggagtttcgaacccatcctactctattaggaggtgctatactgcaggtcaatctccacgcggtctccctgacccaggacgtttttgaggatgagaggaaagtactggagagcaagctgactgcccatgaggcagtcaccgtcgttcgcgaagtgctgcaggagctgctgatgggggtcttgaccccggagcgcacaccatcacctgtggatgcctatctcaccgaggaagacttgttccggcacagaaatcctccgctgcattatgagcaccaagtggtgcaaagcctgcaccaactgtggcgccagtacatgaccctgcccgccaaggctgaggaggccaggccaggggacaaggagcacgtcagccccatagccacagagaaggcctctgtgaatgctgagctgttaccacgctttaggagccccatctccgaaactcaagtgccccggcctgagaacgaggccctcagggaatccgggtcccagaaggccagagtggggaccaagagtcctcagcggaagagcatcatggaggagatcctggtggaggaaagcccagatgtggacagcaccaagagcccctgggagccggatggccttcccctgctggagtggaacctctgcttggaggacttcagaaaggcagtgatggtgctccctgatgagaaccacagagaggatgcgttgatgaggctcaacaaagcagccctggagctgtgccagaagccaaggccattgcagtccaacctcctgcaccagatgtgtttgcagctgtggcgagatgtgattgacagcctggtgggccattccatgtggctgaggtctgtgctgggcctgcctgagaaggagaccatctatttgaatgtgcctgaagagcaagatcaaaaatcacctcctatcatggaagtgaaggtacctgtggggaaagctgggaaggaggagcggaaaggagcagcccaggaaaagaagcaactggggatcaaagacaaagaagacaagaaaggagccaagctgctcgggaaagaggaccgtcccaacagcaagaagcacaaggcaaaggatgacaagaaagtcataaaatctgcaagtcaggacaggttttctttggaagaccctacccctgacatcatcctctcttctcaagaacccatagaccccctggtcatggggaaatacacccagaggctgcacagtgaggtccgtgggctgctggacaccctggtgaccgacctgatggtcctggctgatgagctcagccccataaagaatgtcgaggaggctttgcgcctctgcaggtgactctcgggcccaagcaaccttctggaaaacgggttaataaataaatcaataaagaaccttcaagtttctact

SEQ ID NO: 1280 - DNA, 1825 bp, Homo sapiens
ctctgattcaacatgttcaaaacgaagctcatgacctagaagaagcttctctgctttctcgaatctctgcctggttcagcccacccacccctccactactgcctccaccatgtccatcagggtgacccagaagtcctacagggtgtccacctctggcccctaggccttaagcagccgctcctacacaagcgggcctggtgcccatatcagctcctggagcttctctcaagtgggcggcagcagcagcttccggggtggcctgggcacccgcatggctctgggtggaggctatggtggggccagtggtatgggggtcatcacagccatcatggtcagccagaacctgctgagcccccttaagctggaggtgaaccccaacatccaggctgtgtgcgcccaggagaaggagcagatcaagaccctctacaacaagtttgcctccttcatcgagaaggtgcggtccctggagcagcagaacaagatgctggagaccaagtggagcctcctgcagcagcagaagacagctcagagcgacatggacagcatattcgagagccacatcaacaaacttcggcggtagctggacactctaggccaggagaagctgaagcttggcaacatgcagaggctggtggaggactccaagaacaagtatgaggatgagatcaataagcgtacagagatggagaatgaatttgtcctcatcaagaaggtaacgtggctgaagctaacatgaacaaggtagagctggagtctcttctggaagggctgactgacgagatcaacttcctcaggcagctatatgaagaggaaatctgggagctgcagtcccagatctcggacacatctgtggtgctgtccatggacagcagccgctccctggacatggacagcatcatccctgaggtcaaggcgcagtacaaggaaatcgccaatggcagctgggctgaggctgagggcatgcatcagatcaagtatgaggagctgcagacactgcctgggaagcataggaatgacctgcgttatgcaaagatggagatctctgagattaataggaacatcagccggctccaggctcagactgagggcctcaaaggccagagggtttccctggaggctgccaccgcagatgctgagcagtatggggagctggctgttaaggatgccaacacgaagctgtcgagctggaggccgccctgcagcgggccgagcaagacatggtgcagcagctgtgccatggagcaccaggagctgatgaacgtcaagctggccctggacatcaagatcgccacctacaggaagctgctggagggcgaggagagctagctggggtctgggatacagaacatgagtgtccatctgaagaccaccagtggctactcaggtgggctgagctcgacccacgggcacctcacaagccctctacaacaggccttagctacagcctgggctccagctttggcactggtggaggctccagctccttcagccgcgccagcttctccaggtccatggttgtgaagaaggtggaaacgcgagatggcaagctagtgtccaagtcctctgatgtcctgcccaagtgaatggccatggcagcccctaccagcctgcccctcctgcggctgccccagggcccgtggaggaagccgctgtgcagtggagcacaggaacaggagactcacctgaggctcagccctagccctcagcccacctgctgggggagtttactgcctggggcacccccattggccatgcttccagctacaaaacaattcaattgttgctttttttttttttttcaaaataaaatctcagctagctctgc

SEQ ID NO: 1281 - DNA, 2280 bp, Homo sapiens
cttttgtggggtcagtgcccacagggttgagcaccacgtgcctggctgggcagtgctcctgccagggtccccttctccactgtaggaaacacggctgctcctgcagccgcgtctgctctgctgcatctccagctcctgccaggcatggtgtgcgcggccccaagacagggagtttccatagagacagggtttcaccgtgttagccaggatggtctcgatctcctgacctcgtgatccgcccgcctcggcctcccaaagtgctgggattacaggcgtgagccaccacgcccggcccccagagccttagtctcagaatcacacccaccccacgcccagggcgtctgtcacagctttccaatccatgagcccatcaatcggactggacacagataaactgggacaggacgccgggtggcaaaggccgggagagctgggccactccctccaaaaggccccagacgcagctgcatcctggagtccttctgagaaatgtgggacctgccccagctccaccccaggtgaggggcaccagccagctccagagctgcctaccttccctgtcaggtgcacaggtcagcgccaggccaaccccagagcgagaacacctgtgctggactgagctggagcagcagggtggcctgcaccggggcagcgagggaggcgttggatggagccaccccacggctcctctgtgaaggtctgcacgtcactcagaaagttgaagcaaaccaagcagggttggagcccacagttcacagccggctgcacaggggatgcaccaagcacagtttcctatgacaagtggaaacctgtgcgccacagcaaaactccgtcaccacagcagcagatggctccgaagaagtggagcgttttcatcaggttcaactttgaaacctccaccatcaccatcaccagcaccgctgtgtcatgctgataacttgaggacaggcaggacaaggagcccaggtgcggcccggagcccactgaagtcttcactgtcggacccaagaccttttcctggacaccctttccgccggacctgtggggcccgggccgttcctaccggctgcttcacggggcaggagggcacctggaatcccccgccaggtccctgccccagcgcccggcacctgatccctgcagggcccccagggtggagcagcagccgtctgtggagggtgccgcggccctgcgcagctgccccatgtgccagaaggagttcgcccccaggtacttcaactcccgcccccacctgtgtcccgctggctcctaagctgcccccctacgtgtgggttgcgtctgagatgtggggcaggcgccactcacggaaaaaaggcatcagaggagcttccacatcatcggaacattttattcctcaggacgctacacgctcactttcctggcggagcaggtcagtgcatcgagttctgtttccgtggaaaatgtgcaccttggaaaccgcatgacagccccctcggcagggtccccgcggatccgccgcgacgcaggcacagcagcaagttcctccagcacgaagctggcctgcccgggcccaggtgtgagggactgttctgctcccagcagcgcccgctgacgcttccctctgcggtctcggcgcaagcgtctgtccctggccgccctcggagccgtgcccagcctggcatgcatatgcggtggttaaggatacagttaaagggtcaatcacgcgtgtccacgacagagacgcacgcggcctcacaccgactcctcggtggacagcaataatgggttgatatactcaaagccttcgaactctgactggtcgatcctctttatggcatccctgtgggcaaaggtggcaggggggaggggggtgaccgtgtgttcattcccttgggggaagcggagtcacgttcgcataagaatcctcccccaacgcccactggagagatgacaccaggcgggtgggactcaagggcaggctgggtcaccagctgcccaaggtgccggcctgccatggggctgcccgaggggtgctccagggacccgcacccagtgggactcactcatcgtctggggtcagctgcacgggctcgctggtgaactgtgtgtcaaagttgtccagaccgtagtcgtctgtgatctgtggctggaatggagggagcgcctgcttcttctccagcttggaaaaacaataggagaagggtcagctccgcgcgggcatcatccctaccagattgagtgttttgcacgcacttcaatcacaaaatgaaacagtgagaaagtcagcatttcaatctg

SEQ ID NO: 1282 - DNA, 2136 bp, Homo sapiens
agtgctggtgctgcaagaaagtttccagagctttcgaggaaggtttctttaactcgaattcatccgcccaataattttcttatattttcctaaagaagagaagtgcatagaggagaagggacataatttgttaggatcctttcttacgctatgggaatttggggctcagttgaaaagcctgaactgcgtctggggatgttgggcgcggcgaactactttcagtggcgcacggagacggtgtctatgtaagaagtgataacgcaacacaccttgcacaaatttgcgctctgccaaaccagagcattcaggcacgactggctttgttgggtgaggttgttgtggtgttcctgtggctggacgtgattcgcagcatcctcgtatccgctaacaggtcaaaatgcggatcttcgtgaaaacccttaccggcaagatcatcacccttgaagtggagcccagtgccactatcgaaaatgtcaaagccaaaatccaagataaagaaggcaatccctgtgaccagcagaggctcatctttgcaggcaagcagcgggaagatggccgcagtctttctgactacaacatccagaaagagtcgaccctgcatctggtcctgcgtcggagaggtggtatgcagatcttcgtgaagaccctgaccggcaagaccatcaccctggaagtggagcccagtgacaccatcgaaaatgtgaaggccaagatccaagataaagaaggcatcccccccgaccagcagaggctcatctttgcaggcaagcagctggaagatggccgcagtctttctgactacaacatccagaaagagtcgaccctgcatctggtcctgcgtctgagaggtggtatgcagatcttcgtgaagaccctgaccggcaagaccatcacacagctccagtggctcagccagtctgagtcaggtttctccagggaaagaaacagatcaaactgaaaccgtgtcagttcagtcttcggtattggggaagggtgtaaaacatcgacccccaccaatcaaacttccctcaagctcaggaaatagttcctcaggtaactattttacaccacaacagacaagcagctttctcaaatctccaactcctcctccttcttctaagccatcaagtattcctcggaaatcatctgtggatctcaatcaagttagcatgctttctccagctgccctatcacctgccagctcatcacaaagaaccacggccacccaggtcatggcaaactctgctggacttaacttcatcaatgtagtgggctctgtttgtggggcccaggctttgatgagtggttcaaaccccatgctgggctgtaacactggtgccataactcctgcaggaataaacctgagcggccttctaccctcaggaggtctgctaccaaatgcactgcccagtgcaatgcaggcagcttctcaagcaggtgttccatttggtttaaaaaatacttcaagtctcaggcccttaaatctactccagcttccaggtggttcacttatttttaacactctgcagcagcagcaacagcagctctcccagtttacaccacaacaacctcagcagcccacaacttgtagtcctcaacagccaggggagcagggttctgagcaaggttcaaccagtcaagaacaggccttatctgctcagcaagctgctgttattaaccttactggagtaggaagttttatgcagtcacaggcagctgtgttgtctcagcttggctctgccgagaacagacctgagcaaagccttcctcagcagagattccagctctcctctgcctttcaacagcagcagcaacagatacaacagttgcgattcttgcagcatcaaatggctatggcagcagcagcagcacaaacagctcagctacatcatcatcggcatacaggcagccagtcaaaaagtaaaatgaagagaggcacgccaaccactccaaaattttgagtcttgcattactttttgttccttttttaaaaacacaagagcactgaatcaaaagaattgagtttctactttttgttttttttaatgtgtcagtattttacattgctagatgtacaaactttatacagaagcacaaccttatcatttttaaataaaaacagggaaatggtttaac

SEQ ID NO: 1283 - DNA, 2055 bp, Homo sapiens
aggcgggcgcgccgcccgggccgcggcgggctgtggtcacaggtgggcggctgcggcgagggagcggccgagcggagcccgggtcccggagactcctgccgtcacgcccggggctccgcgtagcagagatcgggagacgcgtctgtgcctccggggaagccgacccatctcccctccgcctctttggctgcagttgcacctccggccagagggcgttggaggttaagcagagagagagaggcgtggacctatttacgagattatgaagcctgtgaagaaaaagaaaaccgaagaacctgaattggagcccctgtgctgctgcgagtacatagatcggaatggggaaaagaaccacgtggctacttgtttgtgtgattgtcaagatctggatgaagggtgtgatcgatggattacatgtaaatctttacagccagagacttgtgaaagaatcatggatacaatttctgatcgcctccgaattccttggcttaggggagccaaaaaagtgaacatcagcatcatccctccgcttgtcctgctgcctgtcttccttcatgtggcttcctggcatttcctcctgggggtggtggttttgacctcccttcctgtgctggcactgtggtactactacctcactcacagaaggaaagaacagaccctgtttttcctgagccttggactgttctctctgggctacatgtactatgtgttcctgcaggaagtggtccccaaagggcgtgtgggtcccgttcagctggcggttcttacctgcgggttatttctgatactcttagccttgcacagagccaagaagaatccaggctacctcagcaatccagcaagcggtgacagatctctaagcagcagccagctggagtgcctgagcagaaaagggcaggagaagaccaaagggttccctggggcagacatgtcgggcagtctcaacaatcgcacaacaaaggatgaccccaagggctcttccaagatgccagctggaagccccaccaaagcgaaggaggactggtgtgccaagtgccagctggtgcgaccagcccgggcatggcactgccggatatgtggcatctgtgtgaggagaatggatcatcattgtgtctggataaatagctgcgttggagaatcaaatcatcaagcatttatacttgcccttttgatcttcttgctcacctcggtgtatgggatcacactgaccttggacaccatttgtagagacagaagtgtcttcacagctcttttctattgtcctggagtttatgcaaattacagctcggctctgtccttcacctgcgtgtggtactctgtgatcatcacagcaggcatggcctacatcttcctgatccagctgatcaacatcagctacaatgtgactgagcgggaagtccagcaggccctccgacagaagactgggcgccggctcctctgcgggctcatcgtggacacagggttacttggatgagccaactccgcttccttcccatggataggaagggactctgtgtattattcaggtttattggcacgaagatacttgttttaagttccttgagaacccatgatggacagttgacagaatgcttaaacctgtcaaaagatgagtgatcttgtgtgggaaaagccttcccaggcgtctgtaccgaaaggagcagcaaacaaggggctaatccatgagcagtgttctgtaggctctgtgacatctttggtttataggattttggagccttttatgatctggaactatttgaggggtttcattataggccttggttctctccaggggccagatgagtttattgtggaatctttgaaaggacaaggcctctgtgaatgaatcagtcccagggaagcatttggtggtggcggcagtggaggattgcccggtgaacctataaatcagcagtctcttgggcagaggagcaagcccctcgaacatgatttcaaacaagcaggtcctcttctctcatctcacgtccttagtctctgttaatgaacatactggatgtggagtttaataaattacctactatcatctggccactt

SEQ ID NO: 1284 - DNA, 1997 bp, Homo sapiens
gtgccactgcattccagcctgggcaaccaagtgagaccctgtctctagaatgaatgaacgatgcaatcccagcacttcgggaggccgaggaaggcggatcacctgaggtcaggagttcaggaccagcctggccaacatggtgaaactccgtctcaactaaaaatacaaaaattagccaggtgtggtggcactcgcctgtaagcccagcaactcgggaggctgaggcaggagaattgcttgaacctgggaggcggagattgccgtgagctgagattgcgccactgcactacagcctgggcaacacagcaagactcagtctcaaaaatgaagaagaagaagaagaagaagaagaagaagaagaagaagaagaggaagaagaagaagaagaagaagaagaagaagaagaagaagaagaagaagaagaagaagaagaagaagaagaagaagaagaagaagaagaagaagaagaagaagaagaagaagaagaagaagaagaagaagaagaagaagaagaagaagaacaagaagaagaagaagaagaagaagaagaagaagaagaagaagaagaggaagaagaagaagaagaagaagaagaagaggaggaagaggaggaggaggaggaggaggagaagaagaagaagaagaagaagaagaagaagaagaagaagaagaagaagaagaagaagaagaagaagaagaaaggaaggaaaactgaccttgtaccatgccctctatgtgccagacatatgctatgttacacagttgatctgatagtaacacactgaggttggtctttcatggaggagaaaattgtccaatgtcacggtggcaaaagtaagacttgaacctaagtcccaccagatgatggcaagaatgtgggcaaaccactaagatgctgagcttcgggccacctgtctccatactgggaatcgcaatagcacctcactgacccacctccttgccctgtggggagggaagacaattgtgagtgcaaagctaattcacaagtgtcagtgggctgggagcacctgaggacagggagatcctccactgtatcacagtgtgcccagcacccagatccatgctggggcgtcatcagccctgtactgagtatcagccctctactggagtggggtgaagccatgcccacactgtgtcccgtggaaagcagaggagaattcttcttatggtccggatggaaggagtgggtgcaaacaaggcgtccatcacacggcagaccaccctgagcagagaacgagcacacagtgctaggagtaggaagcagataaggggtcccccaaacctcatcttttggatcaaccaaattcatggcagcctaatccaaagagccctgtggccctctcacaagagctgggagttgaactgaggcccacagcatacctcgctttaatgggacagctgagcccaagcattggtagtgggggcagggcaaaggggctgatggcggcctgatgccaacctcaaagaaaccacatggcttctgacacaggggcaaacaagcaaggtgtggtggttctcgcctgtcatctcagctactcaggaggctgaggcaggaggactgcctgagtccaggagtttgagaccagcctgggcaatatagcaggaccccatgtaaaaaagaaaaaaaaaaagcacagtatagggaggacagacaagaccctcagacctgggtatggctaatctaagagtaaaaaggggccaggcacggtggctcatgcctgtaattccaacactttaggaggccgaggcaggcggatcacaagatcaagagtttgagaccagcttggccaacatgacaaaaccacatctctaccaaaaatacaaaaattagccgggcgtggtgccaggcacctgtagtctcagctactcaggaggctgaggcaggagaatcgcttgaacccgggaggcagaggttgcagtgagctgagatcgcgccattgcactccagcctggacaacagagcgagactccatctc

SEQ ID NO: 1285 - DNA, 1897 bp, Homo sapiens
gtctgcatcaggaaggtccaagggtccaacgagctaagctgagcccggtggccggcgaggcaccaccagcagcccagactacggtcccccaggaggcgccccgggagctccgaggactcgccccgcgtcgcgcggtcctgcgccccgctcgccccaaccagcctcccctaccaccgacatctgttacttcaaagaggacttcaccgccgcgctccccacgtccgctgctaggcccaggagcgccgtccacagcgccgtcgaggcgatggtcagccggccccgcagccccagcgccttccctgctccctggtggggacagcagccaggaggacccggccctgccaagcgcctccgattggaggagcccgcgggccccgaaccccgcgcggcacccagcctggaagacccggcgggggacccggccgtggacgcgctcacctccatagtggtcctggccgcgggctgtgccctgcgtgtgcccctggacgacgtcgacctggtgctggagcccgcaccaacgtcgatcctgcgagtgtctctcggtggacacaccctcatcctgatcccagaggtcctcctgagctccgtcgacgaacgctcaggagcgcagcacgactcgtctgccgggctggaagtggacgttttcctgggcgctgtcagggaggacgtcgtcgtcgagctggaattctgcgcatctgtcccagagatcgccgcccaggaagaggcctacgaggaggacgcggaccccgagttcccggagctccggatggactccccaaccggctcagccgctgggctctacccctcctctagaagtatgttcatcccctaccgggagggccccatcccagaaccctgtgctctggcccccaaccccagttcagagagacgttctccacgccccatctttgacctggaattccgccttctggagcctgtccccagctcacctctccaacctctacctccctctccgtgcgtggggagtccaggtccccacgcgcgctcgccgctcccggaacgccctccgtgcaaggcccggagacgcctgttccaggcatagacccccacccccacgtacacacaacaatcctggccgctctgctggaggccctctaggattgcgggaatctctcacattgagtatccaacaacctggaaattgggcaccgcgtgttcggacaattgctttttcgctgcacactaccgatagtaggagatgaagacgtcagcaagaaaaggtatattctagacctcatctttaaatagaaaatctgcgcaaggataccagaaaatgtgtccagatttctgggcttctttacaaggtcatattcagatcccttcattctccctcgttttgcatcagttgtttctctcaaattccagtctttctccagcatcatactgccactcccgtttctccccaaaccaagaaatcaccagatctcttacgttgttagttaccttgcatttttttcccatgaattttggaagacttagccatggcttttcttggggtttttccaactgctctccaaggaaactgccaaatagtatgcttactatacaagactgtatgttgcttcttcctaggaaccccttatcctgctgaagttttcttctagtcttctaattctaaatgaaaatttgtgttgaattttatcagatgttttcagcatgcattgtgttatgtattttttttttaatttgttaatctggtgatttcacccaatggaaagtgtttgcattcctgctattccacattattttataccttttaaaatctaccctgagttttttctcatgtaaaccaaacttctaacttttaaaatgttagtttattactgtagttgcctcatatttttatataggagataaaagattactggtaaagctg

SEQ ID NO: 1286 - DNA, 1506 bp, Homo sapiens
caggctggctggttcctggagaccgtgtggactctactctatatcttattagatgtagggatgccagaataataactaataagtactcagagctacatttgagggataatcccaaatggggattaaatttatttgagggttcctgtagatgaatataaagttgtgagtggctctctttacagaaattttagtaaacatcttattgatgccagtggcagcccatctggagtggctgctgccatgatgccgcatgcagcgggagaggactggccggggctgccaccatggagtcagcaaaagccaggaacaggcggaagctccacccccttctgagttggcagggcaggagccttgcactccccaggtgcagctgtggcacccagctgtggctgcagacctgggcatgcctgtgcacctgggggctggaagtaggcaggagccccaccttcccgggcacacctacagctgcccaatctgtggctgtaaatctgagcatctctgcactctcaggagccctggaagccctccccttccactgcctggcctcttcctactccaagcacttgagggtgcctgctccttctgcctggcctttccccactccaagcgcccactccaatctcagagcaaagtggaggctgagcctgagtgctgtcacaacctggctaggtatgtgcactcttggggcagcactgacacaccagccccctgctgccttggactcctccagactttgggcaccgaggagcatgggatggaggccaagggcagctcagagctggcctgctggcaccactcagcacaaacagtcttggcatcatgaacagcggcaggaggcagataggctcctgggtggaaagacacaggtgcctggtgaagccccaccttcaagtggggaaaggcctgaagcctgggggcaaggctaccagttctgcagagtgggaacttatgttttttctgggcctacccatggccttacatgaaccaatcagcatacacttcctctcctttgaagtccatacaaaccccagaactcagccagattcaaaaagagatgacatgaccaccagctgcagaaaggagctacctacccccagggcctcctctctgctgagaactaaaaagagatcacaagatgatcagctgtggaaaggagctatgcatgccagggtctcctctgctgagagctgaaaagagatgacaggaccaccagctgtggagaggagctacccacaccagggtctcctctctgctgagagctgagaagatgatggaatgaccagttgtagacaggagctacccaccagggttttctctctgctgagaggtgagaagacaatggaaaaatggacctgtggagaggagctaaccactccagggtcacctctctgctgacagctgaacactcgtcaggacaccctgcctgaggaaaggagctacccactgtgggtctcctctgagctgttttataactcaataaagctcctctttgccttgctcactctc

SEQ ID NO: 1287 - DNA, 1778 bp, Homo sapiens
acgcctgtggattggctgatggagctgtgagccggctgtagttgagcgggaacccgagacctggcagtcgccatgactggctgtccggcgtcatcaagacgccgaggcttcgggctctttttcttcttgcgtctacaccgcctcctgttgttgtttctggttttgcgtgggaccctggccaacaaacttaacgtgccacaggtgttgctacccttcggccgagagccaggccgggtgcctttcctgctggaggcccagcggggctgctacacttggcattccacccatcatgatgcagttactgttgagcctttatatgaaaatggcaccttgtgttcccaaaaagctgtactcattgctgaatctacgcaaccgatacgcctcagcagtattattcttgctcgagaaatagtgactgaccatgagctacgctgtgatgttaaggttgatgtgataaacagcattgaaattgtatctcgggcccgggaactttatgtagatgattcgccactggaactgatggtgagggcattggatgctgaaggaaatacttttagtagtttggcagggatgatgtttgagtggagcattgcccaggacaacgagtcagcaagagaagaactgtctagcaaaattaggattcttaaatactccgaagcagaatatgctcccccaatatatatagctgagatggaaaaagaggagaaacaaggagatgtgattttagtgtctgggattagaactggtgctgctgttgtaaaagttcgaattcatgaaccattctataagaaagtggcagcagccttaatacgtctgcttgttttggagaatatatttcttataccatcccatgatatttatctcttagtaggaacatatattaaataccaagttgcaaaaatggttcaagggagagtgacagaggtgaaatttcccctggaacattatatactggaattgcaagaccatagagttgcacttaatgggtctcattctgagaaagtggctatactggatgacaaagcagccatggtgactgcctcacaactgggccagactaatcttgtctttgtccataaaaatgttcatatgcgatctgtgtctggactcccaaattgcaccatatatgttgtagagcctggatttttaggtttcactgtccaacctggaaaccgatggagtctagaggtgggacaggtatatgtcattacagtagacgtctttgataaaagcagcacaaaggtctatatttcagataatctcaggattacatacgactttcctaaggagtactttgaagagcaactaactaccgtgaatggatcttaccatatagtaaaagccctgaaagatggtgttgtggtaataaatgcatccctgacctccatcatttaccagaataaagatattcagcctataaaatttctaatcaaacaccaacaagaagtgaagatttattttcccatcatgcttacacccaaatttctggcatttcctcatcatcctatgggaatgttatatcgttataaagtacaggtagagggtggcagtggcaactttacctggacttcttctaatgaaacagtgatcatagtaaccacgaaaggagtggtgactgcaggtcaggtcagggggaatagtactgttttggcccgagatgtacaaaatccctttcgatatggagaaattaagatacatgtcctgaaactgaacaaaatggaactgttaccatttcatgctgatgtggagattggccagattatagaaatacccattgc

SEQ ID NO: 1288 - DNA, 1738 bp, Homo sapiens
gtacccaaccggctgcgcccgaactcgccggccccaacctgccctgcgcgcagccgacctgcccggccgcctcaccgggctccccgagggaatccccgctcgcttaatccgccagagttcaccgccccgaaactcagggctcagagtggcgtggtggaggtgggcgcgcactggatccatgggccctcccggggtaaccccgtcttccagctggctgctgagtacgggctgctgggggagaaggagctgtcccaggagaaccagctggtggagaccgggggtcacgtgggcctgccctccgtgagctacgccagctccggggccagcgtgagcctccagctggtggcggagatggcgactctgttctacggcctgatagaccagacccgggagttcctgcacgctgcagagaccccggtgcccagcgtcggggagtacctcaagaaggagattggccagcacgtggccggctggacagaggatgaggagaccaggaagctgaagctggccgtcctgaactccttcttcaacctggaatgctgtgtgagcggcacccacagcatggacctggtggccctggcaccctttggggagtataccgtgctgccggggctggactgcaccttttctaagggctatcaaggactcacaaactgcatgatggccgccctgccggaggacactgtagtttttgagaagcctgtgaagaccatccactggaacgggtccttccaggaggcagcctttcccggggagacctttccagtgtcggtagagtgtgaggatggagaccggttcccggcgcaccatgtcatcgtcaccgtgcccttaggttttcttagggaacatttggacaccttctttgaccctcccctgccggctgagaaggcagaagcaatcaggaagataggctttgggaccaacaacaaaatcttcctggagtttgaggagcccttctgggagccagactgccagctgatccagctggtgtgggaggacacgtcgcccctggaggatgctgcccctgagctacaggacgcctggttccggaagctcattggctttgtggtcctgcctgcctttgcgtctgtccacgttctctgtgggttcattgccggacttgagtctgagttcatggagactctgtcggatgaagaagtacttctgtgtctcacccaagtgctccggagagtgacaggaaacccacggctccccgcgcccaagagcgtcctgcggtctcgctggcacagcgccccgtacactagggggtcctacagctacgtggccgtgggcagtactgggggcgacctggacctgctggctcagcccctccctgcagacggcgccggcgcccagctccagatcctgtttgcgggggaagccacacatcgcacgttttactccacgacgcacggggctctgctgtcgggatggagggaggccgaccgcctcctcagtctgtgggccccgcaggtgcagcagcccaggccgaggctctagctggacccagcctactctgttccacccgtgtcgggggtaggctgggaccgtcatttcttctgacagatttcagtctggcttgaaatttggggatgttaatgagggtcctctggtttttggtaaccagggccaccttctcagttcttgtgtctgttattggagtctggccagggttgacttgagctgagacaccagatgctcacggagatgctggacacataaagcaggttacagccac

SEQ ID NO: 1289 - DNA, 3056 bp, Homo sapiens
aagaggccctgagcctgtggcacctagcattgaaatggggagcagacagcccagcccaggtgagcttggaagaagaccttcgtacctcagatgttgattacagcctttgggacattgatcagaagatctggttaagcttctgaccatggaaatgtgagggaggcaagatggctgactagacgcagtgggaaagaacatctgccaccaagggaccaggaaatccagaggactggtgcattccaaacagatcttcagagaaggcattgaaaataaatggagggagaacacagctgggaacactagactgggctcccacacatggggactcattcctggcccccaataactcctggggaaagggtgagttgagcaggcaaggagcaacctgctctcaccatggacctctggaaatctggcagcaggagaccccacatccctcatggacacttgagttggcagggagagctgcttagagaggtagtaggagcagaattccagccggtatggagctcagagggttttgtgaagcaatgtctacagcagatcatggccagaagcacctatccctcaagggttgccttgcttccctaggatactttagccttacatgaactgttggatcagaatatagcaggatgatcatgcccatggaatggggccaatctgacctaagtgcacccctgtctgctggcctcttccggggccccagcctgggtgcacctgcttgtactgcagccttggatgcccagtcagggtgcctctgagggaactgcatcatagctcctgcactggcagaccatgcctgaccattggagatctccagcagaacaggccctgctgacctgtgctagcccacccatctcccccataccacagcctcccccatgcattttgctggcatgcactcgcccacagctaacccccacattacttgattggggggaatgcacactttgcctcctcttccccgctggcgcatgtgtgcatgtgcactccagcatgccactgctgctgccatgaatggaccctaccctcctaccgtgacaccattgtcaatggggaatgcacaaaaggagaccagcagccctatttcctgtcctgagctgccattgctgctggtgcaattgcatgcacagagaacatcagccctgtgcctgccaaagccccacctccacactgacactgctgctggccacatagatgctggtagctcctgtaccccttgccatgccaccaccactaccaccactgtgaatgcccacacagaggccagcacctctgtggcaatcagtgccctgcctcagtctatgagcatgtacaccagtgtgctgtcactgctgatggcacattagaatgagggtggatcttgctgccagtgcccaaaaaagtgctttggatggcaccacctattggagtgttgtgaccagcagtctgggaacaccttggcctctccagggcagcaggatcctaaccttgagggggtcacagaacaaagccaggggcctgataccagcccctaaaagttagagtatgcatctcaggagttccgagctgaggctttgctccctaaaatcttccagaaatgaagccagttaactgaacttaccttataccataattaaactcccaaggatgtcaaagaggattaaaaaaaaatccaaaggacagcaacttcaaagattgaaggaacatcagcccacaaagatgagaaaaaaatagcacaagaactttggcaactcaaaaagctagagtgtcttcttacctctaaacaactgcactagttccctagcaatggttcttaaccaggctgaaatggctgacgtgacagaaatataattcagaatatggatagaaatgaagatcatcaaaattcagaagaaagtcaaaacccaatccaagaattctaaggaatacagtgaaatgatacaggagatgaaagatgaaatggtcatttaaagaaagaccaaaactaatccgatagagctgaaaaactcactttaaggattttagaatgcagctgcaaatattaacagcagactcaaacaagctaaagaaagaatctcagagcttgaagactagctctctgaaataactcagtcagacaaaaataaagaacaaacaataaagaagagagaacaaaacctctgagaaatatgggattatgtaaggagacctgagatacgactaattggcgtccctgaaagggaggaagaaaaagcaagcaaactggaaaacgtatttcaggatatcactcatgaacatttcctcaactttgcaagagaggccaacattcaaattcaggaaattcagtgaacacttgtgaaatactacacaagaagaccatccccaagatacaattatcagattctccaaggtcaaaatgcaagaaaaaatgttgaaggtggctacagagaaggggcgggtcacctacaaagggaacccaatcagactaacatcagatctttctgcagaaaccttacaaactagaaaatattggaggcctatattcagcattcttaaaaaaagaatttccaaccaagaatttcatatttagccaaactaagcttcataagctaaggcgaaataagatatttttcagacaagcaaatgctaagggaattctttgacatcagacctgccttacaagtggtacagaggagttgctaaatatggaagggaaagaccattactggccattacaaaaacacacttaaatagatagaccagtgacactataaagcaagcacaccaacaaatctgcctaataaccagctaacaaaacaatgacaggatcaaatctgcacatatcaatactaaccttgaatgtcaacaggctaaatgcccctattaagacacagagggacaagttggataaagaagcaaaacccaacgatatgctctcttcaagatacccatctcacatgcaatcaaatcaatagactcaaagtaaaggatggagaaaaatctaccaagcaaatggaaaacagtaaaaagcaggggttactattctaattgcagacaaagcagactttaaaccaacaaagaacaaaaaagac

SEQ ID NO: 1290 - DNA, 1802 bp, Homo sapiens
agtcgccgctccagcgggaggcaggatggttgctacctggggcggccgccagctcctcccgcagggctccgggccgcccctcaccccagggtcgcccgctcctagtgtggcccaggcttcccggcctgcccctcccagccctaggaagacgtcccccgggccccctcagccctccgcctccccttctctccctttctccccgctcctggcaggctgcagccgtctcctcccggtgctcgctccttccttgagctctgtccaccgctgcccactgggggctagagcttcccggctaccctggaagctggaggctgggaccagctcttcaggtgacaggcctctgtgtctccacagtggccagaggggagcctgcctgactgatgagcaaggctccactttgtcaccaaggcagagaaggggcccgggtaaatgaccccggtggcccccacccctgcctggcatgagagtgggtaggggcttcggacttgaggggactggagcgggaataagggtcttctctggcccagcctttgactgaagctggtctggagacaggggcgttagagaagtgactcatagatggcctaaataagcggggccactcaaggacccaggacagggggaagagggccaacccatctggaccgcaggcaaaccccatggcctttgagagaagagagaagaggacccggtgaagtaggctccgagggcctcagcccagcaggagcgcagggtgggcgcgtgatgtcatcgaagggaagacagtgacctgggggagggccgctttgagggagagtgcaggccaccgccagagagctctgggagccgagggcagggaagactttcagatgttgcttgtccaaggggtgggggtggaagggagagagagcagaggctcgagagggatgtaggagagctgatggcactttggggacagcctcagggctgcaattgaggagggctccctccctcatgcaggcttttcctccaggagctgcaccaggaactcacagaggatcagggagaattctgagaacatgctactgtggtgctgcctagagaggaaggataaatgatgacaagtacatctctgagtaacgtatggccacttgttcatgaaaactgtttttctgaaagcttgtgaaggtcttgaaatactcgctatcagttgaggacaaacatttacaccctccttccacagggagttcaagcaggctggatgggtccatctatggatgatcttccccagccccttcctcttcccagctcattcctggctctctgtgtgaacaggtctcatcagtggaatgtggttgatgaagtgaggtcttcaattttctcatctactgtgtggtcatgttattttcctcatctgaggcttaaaaactcacctgcatgcagcacatgacagcttaaaatctcttgtgaacaaaacagtaacaaagacacccaccagcgttgagcatcccgtgttgatgacagcgaccaccatgggtcaacgtcctcttcacaatcctgtgtcagagcatcacttgactgatttcattagcaacttcccaggagaatcagcttacaaaatacttgtcccattttccatgcagatgtaacccatctattttactgaagaaatgggaagagctgaatgctgaatacactgaatgtctgcaggttgtgcaagtttgtgactttatcactttctaatttctgatctgtgtggaccactctacagatttttctcactggtgtgatcagccttctggatgtcaaatataatagactttcaacaatataaaagtcaacac

SEQ ID NO: 1291 - DNA, 1574 bp, Homo sapiens
agacaacagggaccaatccccatagcacactgtgaaagagaaactatctcggctatcgatacctctcccaaagagaacacgccggtcagatcgtcctccaaaaaccactacactcctgtgcgtacggccaagcagactccagggcattatgggaaggatgcttaccgaagtggaggacctgatctccataacttcatctcatctggatttgtcacattaggaagaggacacaccaagggtgatcatcaatataaccatccgattttgagcagtgttacccagatcccgccacatgagaagccacggatgaacaacatcctgacatcagccaccgagccctatgacctctccttctcccgctcgttccagaacttggcccacctgcccccatcctacgagtctgcagtaaagaccaaccccagcaagtattcatctctgaagaggctaaccgacaaggaggctgacgagtattacatgagacggcggcacctgcccgacctggctgcccgcggcaccctccccctcaatgtcatccagatgtcccaacagaagccgttgccaagggaacgaccccgccggcccatccgggccatgtcccaggacagggtcctgtccccggatcggggcctgccagatgagttcagcatgccctacgaccgcatcctgtccgacgagcagctgctctccacggagcgcctgcactcccaggacccgctgctgtccccggagcggacggcctttcccgagcagtcgctgtccagggccatctcgcacacggacgtctttgtgtccacacccgtgctggaccgctaccgcatgagcaagatgcactctcatcccagtgcctccaataactcatacgccaccctgggccagagccagacggcagccaagcgtcatgcctttgcctcacgcagacacaacacggtggagcagctgcactacatcccgggccaccacacctgctacacagccagcaagaccgaagtgaccgtgtgaccggcggggcagggccggggctgctgggcgtggcagagcagagcgggggccgggaggggccaggagcagagcttctagccttgccactctcccttcccttgtcccctctgtaggaagtgggggtgggccacctttgcccaaaaagccatacccccggggacacagccccgatggcctggtccaatacacttagacccaggaccaagagcaatcgctcttgctcctccagaagaatcagtggggagtgaggagggggctaggccccattctcacccccgaccaccttcaccaactccctttccgtcccgcgcctccttctccccatccgggggactcagctgcaggttctgtcagcaaagagacccttgcttgactgtggtctgaagctgcctgggtttgaaggggccagcgggtccaatcagtgggctgaccggataggctactcggtctcattcattcatctagaaccgcatcacagaaatctcctagtgcctaaaaactgcctgctcgctctctcagagccagggagctgctgtgtccataagcacaataatgattcttttcttgcctgctgg

SEQ ID NO: 1292 - DNA, 1929 bp, Homo sapiens
agacggacccggcgggagaggaggaagccgggttgtgggcgcggagctgaggcggaggcggggccggggcgggaaggggcggccccagctgggtcgggcgaggctggctgcgggaaaccgagtgagccctcgcttttcctccggggtccgcgcgcgggaccctatttctggcctgtctcgcgcttcgcctgcgcggtggtctccacgctgggactgcggcgtcctcgcagaacagccagaactccacttcttcctgtccgggaggagttgtttaaaacatgcgtatctccaccttctgcttcttagaacagaactgactgaagccgtgttctccctgccgagaccatgccgccccatcgaccctgctgcggccagagccacccagggcgggcccactcaccgcaggctcgggccacttggttccaaacctccactcccatccaggggcccggcacacccaccacactcccactctcagaggtctttgccgcctgcttcaggagaaaagagaaacttccactttccaccggcaaaactgcacacctgctccctccatcaccgagccccccccccccaccttctgtttttccagtatcgcagaatccgatccgttgctccctctggactggaatccgtatcctcggcatttcatcattccaagattctctactccacgtacccttgctgccaccctcttctactttccatcgctgaagttggtgaaagaggcgcctgcccccagttttgtggtctctcaactccacgtgttcgttttcacactcggtgaaattgcctttttaattgtcgcaagtagcatccacatcactaaagtcaaaggacactctcctttctcgtgttaactgatctgagcaaaattccttctttctccttaaaacacgtcttcctgtggcgggggtgctccactttcctgtctgtccccagtcttggcgtgcttgtctactctgggtgaccaccaaataacagagttttcaaggtctcagacctttcctcttactccacaatttttccctggatgatttaacctgctgtcaacatttaaatcaatatatcccaaatttgcaactctaatctttgctcctctgagctccaaatccgtttatctagcttcctattcagctactcctggtaacaagcacctcaaatggaacccatccaaaactgaatgcgtcctttccctgcttgctttcaactccctgtctccctgtgatagtgaagacaccactatccagtgtttcccaaactctgccttcacctcggcatctaacaaatcgccaagattctacttcctaaataactctgaagtctgtccacttcctaccatttccagtattacgtatcataatgtgcttactgcacgtgcgttttcccggcccacactcagtgatgtctcgttggtagactgtaatgggccatggtcgaagtatttacaccatggaaattagccaacattatgaatcatgaatcagggatcgatttgttttgctgattgtctctagacttcagaaagtgatggggaagatgttaataatgtagattaaacttaaaaatgtgtttagtgctgaaacaagattgcagtttaatgagtttatacaagggtaagaagtagtttaacagatcacatatcagatttaaggacaataaatttgttggcaaaaagtggatcggtatgtaatttcactagtcacatcatggttgagttacaagcattggatggattcagatacaagcctttggcaaaaaagaagcaaagctttctgtgagaatcagtcaagtagatagaactgacaataaagagtgtctgccttttacttgtgtattgtttattacacatcctttatatcagaaacatttataacacacatatggttgtatatataggtggaaataaaaagcagatgagattttagt

SEQ ID NO: 1293 - DNA, 1855 bp, Homo sapiens
ttaagcccacattctgaggttctggggaggcatgaattttgggagggacactatcttgcccagaacagcttctattattttgtgtgtgtgtgctcagtgcttcgtagacttgactttatcccctcctcctagccaccttatgaggaagggacaatggctaccttgcctcacatgaggaggcgaggcacagagacttggaacctctcaggatacacgatcatctttgcccttgcttggaattcatctgattttcaaagaggcggcctgcagcagagcctcccaacctgacttttctctccaaatggcagtccctgcacgacaatgaacatggagaagctgggctccacagtgccctgtgttcacaggctccacagtgagacgaaatgtcctggtttaaaacggacattgatcagacctgctgggaaggcaagcgggaggcagaaaggcacggctgcttccaagtttctgttggcagagagggcagagctgacaactcccagtgaaagatgttttcaccgtggcgcaagagcagagacagggccagcgcggcaccccagccccgctcacagctctaggttgatgcttctcagagggaagagctctttctctctcaagagtttcaataatcgtatcctaacctggcacagaacctcacccttcctgggaacacaggaatgtttgctacttgatgtcaatgaaatccaactccttaaggtctctcctggggtccatggggtggagttcattccacaccattctgagacagagtcagaggaatttgctgggtcttctctggctcggaataagtccaccaggcatctctaccttatccagaagagagtcatttattttcacaagtgcatagcggccgacaccaccagcactaaccagagtggattcttgcttcactctcggggccctcattcaaggctggtctcttcccgcaggccttctgacaagtgccacattttgttcctctaacttgggtgaagccccctcaaacactagtctcaaagatcccttgctacaaaggtgggtgctcgggcctcaaattcaaagaccctgactcagtagatccaggttggggtcccaggactgtaatataggtggtcctggcaccacacttggccaaatgctgtgtagcttgcaagaaagctccagaagcaatctagagctttatatcatcactcaaaagtaaagatttgtaggaaaggtttaaaccagtgtcttcccaagtttccagcttcttcaaccaaactgctggttgaggggaaggtgatttgagattttagggcatcgatttatacagtgtgaaaattattcccctgtggttagatcaaaggaaaattcttcatctggcactaagagtctttagcacctcctgacacttctaagctcccttttgaacaaagagagagaggcctcaggcttgaagccatcagcaggcagcagtatctggctggaatttagcaatgctcatttgtggtcaagtgcttaggagctgggactaaggcaacttttgtcatcaaaaagaaggcccagatcttggagagaagcagagcatcctgagtgtctgccaagcgccaactttgcagccacaggttcaagttcttccctaatcccggcagatctgccttcttggtcctattggtctccatgtgtggttggcgcgatctctgggctttgctgatgtgaagccatggggaggtggagttttaagagcggtgttctcagcgggaagagctctttctttctcaaacatttcggtaatctcatcccaacctggcgtagaacctcacccttcctggggacacgggaatatttgctactttacatcaataaaatccaactcctt

SEQ ID NO: 1294 - DNA, 2446 bp, Homo sapiens
agtgagccgagcagaggggccgcctccgcccgcacccagcatgcttcgccgaggctataaggcctctgaaaggcgaagacacttgagcgagaggctcagctggcaccaagaccaggcgctgagtagcagcatctacctcctacgagagatgggccccactggcttcctgctgagggaggaggagccggaatacatggatttccgagtttttctaggaaatcctcacgtttgtaactgttccacatttccgaaaggaggggaactttgtaagcatatctgctgggtcttgttgaaaaaattcaagcttccaaggaaccatgaatctgctttacaactgggtcttggagaaagagagataagtgacttgcttcgggggatacatcgagttcaaactccccaaccaggaacaaatgacgaaaatgaacatgttgaagaagatgggtacattaaacagaaggaaattgattcagaggatatctgctctatttgtcaagagctacttttagagaaaaagcttcctgtcaccttttgcaggtttggctgtggcaatagtattcatataaaatgcatgaagatcttagctaattatcagagtacatcaaacacttccatgttgaaatgtcctctgtgcaggaaagagtttgcaccattaaaactgattttggaggaattcaaaaactctagcaaactagtagctgcagcagaaaaagagagactggacaaacaccttgggattccctgtaataactgcaaacagtttccaattgaggggaagtgttataagtgtaccgaatgcatagaatatcacttatgccaggaatgttttgatagctgctgccatctttcccacacgtttacatttcgtgagaaaagaaaccaaaaatggagatcactagaaaaaagagcagatgaagttgtaaaatacatagatactaaaaatgagattgaagaaaagatgtcacattttcaagaaaagcaaggccaagtttacacaccaaaacacattgtaagatcactgcctctccaactgattactaagaatagtaagctgcttgctccaggctaccagtgtctactttgtttgaaggcatttcatcttggtcaacatacaagattgctaccatgtactcacaagtttcacaggaagtgtattgacaactggttattccacaagtgcaattcatgccctattgacggacaagttatatataaccctttaacttggaaaaattcagcagtgaatggacaagcacatcagtctgtttcaaacagagacatcattcatctatcaaagcagaaagaaccagatctttttattcctggtactggattagtcttaaaacaaaatagacttggaattttacctagcatacctcagtgtaattttgatgaattgaatacacctcaaagcccaaaagatgcctatgaaaatacaacaatagataatctatgctctatcaaattagataattcaaattcaaaaaaattaacctatgattataaaattagccaacattttcccaggtatcttcaagatttacccactgtgtcatttgggaaaataccatctcaaacactgcttcctcctattgttcataagaatattgtgtgtcccactgcaatggaaagtccatgcatcagtggaaaatttcacactagtctaagccggatgaccaaaggctgtaaatgtaataaccacaacctaaagaagactcctgccactaaaataagagaggacaacaagagatcaactttacttccagaggatttcaatcttattgtcaattggagcacagctaaacttagtttgtccaaaaggtatagtaactgtatgggggaaattacacgaaagtgtagtcatctatcaagacagcctgtgtctcactctgtaaatacaaaaagtactgagctatctttaataatagaaggagttcaattgtgaaaaagtttactatctgaaaatatttgaatgttgaatataaaaaaatgttttatatagaacataaaaagcacacatagtcttgacaaatgtatataaaattctctgttggaatttgcctacttacctataaacagctcactacacttaaaggaaatgattctattacttatatgacttacagcattaggtgtcttcatgaatatattcaggatgttataaataatgaataatttttagagcctttatcttattttactctgattttagaaatgttttacttaaattaaggaaatagatttttcctactttgagtcactgttttcaaatatttttcacggtagcacataacatgcagggattactccccggtacttctgtattttttgcatttttcttgcactagtaattaccacaaacctataaaaaaaaaccttaaaaaactccataaaggagttttcttatacataaaatgaaaataaaatgaaatactatcagctatgtcac

SEQ ID NO: 1295 - DNA, 2085 bp, Homo sapiens
gtctgctcaggttgccataacaaagtaccacagactcagtggcttcgacagtggagatgtaatttctcacagttctggaggctagaagtccaagatcaaggtgtcaggagggttcatttcttcaaaggcctctcttcttggcttgaagatggtcttccctctataactatctgtgtctaaatttcctcttcttataaagacaccagtcatatgagacccagcgcggtggctcacacctgaaatcccagcgctttgggaggctgagatatgaagcggccactgagcctacccccaccggctgagaaggagacccccatatctggagctgctgagtgcctccctcggcccccagaaccacctaagcccaagcgagaaagaaagcggccatcgtacacgctctgtgatgtctgcaacatccagctgaactcggcggcccaggcccaggtgcactgtggggggcgggcccaccagaggcggcttcggcagctcagcttggggaagagcccctcagggccaggtcagtgtagaggggacgctgctcccacaaatttggtttggggagtatctctgtctgggcccctctgaggggctctgggtctgtggcctccctccatgggggtctttgcgtctggggtgccctcaatggggtcttagggtctgaagcccccccgatgccagcaagttttattctgcatctggacaacccttctgtaggacctctcggaatctgtgggtccttaggccgcctcttgggtctttgtttctagggaactctccctgtgggatcttttgggatcaggactcctaagcagcacttctccagcccggagcctcctggtagccacaggctttcagacaagggcctcatctgcggggtgggggtcccaggctccagctcaggtctgtggtctctgaaggccaaggtcagcaaggtacacagcactccaacccagggacaagggggaggcccctcttcctttggactcctggccaggatttctgcttctccctagctggggtgactttgcagaggtttggctatgagcttggaaggggcagctggctgcaaggcagatttctgggggaaatgggtgaatgcctccatgagggtgattctagctgacaggtgcacaggggccatagggaaagtaagaaccacccaggctgctgttggcagagcaaacagattcacattcaggctcagtgtggggaggtgggaaaggcaggaacttacccctggctcctgggggaggccaacagaaacctaccttgcagcccaggctggcagttttgccggaggctacactctgacctcagacaccctcttgagggctgtcttctcttttggtgatattcatggggcacccactgtgtcccctgctccacacacacaatcctgtaggccagagacaagtaagatccaatctctctgcttaccaccctccccaagattgagtgggtcttttgggtggagacacatgtgaaaagggataagggttgtggttgccacatgggacataccctcagggcacaaaggcaaagctgcagtccctgggggcagcaggaaagtctcctgaaggaagagggggctgagcctcggaacatggatgaggggagtaggggcattacaggcagaggtcacggcataagcaaaggccagggtgctctggtgactgggaccagctcctccccacccaattatttcaggctggacaccaaaagcatgactctgagcaagagagtatctgactgatgggtgtttctggagcatatgtgtctgtctggattcgaaagtcactcattggctgggcatggtggctcatgcctgtaatcctagcactttgggaggctgaggcaggtgggtcacttaaggccaggagtttgagaccagcctggccaacatggcaaaaccccatttctactaaaaatgcaaaaattagccaggtatggtggcacgcacctgtagtcccagctactcgggaggctgaggcagacgaatcacttgaacccaggaggtggaggttgcagtgagccgagattgtgccactgcactccagcctgggtgacagagtgagaccctgtctc

SEQ ID NO: 1296 - DNA, 1601 bp, Homo sapiens
agcactcaacgatggggtggggaccagcctgggcacgggggacgtcctggcccatcccagggtttctggagggcgagggaaaactcctagaatggaactgccaatgggcatgggatttcttttggggaatgagaatgttctggaactggagcttggggcagtcgcatggcctgggaagtgcagtaaatgccactgagctgtgcaacttgaagggtgcatttcatgcatgtgaattatgtctgaataacaagaaaatcagtccccaaggatttgcacgatgactcacaggggctatgagaactggactctcttggaagctgctgctgcaccacaattcatgtgacacccgctgtccagtgcatagcacggtgggaacctgccatccaaggaggttgggattggctgttggtcaggtatgtgctcaagagggaaatcaaaatatgaacaaatgtggggttttccctagtctttcattcgggagaattcaggctctcaatgaggtgaaggccaagccaggtgaacccacagacgctagccttttgccatctttgcttttccacatttgtgtgaatagagcattttctttttgttgagccatttgaaagtgacccacagcatgactttctgcctgtgcctccccaaaagtacagctttctcatgcacggcccagtccctgtgatcctgcctaaggaaattagtgagaattccttaaatctgaattcagatcgccccaactgggcaaatcaattttttatgaccctttccattgaaccaggatccaaccaaggctggtgcgtttcatttgggggtttttctctttagtctcttctgtttctaccttctttttcatgaaaaagcatgacccagactttttggggtgcccaggccgggcctgctggtcaacggggctggttgcgaaagctcccaggtgtgcacacccatcttctccacacctccacgcggcgcctggggtctcccagtctgggctttgtgggctgaagcctatcagggcaggaggctgggcctgtctggttggagcccggaggtggtggcagagcaggtatagagtgttcccttccagttctccgctcccctccttcctgcctctctccgctcttctccaggccctctccctctgctcccagctgccccagaggcgatgctccatcatgttctctccaagggagactggcagcacctatttctgaaacccgaggccgggctgcatggctcatggaaggggctgaggatgctgggtcagctcaggtcagcctcatccctgctggcataggggaagggcatctgaagtgacagacccgggaggcctgcaccagccactgcacaggcctccccagcacggcttcagcttccacgtttggccaggagagactgggctcttccccgggcactcggcagtccactgtccatccctttttatctcttcttgattccagattggttccttgttgttttcctttgtcccggaggagcctcagggctttgctcaatcagggcaaggcccacacacagtgctcagagcacagccgcgcggagcaaatgtcaccttgcaaataaaccaatgtccatgtggtacactgaag

SEQ ID NO: 1297 - DNA, 2539 bp, Homo sapiens
aaacaacgggcgggagcggtgaagagactacagctcccagcatgcagagccaggccggcagagccaggccggcacagcccggcttcccccttcaggactgcgcgccgccccatgttcatgctggctgggattgtaatccggtcgccctgcaattaaaaaactgggagctaatcaaagatgacaagtcccagtatgccaggcgtagctcccgccctccaatccacaccttcccgagtccagagcagttctgccatgccaaaggggagcctggttgttcccgaacctctcttgcctgccaagtgacagcgagaccaggcggcttgtcttatcgtgtaattatgtcactacctctccctgagatgctggcttcatgcttcgtcattgccagaagtttgatttctcacggagcagcaggggacctggagctactcgcaaagctgtcacggttgccatatcttggagcagtactcgccccgccccttctcctcgccccgctccttccctctgcgctgcctctcccctcggcaccgcccctccgtctcgccccacccctgacacgccccctttgaacatgcgcagtgtagtccctgcgtaggactggggctaatcgccaggtgtctgactgttctccgacttcttggcatcctacgcgggaagctccctcgtgagtgtctgaaaccgtccgttcgctgccagaaatggatatatgcgttccctgataacctagcacttgccttttcaaagccaccatttcctctatcctctaggctgtcgcaaatcctcctgttcatcccaggagtgccccttggaccccgggctggctgcatgacccacacctgggtcaggcctctcacagggacgctcctgccactctgacaaagagttgaaaacgtcacagcgaaaggcctgaccctgctgcatccagtcaggaaacagccacagggaagggagcccctaagacactttgggagccacatccaccgcttctctgcccccgatccaggctggttcccagaccttggggtcctagtgtggacctcccggccgtaattaacgcaggtgcagggccagagagccccttggtccctcccaacacataagggaagtttgtgtggtgaggtcatgaacagtgtctgcgtttctgctgtgaataggaccttcatggaaacacttaatttccctttttaaatatccctttggaaccacgtttaataatttgctggtggaacttaacagtgataattctttgaatccatttttcttttttctttttttgacacggagtctcactctgtagcccaggctggagtgcagtgactgactcgatctgggctcactgaaacctccgcctcctgggttcaagcaattgttctgccccagcctccccagtagttgaaattacagacacccgccaccttgccgggctaatttttgtatttttagtacagatggggtttcgccatgttggccagtctggtctcgaactcctgatctcaagtgatccgcccgtctcagcctctcaaagtgctgggattgcaggcgtgagccactgtgcccggcctgaatccattttaacatttagttttccagattaactcgaagtaccccacgactacacgctaatgaaactagaggaggcacagcctcagctccgtgcaggagggacgcacaagagcagaatctccgtgggacatctttctggagcatcagtattactgcaggatttggaagaaacgaatttaaataatttccaacgtaagacactggaaatttaagagaaggctggaaagtcattggcctttaataactgtcagtcatctgtgcctaagtcagactttctccaagaaaaaaaaaaaaaaaactctaaggagaacctatttttcattcttctaagtagttaaaattagaaatcacagcaagtcaatagaaagctctgccctgctagtcttctaaatcacaatatggccttggtatggatttatttgtattttttggaggggtgtgttgacatgttgggtataaaaattggggggttttgacaaattttggaagttttcagctattagttggtgatttacttggtacctcatttaattttcctgtcccctcttcaacttggactcaatcactccacaggtctctaagactcttcattttctttaagatttttcactcttttattcagaatggacaatttctattgctctgtgttctgtttctaatctttgaataagctcaaaagtattttttaaatttccttatcttcttattgtttcgtaatttccatgtctttgctgaggttccacagctcttcattcatgattagaatattttcctttacccccatgaacagatttataatggctgcctttaaacatcctgaattacaacatcttaaatatcttaggatcacttctactgcctgctttttaaattgtgtatggatctcattttcgtgtttcttcacacgtctcatgaattttaatgttgtgtactaaaactgtaaagaatcattatagagactctcgattatgttgtg

SEQ ID NO: 1298 - DNA, 2372 bp, Homo sapiens
aacagtgcccctcaaagtcagggaatagtgagtgactaccttgctttggggtcccaggttcctgcccgacacagccattcacatgctgtgcagctttgagccacttactctcttcaggcctcagtgaactcaactgtctaatggggctcttccacctcagtgggaacgaggctgatggcctggctggactccaggaacaccagcctgccctccctgggcttctgtctactcctcctgcctctccacccagctcccttgcttcccacaacccccaccccagccctatgccctgggctggtccacagtcagggccacccctctgcctgtccccactttccccacggctactccagaggccagcagtgcttggagcaggcagactgggagacagctgtgctgctcttctcccgcgcactccacctggacccacagctgggacaatgcctttttgagcagtgtgccttcctggatgccctgaatgtcttctcacatgctgctgagctccagcctgagaaaccatgcttccgttaccgatgcatggcctgtctcctggccctcaagcagcatcaggcctgcctcacgctcatcaccaacgagctgaagcaggacaccaccaacgccgatgtctacatcttccgggccagactctacaactttctccagaagccccacctctgctaccgggacctgcacagcgccttgctgttgaatcccaagcacccgcaggccaggatgctgctccagaagatggtggcccaggcccagcaggcgcgccaagatgcggggatcctggctgtgcagggcaagcttgcagcacgcactgcagcggatcaaccgtgccatcgagaacaaccctctggaccccagtctcttcctcttccggggcaccatgtaccgacggctccaggagttcgatggggcagtggaggacttcctgaaggtgctggacatggtgaccgaggaccaggaggacatggtgcggcaggcacagcgccagctgttgctgacctacaacgactttgccgtgcactgctacaggcagggcgcctaccaggagggcgtgctgctgctgaacaaggccctccgggacgagcagcaggagaaaggactctacatcaaccgaggcggcagttccagaaggcagagaaccacttctccacggccatccggcacaacccccagaaggcccagtactacctgtaccgggccaagagccggcagctgctgcagaacatttttggggcccgccaggatgtggccactgtcctgctcctcaaccccaagcaaccaaaggatgcttaagcggcacgagttggagcgccagaaggccttggccctgcagcactcatggaagcagggggagcctttgattgcgacctccgaggagctgaaggccacccctgagattccgcaggtaaaaccgggaagctcagagggagaggctgaggcccctgaggaggaggaagaaaaggagaaggagaaaaaagggtcaggaccacaggcacctcagagactgagatgtcggctatctgccaggaatacaggagcacctcagccaccgccgtgacattctctgactcgtcactgttgaagacgcaatcctcggactctgggaacaacagggaggcactaagccatggtcccagaaaaatcaaggccacccagggccagaggcagagccttagcaagactgagcccacccagagccagaggcggaactccagcaagaccaaggccactatacacaagaggaactccagcaagaccaaggccacccaaagccagaggcggaactccagcaagaccagggccacccagggccaggggcagagctccagcaagactgaggccactcagggccagaggcagagctccagcgagattgaggccacccagggcccaaggcaggagcccagcaagaccaagaccacccggagcccaaggcagaggcccagaaaggtcaaggctgctcgtggccggagctggagacccagcaaggttgatgccacccagggccgaagcaggggactgctccgaagttccaccaagactgaggctttctatgactcaaactggagcctcagcaagactgagtatgcccaaggccagggccagaggtccagcaaggctgagggtgcccagggcaagagccagggcatgagctcaacttccagcaaggccgagtccacctggggacccagcccaagtctcagcaaaactgaggttgatcaggacctcacctactatgaagctgtctgaagggaccatccagaccctcccttcttgctggggaggggatgagttctacccacctccccacactggcactcagccagctgcctccttccagagcaattaaaagtcttagcaac

SEQ ID NO: 1299 - DNA, 1618 bp, Homo sapiens
agctgcgcgccgggtcctggaggccgaggccgctcccgcccgttgtccccgcagtccccgacgggagcgccatggcccagccgccgcccgacgtggagggggacgactgtctccccgcgtaccgccacctcttctgcccggacctgctgcgggacaaagtggccttcatcacaggaggcggctctgggattgggttccggattgctgagattttcatgcgggcatctgaggaccagatgggacattgcagctccagtgggacctgcctagcaggggtagctacctttatggttattgtgggcaagcaacccccgaaccagaagagccgagaaaccaaagaacaaggcagacagatcccgtttgtctgtgtcaggcacggctgccatacggtgattgccagtaggagcctgccgcgagtgctgacggccgccaggaagctggctggggccaccggccggcgctgcctccctctctctatggacgtccgagcgcccccagctgtcatggccgccgtggaccaggctctgaaggagtttggcagaatcgacattctcattaactgctccagcagctcctgcggtctcccattctgcaggtgcggccgggaacttcctgtgccccgctggcgccttgtccttcaacgccttcaagaccgtgatggacatcgataccagcggcaccttcaatgtgtctcgtgtgctctatgagaagttcttccgggaccacggaggggtgatcgtgaacatcactgccaccctggggaaccgggggcaggcgctccaggtgcatgcaggctccgccaaggccgctgtggacgcgatgacgcggcacttggctgtggagtggggtccccaaaacatccgcgtcaacagcctcgcccctggccccatcagtggcacagaggggctccggcgactgggtggccctcaggccagcctgagcaccaaggtcactgccagcccgctgcagaggctggggaacaagaccgagatcgcccacagcgtgctctacctggccagccctctggcttcctacgtgacgggggccgtgctggtggccgatggcggggcatggttgacgttcccaaacggtgtcaaagggctgccggatttcgcatccttctctgctaagctctaggaatcttccggccgctgcttcctgccgcctcactcagccaggtggagagcaccaatctgaaccagcaatgcctgcagcccagcccctcctctgaacactcagctattactgcgctttccctccccacggccccaactccagggcaggagcaactggacagtgggcctggcccgtggagctgccacgcaggtgcctgagggccaggtgccacgcaggtgtctgaggaccaggtgccacgcaggtggtgggggtacagacaagatgctgggatgtcccctgccccatggtcaagggtgtcctgcctgcctgggtccagggcctgagggagccacatggatcccgagacttgtgttctcttggctgaaaacactgaggtgctcccatctgtgcgtggcccatgagctgggatggtcctccagctgcccacaaggtccgcccctctgtctctgcaccacctgtttgcataaacacactttgctac

SEQ ID NO: 1300 - DNA, 1765 bp, Homo sapiens
agactattcggtaggcgtcttgagagcgggtgtgccgggtgacgagaaaatgctgcaaagattaacgctctcattcctgaatcccagcagaacctcattagatccataaatgggaacgctgtatcatccgttgcagtcgtcttgaagaaccaaggaggaaaattgcaccagcaaaaaaaaattgagtcatgaaagatgtgaaaagatggaaacattacatataatttattcagaagcaaagtcttttacagtggaggggctgtccagccggacccgggtgcgggaactccagggccaaattgccgccatcaccgggatcgcccccggcggtcagcgaatcttcgtcggataccctcccgagtgcctggatctcagcaatggggataccattctggaagacttgcccatccaatctggtgacatgctgatcattgaagaagaccaaaccaggcccagaagttcacctgcatttactaaacgtggtgcttctagttacgtcagggaaactttgcctgtgcttaccagaaccgtggtcccagcagacaactcttgcctctttactagtgtgtactatgtcgtcgaaggaggagtcttgaatccagcttgtgcccctgagatgagacgcctcatagcacaaattgtagcaagcgatccagacttctatagtgaggcaatactgggaaaaacaaatcaagagtactgtgactggatcaaaagggatgacacttggggaggagcaatagagatatcgattttgtccaagttttaccaatgtgaaatatgtgtagtggatacacagacagtaagaattgatcgttttggggaagatgcaggatataccaaaagggttctgcttatttatgatggcatccactatgatccacttcagcgtaacttccctgatccagatacacctcctctgaccattttctcctctaatgatgatattgttcttgtacaagcactggaattagcagatgaagctagaagaaggagacagtttactgatgtcaaccgcttcaccctgagatgcatggtatgtcagaaaggattaactggacaagcagaagcaagggaacatgccaaggagacaggccataccaactttggagaagtgtgacctatgcatgaatgagggttgaagcctactacctcacacatccagaaggctctgggttttccaataagctatggtaaccctaaagaacaaaggatacaatgcttgaaccatccttttaacttaaaaccactaagacactgaaattccttgttaagattaaaattagtgtgcaagtttacagatgtgtgtctacagtggtaaactgtacatacatgcctctttctgctggagtgacagaataggtgatccttgccacctactgacactgacctgaaggttgagattgagtattataaactagcacccagcagctttaacttgtagaagaaagcatcacattttgggtaatgtggaaggcctcctgtgagtccactgggcatacgattgagattgagtattataaactagcacccagcagctttaacttgtagaagacagcatcacattttgggtaatgtggaaggcctcctgtgagtccactggacatttaccacagtgtctccagtaactgagtctttttaaaaactctgaatgagttaagtttctaaattatgaattgattcatcaaatgaagatactcagaattgtccaaactgattttatattgcaatttggtagacattataaatgtgtgcttaaccactg

SEQ ID NO: 1301 - DNA, 3224 bp, Homo sapiens
cttcgttcttaacagccctgccccaaggctccctgaacggagccagatggaagttgtcccctttccctcctcctccgggcgggttggggagttctgagttgccgcggccgccttgtgtgtgccaggagagtggcagtgccatgctgctgggagctgccccggagagcagcccaggaccccggcggggccgcccctcgtcctctctcgtccccgaggggtcgggcaggaaggaaaatcaaactttattcccctctgtgacttcctctgtgtgtgtgcatggggaaccggctccctcgagatggatgctgcattgcttcaggaggcaagcttcatcctcttgggtccttaaaggtgcttttgggggtcctttcgagggctactgtataagcgtgttcacgcgtgcctgaagcgggaagggtggtcagcaggcacaggagaagcgaatatggtacaccagaggatcgcttcctggcagaatttgggagctgtttattgcagcactgttgtgccctctgatgatgttacagtggtttatcaaaatgggttacctgtgatatctgtgaggctaccatcccggcgtgaacgctgtcagttcacactcaagcctatctctgactctgttggtgtatttttacgacaactgcaagaagaggatcggggaattgacagagttgctatctattcaccagatggtgttcgcgttgctgcttcaacaggaatagacctcctcctccttgatgactttaagctggtcattaatgacttaacataccacgtacgaccaccaaaaagagacctcttaagtcatgaaaatgcagcaacgctgaatgatgtaaagacattggtccagcaactatacaccacactgtgcattgagcagcaccagttaaacaaggaaagggagcttattgaaagactagaggatctcaaagagcagctggctcccctggaaaaggtacgaattgagattagcagaaaagctgagaagaggaccactttggtgctatggggtggccttgcctacatggccacacagtttggcattttggcccggcttacctggtgggaatattcctgggacatcatggagccagtaacatacttcatcacttatggaagtgccatggcaatgtatgcatattttgtaatgacacgccaggaatatgtttatccagaagccagagacagacaatacttactatttttccataaaggagccaaaaagtcacgttttgacctagagaaatacaatcaactcaaggatgcaattgctcaggcagaaatggaccttaagagactgagagacccattacaagtacatctgcctctccgacaaattggtgaaaaagattgatctgcaaaaagcctctgaatcctggcagaaggaacacctgtttgcctttttaattaaagcattgcaggtggaagctgggagccatgtggggggtagagcgtttttacctttaattataaaacaaaaacagaaaggatctgagggaagaagggaatgttaaaacctgaggatcaggcattgtggaatataagctcaaagggcttagtgaatattgtcttaaccaagtatctcagtttctggatgaaaatgatgcagttatatagttgagagattcataaagagaaaacaatgctgggggtgttcgtttcttgcatcttctttgcagagtcagcaaaagagtaacacaccagcaccccactcgactctatttgtttttaatttaactgtccctatttttgacataggagtaaataaatatactagaaaagcaaattctcatgatatgctaaaatatcattagcatttattttaaattggacccagtctctgcagagttaccaggaatctttccttccagcatccctttactgaccacctacctgtacctcttggttacactcattttttccatttgataattggaaccaacttataactgtttaataattgacactttagattatctcttaataccttcttaaatgtctatatatcccagtgctctggatcagtgtctaaaaatcactggcaacactgcatgaggttgttggttttgttttgttttattaattagtctttcacaggaggaataattgccctcctttatatacttatctattgataatcccctctccctccagaacacaaatcagagggaaagggggtgttcagctgtactaccaaatcaggaagatgtaaggtttacaaattggctaagaatcatggctctgtagccatttcaaccagaataattttattgctaatctgctttgtgtgacagcattccaggccagccagatgggactgccttgtctggaggctttgttcatctcgaaggacacacacttccacactgtttgtgagccctcccacctccacaacttcagttgtaaatcaagtgtgtggatctcaaagggtgcaatttatctttatataggaatacatttctagggcttccttcaagcccactctcttcaccctattttttcttatcttaaattgagagaaagagaattaatcttatactttgtcaaaacattttctaccatatttccagatgacatctgcgcttgaagagtcaaaggaatctgtgtctaatatcctgtttttaactgctgtaggggcaggatggaaaggatgatgggggctgccacaccactgattggccttttctttcacgtgattcatccttcctcattgtggcaaggagtttctttctctttttcttcctcctttgggatcattgtgtatgaaaagaaaaactttaaatgacaaacccagactccaggtgccttgcaaaggttgaaggccagccaggattgctactgctgctgctactcctgccaacacccctttcattggcatgacggaatgaaaggatgcatgtctccacttcctgaccctccgcccacttccttctccctccaacacccccagtcgtcagctccttccctcatttatttttgttaagttgtgtgaattatttttaacccatttatcctgtttgtgcatagggtttttaagaagaaacagcacagtgcaacgagcaaatctttttggggtgtgtgggaagcaagggagggaggacatggagaaaagttctttaaacaaatagcaaactattgaacatgtgtaaaatcctgtatcatttatgaaatatgtataaaaagcaatgtaccttctggaacaataaatacttattcaatttttg

SEQ ID NO: 1302 - DNA, 1846 bp, Homo sapiens
aaaaaccccgccctcagcaaggccccgcccaccccgacccctcaggtccagcctccttcctcgtgcaaggttttttttcccttttggcgccaaatcttcgttggttatattcccgggttatccaggggttctaccagaggcacacgctggggacagaaggggcgtgaaggccaacccgcgcgccagggccccgcctcccggccaaccgccccgggctgggggaggaaggagaggggcaggcgaaggatacagccgccgctgcccccggcaagatggcggccgcgaaaagcggggcagggggcgccagccgaccgccgttaccgctgctgcgcgaggctctcagcaaaagaaggactgctccagtgaccaggccttcccgaacagcgacagctgctcttgggaaggcaagtactcccgcccaccggtctgccccttctccggagcccccgtccattagccctccccgcggactggccagtgccttaagctttccacagtcccgcttacttgtcggcagaaaccagctccgcggcgacggcggcagtggctgtggactccatggccatcgttcccctgaggtggcgaaccagcgaacggaatagagcctgcgagaaaaacaggcaatttgggacgccagagactcactcagggacagaaaatggcagattagagaccccgcgcggccggggcccttttatatacgaggacccttcgccccgcccatccacttccggatcctccccctcgggtttaaagggtcaggactcaccacccataccctccgtcccccgccggcctaccactatctagacacctcctgccctctccatatggctccgcgggattgtttccctccctagcccgacttctccaataaacagcaacttcctgcttctccagcaagtcgcataagaagaactggaatcttgacactacaactcctgacaggacgcccctgcggcatccagagacagggaagccagtgctgctctgcatgttcagggcgagtagctgagagtctccttccggcctggatactgaggaaggtgacttagactttctctccgtcctctgagtcgtaacggacggacacgcaagggccgaggacgggtacaagcagcagcgactagaactgatctgggtgagatctaggcctcagcaacaactgacgcaaaaagattttgttctaggattggctacagctgaaactaccgcgcttgattcaaagctcggggcttgcagcgggaggcagctggctcctccctctgaacccgccccctttggctggcccaatccgctgatcccatcctcttaggccctgcccagactccaaatctaccagaattaatgctcccagcgctgtttgtccactcctgcctatgatttgctgtgtgactactactcgtgggggtaccgtgattagacgctttaaagctattagctatcttgtttaatattaacaatgctactagtgagatcagtgttagtctgtttcttagaaaaataaaccaaggggccggacgcggtggctcacgcctgtaatcccagcactttgggaggcctaggctggtggatcacgaggtcaggagttcaagaccagcctggccaagatggtgagacccccccgtctctactaaaaaatacaaaaattagccgggcgtggtggcgggcgcctgtaatcccagctactcgggaggctgaggtaggagaatactagaacccggaaggcagaggttgcagtgagccgagagctcgccactgcactccagcctgggcaacagagcgaaactccgtctcaaaaataaataaataaataggccaaggttccaacctggccaacatggtg

SEQ ID NO: 1303 - DNA, 2451 bp, Homo sapiens
aatgaggttggcactgaccaggagacggtcaccctctactacacagacccaccgtcggtctctgctgtaaatgccgtggtgctggtggccgttggggaggaggctgtgttggtgtgtgaggcatctggggttcccccgccccgagtcatctggtatcgagggggtcttgaaatgatcctggcccctgagggctccagctctgggaagctgcggatcccggcggctcaggagagggatgctggcacctacacctgccgggctgtcaatgagttgggtgacgcctctgcagaaatccagctggcggttggacatgcgccccagctgacggagctgccccgggatgtcactgtggaactggggaggagtgccctcttggcatgccgggcaacaggccgcccgcccccgacggtcacctggcgccgcggagatggccagcctctgggactcaggctgggggccgggcgaggcagtaggtctcggcagccggattcgggagtgctgttctttgaaagtgtggccccagaagaccaggccccatatgtctgtgaagctcgaaacgtctttgggaaggtccaggctgaggcccggctcatcgtcactggtcacgccccgccacagatcgccagcagcgcccccaccgtccgggtcctggaggggcagcccgtgtccctgccctgcatcgtcctagctgggcggcccctcccggaaaggcactggctcaaggacggccggcccctcccacctggcagccggcattccatccgagcagacggcagcctccaccttgaccgagcattgcaggagcacgcggggaggtacagctgtgtggccaccaacacggccggctctcagcaccgggacgtggagctggtggtccaggtgccacctagaatccatcccactgccacccaccatatcaccaatgaaggggttccggcctctcttccctgcgtcgcttcaggagttcccgcccccaccatcacgtggaccaaggaaaccaatgccctgacctccagaggtccccactacaatgtgagtaaggagggcaccctgctcatcgcccagccgtctgcccaggacgcaggggcctacgtctgcacggccaccaacaccgtgggcttttctagccaggagatgcgactttctgtcaacaccaaacccaggatccatatgaacgggtcacgtaatgcagatgtgcctctgcaagtcacagcgaaggctggcgaagaggtgaccctggactgcgaggccaagggctccccacccccactggtcacctggacgaaggactcccgccctgtaccgcccatcaccaacaggtatggcctcctcccgtctggctccctgcgtctggcccaggtgcaggtgggtgacagcggccactacgagtgcacagccagtaaccccgccgggtccgcctcccatcgctacgtccttggggtgcaaggtaggaccagctggcagccccagtccctccctgtcccccatcaccctgcctgtctctcaggtctctcagtgcccctcctgcagcccacgcccaggtctgtcaggctctgtcacctctccctccgtgcgcctctgccacctccttttgccacccccacttcctgtctctctcaggcctgtctctcctcctccaccctttctctccacctctccccataccccttgaggggtcctggagacgctgttcagaggcccccaacaacacagggcagagcacagtggggacttgggtttgggaggacaggggtcagaggggaacccatgaaggtgggtctgagagggtctctgcctggtacgcgaggcccagctgggagcccagggtgtggcgatgggaagaggcctgtgaggtgccacagagcccctcctgctgggagcatcttaatgcccccaagaggcccttctgagcccctgctcccaccactgccatcaacaaggcactttgtgcacctataacagtgggtgccgctctctctccatgtatcccttcctctagtccaaggcccctacgtaccccactgtgcctctgattcccagcctggtggggggtcccaggagtgggtgttcccctggggctcattcaaagggagccagccagtgggagtcatacactgaaaagggagggcgctcgtcatccgaaagaaccctgagaggcatccaagacaggcccaactatggcccaagggcccaatctgccctcctgttttcagagatcatgagccagtgaagaatggcttccactttttaaaataattggacaagcacaaaaaaccaactaaataatattttgtgatatttcaaatttatctgaaattcaaatttcagtgttggccagacgtagtggctcatgcctgtaataccagtactttgggaggcctaggtgggaggatggcttgggtccagaagttcgagaccagcctgggcagcatagcaagaccccatctctac

SEQ ID NO: 1304 - DNA, 1958 bp, Homo sapiens
catgcggaaaagcagcggcagccccgactctcagcactggtacgtctgctcatgaccacccagcaggtcaaaccaggacaagtactctagcccaggactcctgaaggcccagccacgctcccttcctcccaatggcctcttgtcatgaacactgtgggagcggggctctgtctcccccagagtccgggtggggagggcagacacctttccatgtgctgccagccctgatccattcgtggtagctgcctggggtgctgtgctgaggatccttagggcagatccagccttggcagggaagagtgctgggctcgctactgaggtctgttgtgggcactggagctggaagatctgccacacctgccacatgctgccatctctgagcctccagccccaggagggcagagggtataaaccaccgtgcattgcccagcctggggctgcctcaggccatctaggtttcatggcctgggctgactctgctcctggccccacagtgcctcagatggctccacggagaccctggccatggttgtggtagagcctggggacacgctgtcctcccccgagttcgacagcggtcctttcagctcccagtctgatgagacctctctcagcaccactgcctcatctgccacgcccaccagtgagctgctgcccctgggtccggtggacggccgctcctgctccatggactctgcctacggcaccctctccccaacctccttacaagactttgtggccccaggcccaatggcagagctagtgcctcgggccccagagtccccacgagttccttcccctccaccctcgccccgtctccgccgccgcacccctgtccagctgttgagctgcccgccccacctgctcaagtctaagtccgaggccagcctcctccagctgctggcaggggctggcacccatgggacaccctctgcccccagccgcagcctgtcagagctctgcctggctgttccagccccaggtattaggactcagggctcccctcaggaagctgggcccagctgggattgccgaggggcccctagccctggcagcggtcctgggctagtcggctgcctggccggggaacctgcaggctcccacaggaagaggtgtggagacctgccctcgggggcctctcccagggtccagcctgagcccccaccaggggtctctgcccagcacaggaagctgaccctggcccagctctaccgaatcaggaccaccctgctgcttaactccacgctcactgcctcgtgagtggcctggactggggtagggcaggtggctcaaggcactggcatgggggcccactcatgcctgggagcatcgcatttggggagggtcatggcggagggagcctgaaccctgcccagtgtctgggcgcagggggctgtggtgggcagcagtgaaggggcctgaggagtgccgtggggaagagagggtgaccagagccactctgaatggcgtcagccaaagaaggactctgtcccctccccaccctgtagggaggtctgagcagagggaggcccccaagagtgccattgaccaagagacagcagacagcctgcctcctggggcgtgccggcacctgcttcagctactgcctcctgtatgcatgagccggatgctgggcaggatccctgcctacgcccgggcccgatttgcgctttgccggactggatggagtggaggaggcccaggccacagtaccaccccacctgcccaggcagcccctcgtcacctactccccgaagttaccagctcagctcgagtcttcagggctgggctcctaggctgcccatcctacttctaccctcactggcctccagtgggattcactcctgccctgcccccaccttcccagtcccacaggccacccctggcttgggctgggttctgtgaagttacgtatttattgagcttttggttcttttataaagacttgtctagactcc

SEQ ID NO: 1305 - DNA, 4544 bp, Homo sapiens
atcctcccagaaacccagccggcttcacctctcaccaacagtggctgcgggactttccagcacctagcctgggcattcccacagcccagagggagctcgtcccagacaaccaagaggaaaagaagggaaacaagaaagagatggagacccatcattgtggccaacgaccccacgaagagggaatagcggtccacgcacgggacccagcctccgatcaagcccagcaggcgccggctgcgccagtgctgggaggcagagcccacgcccacccggaaccgcgccggccagcgaggtccgtgcgcagccccggctgccacctgcgcttctccctccacacctcaccgttagcagagggagccggctccggcctcagccagccccagagacaggcccccacagcacagcggcgggctgaagggctcctcgagcgtggccagagcagacgccgaggccaaggaggtgccgagagacagcgagggctgctagcacattgtcacctctcaatactggaactcagaataagaggtctccactgtgctgagttatgggagaaagatgggtgtatggtagacagaatagtgcctccccacaacaaagatgtcaacatgttactgtgtgtgttaaaagggactttgtaggtgtgagtaagttgaagatcttgagaagaaaagattatcctgggttttttgggtggggccaatgtcataaaaaggtccagataagaaagaggcagaagagtcagggtcagaggaggagccatcatgataggagcagagaagcagagtcaggagagttgatgctacactgctaactttgaagatgaagaagccacgagctatggaatggagacagcctctgaaaggcaaggagatggatttcctttagagcttccaggaaggagtgcaggcctgctaacagatacgttttagcccagtgagactaatttttagacttctgacttccaggaccgtaagtttgcagaattactctcctatgatggcacagaaatcacaaggatctgacaaccttcaggaaggccaggaaaagagcaagagagagatcctgaagtgcaccaaaagcgcgtgggctccgctggatgagtggctgccccctgaccctgaggaggaaagccagagtctcaccatccccatgctggaagattccaagcaagaaagtattcagcagtggctggactctggattctttgtctctgcaaatgaaaactttcaacaagtcattgatcgcactgtttctttgtatgaacaagggatggttcaaatgactgtgaaagactacatgagatctttgcatcagttttcagaaactcccatcctatccagagggaccagtttcaactcttgctattctactgcaagtgtaccacaaagcattcctgaatggctggaattttgggagatagatccagtggagattctcttggatctggggtttggtgctgatgagccagacatctgcatgcaaatcccagccagattccttggttgtggctcagcagccagaggaatcaacatccgtgtttttcttgaagctcaaaagcagcgaatggacattgagaaccccaacttgtacggtcgtttccgacagctggaaatcctggaccatgtgaccaatgccttctcatctctgctgagtgatgtcagcatcctgccaaacagagctgaagagaaagctggaggagagagtgtgcaaagaacctcagtccaaagctttgaagaagagactggtaatcctcttgacatgacttcaggaactgtaggtgccagggtggacagagcaaatagctgccagtctgacagcagcgggttcctggaggagccgctggaaccgctgcccctccagatgccttccttgccaaacagccagagtcctgctgagaatggaggtagaaagccaagagatcagagccacagcttagtatcatcccaggactgtcagctagagtcggatgggccagattccaaaagtagggcgagcatgtctttttcaagccaagaagtgaatgccttggaacaaagggcctcagtatctgtgatggaggaagagtttctgcttgaggccatggaggggccaccagagctgtatatcccagacatggcctgtgccaagaccaccacgaggggagaatgcccaaggaaagacagccatctgtggcagcttctgccaatgccccatgctgagtatgaggtcaccagacccacagccacttccaaatatgatcatcctctggggtttatggtaacccacgtcacagaaatgcaggacagttttgtgaggcctgagggagctggcaaagtgcaaagccaccacaatgagtctcaaaggtcacctggaaatgatcatactcaagacaagttccttcatgttgactctgaggccccacgagaagaggaaagcagtggattctgtcctcacaccaaccacagcttactcgtaccagaaagctcatcacagtgtatccccaagcacagtgaaatcacaccttatgcaactgaccttgctcaaacatctgaaaagctcattccccacctccataaactgcctggagatcctgcccaggtgaagtcaaggtctggtactttgggtcagatactacctgggacagaagctgagatggaaaaccttcctctaaatactggcagctccaggtctgtaatgacccagatgtcctccagcctggtgtcggctgctcagagggctgtggccttggggactggtcccagaggaacatctttagaatgcactgtgtgtgatcctgttaccgcaacagaaacaagactggggacaaaagcaagacagttaaatgatgcttccattcagacttcagctctaagcaacaagaccttgacacatgggccccagcccctcaccaaatccgtctctctagactcaggcttctctagtatctgcccaatgggcacctgccatgctatatctgcccactgctgcatctgctatcatcaccaccctcactgccacggggagaggcaaagccctggccctgaaccctcagtctgtaggcactgcctgtgttcactaactggtcaccaggaagcccagttcatgacgactttgaaagcccttcaggacactacagtgagggagctatgttcctgcacagtccatgagatggaagccatgaagacgatatgccaaagtttccgggagtatttagaagaaattgaacagcaccttatgggacagcaggccctcttttccagggacatgtcagaggaggaaagggaggaggccgagcaactgcaaacgttacgtgaggccctgaggcagcaggtggcagagttggaatttcagttaggagaccgggctcagcaaatcagagaagggattttactgcagctggaggttctcacagcagagccacctgaacactattcaaatctgcatcaatataactggatagaagaaagcaatgggcagacttcatgttctaaaatccacccaggcatggccccgaggactgtgtttcctcccgatgatggccaggaggctccctgttcaggtgggacccagttggctgccttcactccacccaccttggagaacagcaccaggatgtctccttcatcatcagcttgggcaaagttaggtccaacccctttgtcaaattgtcctgttggagaaaaggatgcagatgtcttcctctagatcagagcaggtttgttaaccttcatacaaaatataaaggcccagaacagatgtagcaaggaaatttcaattttccccaaggagaagggtctgccaacccattgtcagctatatctctcatattctaccctttggttaaacccaagaggagtttagaatactctaatactcattcagtatagaataactgagcacctagtatgtgcctggcacagagtatgcaacagtgactaaatagtatacggtctctgccctgctagaacttacagtgtagtgggggagatagaattgcaaacaaaaagtatctgagacagacctcagtcaatatagaagtttattttgccaaggttaaggatacacacccagaagacaggtctgtgcctttctccaaagatgattttgaggccttcaacatttagtggggaaagggtgctaatggggaaagaggtgtgggtacataggaggcaaacagttgcatttttttgagtctgatcagcttttctcatgagagaaggggtagaggaacagtcacttatgcattcacctagctcagtggatctgcacttttacagaaggtaaaataaacatagggcagaggaagcaatcagatatgcatttgtctcgggggagcagagggatggctttgagttctgttctttgtcctgtacctattaagagaagctatcaatatactttgtcaggataaaattcaacagaactgttttagactaaagattttagggaccacaaggaatttcccagtgggcaaattgtgagggaggtatttagcttttaaaaaaatctttgtagctatctcatttagaaataaaatgggaggcagattgcctgatgcagctcct

SEQ ID NO: 1306 - DNA, 5969 bp, Homo sapiens
aataggtggacgaggaagattatctttctctcattttttagaccattaatttttagaccaagtttgtaaaattggggatactcatatttcttagacaatcaaataaatgatcagaaagactaaataaatcaccatagtcacaaagcagttcacaatacatttactgggtaatttctagttaacagtagcagtgatgatcacattgaaaatctcgtgttttgtggtggttttctcttacgtaagcttcttgctttgttgaaagcatagattctaagctgctctatcaaaatgattattagaaaaatgtgatgtactttctgtgtaaattttctaaactttcttctgttaatcttgttaatttgattgaacatgtgtgtcattttcaaaaatgtaaatcgaatatatgtggatgggatatatatgtgtacatatgaaatataacttcatattacagagtaggcttagctcatggcaatgttgttttgtgaaagcacctgcagaaatctctctcatttctagtttgttaatgtttcagagattgcgtgaggcagatttggtttcagtcattttagcatcattcattgtaaggtgatgatccctaagaactgcttcacaatgagaaacctgaaaggtcccagcagtgagcaatgaatgaaaggtggggcggggctgctggcagggtggggccttgtcagccatatgcctgtgctctcaagtgccaagtttgtggggatgcatgcaggggattctggacctgattgtttcctctgaaccaggatgtggtctggttggcagggcaactggtcttcacttggtggccttcagtgggtgtcctcattggttgccttcagatagtgccctcagttggtaccatcagttggcgctcttcaggtggtggtcctcagttggtggtcttcagttgtagggcaatggtggaaggaggatgaaactgtgctttctcctcccccagtcacagctctcaggcttgctgcctccgggcccttctaaaataaaccagacaggttggcaggtttttcttaacagacaagtcagctcagggtacaggggtgacacagggtgcaggctgctagtgcagtgccaccccatggcccaggggtgcccgtgccagccatgcctttgccaggaagaggcgataggtgttgagctctgcagacttggggacaagcgaacacccaagctgcctgagaagtgcaggggtgccccatggggaccacactgaactgtcgcatgtgcaccaaagccagccccagtcagggccggcacaaggtttctgcagagccagcctgtggctctgacgtctacaagtgtgcatacaacgaaggcgcaggctgcgatatacaggagcagaggcacccagaacacgctgcccctgctgccagttgcaagtggggtctgctcagaatgcggagggtgaagctgtcctgcagctttgagatccacgaggtggtggtggccctagcgccagactccactgctatggaacctgcccagttgaatttgggagccagtgagggacctgacagcagcaccaggagacgcccaaaggtagggaggtgacagatactgctgaagtttaggaactcctctagccattgctggcccaagaatcctgcagaggcatccagagtctcagttttctcatctgtaaacgatgtgcttgttatgaggcttcggtaaggtaagtgtgtaaaaaccatggcaaaatgcttgtaacttaaaagagaggatttctatgaggcttctataaagtaagtgtataaaaatctggacacaatacctatgattttttcagtgttcagtatatggagaaggagattatattctctcatctaattttcagagccagtttataaaaatggtgatactcatatttcttagacgatgaaatcaatgatcagaaagaataaatagatcatcaaagtcacacagcagttcacaatgcgttccttgtgtaatttctagttaaaagtagcaatgatgatcacattgaaaattttgtattatgtggtagttttcacttacataatccttttggtgttttgaaaccatatattctaagttgctctaccaaagcgatcattagaaaaatgtgatgtagttagtgtgtaaattttagaaaatttcttccgttagtcttgttaatttgattgcaaatatgtgttattttcaaaaacgtaaatggaatatatattgattggacttgtatgtgtatatatgaaatatgactggacattatagagtaggcttagttcatggcaatgtttttttctgaaagcacctgaagaaatcactcttatttccagtttgttagtgtttcagagattatgggggaaagggggttctatgaatgtcagacactgcgtgaggcacatttggtttcagtaattttagcatcattcattgtaaagtgatgatccctcggaacttcttcacaatgggaaacctgaaaggtcccagcagccagcaatgaatgaaaggtggggtggggccgctggcagggcgaggccttgtgagccatgtgcctgtgctctcaagtccgaagtttgtggggatgtatgcaggagattctggccctgattgtttccccagaaccaggatgcgttctggttggcaggacaactggccttcacttggtggccttcagtgggtgttctcattggttgccttcgtttagtgccctcagttgtttctcttcagttggcggtcctcagttggtggtcttcggttgttgggcagtggtgggaggaggatgaatccatttgtgctctctcctcccccagtcacagctctcaggcttgttgcctccaggcccttctaaaataaactagacaggtggcaggatttttttagcagacaagtcagctcagggtacaggggtgaagcgggttgcgggatgctagtgcagtgtcgcctcatggcccagggctgcccgtgccagccatgcctttgtcaggaagaggcgataggtgttgagctctgcagtcgtgggggccagggaaggcccaagctgcctgagaagagcaggggtgccccatggggcccacactgaactgtcgcatgtgcaccaaagccagccccagtcagggctggcaaaggggttctgcagagccagcctgtggctctgacatctacgagtgtgcagacagcgaaggcgcaagctgcgatatacaggaccagaagcacccggaacacgctttcccccactgcgagccgcaattgggctagctcagggtgcggtgggtgaagctttcctgcagctctgagatccacgaagtggaggtggtagtagcgcaggaccccactgctttggaggctgcccaatcgaatttgggagccagtgagtgtcctgacagcggcaccagaagaccccgaaaggtagggaggcgacggatactgtttagattcaggagcacctctggctgctgatggcccacgtttcccccagaggcatccaaagcctcagttttctcatctataaaagatgtgattgttatgaggcttccataaggtgtgtaaaaaccaaggcaaaaatgtttgtaatttaaaagagagagtttctgtgaggcttctataaggtaagtgtgtaaaatctggacacaatacctataatttaggtcactataacctctgcctcctgggttcaaacgattctcctgccttagcctcccgtgtagctgggattagaggcatgcgccatcaggcctgaccaatgttgttctttttaggagagatggggtttcaccatgttggtcaggccggtctcgaactcctgacctcaggtgatctgctcaccttagcttccctaagtactgggattataggcgtgagtcaccatcctaggccaaaaatttcattccttgatcaacaaacctgtttccaaggagatgcttgtggtctacatatgcagattcccagcatttccaagaagaagggaatgactgcaaggcaacctgggcgggagtttaggattgttctgaggctgtgaaagccattgaaattcacacataagaggatagagaaagggaattcacatgtttgatccctccatgtactgggtataacttggtcttcattaagtttgcaccacctttggcatcagagagaactggagttgaatccaagttccaacactcattaggatgtgatcatgaatgtgtttttaactcctcagaacctcactttgcttatctataaaagaggggattcttatgaggcttccgtaagttaaatgagtaaaaatttgggtggacaaaatgcctgtaatttaaaagatagggttgttatgaggcttcgataaggtaagtgtgcaaaaatctggacacaatgcctataattttgttagtgttcaatatatagagaaggattatttttctatcatttaatttttagagcaagtttataaaatggtgttactcatctttttgagaaaatcagaccaaggatcacaaagattaaatgagtcgccatagtcacaaaggagtttacaatacatttcctgggtaattgccagttaaaagtagcaatgatgatcacatttcaaatcttgaattatgtggtgcttttctcttacgtaagcctctttgtgtgttgaagccatagattctaagttgctgtatcaaaatgatcactagaaaactgtgatatacttagtgtatatattttagaaaatgtcttctattactcttgttaatttgattgaatacatgtgttattttcaaaaatgtaaatggaatatgtgtggattgaatatatatgtacatatatatgaaatatgatttgtcattatagtgtaggcatagctcatggcaatgtgtttttctgaaagcagctgcagaaatttgtctttttttagtttgcaaaaatttcagaggttatgggggaaagtggggttctatgaatcccagatagtacatgaagcagatttggtttcagtaattttagcataattcattgtaaggtgatgatccctaggaacttcatcacagtgagcaacctgaaagctcccagcagccagcaataaatgaggtgggacgagtctactggcagggcggggccttaagagcctgatgcttgagctctgaattccaagttggggggacacatgcaaaggattctgggcctgattgtttcctgtaaccaggatacagtctggttggcagggcaactggctttcacttggtggccttcagtgggtgtcctcattggttgcctttggttagtgccctcagttggtaccctcagttgtttctcttcagttggtggtcctcagttggtggttttcagttgttgggcagcggtggaaggaggatgaatctgtgctctctcctccccaggccacagcaattcacttgaaggagaaacagccccggtgtggagaggcggccatccttggcgggatcctttctaaggagccgagaaatcaacgtagagcttcctctgtctgattctctaacaactgcagaccttccatgagtcaagctttgtgtcaaaaggacaaataaaaaggacctataaaaggcatcaccaagcccaatgggcagatgccccaggctgcacattctgtcagtgctgttctggaaaaggcccaaacacatgctgaaacatcgaaggataagaagccagccctcgggaaccggcaggagcactctgggccccgcacggccccaagtccagcctgccccgcctcctctggtgcagaggtccagggataccagcagcagccccgccacgcccctccaaggccaagaacacaggcggcaggggcttcccctccctgccagactacttcctgccgccacagccaccacccttggacgacccagagctcccgccgcccctggacttcgtgctccctccccccgcggtcgccaagaggcctcctaatgccccacccccgcaagagacacgaagcatcaatgttcagaagcagcaaataaataaaataaatg

SEQ ID NO: 1307 - DNA, 3839 bp, Homo sapiens
aaatataaaaattagccaggtgtggtggcagacacctgtaatcccagttacttgagaggctgaggcaggagaatagcctgaacccaggaggcagaggttgcagtgagccgagatcgcactactgcactccaacctgggcaacagagtgagactccatctcaaaaaaaaaaacccaaaaaactaatgggccatggcccaaaagcttgcacaccaaggggatagcgcacatggtctctggggatttggggggtcctttgacagtgattgttataccccaccctgccattaggaacactctacccccagtacccaccctcctgagagggcatgggggccctcagtaggctggaggtcctttacaacccagacacctgttggacagagtggaagagacgagtaacagacaagggtccctgtccacgatgggatctgggctgccctttgccctcatggtggacgtgtctgctggggctttgtaccccagtttggtcagacaggacatgggctcacccaccagctatggggtctctccattgctgctcagacgccaggtcccaggttgcagtcctgtgatggcagtacactctctcccggcagatctcccaggtctgccagctgtgccagcagtccccccggctcttctccaaccatgcagcacagctgcacacattgctggtgagtaaccctgtgacaacaccccgggagaatccagaatgttctcagtaagtaagtacctaaccagatccagaacattcccagtgaaggaccccctgacagcaccctaatcagaatccggaatgttcccataggtaatcatataaccttcccaggcacgatccggaatgctcccagtgagcatcttgtcccaccccacattggcttgggtctgaaaggtggggacagtgagcatattacctgccttgcagctggctcggtagagccattgtcatactcctccagggcagccgtgcaggccccgggcacaccacgtgtctctgatctgagccccctccccaggggccggccctgatgacaacaccaccttcttccagggcctgtactgtgtctctgtcaactgcatggacaacgcggaagcccagttcaccacggccctgcggctcaccaaccaccaggagctgtgggccttcatcgtcaccaacctggcgagtgtgtatatacgggaaggaaatagacaccaagaggtactctacagtctgctggagaggatcaacccggaccacagcttccctgtcagctcgcactgcctccgagcagccgccttctatgtgcgtgggctcttctccttcttccagggacgctacaacgaggccaagcgatttctgcgggaaactctgaagatgtccaatgctgaggacctgaaccggctcacagcctgctccctcgtgcttctgggccacatcttctatgtgctgggaaaccacagggacagataaagcaagatgtgtgtcttggcctgtaaagtttcacgtgatctgagggctccctcagcatggatgctgttaacaaacgtggtgcccgcccaccgcaacacacagacacataactgtgtggagagtaacgacatggtggtgcctgccatgcagctcgccagcaagatcccggacatgtcggtacagctgtggtcgtcagcactgctgagagacctgaataaagcctgtgggaacgccatggatgcccatgaagccgcccagatgcaccagaacttctcgcagcagctgctccaggaccacattgaggcctgcagcctccccgaacacgacctcatcacgtggacagacggtccaccccccgtgcagttccaagctcagaatggacccaacaccagcctggccagcctcctgtgaggccttgatggggccatccagctccgcagggcctgcgcgtctccggcttccacccagacggcactcaagcctgcccccgaggcgtgcttccttcctgattgtctctagagcttccaagtcctgggaatgtgcggggccagtccctgccctcccaggaggggtggtagccgttcccacctcgcagcaggacccccagtgcagaggctcacaggtggcacacaggcgctgtctctccagagccatccttcagagtggacctcagtgccagtcctgcctcagcatctgggtcacgtcggccaggagtagggtgcaggcctccagcaggtcctaatcctgtgtgccagggcaggcagtgccccaggggcaccacgcctgactctccatcacccaggccttgatgccgagcgggagtagagtgtttcctctgctcaaggcaatttccagagcccggatgccagtttctggcctgaatttggagggaagaagtaatggccctagtgtgggacgaagcacagatcccagcacttttcccagctttctctccagcatcagtccctgcagcagctggggcctctggtcaggaaccctcagggacccaggaactcagcttccaaacatctgcaccttgaccggactcgccatcccgccgtgggggtgcaggtgattgtaaacacgggtgtgcatgtggatgcacacgggtgtgcggtgaagatctgtggagatggagctgggagctgaggctcctgttgcaccagccaccttcccccatcttgtggctgctgaggggcaggaagcgggggagtgggctcgtctcctaaatttaagatcacctcctcagctagcttagagtgcgtggcacgggccccccgcccccgagatctggagcccagggactttcttcctggcagatctgtggccttccctgctcagcctcttggtccccccactccctccaccgcctcaccttccctgctgggtctctggggcacagtgtgaaacccgcaccctagccaggccccagggagcctccgctgggcccagacagcagcgtttggttttatccacttttcttggataatcaggaggtgccccagtggtcacagtgtggcattccgagttggggcgggtggtcgggtcaagatagcagcagcaggtgtcagggctcaagacaccaccccctccagcttctggggcccaggagcctctccctgctacagggggtgggggtcctgctcagcagggtaggtggtggttttaggtcttgtcaccctcactcagtggaactgcctctgggagctttggcgtctgtgactaaagggacgctggattgctcaggtcagctgctcggggctcccaggctgggtgtgccttagccacaggcagggctgtcaataacccccttcctcactggccaccacctgacatcagcaccagtgacaggctggtcagagggcggggctggtgagggtttgtcctaagaggaccaccgccatctctgggtctccagggggagagcctggccctgtcctttgctacccagggctgcccccaggcccatgaagccaataggagagcgtgtggcactggcccacaaactgaccctgtcctgtcttcctcccgagccatggcctctgctagctccaccttgaaggagccccccacatcctcccctacatcccagagatgccaccacttgtgtctccacaatgtgctcctgcccacccgggttccgcactgtccgacccctgcacaccactcatgtcaccacggcgtgcatcatgttcatccccatctatttatttaagcctttctttgcttgtagggcattttgtatgtagagcagttgaaaacagaacctcagaacttaacatctgtcctgatgttaaagtgcttttcatgaccaccctgttatctatgtatatgtaaagttaaggatgagatcttaagtttacaattaaaaactcagtactcaat

SEQ ID NO: 1308 - DNA, 7666 bp, Homo sapiens
aacttgggcagaggtcaggggtcacgcgaggtcagtccgtcgggagggctagggagatggtcacgaaacctgaagtcaagagttaaggcttgttggcttctggtgtgattcccttcagtacggcggcaccgtggaagtgcagactttcacagggggtgtggtctcagctcacacaggtgctccagaggctggtggacctgagcggaggctgggacgccctggtgggccccgggccctggaaggcgggtcccggtggccggtggcccagaatgaggccagctcccagcatgccctgcagccggacgccagcccctcggccagcagtactggtgataacaacccagtcattcttcaggcatccaagggggagcctgggagtgggaccatgcagagcagcccctcccctgctcaccctcagctcccagtcctacagacacagatggtgtcggacggcatgacaggcagcaatcctgtgtcccctgcctcatccagttccccagcctctagtggggcaggcggcatctccccgcagcacatagctcaagattcctcactggatggacctccaggccccccagatggtgccacagtgcccctggaggggttcagcttatcccaggctgctgacctggctaacaagggcccgaagtgggagaagagccatgccgaaattgcagaacaggccaagcatgaggccgagatcgagactcggattgctgagctgcggaaggagggtttctggtcactgaagaggctgcctaaggtgccagagccccctcgccccaaaggtcactgggactatttgtgcgaagagatgcagtggctctctgctgactttgctcaggagcgccgttggaaacggggtgtggcccggaaggtggtgcgcatggtgatccggcaccacgaggagcagcggcagaaagaggaacgggcccggagggaggagcaggccaagctgcgtcgaattgcttccaccatggccaaggatgtcaggcagttctggagcaatgtggagaaggtggtgcaattcaagcaacagtcccggcttgaggaaaagcgcaaaaaagccctggacctgcatttggacttcattgtggggcaaactgaaaagtactcggaccttctgtctcagagcctcaaccagccattaacctccagcaaagcaggctcttccccttgcctcggctcttcctcagctgcctccagtcctccaccccctgcttctcgcctggatgatgaagatggggactttcaaccccaagaggatgaggaagaggatgatgaggaaacgattgaagttgaagaacaacaggaaggcaatgatgcagaggcccagaggcgtgagattgagctgcttcgccgtgagggagaattgccactggaagagctgctccgttcccttccccctcagctgttggaagggccttccagcccctctcaaaccccctcatctcatgatagtgacacccgagatgggcctgaagaaggtgctgaagaagagccccctcaggtgttggagataaagcccccaccctcagctgtcacacagcgcaacaaacagccttggcatccagatgaagatgatgaagagtttactgccaacgaagaggaagcggaggatgaagaggatactatagcagctgaggaacagttggaaggggaggtggatcatgccatggagctgagcgagttggctcgagaaggtgagctttccatggaggagctattgcagcagtatgcaggagcctatgccccaggctctgggagcagtgaagatgaggatgaagatgaggttgatgctaatagctctgactgtgaaccagaggggcccgtggaagcggaagagcctcctcaggaggatagtagcagtcagtcagactctgtggaggaccggagtgaggatgaggaagatgaacattcagaggaggaagaaacaagtggaagttcagcatcagaggaatctgagtctgaagagtctgaggatgcccaatcacagagccaagcagatgaagaggaggaagatgatgattttggggtggagtacttgcttgccagggatgaagagcagagtgaggcagatgcaggcagtgggcctcctactccagggcccactactctaggtccaaagaaagaaattactgacattgctgcagcagctgaaagtctccagcccaagggttacacgctggccacgacccaggtaaagacgcccattcccctgcttctgcggggccagctccgggagtaccagcacattgggctagactggctggttaccatgtatgagaagaagcttaatggcattcttgctgatgagatggggcttgggaagaccatccagaccatctctctgcttgcccacttggcttgtgagaaaggtaactggggtccccatttaatcattgttcccaccagcgtgatgttgaactgggagatggagttgaaacgttggtgccccagctttaaaatcctcacttactatggagcccagaaagagaggaagctcaagcggcagggctggaccaagcccaatgcctttcatgtgtgtatcacatcttacaagctggtgctgcaggaccaccaggccttccgtcgcaagaactggcgctatctcattctggatgaggcgcagaacatcaagaacttcaagtcacagcgctggcagtcactcctcaacttcaacagccagagacgcctgctcctgacaggaactcccttgcagaacagcctcatggagctgtggtccttgatgcactttttgatgccccatgtcttccagtctcatcgcgagttcaaggagtggttctctaatcccctaactggcatgattgagggcagccaagagtataatgaaggtctagtcaaacgcctccacaaggttttgaggccttttttactgcgccgagttaaggtggatgttgagaagcagatgcccaaaaagtacgagcatgttatccgctgcaggctctccaagcgtcaacgctgtctctatgatgacttcatggcacagaccacaactaaggagacactagccacaggccatttcatgagcgtcatcaacattttgatgcagctgagaaaagtttgcaatcatccaaatctgttcgaccctcgaccggttacctcccctttcatcaccccaggcatctgcttcagcaccgcctctctggtgctaagggccacggatgtccatcccctccagcggatagacatgggtcgatttgaccttattggcctggaaggtcgtgtctctcgatatgaggcagacacatttctgccccggcaccgcctctctcgccgggtactgttagaagtggctactgctcctgaccccccaccccggcccaagccagtcaagatgaaggtcaacaggatgctgcagccagtacctaagcaagaaggccggacagtggtggtggtgaacaacccacgggcgcccctgggccctgtcccagttcgacctcctccaggtcctgagctctcagcccagcccacccctggcccagtcccccaagtgctgccagcatcactgatggtttcagcctcacctgccgggcccccgcttattcctgcatctcggcctcctggccctgtcctcttgcctccactgcagcccaacagtggttctctcccccaggtgttgccatcccccctgggggtcctgagtgggacctcacggcctcccacgccaaccttgtccctaaagccaacaccacctgccccagttcgcctgagcccagccccacctccaggctcctctagcctgttgaagcccctgacagtgccaccaggctacaccttccctcctgctgctgccaccaccgcttctaccaccacggcaactgctaccaccacagcagtgccagctccgactcctgcaccacagcgcctcattctatctcccgatatgcaggctcgcctgccctcaggcgaagtggtcagcatcgggcagttagcctcactggcacaacgtccagtggctaatgcagggggaagcaaacctctcaccttccaaatccagggcaacaagctgactttgactggtgcccaggtgcgccagcttgctgtggggcagccccgcccgctgcaaaggaatgtggtgcacctcgtgtcagcaggggggcagcaccatctcatcagccagcctgcccatgtggccctcatccaggccgtggccccgacccctggccctacccctgtctctgtgctgccttcttcgacccccagcaccacccctgcccctactggcctcagccttccgcttgctgctaaccaggtgccaccaaccatggtgaataatacaggcgtggtgaagattgtagtgagacaagcccctcgggatggactgactcctgttcctccattggccccagcaccccggcctccgagctctgggcttccagctgtgttgaatccacgccccacgttaacccctggccggctacccacacctactctgggtactgctcgagcccccatgcccacacccactctggtgaggcctcttctcaagctggtccacagtccttcacctgaagtcagtgcttcagcccccggagctgcccccttgaccatctcttctcctctccacgtgccatcctcactccctgggccagcctcttctccaatgccaattcccaactcctctccccttgctagtcctgtgtcctctacagtctcagttccattgtcatcttcactccccatctctgtccccaccacacttcctgccccagcctcggctccactcaccatccccatctcagcccccttgactgtttctgcttcgggcccagctctgttgaccagtgtgactccaccattggcacctgttgtcccagcggctcctggacctccctccttggcaccatctggtgcttccccgtcagcatcagccttgactctaggtttggccacagctccatccctgtcttcatctcagacacctggtcaccctctgttgttggctcccacctcttcacatgttccagggttgaactcaaccgtggccccagcatgctcacctgtcctggtgccagcttcggctctggccagtccttttccgtcagcaccaaatccagctccagctcaggcttcccttctggctccagcatcttctgcatctcaggctctagccacccctctggctcctatggcggctccacagacagcaattctggctccttctccagctcctcctctggctcctcttccggtcctggcaccatcgccaggtgctgctcctgtcctggcttcatcacagactccggttccagttatggctccatcgtctactccaggaacctctttagcctcagcttcaccggtaccagctccaacccctgtgttggctccatcatcaactcaaactatgctaccagccccggttccgtcacctctcccgagcccggcttctacgcagacactggccctagccccagctttagcacccactcttggaggctcatctccatctcagacactctctttgggaacggggaacccccagggaccctttccaactcagacattgtcattaactccagcatcatccctggtaccaactccagcccagacactgtctttggcaccaggaccaccactgggtccaactcagacgctgtctctggctccagcaccccctctggctccagcttctccagtgggcccagccccagctcacacgctgactttggctccagcatcgtcatctgcttcactcctggccccagcttcagtgcagacactgaccttgagccctgccccagttcctaccctgggcccggccgcagctcagaccttggcgctggccccagcctccacacagtccccagcttcccaggcatcttcccttgtggtttcggcatctggtgccgctcccttgcctgtcaccatggtatcccggctgcctgtttccaaggatgagcctgacacactgacattgcgctctggtccccccagccctccctccactgctacctcgtttggtggcccccggcctcgacgccagccccccccaccacctcgttcccctttttatctggactccctggaggaaaagcggaagcggcagcggtctgaacgcctggaacggattttccaacttagtgaggctcatggggccctggcacctgtgtatgggactgaagtcctggatttctgtaccctgccccaacctgttgccagccccatcggccctcgttctcctggccccagccaccccaccttttggacttataccgaggctgcccaccgggctgtactgtttccccagcagcgactagaccagctgtcagaaatcattgagaggttcatctttgtcatgcctcctgtggaggcacctcccccttccctgcatgcctgccacccacctccttggctggccccacgtcaggcagccttccaggagcaattggcctctgagctctggccccgggctcgtcctttgcaccgtattgtgtgtaacatgcgcacccagttccctgacttaagactcatccagtatgattgcggaaagttgcagacgttggcagtgctgttgcggcagctcaaggcagagggccaccgagtgctcatcttcacccagatgacccgaatgctggatgtattggagcagtttctcacctaccatggccatctctacctgcgcctggatggatctactagagttgaacagagacaggccttgatggaacggttcaatgcagacaaacgcatattctgcttcatcctttcaactcggagtgggggtgtgggcgtgaacctgacaggagcagacactgttgttttttatgacagcgactggaatcccaccatggatgctcaggcccaggaccgctgtcaccgaattggccagacccgggatgtccacatatataggcttatcagtgaacggacagtggaggagaacatcctaaaaaaggcaaatcagaagagaatgttgggggacatggccattgagggaggcaacttcaccacagcctatttcaaacagcagaccatccgagagctgtttgatatgcccctggaggaaccttctagctcatccgtgccctctgcccctgaagaggaggaagagactgtggccagcaagcagactcatattctggagcaggcattgtgtcgggcagaagatgaagaggatatccgtgcagccacccaggccaaggctgaacaggtggctgagcttgcagaatttaatgagaacgatgggtttcctgctggtgagggagaggaagctggccggcctggggctgaggatgaggagatgtcccgggctgagcaggaaattgctgccctcgtagaacagctgacccccattgagcgctatgccatgaaattcctggaggcctcactggaggaggtgagccgagaggagctcaaacaggcagaagagcaagtggaagctgcccgcaaagacctggaccaagccaaggaggaggtgttccgcctaccccaagaggaggaggaggggccgggggctggggatgagagttcctgtgggactggtggaggcacccaccggcgcagtaaaaaggccaaagcccctgagaggccggggactcgtgtcagtgagcgtcttcgtggagcccgggctgagactcaaggggcaaaccatactcctgtcatatccgcccatcaaactcgcagcaccaccacaccaccc

SEQ ID NO: 1309 - DNA, 4561 bp, Homo sapiens
aaaatgctcctctttcctcctcttcctcaccttctcctggctcctgctcccagagcagcacagcgcagtaaggtacagggatatactccaactctgcccagatcactcagccagctctccttacccaggcagagcaggatttgtccatcttgaatggatgattccttttctccagggaaagggaattccacaggcttcctcgactatccatttgactatttaataattgaaagggggcaagctgattttcatggccccaggacccatcgagctcagggcacacgccatccttgtttctgatggtggagagctccggattggatccgaagacaagcccttccaaggcagagctcagatcacactctacgggagttcctactcaactcccttctttccctatggagtcaagttcctggctgtgaggaatggaactctttctctgcacggttcactaccagaagtaattgtcacctgtcttagagcaactgcccatgccctagacacagtgctggctttagaagatgctgtggactggaaccctggggatgaagttgtcatcatcagtggaacaggtgttaaaggtgccaaaccgatggaagagattgtcactgtggaaactgtgcaggatacagacctctatcttaagtcacctttgagatattctcacaactttacagagaattgggtggctggagagcaccatattttaaaggccactgtggctctgctcagcaggagtattaccatacaaggaaatctcactaatgagagggagaagctgcttgtttcatgccaggaggccaatgctccagaaggtaatctgcagcactgtttgtattccatgagtgagaagatgctaggatccagggatatgggagccagagtgatcgttcagtccttcccagaagagcccagccaggtccagttgaagggagtgcagtttcaagtcttggggcaagccttccataagcatctgagctcactcactctggtgggagctatgagagggacatgcacggagatgagatatatctcctgggaggcaattcatggaaggaaagatgactggtcaggacatggaaatataataagaaacaacgtgatcatccaggtttctggtgccgagggactctccaatcctgaaatgttgacaccatctggcatctatatctgcagtcccaccaatgttatagaggggaacagagtgtgtggtgctggctatggctactttttccatctcatgaccaaccaaacatcacaagctccgcttctttccttcactcagaacattgcacattcttgtaccaggtatggtctctttgtataccctaaatttcagccaccttgggataatgtcactggcaccactctgttccagagcttcacagtttgggaaagtgcaggtggtgcccagatttttagaagtagcaatcttcgcctgaaaaacttcaaagtttattcatgcagagattttggaattgacgtcttggaaagtgatgcaaatacttcagttactgacagcttattacttggtcattttgcccacaagggaagtctgtgtatgtcatctgggattaaaactcctaaaagatgggaactgatggtgtctaacacaacctttgttaattttgatctcatcaactgtgtggccattagaacctgttcagactgttcccaaggacaaggtggatttactgtgaagaccagccagttgaagtttacaaactcttcaaacttagtggcatttccatttcctcatgcagcaattttggaagacttggatggatctctgtctgggaaaaacagaagtcacattcttgcttctatggaaaccctttcagcttcttgtttggtcaattcaagctttggtcgggttgtccatggcagtgcctgtggaggaggtgttctttttcatcgtatgtctattggtttagcgaatactcctgaagtttcttatgatttaaccatgactgacagcagaaataaaacaaccactgtcaattatgtacgtgatacattgtctaaccctcgtggctgggtggctctgctcttggaccaagagacctactcattgcaatctgagaacctttggatcaacagatctctgcagtactcagcaacctttgacaactttgctcctggtaattacctactgctggtgcacacagatttgccgccttaccctgacatcctcctaagatgtgggagtcgagtgggtctgtcttttccatttcttccatcaccaggtcagaaccagggctgtgactggttcttcaatagccagctgaggcaactcacctatctggtttcaggtgaaggccaagttcaagtcattctccgggtgaaggaaggtatgcccccaactatttcagcttctacctctgcccctgaatcagctttaaaatggtccctccctgaaacatggcaaggtgttgaagaaggctggggaggatacaacaataccattccaggccctggggatgacgttctcattttacccaacagaactgtccttgtggatacagatcttccattcttcaaagggctgtatgtgatggggaccttagacttccctgtggacagaagcaatgttctgagtgtggcatgcatggtcattgcaggcggggagctgaaagttggtactttagaaaatcccttagaaaaggaacaaaagcttctgattctccttagagcctcagagggagtcttttgtgaccgtatgaatggaattcatattgacccaggaacaattggggtttatgggaaagttcatctttacagtgcttatcctaagaactcctggacacatcttggagctgatattgcctcaggaaatgagagaattatagtagaagatgcagtggattggcgcccccatgacaaaatagtccttagctcctcttcttatgagcctcatgaagcagaggtcctcactgtgaaagaagtcaagggccaccatgtgaggatctatgaacggctcaaacaccggcatattggaagtgtacatgtcacggaggatggccgacacattcgtttggctgctgaggttggactgttgacccgaaatatacaaattcagcctgacgtatcatgtagggggagactgtttgtggggtccttcaggaagtccagccgagaagaattttcaggtgtccttcaacttcttaatgtggaaattcagaacttcgggtcaccattgtactcatctgttgaattcagtaatgtgtcagcaggatcctggatcatatcatctactctgcaccagagctgtggcgggggcattcatgcagctgccagtcatggagtacttttaaatgacaatattgtgtttggcacagctggccatggcatagatttagagggtcaggcctatactgtcactaataaccttgtggttctgatgacacagccagcgtggtccaccatttgggtggcgggaatcaaagtgaaccaggtaaaggacatcaacctccatggcaacgttgtggcaggatcagagagacttggctttcacatccgaggccacaagtgctcctcttgtgaactgctttggtctgacaatgtggcgcattcaagtcttcatggccttcatctctataaggaaagtggacttgacaactgtaccagaatctctggcttcttggctttcaagaactttgactatggtgccatgttacatgtagagaacagcgtggagatagagaacattactctggtagacaatactattggtcttttggcagtagtgtatgtattttttgctccacaaaattccgtcaaaaaagtgcagattgtgcttaggaattcagtcattgtggccaccagctcttcttttgactgcattcaggacaaagtgaagccgcactcagccaacttgacatcaacagatagagctccctccaatccaagaggaggtcgaattggtattctgtggcctgtattcacctcagaaccaaatcagtggcctcaggagccatggcacaaagtgaggaatgatcattcaatttcaggaatcatgaaacttcaagatgttaccttttctagttttgtgaagagttgctatagcgatgacctggatgtctgcattctaccaaatgcagagaacagtggaattatgcacccaataacagcagagaggaccaggatgctaaagataaaagataaaaacaagttctactttccttcattacaacccaggaaagatttaggaaaagtagtctgtcctgaattagactgtgcaagtccaagaaaatatctcttcaaggatctggatgggagagccctgggtctgcctccaccagtttctgtatttcctaaaacagaggcagaatggactgcatccttcttcaacgcaggtctcctggggacaaaagaagagttcccttatgttctttatcctcttccctgaagcaggagatagtatatatgttcggaggaaaagatgcatctaagaatattatagatgctgcatccatcagagtactgacatcctaacctagtctaccctgatgctgtatatatctcaacagcttaaaacaacaaaggcttatttctcgtttgt

SEQ ID NO: 1310 - DNA, 3596 bp, Homo sapiens
aataccgacagctgaaatgctctaatacacttaacccacggaacatcacagctgagccttcttgccttatacacactcagcacacttccattagcctacagctgggcgaagtcatcccccacgaagcctcctttataataatgcatcaaatgcctcacgtaatttgtccaatgctataagaaggagaaaaacagattggttgtgtgggcactggaagtacggtttctaccgaacaattgcaaatcagaagccgggaaccgtagagcacagaacacccgtcatgtccacccgccatttccaagccccgtgctgggtacaggcgctccttggtgcgtggaacagacagccctgtgcccagggagctcgcagcctaggacgggacaactggcatcccaggagggtgtagggctgtgagtctcaccggggagattcagccccgggacatggggctactcagaagatatttttggttgtcacgactggagggcaagtgcttctggcctcttgggagtgggggccaagcggccccacctcaggtcagtgtccagccagactgtctgaccagcgcctgttgaggggctctgaagggccatggcccggatgaaggggctccaggggcagggtggccagggaaggcctctctgagcaggggactttcacagagtgagcggaattgagatggcccggttcctctgcaggtccccacagcctgggaagaggagaatctgagagcacggccgcctgggggcaggccgaggcaggcggatcctgagggagcagccgcctggtgccaggcctggggaattccaggaggcagaggcctcaaaagccctcctccaggctccgagttcccagcagcccctgccacattcctccacctgggtgggcaggggtgcaggggctcagtgcattcctggtggagatagggaggccagcctgcggcctgtgccagcctcctgcggggcctggggagccctgtccaggctctgccgagctcggcatattggagctgagccagtcggcctttgctggaacactcaggcggaggtcgcctttcgcctttctgtgtggggagaagccacttgcagataaggcagggattcaccagctccggggggctggcaggacatggccacacttcacctgcaaccaagcctccccatctgtaaaatacagataacaagggggccaggcggtggctcacacctgtaatcccagcactttgagaggatgaggcctgtggatcacttgaggtcaggaattcgagaccagcctggccaacatagtgaaaccttgtctctactaaaaatacaaaaattagctgggcgtggtggcgagcacctgtaatcccagctactcaggaagctgaggcaggagaatcgcttgaacccgagatgcagaggttacagtgagccgagatcgcgccactgcactccagcctgggcgacgagcaaaactccatctcaaaaaacaaaaaaaaacaagagcaggtccctcgcaggagatgggagccagctccgcgcccggcctgatgtcggctgcacgggctgcctggctctcctgcacagaggtgggagggaggcacgggggggcccaggtcaagaaaacacaacccccacatgttcagggggctggaggtgggggctgcgcctctgacctgaagctgcccagcaagccctttgtggagccaggagcaggcagtgggcaactgggccgacaggaggctccgtggcagctgctctcttgcacgccatccccactgccactcccgggttctgagagagagccccatgggaggccacgcacagacccctgacctggctgccgggggtggtccagatcccctgcgagaggaaacgtgggcccccagtggaccccagcaccatctgtggtcagcgggagccttccaagtctccgtgtgtttacattcccccaggaaatagctccccagaagagctgcaaatattttcttaatgttggaacttgtggcaaacagaggcctggagtgggcccacccacactttgcccctccacacatcgggggcccagtgggatcctggggttacctcctcacctggcccaccccctccccctccccctcctggcaggggacaggcacatgggggcccagctggggcatcttcctgccggagctggggcagccagcccaggggattcagtggcactgccatcctcccacctttcagccttcctttcgtgaaactgggctggcaataggtggaggtggctgaggtgttgcttggcggtttgaatcaatgaagaccctaggggacgggggtcaggccctggacctgcctagtaactcaggctcctggcagaccgggctgaagacagaggcagctgcggggctgtctctcccgccccaggctgagtcagtgtgtagggctgggtgtcctgggtatgtgatggccctaaacacaggcccccacctctctgtgcatgagcacaggtccagctggtgttggcaggctgtgtgggtggcccataagcaccaagaagtaccctgcttctactgacctccacctgaagactcccaggcacctgcccgcctgaactggctctgcaggctcactcagcatccacgtgctcctccctctccccctccacactggcgaggggccagtggccatggcacatcccaggcctccggtccctggtccctgggcagcccctccaagagcctgcctgtacagagtgccgctcctgtccactgatgtctactgtgtggatggaccacgtttctctccccagtcgaccctggatggccgttcgggctgtttctgcctgatggctctggtgcctggcgctgccgtgcgtgtttacccacgagtgtctgtgcagagacgtgtttacgcttctctctgcagctaccaggtgtggagctgctgggccgtgtgcaactgtgttcagtcctttgaggaaccaccagctggtgtcctagcagctcccacactggacaccacactggtccccgcaggatcctgcctgtagttgttattgtcttacttcctgattctgttggtggctatagagtgaggatcacggtgtgggcctcaggcgggcataaaaagaggctggagtctgggcactgggcccttgcctgccacgcctggtgtgggaggatgtgggtcccggggcagtgggaaggtgatgggagaggggcgatcggtcattcagccaccatcgtccagcagcccagcgctgggctcggacgcagcagtgagcacacggagctgcctctgccttatgtgctttgtctggggggctgatgtgggtcaggagatctcatcctggacgcccaaggacacgctgcactgtcctctgtgagccgggggcagcaacatgcctcccgggcagagggcacaaggacagagggcccatccctgttgtggatggcactttcagtgtggaagtgcgcggcctgggagccgtcactcctgggatcctggttcactgcagaatctggaccagctcctgggcaggaaccgtggcccattgtgtcccagtggtggcaccagcccccagactaagccaagccccacgttcgatccagtcaaataaagtgaccgaggcgc

SEQ ID NO: 1311 - DNA, 3634 bp, Homo sapiens
gatatctgagaatagtaggaaaaaaattgggtaatcccaaaataaatcagtgatttcagtatgaagttttctcaacataaatctgctataattaaaaattacaggccttcaggaagtgtcgagtctgggacgcccagcgcgggcccgagcagggggaagggaagcgcagctcggtccgcgtgggtggaggggacgtgaagccgccctgagatgatggttgaggaagggctctacggctcccaagccaggccaaatgcctccggcggccgcgcccgggcgccccttcccctgtggggcaaccctagcttgggacgcgtgaaccacctccgtagctgccccaccagcacccccagccgtgcgcccctgcaccatgcagctgccctgcgcatggagccgcgagggacagcaggcccagccctcagcaccacctgcctgccaggaggttcgggaaactggcgccgcagcggagagggcatctgtccaacgcctcccccggggctcagctgcgggcccccaggcataggcacccatgacccttctgtgttgtttgtctttgtatagtctgcagatgtggatcctgactcctgagagaagtagctcaccgtgacgaagctgcgtttgcttttatcgatttgcaaatcaaagaagggggacatattgggagaaggccccccaaaatctggccataaactggccacaaaactggccataaaatctctgcagcactgtgacatgctcatgatggccataacgcccacgctggaaggttttgggtttaccggaatgaaagcaaggaacacctggcctgcccagggcagaaaaccacttaaaggcattcttaaaccacaaacagtagcatgagcgatctgtgccttaagggcatgttcctgctgcagataactagccagacccacccctttatttcaggccatcccttcatttcccataagggatacttttagttaattgaatatctatagaaacaatgctaatgactggtttgctgttaataaataagtgggtaaatctctgttcggggctctcagctctgaaggctgtgagacccctgatttcccactttacacctctatatttctgtgtgtgtgtctttaattcctctagcaccactgggttagggtctccccaactgagctggcctcggcacttctctttgccttaaaaacaggtacagcggaccttcctggcatcagaaaaaggcctccagaaaaagagacacaggtactagcaattccaaattatccagagcccttctaagttgtaagatctgaaagaaatgtctgccatctatattctcagccacacttagtttcttaatctgcaagatggaattaataatagtacttactttatgatgctgttgcagaaattcactgagttgctacacgccaaacactgagaacccagctgggcatataataagcattctattgcatggcattattgccatcatttttacttctattactgctactgcttgtaactgcttgtaactgtttgtgcttttttgatatgaaagtccaccatcagggagcactgtagtggaaaaggtattaggccaggcatagcctttagttctctggccttgggtccttcatctgtgatattcagttaacaatacctagccagtaggggtgttaaagattaaataaatgtgagaatgtgcctgttgcttaatcttcctcaaagggttatggactctcagagccagaagaaggtcatctctcctttgctcctcgtatgctgggatctgccacatcaatggcaaccgctgggcctccagaatttgctccagggtgtttggaagtcctgacaccctcctgatcttctctgtaacatgcacactttggcctgtgtcagtttgctggaaccacatcaggccggccctcttcctgggacaaaattctttctttttctttctttctttttctttctctttctttctttttctttctctttctttctcttttcccttccttccttccttccttccttccttccttccttccttccttccttcccttttcttttcttttctttctactgtgacatgatcttggctcactgcaatctctctctcctgggttcaagtgattctactgcctcagcctccaaagtagctgggattacaggtttgcaccaccatgcccggctaattttttgtatttttagtagagacagtgtttcaccatgttggccaggctggtctccatcacctgatctcaggtgatccacccacctcagcctcccaaagtgctgggactacaggcatgagccaccacgcctggccgagagacagttaagttatactttaaatgataataggcctcccccaaaactcagctgcttttgtaaagctaatgggaggccatcaggctgggggcaaggaggagagcccggatcctgctaaggtgcagacataaacgagtatcagccattattctggaggttataagatatgcaccttccccaattacccctgcaatcacaccattattgtagattggcccttagagtatcttttcaggttttttggcatgtctgacactcatggctctacttggacccaccaaccctgctcctatggctccacccagaagccattcagcctagaggacagctctgaccccccctgtgatttcatacaatcagcagcaagtaactgttacctcaccatccccaccccttctgccagactgcctttgaaaaacctctaacctgtgagcacgagatgattccagaacaaactctgtctcccatgtggcatgaccagccttgggtctcttaaactttttctccactataatgccatggtctttatgcagcaggcaggaagaattcaggtggttataattccgtatgtgctttttgaacatttttctactgggctattgctctcttcataatgatttctttaacttctctctataaggaactgatttcatctgaaattgaagagacaatcagagaaaaactatagaccactcatgatggtcgttatatgtgcttggctgggccatgggtcccagtgtttggtgaaacacagcagcagatgtccctgtgagtagatgttgctttgaaggtatcttttagatgtgatgaacatttgtcatcagtagactttgagtaaggcagatagcccgtcacaatgtggatgggccttatccaattagttgaaggcctttgaaaaaagactgagatcccaaacgaagaaggaattctgcctccagacagccttccaactcaagtagcaacataacctcctccctgcggctctagcctgctggcctttcctatagacttcagacttgccagccccacaatcatgtaagccaattccttaaaataaattctctgtcctgtttttgccccctctctctttctgacagcacacacatgccctcttggttctgtttctttgaagaaccccaggaaaacacacaaaggaaaaacaactcgatagacagaagattcttcaatgacaacaatggaagccatcttcaccattcaactaaacttgaatgggatattatcaaacttaaaaaaaaattatcaactgatcgtgtaatcagtttcatcttttaagacaggaaatgaaataaagtatttacagatg

SEQ ID NO: 1312 - DNA, 4842 bp, Homo sapiens
accaactcttgtaatttaaccccttcaggtgagcaggctgattgatgaattgcagacagctatcaaaagtaacataggtcatctctgtaaacttggcccccaattacaggctgagcaggagcaattctcctcttatgtctaccaacacattaaaagccttccagcaaacacgcttgtcccaggaggcctgcagcttaaggtatttgaaaatggtaaaaacactggagagatctctgttggtatcagtaaaaaagatttgggatcggatagcccaattcaaactgaccatatgatggaaagattacttctcaagattcatcaaaggcttcaaggttcttccatcaacccaccaggcctcaattattcttcaatgcggctttttgatgagaatggccaagaaattaagaatccactttcgctgaagaatgagcaaaaaatttgggtctcttatggtagagcatacagatctccactaaatcttgctttgggtttgacctttgaccgagtgagtgcatttgccagaggtgatatcatggttgcatataagacctttttggatcctaatgctgttctgctacctggatgtgttgggaagtttgtgagggatttccaattaatttcaactgtaccagtcaacagatacctgaccagtttgaaaaggtggacttggagaaccattttctacagaacaaggtagatcccaatattgtccttcatgcctctgtttccattggaaagtggagtttctcaggcagtgaagcaagcagcaggagtcaaatagcgccatcgatcctgtggcctgtagccagtgtgtggctgatcaccaagactggaatgatcctgagccgagcgataactcagggctgcctggctattggtcatcctatcagagtcaaggctgctgagggaacatcactagaaggatataaattaatcttacagaaaagacatagtggagatgactctcagaagtgggtgtttggaactgatggttgcatttattcaaaggcttatcctcagtttgttctgacctacctagaggagctaaatgcacaagtagatgtgacccagacagagtatcacattcaccatggtgcctggaccacagctcatcaggaacatggcagaaacttagcagaagaggttctgcaagaaagtgccagcaaccttggtctgaagcaactgccagaaccctcagacacccatttaatgccagaaggttctcttgaggagacgggggagctgacagtagcactggtgaggaaactggaagagaaacatcctaaggcttctgctcagagttcactggaaaaaattagaggaactcaagttattttctcactctatgggggaaaagttgtgaattgaaaaattgtgcttctaaacacttaaaggagtttgattggccaatacaaggactgcttgttccgagcagtcctcccatgaagaaacccatctgtaagacaacagagccatatgcccctgtgcgactcagagttttgcagaatggagagaagaataaaaacagatccgttactatccttggtccagatatctcacctggacggaaaacgcaaagtgttcacactgaaaagaaagagaaaatctgtgtcactaaatattctggaatagaaatggaccaggtagaatttcaccaatttttggaaaggtgcactgagattttaaatttaccttctgcagctcggagattgtacaatgaaaaggggaaggaaatatttgccttaaaaaacctgcaaagagatgaactggtgtatgtttcatgtggagaactctggatcaatcctgacctgtccattgctcagcaaaagaaacaaatattcctgaggaacctagaatcagacattgccaaaattcaaatcttctgcagcacacataaaatagaagctcttgttttagaagtccaaagtgacattgtatctggaagcaagcttgctgtgcataaacctgtagcaatttttggagaagagaagcaagttacagaaccggaagaaaagcaaatgcaagaagatcctctaacaacggaaaatgcttccagtgaaattctagattcacacgtaagagctcatcttcgaatgaaggcttgtcacacacttcccaggtatgcctggcaggaaacttcacatgactttgatgaggatgacagtcttccaaagaaaacggaaaaagggctctttgaaaatgtggaaccacagaagaaacacagctgttcaccaaagcatagtaaattgcacaagcattgtcatcagcagttcgaatacagagatgggcagattataagccatgctgctcctcagctagtcttgggggttcaaggtcccaatctccgatcaggcatggaggtggttttggtggagaagaaatctgatggtagtcatcagcgctggatacaccaggaagacagcaggacctttcaccttgtgagtaaccctgaccttgtgctggcagtgtctatgaccaagactagaaatgaagtttgtggctatccagttattgttcagaaatataagccgtacaacaatggagctgccaatcaaaggtggcattacatgaaaaatataaaagcacttgtggcctttcatagcactgccttggataaggaaattacatcagcaaattatgctggtgtctgtacatcatctgtgattaaagaagaaaacattgatcaaccaggatactgttatctctcacctgatggaaagagaaaaactatgctctgcttggcttgtggacaatccatgagaacagagaaaggactgaaacaattgcttccaggggttccattcctctgtatttcaggcaccaagactcagaagcccttcttacaagggcccttcaaggtcatcagtgtggctgaggttgatttgtcgtgtgacaaggctgaaaaaactctaagttactaccaagcacgtctattgtctttacggatgaagacctgcacgcaagctgcatctcacagtggcatggcagccacacaccagaaggcagtgaaaataattgcatacaaaaatggggatgggtatcgtaatgggaagttaattgtggctggaacattccccatgcttcttacagaatgcacggaacaacttgggcttgccagagcagcctccaaagtatataccaaagatggaaccccaatctttaccttgcgtgatttggttttatgggctctagatgaatcctttctccagagagactctgagaaacaaaagcaagatgcagctcctgttggaaaagaacagataattgttgaaaaaaatccaagaatgaaagtgaaaaacagattatttgcaaaatctgtgacatccgatagtttggatggtatagacaagtctttgcttaccctcatcctcagaaatcctattgccatctgggtgtcttgtggtgaaccatttctacctccaaatgctttgcaaagcagaaaaattagagaaacagaactggctaaaaaaggacagaattttggctgatctagataccatgagacacaaaatgagacagttaaaagggcggcgagtagcggcatgtcagccagccaccatggttcctaccaagagccctgtgcagcccgtggtggttgaaggaggctggaccgaacagactcaacaggaaattaaactcatggaacttataagacatacagaggcacacctttctgaaatccaagaaatggaatccaaaataaattttccaattgcaaccaaacgtatagcagtcaagccgagcaacctgtataagcagcccaacacaaaacgagtgtggatttatctaaatggaggcagacctgaagatggcacttatgcctggggcaaaactatttcagagctgctgcaagactgctcctctcgtctcaaaatgacccacccagctagagcactgtacacccccagtggagagccaattcagtcctgggacgacatagagcgagatatggtcatctgtgtgtctatgtgacatggtttcaaaaccccaaaagagttaaaacaactgatggagatcagagcaaattatgccagaatccgaaggcagcagggccctcaagccacagacattgtggtgtcaccatccacgaagctgctgtctctggcacatctccacaattaactcctatcagaaccatcggattttctgctgtatttttctgagttcttggttgcaagcaacagaaatctatcatttacaacaaaagcaacgaggagattacatgaagcgaaagagggggctcacagaattgaagggatgccggagaacaagaagctgaagaaaatctcaacattgaaggagccttggacaaccacctaatcctatattcattgaatagttgaactgtatccacccggcgtaatacccatggcaactggtcttccacatatgatgaaatagcctctgagaggttaagtcactcacccaaaatttccactgccaggaagtagtagtgatgggattcaaacctgggtggccctgagaccagagcttccgctctacccacttcactatacttctcttactacaggtacacagcccttttatctctgctttcctgaagcagtctttgtaagtggaaggattgtactgaaggctcagcagcaatagagctaatgaaatggaagctgggcagtgctgagtccctgggtcacagttaccgagaggaaaagtgggctggctgagatttcatcccaggctgcctgctacaaagctcctcatctgcctccctcgaatcaagtgctacatccaataatagggactaaacccacatctgtagcttctgagtcaagagatctgaatagagaaatcagcagttaaaataaaattaaaatagctctg

SEQ ID NO: 1313 - DNA, 3337 bp, Homo sapiens
ttatttgggggatattttgttatggctggaattaatgtgtgtgtctttatcatagagctagaactaatgctgggtcctagcatatgagtaggaacaggaaaggtggaacagaatccaggaggagaaagtagtttgagcaaagaggccaaggcaagaatgagcactgagtatctggagaataatatggagacaaatgatggaaagtaatgtgtagacaagctggtcagaactggctctgagaccttaatattttggaggaaagtggtcaaaagttcaaagtttgagattggaaaagttaacttccttacacttctaatgatcatactggcttcagttaagctataaattaaaaatgggcatggctcaacagaacttgagtcctgtcctctcgcttttctccttaggcagcatgagcttcaccatttgctttaccacctccaccaactaccagtccctgcattccatccagccacacagccacagcgtccagttcatcagcagcacagccaaagtctatgcagtcctcaggggcttgggctcccggacctcagtgtccttctccaccagcttctggggtggctgggggtctggaggcctggctgcagggatgccaggggtctggaaggaatggggtacatccagaatgagaaggataccatgcaaggcctgaatgattgcctggatttcctacctggacagagtgaggactctggtgaccaagagtcagaggctggtgagcaaaatctgagagcacttggagaagaagagaccccaggtcagagcctgggggcattacttcatgaccatcaaggacttgagggctcatatctttgcaaattctgtggacaatgcttgtgttgttctacagattgacaatgcccgtcttgctgctgatgactttagagtcaagtataagacggagctgatcatgtgcctgtctgtggagagcaacgtccgtgggctccacaaggtcactgatgacaccaatgtcactcggctacagctggagacagagatggaggctctcaaggaggagctgctcttcatgaagaagaaccaagagaaggaagtaaaaggtctacaagccctgattgccagctctgagttgaccatggaggtaaatgcccccaaatctcaggacctcagcaacatcatggcagacctcccggcccagtatgatgagctggcccagaagaactgagaagagctggacaagtactggtcccagaagactgaggaacacaccacagtggtcaccacgcagtccaccaaaataggagctgctgagacaacattcatggagctgagatgtatagttcagtcctaagagatcaacctagactcaatgagaaatctgaaggccagcctggagaacagcctgaggtgggtggaggcccgctatgccatgcaaatggagcagctcagtggggccgtgctgcacctagattcagagctggcacaggcccaggcagaagggcagcaccaggcccagaagtatgaggccctgctgaacatcaaggtcaagcgggaggctgagattgccgctactactactactgccgcctgctggaagatggggaggacttcaattgtggcgatgccctggacaacagcaactctatgcaaaccatccaaaagactgtccaggatagcggatgacaaagtggtgtctgagatcaacaacaccaaagttctgaggcgctgagccagcagaagcagggtacactttggggagcgggaagccaataaaaagttcagaagtcattggatgtcaaaaataaattggtcctgtttggggtcagaagtgttccaagaagcccagcatgacagccagatgagaaactgacatggcagatgacacctcttctccaggttgctggaacagtgggtcagatagacttctatgtatttttcttctccttaaggagctcatagaaggaacaaagtgcatcggacattctacccttcatcagtttattagtctaagggtctctgtttgagcagatcactagttccaaagaccaaataatctttctttcttttttttttttgagattgattctccctctgtcgcccaggctggagtgcaatggcacaatcttggctcactgcaacattcccctcccagattcaggtgtttctcatgcctcagcctctggagtagctgggatgacagatgtgcaccaccacacccagctaatttttctatttttagtagcgaggggattttgccatgttggccaggctgttattgaactcctggcctcaagcaatccacttgcctctgtctcccaaagtgctgggattacaggcatgagccaccatgcctggcccccaataatcttaaaaaagagtatagtggccccatggtaactctgtcttctgccccagaacagccctggctggattatcctcctggtagaaatcaattttgatcatcctggcaggaaatcaggatacagggcagcttcagacaggagtaccacatccttctcagaaatcaaccaacatgagatgctgagtgaaagctggtctcttggttaagagacggatgtaggcagggctggtaacaagtagttagaatcaaagactcaaactaaacctgctagctaacaccagcttcactgatggagataccagagcaggtaggttgcagagaggtaatgacatttgacaatggtcaagagaccaacatggaggttctcattggagcctccaaaatggaggctctcttgttggagctacaatggtttggggatcagagcatctgggctctattcttggccttttctctcaagttcatgactctaatacagccccttctcccctttggcattagttttctcatctataagaaggggtaatgaattttactccccatcccaggtccccttactgcagtatgagaagggtgagatagggactattttaaagggctgtgagagagtctccagagagggctgtgatgaacatctgtattcctcatggaatggacagcccaggaggatggtacatttaagtaagacaaagcaagactcttctaatggtaagagatgtaagaccagtaaattggatcacgtgccctggatgatatgtaattccctcatagtgctctagcctcaaaatcccaaatattggtgaggatctcccaaagctgctaatgtcaaaaactttgattttactgtagttaaagtgatggaaatcattagctttaaattactggggaaatataaaagatgatttgaggggtaagctctatcaattatgtacttaagcaagaaccagactcaagatcaggaaaaaaaaaataaataaaaccaaatacgttcataattag

SEQ ID NO: 1314 - DNA, 4916 bp, Homo sapiens
atcacagggccatgccctcggggctcaaggccagagaggctccgcgcttccaggacccgagagctaaagataatgaatgggagagagcgagactggaggaggtaacgaataagtccccaccaccttgcccataacgcgttgctttcagtcacgttccgcgaactggcgaagttataatattatgatcactgtttttaatggaagatgattgaaagtgaaaacctaaaccaagaagaaataattaaagaactgtgtttgtgcaatggcttatcttatgagatggttggacaagaaggatcagatacatcaaagttggagatgtttttcttagggtatcctcgtatagttggattatcattatttcctaatttaacgagtcttaccattgttgctcaagatataaaagaaatttcagggttagagccttgtttacaacttaaagaactttggattgctgagtgccgcatagagaaaattgaaggtcttcaagaatgtagaaatttggaaaaactatatttatattttaataaaatttccaaaatagaaaatttagagaaattaatcaaattgaaggttctttggctgaaccacaatacaattaaaaatattgagggtttgcaaactttgaagaatttaaaagatctcaaccttgctggaaatctaataaatagcattggtcgatgtcttgactccaatgaacaactggaaagattaaacctttctggtaaccaaatatgttctttcaaggaactcacgaacttaaccaggctgccttgcttaaaggatttatgtctgaatgaccctcaatatacaaccaatccagtttgtcttctgtgtaattattccacacatgtattatatcatttgccttgccttcaaagatttgacacattggatgtgtcagcaaagcaaatcaaggaactggcagataccacagcaatgaaaaaaataatgtattataatatgcgtataaaaactcttcagaggcatcttaaagaagaccttgaaaaactgaatgatcaaaaatgcaaattacaaaagttgccagaagaacgagtaaaattattcagctttgtgaagaaaactttggaacgagaactggctgaactcaagggctcgggcaaagggcacagtgatggatccaataacagtaaagtaactgatcctgaaacactgaagagttgtgaaactgtcactgaagaaccaagtcttcaacagaagatattggccaaactaaatgccttgaatgaaagggtaacattctggaacaaaaaactagatgaaattgaagcaatttatcatattgaagtaaaacaaaagaagaaaagtcatggcttattgatcccacttttgttaattgagttagagactgtgggaaatttccattttgaagaaggcactcgatctgatgactggtttaatttctgctatgaattaattctgtcacgtttttgtgcctgggacttcagaacatacggtattacaggagtaaaagtaaaacgcatcattaaagttaacaaccgtattctgagactaaaattcgaagagaaatttcaaaagtttttggagaatgaagatatgcatgattcagagagctaccgaaggatgctggaatgccttttttatgtttttgatcctgaagtttcagtgaagaaaaagcatcttctacaaatacttgaaaaaggattcaaagacagtgaaacaagcaagctgcctctcaaaaaagaagccatcattgtttctaacagtctaagtataagtgagtgtcccagaattgaatttttacagcaaaagcacaaagatgagaagaaaatctctcttaagcatgagctcttcagacatggcatcctcctcattacaaaagttttccttggccagagtgttcaggcccatgaaaaagaatccatcagtcaatccaactatccaatggttaattcagtgttcattcctcggaaatatttactaaattctgtcatgggacaaagaaactgtgattgcagtgttcggcagtgcaagtggtttgtctttgatcatgaccttgttttgccggaatatgttgttgaatttgagtatattacaatggtcaagccaccctctttattttctgtattcaacaatgttattctagaagaaagcaaaaaaaacccagaagtatcagtattttccaaggatttgaaatttgatgatgaagttataaaaatggagcccagaatcaaggcccgaccaaaactgattagtttggatgataaaacaatactttcccttgcaaagactagcgtttacagtcatattgtgagtctgaatctacatggaaacagcttgagtaaattgagagatctctccaagttaacaggacttcgaaaactaaacattagctttaatgaatttacctgtttagatgatgtataccacttgtataaccttgaatatttggatgcaagccataaccatgtgataacccttgagggatttagaggtctgatgaaactgaagcacttagacttgagctggaatcaactgaaaaaatctggcaatgaaataaatatgttatgcaaacacaccacaagccttctcactcttgatattcaacataatccatggcaaaagccagccacattgaggctgagtgttattggcagattaaagactcttacccatttaaatggagtcttcatttctgaagaagaagcaacagcagctatgaaatttattgcaggaacaaggattactcagttatctctcttacggcattctagtactaaagaggagagaccacggatacttagtatatggccttctgccaaaattctgacgcaggtttcaaagttaggacctcatttacatctgagtggaaactgctacttgaagataactgccttaaatttagatggacaacatctttttgaaatcacaaatttagaaaaattggaaaatttgaaatgggcatcattcagcaataataatctcactaaaatggagggtctggaatcctgtattaacttggaagagctcacattagatggaaactgcatctcaaagatagaaggtatttccaagatgactaaattaactcgcctcagcataaataataatcttctcactggttgggaagagcatacctttgataacatgcttcatcttcactcgctttctcttgagaacaacagaatcacttcattgagtggtttacaaaaatcttttactcttgttgagttatacataagcaataactatattgctgtcaatcaggagatgcacaatttaaagggtttatgcaacttggtcattctagacatgtgtgggaacatcattatatggaatcaagaaaactaccggttgtttgtaatatttcatcttccagaactgaaagctttggatgggataccaattgaaccatcagagactgacagtgcaaaagatttgtttggtggtagacttacttctgacatgattgcagaacgacaaggacattccaacttcaaacaaatgcaagaactaaattggacttcatcatctattagctgtatttactttgtctaaattcagaacagtggatttgattccagtcgaccaatttagaaatgtgtgtaatgtgaatctacagaacaatcatcttacctcattcagtggattaatttatctacctaatgtgaaggtcttatgccttaactataatcatattgaatcaatcatgcccagactaaagcctcagactcacttaaccagtagacaactactgtaccagaaagtgccttcaagtggctatggacagcaaggaatttcaaaaacaaacagagatataatgagcagtgaaaatttgcctccaataatgcacagtttagaagttcttcatttgggctacaatggaatttgtaatttgatccagctacaacttaacagactaagaaatttaaaattcctctttctacagggtaatgaaatcagccaagttgaagggcttgacaacttagtagtccttcaagaattggtagtggaccataaccgcatccgatcatttaatgacagtgcttttgccaaaccaagttctttattggcacttcacttggaggaaaacagactacgagaactgggcaaattacaatctttggtaaaactagagaaactcttcctaggatataataaaatccaggatatcacagaactggaaaaacttgacgttatctctactctcagggagcttacagtgtatggcaatccagtgaatttgtagaaaaatgctacatcgccacatgcttatatttcgactgcctaacttacagatgttagatggaagtcctgtgaattcagatgatagggcaaaagctgaatttcacctcgctgaactacaagcaaagaaaaattcgcttattcctgttacccactctcctatggatggcagatcatttggccaagtgaaaactcctcccatagagataacaaatgtacttctgcctagtggattcagccattacttgggatctgacgtcactttaactcctgaagttgaagacaaaaaaaacaagaatgctgggattctgacaaataatcctcggagcatccatgcagaaatagcttttcggcaactcagagggataagtatctctccatctcttttatcacatcagaatattgcatctcctactgcacaaatataccagagcaaccaagataagagaagaatttttgggagcaactttccaagatcaaatcgaatgtaactgcctaaagagaaatgagcatacaccaagaaactcacctgtttagtagttgtacaaaaactagcggacagtggtcagttaaaaaaaaaaaaaaaaagataatcatgttacttaagttactgaagcacttcagttccatatgaagataatctattacccttcatgaacttgatttaatatcacctctcttaaactttc

SEQ ID NO: 1315 - DNA, 4117 bp, Homo sapiens
tttttctctttcaaaaacactctgccatcttttcaaggtatccgccatctctttcaagcatgtgaggagcttgataacttttgttgggggtcggtgttcagaatgacaagggtcttgcccaggctggagtgcagtagcacagtcataactcactctagcctcaacctcccagggcacaagcgatcctcccatcttagcctcctgagtaactgggactacaggcacgtgccaccacaccctgctaatttttttttttctttggtattaatattttgtagagaaggagtttcaccatgttgcccaggctggtccagaactcctgggctcaagcaatcctgccttggcttcccaaagtgctgggattacaggcatgagccaccatgcctggccctagagcttgataatttcattcattcattctttttttttttttttgagacaaagtctcagtctgtcacccaggttggagtgcaatggcgcaatcttggctcactgcaacttctgcctcccgagttcaaggggttctcctgcctcagcctcctgagtggcagggattacagatgcccaccaccatgcctggctaatttttgtatttttagtagaggtggggtttcaccatgttggccaggttggtctcaaactcccaacctcaggtaatctgcccacctcggcctcccagagtgctgggattacaggtgtgagctcagaccttgataatttcagtgaggaaaaaaaaaaatctcatttacatgtttgtgccaagtgctgtgctagtgggtggggacaccatgataagtatttgataagttatgtttcttgatttaagggagtatagaagaaatggttaagtcaggactaggaggagtgagagaaatggaagcaacctttgaggtaggccctgaagaacgagcagaaattccctaaagcggggtgggagcggcaggaccaacctggccaacttcggaccttctttgaggtccaaagtcaggtactttgaactgacttccaggatacctggagtaaagtacagttctgtttgaagtgtttgtttggaaagatgagtttgttccagtgaggttgctgtattagagaaccacttgagagtttgctgcccacagtgtcatctgtgagaaatattaggtgaacgcaaaaagttgaggccagctgaaccaagccatgtaatatacacaccttccacatagatcagtcacctcagttgacttgtatgtgagccacatttgtgtccatctgatgttacagcattcactctctttgcctccacttctcaataactcacaatctgtaaactgactgaggcccgcttccacagagcaagcttcaggcctttttcaaggacttgaaaatactggaaatctgtccggatccaaattattttgcaagccagatgagtaaccagagggcatgaaaggttgagaacatttgacttccctgcaaaccttggtatagatcacttccttttctgtaggaaaggaaaggcaccaaagagcacaatgagtacaagaaagcgtcgcggtggagcaataaattctagacaagctcagaagcgaactcgggaagcaacctccacccccgagatctccttggaagcagaacccatagaactcgtggaaactgctggagatgaaattgtggacctcacttgtgaatctttagagcctgtggtggttgatctgactcacaatgactctgttgtgattgttgacgaaagaagaagaccaaggaggaatgctaggaggctgccccaggaccatgctgacagctgtgtggtgagcagtgacgatgaggagttgtccagggacagagacgtatatgtgactacccatactcccagaaacgccagggatgagggcgctacaggcctcaggccctcaggaactgtcagttgtcccatctgcatggacggatactcagagatcgtgcagaatggacgtctcatcgtttccacagaatgcggccatgtcttctgtagccagtgcctccgtgattccctgaagaatgctaatacttgcccaacttgtaggaaaaagatcaaccacaaacggtaccaccccatttatatatgaagtattcagagccccccaggagagacggatggacagacagacagccaggttctccagtggtatctgcctccattttcctgagatcaaaaagactgtttcgaaaccaacatctgatatgtaaactgctcttttgtttccaaccccttccttttgttatctccagtttgatgctatggcgctggacccagggccctcccaggccatctctgttcctctggggtggtccagttctagagtgggagaaagggagtcaggcgcattgggaatcgtggttccagtctggttgcagaatctgcacatttgccaagaaattttcctgtttggaaagtttgccccagctttcccgggcacaccaccttttgtcccaagtgtctgccggtcgaccaatctgcctgccacacattgaccaagccagacccggttcacccagctcgaggatcccaggttgaagagtggccccttgaggccctggaaagaccaatcactggacttcttcccttgagagtcagaggtcacccgtgattctgcctgcaccttatcattgatctgcagtgatttctgcaaatcaagagaaactctgcagggcactcccctgtttcctaagaacgaaaaagtgcaataaaggccattcgttacctacttttcagcagcccacaagatgtagcactattagtgtccccctcagaggcttaatgttgcctgtggagcagtgcccatcccagcccgtttctgcccaccagttgttctcaggaaccttacccatgctccagcgtccttcacctggcacaggacatgcaagataaatagggcaggcacgtgtttgggtgtcctctcttttctgataaaatccatcccgtgtttgccacacgccctccagtcctcagttcccactgcctaacgtctgcccccgtgtagatactgagaggtggtggcagtaattgtggccttatcagccgctcagttccaggcttttgcccaggtcactgttgccccatgttcggagaacctggcccacctgtcttggctttctcatccttcccaacccagtgccgtttatttcagaagcttcctggccactgggcttggatgcttcgggcttctgactgctccataggttttgactggtgaaacaggggcccagatgacaacctctccttcgctccacaggtacgcgggagcctcaggttctctcaggggcagcaaagtggcccaagctgcccctgacagcacagggcctgggggtggctaacgagagaggccttacagtgccggcatgcctcctcttccactgtcgtccttcctcagagggcctcacgccaaacaaacggccttttcgtgtgaaacatcttcagggcgggaaaggggccacttctggctttgttagcaataactgaccttcagtttacccttctgaaggagcagggactcagcacagaattcactttagacggggctgaaggagtgtccctcctctatgtgaaaagaaaattgttttattcttcattctgactttttaactgtttggctcacttccagttagtttgaatgaaaataataattttctacttggagttgaagagggcagaatccgcagctctcatcattgtgatgtgtagcatgtctgccctctgactggacatcattgccattaactttcttctgggcatcacggcagtgtcacgatgcccagacttggagcaaggcaaccttggagtcagtccactcataaaatatggtaacacccattttaaaatttaagttttgtccttaaagacaacttcagtggttaattataaaagttgtgttacttcgtcctaaattaaattgatagaaagatttaaaaatgtgttttgtttctactattcagaaactgcgaactagggaaaggttggtatgaaaaaatgtctttccttttttcaatgtacatagttcaactctttctttgttacatttaaactatatccatggatatcagtctgctttggactcctctgctagtgttacagatggaaataaaaccattaatttgaacc

SEQ ID NO: 1316 - DNA, 3779 bp, Homo sapiens
cgattacgctcaaggataaaaagctttgctatgaccaaggcattagtggacatcaccttatggagacttccatgacggtcaatgtggtgggttcatccgggctctgcttccaggaaacacacctggggccccatatgcaagtattggagcttgggatactgggccctgggaggggaaggttggggtcgggtctcaacagggctaatccccctgagaatcccactaatgcattcataatttcctttcttctcattctttctcaacattcatccacccacccactaccacccactaactcctttcattcttttttctttaagacggagtttcactcttgttgcccaggctggagtgcggcggcgcagtcttggctcactttgcctccttggctcaagtgattctcctgcctcagcctcccaagtagctgggattataggcgcccgccaccacggctggctaattttttgtatttttagtggagacagagtttttccatgttggccaggatggtcacaaactcctaaactcaaatgatccacccgcctcagcctcccaaagtgctgggattccaggtgtgagccaccatgcccggcctaactcctttcattcattcacgttttcagaaagggccaccttcccagttgtgcaggttgcacacaaactggtatgttccctctgataacttttcttcagagggagaatagagtgagcaacagggccgttttttttttgttttttgttttttttttaacgatgtctcactcttgtcccccaggctggagtgcaatggtgcaatctcggctcactgcaacctccacctcccgggttcaagcgattctcctgcctcagcctcccaagtagctgggattacagttgcataccaccatgcctagctaattttttatattttaaatagagacggagtttcaccatgttggccaggctggtcttgaactcctaacctcaggtgatctgccggccttggcctcccaaagtgctgggattacaggtgtgagccaccgtgcccgacctagggccactttttgcaattggcacaaaggtggcataagggctggcctggccctgctttcacatctctctcttcttctgcccactcacacattcctcattcagttctttgggtgcttggtgcttcacttgcttatacacgtgatatcgcctttgcccggggcagacactgaggctcagagaggtgcagagtaacccagggagctaataagtggtagaggaggggcgtgccccagagttcttgttctcacccatttccctacccactccctggcatgcagatcctggtgttcctccctcctggcttagaatgaccttgggcagtcaaaaggggttgtaacagcccccacctccttagagtacatgagatttcatgtgctagactgaataaacaaggaggaagtgtgactgcatcagggtgggcaagggggaacgtggtgggatgagctcggagcagtgatggggcagagtaagcggagcccttatgggccatggtatgtgagctggctcctcgggagggctctaagcagaggagggactcgggtgtccccagggcccatctggctgcatggggtggggggacatcaatgaggggactggaagcagggagactctggaagagacaaggttggacaaaacagggtgggggcaaaggagttggaggtttaggggagagaacaggcaggctctcggtcttttttttttttttttttgagacagagtcctgctctgtcacccaggctggagtgcagtggtgcagtcttggcctctacctccctggttcaagcgattctccagcctctgcctcccgagtagctgggattacaggcatgcaccaccacacacccagctaattttttgtatttttagtagagacagggttttactgtgctggccaggctagtctcgaactcctggactcaagtgatcagcccgcctcggcctcccgaagttctgggattacaggcatgagccactgcaccaggccgtgttaatgatattaatgaccatattgcccttgggggtgagggagagccaggcagctggtggtggtgtttgtgggagggggactgtccttcctgccccttacccctccaggggcctgaggagaccctggccacccctgtgagccttttttcctcccaccgagggcaacctgatggtgccagtgttcattggctgccccccaggcaagcgcctggccttcgacatcacctacacgctggaatacagccgcctgaagaacaaacactactttgactgcgttaacgtgaacccggagatgccctgctttctcttccgggacagtgtgtgtccagtcccttcccctgcacagttcactgccctcttgcccccactactttgtgctctccctccccattcctctccccgcagactacccaccctttttcctgcggcatctcactttcccccgtctcggtcctcagcttctcgggccaagctaatttcttcttctggtctcaatcccctccaaccccatagttttctaccccttcttcttgattcaagatttggtgacaggagactccggcagtttccagggcaggtaaaggcgtggccagcttgcagctagggcaggtggagggagtggaaggagatgggtgcaggactcgagacccggaggccagtctgtgtgcacttctgtccctggtagctatgttctgctggtggtgggtggcgggcccacactggacagcctcaaggactacagtgaggacgaaatctaccgcttcaacagccccctggacaagtaatccccgtggggtcccacgtgtaatccaccttgcttcccctggaggcctttcccacttccaagccaagcccacctcgcaagcccccacctctgcgtctcaggccctgcccacagtggggctcttaggatctcacaggcaaactcctgcccgcccctaacaccatgtcccctgcacccacctgtggcctccctccacactgaccactgaggtcatacctcccctacaccgccccccaacccctggctgagatgacctgggcctgcacaggaccaacagccttatctggaccacgaggaccacaaggaccaccaaagactcagcctttcacatcatgtcccacgagagcccaggcatcgagtggctctgtctggagaatgccccatgctatgacaatgttccccaaggcatctttgcccctgaattcttcttcaaggtgttggtgagcaataggtgagccagaggagtggacacgagcacctactgcaactaccagctcaccttcctgctgcacatccacgggctgccactcagtcccaagcgggcccttttcatcatcatggtgtcagctagcgtgtttgtgggcctggtgatcttctacatcgccttctgcctcctgtggcccctcgtggtgaagggctgcacgatgatccggtggaagataaacaacctcattgcctcagaatcctactacacctacgcctccatttccggaatctcgagcatgccgtctctgagacattccaggatgggctccatgttcagctccaggatgacagaggacagggctgaacccaaggaagccgtggagagacagttgatgacctgagtgtcccacctgccccagcccccagttactgtcacgcctctcttatgaggcccatcttgaagatgcaacctgtcacccagcccaggcctctctttctgttttgcttgatgtttacttctcgttcagactcaaataaagccttttttcag

SEQ ID NO: 1317 - DNA, 4149 bp, Homo sapiens
aaaactcttgacccccccgccagagaaggaggaccctcccgcgccctttcggagcgtcggtggcccggctccggctctgcgctccatcctcccagccagcaggtgcccccagacccccggctcctcctccgccgccgtcacagcctcgtcctccgcctctggctcctccgcttcctgttgccgcgatccgggccgggagctgcgggcgcccgggcgcccgaggcttcccggtgcgctccgccaggatggcattagctctgtgtctgcaggtgctgtgcagcctgtgtggctggctctcgctctatatttctttctgccacctgaataagcaccgaagctatgagtggagctgccgcctggtcaccttcacccatggagtcctctctataggcctctccgcttatattggcttcattgatggcccatggccttttacccacccaggctcacccaatacacctctccaagttcatgtcctgtgtctcaccttgggctacttcatcttcgacttgggctggtgcgtctactttcagtctgagggtgccttgatactggctcatcacacattgagtatcttgggcattatcatggcccttgtgcttggggagtctggcacagaggtcaatgcagtcctctttggaagtgagcttaccaaccccttgctacagatgcgctggtttctccgggaaacagggcactatcacagtttcactggagatgtagtggacttcctctttgtggctctgttcacaggagtgaggattggtgtgggagcttgcctccttttctgtgaaatggtctcccccacgcctaagtggtttgtgaaggctgggggagtagcgatgtatgctgtgtcttggtgtttcatgtttagcatctggcgctttgcatggaggaagagcatcaagaagtaccatgcttggagaagcaggcggagtgaggaacggcagctgaaacacaacggacatctcaaaatacactagccaaggcttgctccagattatggattgggttaagtcagccatgggaaccaggttggaaatatgactgttacataattacacttataacaaacttaggtttcaataaagggctaaatgtattgatcaatttggtcagtcttcaagccgagcatataccagtattaaaacactaacttctacagtagcacagttgtagaaagtgagaatactccatggtagttgggaataagtgagaactgtgaagtgagtacaactggcatttgttttcatttgtggtgaccctgggtcctcctgtccctgggaggtttgatgttcaggcagtttagaaaggaactcgaaaaagattagtgctatttcttgttcctttgagaagtaactctttcaataaacacttatttctgctttccatatagcaatttatctaagtttaccccatttactataaagtgaggggcttacaggaagagacacgcctttgacattctgaacattagatcggggaattgggtcgcttaaacagaggggcataggagggtgagagtgaaactggcagtgagggggagggctacttactgaacctcctataccaactgtgccagaggtgcccaagaccactgccaggttctgtaattctctgggaagactcagtggactcagcatatagtcttacttatagttttgatttattatagtgaaaagatacaaagaaaaatcggtaaaaggaaaaggcacctgagacaaagtctagggtaaagcaagcacaagtttccagagtcctctcccaatggaatcacacaggatgcacttaattcccctagcagtgatttgttacgacatgtgaatgagttgtctactggacaaggtcactacagacccagtgcccaaagtttttactgaggacaggtcatctaggcaggctttccctggcagatagcaaaattcaagactctcaaaaggaaagcaggtgttcagcataagccatattgtttgcacaagcagttcagacacagtaagccagtcttatcagttaattgtgggagcccctccaaaatctaagttcccaaatgccggccagtggccaaccctgtaatcaggcctctccaaggatagcagtttaggcctgctatgttaactcttttctgcacaaaacctatagagttagggctttggatctgagatgaatgaagtgtgggtagatttactgagtcctgttatatgggttctgccctaccaggaaaactatgccagttctcagggcttttgtgcattaatctcctaggcatttgaggctatgactaaattccatagggatttatcatgtggattccactgtgcttgagatggcagtttagatttcagctctgctgtacatattgcaaactagagccaaagactttaaagtgtgtactggcctcagggggatgaggttaatttttttttttcattttagatactttcccttttagtactcctcctacttttcttatttttactaaaaaggtaccactctatgaacaaactaataaaacaaggccagtcttggaaggaaaaaaataataattcttagtgtgacagtctccaagagaagcaagaatataagcttagaacaaggggttaagaatccagaattcctgggttcttttaactaattttgctactcacttgccactttggagagctactcactcactttggataggttacttgtttcttctttgcctgagtttaaacctattgtgaatgaatgaaataccctgtagtatatttcataaatacattatgtggcattttattaatggaggtctttaatgtagggcttttatggaaatatgaagtatttatgtatttattgattatttatttttaccatgttattgaagtcaatggtgtttgattagctcagtgggtgagcaagcatatggtgctactggagtcaaggctggtcagtaggaagcatcagtccattccacggccactggtaatctaacgtaatgaatggtgtcttttgttgttgttgttgttgttgttgttgtttgagacagagtcttgctctgtcgcccaggctggagtgcagtggtgtgatctcaactcactgcaacctccgccttctgtgttcaagtgattctcctgcctcagcctcccgagtagctgggactacaggcgtgtgccaccatgcctggctactttttgtatttttagtagagacggggtttcaccatgttggccaggctggtcttgaactcctgacttcatgacccacccgcctcggcctcccaaagtgctgggattacaggtgtgagccaccgtgcccagccatgagcggtcttgaaaatggaaaatggtcttggccacagaaaccaggtatgagggagtggttggaatggtataaagtcatcactgttaaggaaacagtaactttaaatgcatgttaacagtgggtctttaaaaatgaatgtcatttggttaaagagttttgctgggcattgagataatctgacagcatctccacttcctgttttttttcttaatctccactttttttttttttctatgatgagcgcccctaaaatgctggtaagcttctttccaacaaaattgcggtcaaagtaggatgctggggaatgctgattttagcaaaagcttgtagaaaagagtggcctggcacatgagcttaaaaaaaagaaaaaaagctggctcttgaattttggcacagtgcaacctgttccataccagacaaatgaacaggcttaatctggtaccaattctttttctctcttactcctcagaagtgaagggactgcagatcttgttgttttggggacactttcatggaactgtatgtaggtttttttgaatggtgagaaatctgaataattggtaaggggaagggaatccctcatttcagcttttcttgatgttgttactaataactatgaaaaaacttctgagagaacaatgtgaactgaagatgactcagcagttaagacaatgctaagttctgaaaccacaggtaaatgaagggctaattaatgtgtggtatacttggacaaaatgaagtactcatttgcactggattactgtgtaatgataacgaacactgttcaagaacgatttatatttccataagatttgtactaaattttataaaagtaaaacaactttttat

SEQ ID NO: 1318 - DNA, 3816 bp, Homo sapiens
aactgtgctgaagccacacgtgggggacaggcaacgtgcccatgccctctgctggacttggcactgtgtgcgtgacacccagctcccctcggtgcagcctggcaaatccatctaccctggtgtctgaagtttgcccatggtctttggccaggggctgtggaagggcctccggggactgaaggtcgggacccatttggggtcattgagagtaaatcgacttgttaatggggcatcctcctcaacccactcctcagggccccacatccacgctcaccaactgcacatgcagacccaggaggtgcatgagctgaagtctgtgggccgcagagccgtgggctcggaagaagcacagcccaccatgccgtggatctccacgcgtggctcctctccacgcctgtgggttgctccaaagctgcagcgtcacgcgcagatgccaggtagccgtgatggaggctcgggcacaagctgtattgcaacggctttgtgagtaagacagcggtttgtcttagctgtatctcgttagggagttccatcccagtcatattaaaagcaccatgccgcatggcacagagtgacaacaaattccttcaagataaaggaaccctaaaactgtaagaactcgaaggtctcgtctgcgatgcagtttgtctggggcaggggagggatctgcccggtgtggctctggccgcaggcaggaagctccctggagcccattcactcccagcccccatcctgcacccccacgtcccactctgtgacttgcctgattaaagcgtcagggaattaaagggggaattggagggcagctgcagctacacatgaaatgaacaaggatgcgcttttcctggtgaacgatgcttgctgggtgccctgtcccctaaggacatctgagtcagagccagacaaatgggagaaatttgtctggggattaggagacctttgatgcctcatccctgtggaactacatggagctcattctgcaaatcaccttctcctgcctcctctgaggtgacttaagactccgttctcttctgacctgtgcttcatgggccttccgtggagccccaggccgctggctgcctggggtgaccatgtccacttgtgtcaaccaacacgtgagcctgagaggctggagctcagaatacaccctggggcacggggacaagtcctgggcagtggcgggagctctgtttgtcattttccttcacttcactcagacacacttcagcaagtgtgtctgagccaacatagaaagatggagcagcaattcagaagcatctctcctgaagacagaaggccagtgcccagcttcctgtcactcactcgagagcattgggcacctgctgggggctgcatgagctgccagtgagcagacaggcaacgtcccagtgctccagggatgcgtgttctatctgggcagagacaacagcaaccagcagacaagaaacgccgcagagtgctgtgtgctgggtgccgggcgacgctcagggcggccgtgcgggcatccgtgtcagagtgctgtgtgccgggcgaagctcagggcggccctgcgggcatccgtgtcagagtgctgtgtgccgggcgatgctcagggcggccgtgcgggcatccatgtcagagtgctgtgtgccgggcggagctcagggcggccctgcgggcatccatgtcagagtgctgtgtgccgggcgatgctcagggcggccgtgcgggcatccatgtcagagtgctgtgtgccgggcgacagtcagggcagccgtgcgggcatccgtgtcagagtgctgtgtgccgggcgacgctcagggcggccgtgcgggcatccatgtcagagtgctgtgtgccgggcggagctcagggcggccctgcgggcatctgtgtcagagtgctgtgtgccggacgaagctcagggcggccctgcgggcatccatgtcagagtgctgtgtgccgggcggagctcagggcggccctgcgggcatctgtgtcagagtgctgtgtgccgggcgacgctcagggcggccgtgcgggcatccatgtcagagtgctgtgtgccgggcgacgctcagggcggccgtgcgggcatctgtgtcagagtgctgtgtgccggacgaagctcagggcggccctgcgggcatccgtgtcagagtgctgtgtgccgggcgatgctcagggcggctgtgcgggcatctgtgtcagagtgctgtgtgccgggcgacgctcagggcggccctgcgggcatccatgtcagagtgctgtgtgccgggcgatgctcagggcggccctgcgggcatccatgtcagagtgctgtgtgccgggcgacgctcagggcggccctgcgggcatccatgtcagagtgctgtgtgccaggcgatgctcagggcggccgtgcgggcatccatgtcagagtgctgtgtgccgggcggagctcagggcggccgtctgggcatccgtgttagcgttctgtgtgccaggcgatgctcagggcggccctgcgggcatctgtgtcagagtgctgtgtgccgggcgatgctcagggcagccgtgcaggcatccatgtcagagtgctgtgtgccgggcgacagtcagggcagccgtgcgggcatccgtgtcagagtgctgtgtgccgggcgatgctcagggcagccgtgcaggcatccatgtcagagtgctgtgtgccgggcgacagtcagggcagccgtgcgggcatccgtgtcagagtgctgtgtgccgggcgatgctcagggcagccgtgcaggcatccatgtcagagtgctgtgtgccgggcgacagtcagggcagccgtgcgggcatccgtgtcagagtgctgtgtgccgggcgacgctcagggcaaccgtgcgggcatccgtgtcagagtgctgtgtgccgggcgacgctcagggcggccgtgcgggcatccatgtcagagtgctgtgtgccgggcgacgctcagggcggccgtgcaggcatccatgtcagagtgctgtgtgccgggcgacagtcagggcagccgtgcgggcatccgtgtcagagtgctgtgtgccgggcgatgctcagggcggctgtgcgggcatctgtgtcagagtgctgtgtgccgggcgacgctcagggcggccgtctgggcatccgtgtcagagtgctgtgtgccgggcgactctcagggcggccgtgtgggcatccgtgtcagcgttctgtgtgccgggcgactctcagggcagccgtgcgggcatccgtgtcagagtgctgtgtgccgggcgacagtcagggcagccgtgcgggcatccgtgtcagagtgctgtgtgccgggcgactctcagggcggccgtgtgggcatccgtgtcagagtgctgtgtgccgggcaacgctcagggcggccgtgtgggcatccgtgtcagagtgctgtgtgccgggcgacgctcagggcggctgtgtgagcatccgtgtcaggtgggctgctggatgctggggggtcactgactcacccctagggctgagggcgggtgggttactggcctccacatgggtgtgacaacctggcagtgagggatggtcatgcagacatgtgttgggcatggagcatccgtggtggtggaagccctcccatgccgggccgcggggcagggctctgggagaggacgcaggatccctccctgcatgtctgtctgcagatcagcttcacctgcccccaccctggcagttcaatctactgtcattagacccacctgccctcaccctggcctgcacccttcaatctactgttattagacccacggggcttcttggtgattaaacgtgtgtgttgctctctgcacatccaagaactgc

SEQ ID NO: 1319 - DNA, 3823 bp, Homo sapiens
agcagcgccccactcaacaaagcttcccgcgggccctgccccatgactcaccgctgggtggggcgggcacgcaggcaacccgcgggccgagacggggtagtgagggccggaagcccggctcccgactccgcttcgtccccacaacctccggccgcctgaagtcctgaggggccgtggccctgggtcgtctcccctgttcccagcctccagtcgcagctggcggagagaagttcccgaggcccccccgacttgcaaggtcccttgccccgcccagagctgagccttccgaggatctgaggaccgagtccagcccagctcccaggaggggccgggatcctggggcagggaataaggggcaggggctggctctaaagtcgggcgggagaggggcactaaccgagatgggggctgagcctccggtctgggagcttcgggaggcgcgtggcgggatggaaaacattcctgagaccgttggattggatttccgaatttgggaggctaggactccggctacggtggctctgctcttgggatgagaggactgggcccagcttgcgaggaatcatgaagtggacacagggtgggaacgtgaattttaatgagggggcagaccgaggaggtggtggctgcccggagatcagggccaggctgtgctagatggcgcctggaaggggggtcacccaagtctccctgctgtcatttcaggaggccgacccaagtctccctgctgtcatttcaggaggccgaattttttcccaatcccagagaaggtgtcagaggcctggttagcagtcttgtcgatggtttcctgggtggtcttggccagctggtccatggctggggaagggcgggagagagggcaggtcaggcagggcccgggaaccacagtgcctgtaggcttagcctggcctgggtctcccgggggacctgcttggggcattgtggacagagggctctgcagaggagaggatgtgcctgggccccagccgggatggggcggggagtgggaggtgtgctggggttgcccgcctccctccagccccaccagacctttctgccccgcctctgtggcctggtccaccacttgctgagctgccgctccggccgctgacactggaacagagagatgtggcttttagcccctgttgaggcaccaccgactacaggtgccccaccattgccatgcctctgtgtcctccagagtattcggtggtacaggtccaagggatggatgccatggagataaagtccctggcccagggccccccagcccgaggggcaggagacctttccatgcctctgggatgtttttgtttatttctaactctgagctccttctctgtgggggaggagcttccctttccatctccagggctactgagaaaatgttggacagaggaaggaaggcagggcagggccaggctgcagctagcatctggactgttggctaatgctggtgatggcgcagaagacccttgcccccttttacagcttctcccctagaagcctggcccagatgcctgaattcccacctttcatgcacttagccctggggcttgcagttttgccaggtccttactgcctcctccctcctgtggcctgcccggaggggcacacaagcaaagccagtgcctctgtggacaggcagcttaagacattaggagacaaatgaaggaaggaggcaaaacttccaaggccggactatctcctctggaccagagtttcggcctgctgggaatggagtcaccagccccgggggggctgacaggtggctcccgcctacagagctgtaactcatccctgctgctgaacaggaaagggcctgccttacccagatcccatcctccggaaaggctctcagatggaaaagtgaagcccagaaggaagggacctgacacggaggcttccttggtagcatttcagtctcaagggaagaactgtgggcctcccctggagcactggtgaagtaaggggttggtttggatattgtctcctgactgggatatgggcaggactgacagggagctggagtcctaacgaagcctgggctaggtgcaggaagaaccaacccagtggtctcctgacatctcccacgcccccaccgcagctgggtcacctccagaatacggaggagagagctggaggtggaggaactaaggaccttctttgccaggtggggacttaaaggtaaggcgacgattacttttcggcgatgggggtgggatggaaacaaagccctttgaggtctggggcagcctctggtggcgcgcgcgggtttaagtggtggcgggccgcgcccgatccctgtcctggaccttcaccctctcctgagggcctgggcgggccgcccagcgccagcatggcctccttggaggggctcccgcagtgcccgcagcgcagctccggctcctccggagcctctgttccgctgcctccctgcgggcaccatctgtctgctcgccggggtgggcgttctgcctgccccctgcgtctcagtggaggaccgagccttccgagccaagctgccggtccaggaacttgcggaccgcgccgacccgctgcttctgcctgcgcatccacgcaggtgcccctgcctgagccctaggtcgcgcgctatcctcaccggcttcctgggcggtcccctccacctgttgcttcaggtcctgcaagcccttgcttgccatggcttcggggtatctgtggagtcgtcaagagcagctggagcgacgttggatcctgcccagagtggcgatgccaagcgccagctccggtttttaaggcgccccagggctggcctgccccgcgtaggggagagggcgcggggcggttcccgtcatacaggctccggggagtggccgggccctgctccagagtccgcagggcagggagcacatcctggcctaagacgggccgcggtgggaaaggggcagaccgaaccagggaccgaagaggtgccaggacaggggtccagagaggagctggaggcaggagaagggcgcacaccacctcccagctcatcagccccagccctccctttctgatcctgggcgtgagcgctgggtcagctccagggcaggagctcagggctggtgttgaccttaatgacagcagtggtcttttactgagcatttgtcttgtgccaggtgctgcctaacgctctgcagtctcttgtataatctttacaaccacctcctgaagtgggtatttttgttgatagcatcagtgtataggaggaaactgaggcagtgaggtcggtctcacccaaacgcatgtggcagggacttggatcctcgaatctgcctaggtgcctgtaaaccctagggctctggcatcatcggagcccccagccccaaacagctgcaggggcactgctgactggctctctgcctgtagccagagacccagtggatgcagccggagagggcctggtaaatctttcccctgagagggcgagatacagcatacagtgaagttgttctctgaagttcctcatctgccttaagtctggacccaccaaagaagaaaacaatgaccactggtcccttcccggagttttctctgactgaactgctgtcacaggaagaaagactgaagcctgctcacatacctggacagattttgcaaaccgttgtctgctctgtgagcccaacagactttgtcccaggccactgtatgttcttcaagcccactgaattcccctgaaaatcatttactagccccctgaaattactcacacttccccattgctcatctgtaccccatttcgtggtggggcagtcactctgatttccccttgcatgctaatgaatgtgtattccatttc

SEQ ID NO: 1320 - DNA, 3396 bp, Homo sapiens
aggcgaggaccctgggaggaaatgaaacaccagacccagtgcaggcgaggaggccgggaggatctgaaacaccagacgcagtgcaggcgaggaggccgggaggaaatgaaacaccagacccagtgcaggcgaggaggccgggaggaaatgaaacaccagacccagtgcaggcgagaaggcagggaggaaatgaaacaccagacccagtgcaggcgaggaggccgggaggaaatgaaacaccagacccagtgcaggcgaggaggccgggaggaaatgaaacaccagacccagtgcaggcgaggaggccgggaggaactgaaacaccagacccagtgcaggcgaggaggccgggaggaaatgaaacaccagacccagtgcaggcgaggaccctgggaggaaatgaaacaccagacctagtgcaggcgaggaggccgggaggatctgaaacaccagacgcagtgcaggcgaggaggccgggaggaaatgaaacaccagacccagtgcaggcgaggaggccgggaggaaatgaaacaccagacccagtgcaggcgaggaccctgggaggaaatgaaacaccagacccagtgcaggcgaggaggccgggaggatctgaaacaccagacgcagtgcaggcgaggaggccgggaggatctgaaacaccagacgcagtgcaggcgaggaggccgggaggaaatgaaacaccagacccagtgcaggcgaggaggcagggaggaaatgaaacaccagacccagtgcaggcgaggaggccgggaggatctgaaacaccagacgcagtgcaggcgaggaggccgggaggaaatgaaagaccagacccagtgcaggcgaggaggctgggaggaaatgaaacaccagctttgtgaaatttctggatttggtgagaagcctctggtgtctggttagtctttaaacaagtgctgacttcggctttgcctgcactggtcagttagactttcttggttatgtggcttacaaccgggaagtggcctagggtttcttgaagttgactcatatgtacagcaaattcaataatccattttctgaaattaaatgtctgtccagtttagactcaatttaaggaaaggaatagatttggcaatacacgtaggtacgttgatcatatgcgatgtgaacttggggatcagcttgctgcttagagatttccttagtgattcctcatcgataaaatgaactgttacatttaagatgctgataaagtaaatatttttttgaacaaggcagacacagatgcaattacacagaaacattgccataaatgtgcatgactgaaggggttagaggagttatctgtatgggagaaggcagtctggatgccaaaaatcccagcaggctgtggaagtaggagggaaactcatgaggagttagcaagggaagcctcagagacaagaggctgtttgaagttggtcatcgagaacagatagcaatttgactacaatgaaataagaaactgtagatattgttttagcacttggtttcatgggcacatgacagctttttattttttctgataaatgtgcaggtttcctgtatatttttaatgtctccagttcttttacttcctttagcaaatgacattttaccttgtatcttagtccattaaggctgctacagcagaatcacacagcctgggtggattctaaaccacagagacctgtctcacagctccggaggctggaagtctgagaccaaggtgcttgccgatgcggtgtctgcagggccctcttcccttccagaagacaccatctggctgtgtcttcacctggggaaaggggcagggcagctctcggggcctcttctatgggagaactcatcctattcaggagggtttcaccctcatgccttcccaaagaccaactgatttcagttttcccaaatgatttcaacgtttcagatttgaggggacagacattcagtctactgcaccttgcatttggggactctgtgtccataaagactccaaattgtccaaactgaatttaacaatcaggtaatgatcatcagaataactccagctagttctgaccctgaagggaagagatattatttgttcaaagtcacatttctttactctcctttcctaacgtaatctactatttaaacagaattataacattacatattaagtctatcctagtgggaggataatgacgcttattgaggtgtggccattacattttaaaatacttatcactttataagcttacattgaaaagacaagtaagtattttttttcaggtgtactgatgaattaaaaaacagtgacaaaaagcaaatatctgctgtgcatcaaccatgggacattgttttagggccctagagaggatgggggtgcaaacaggatcagggcatcatcctgaccaggcaaagagctcagcatcaatggggcaaatatctatctacaagagttcttgcgatctacggaaaatggcagtaaggatgtgattagcaaaaccaaagtaccaaggaagaagaataaagggaggaactcagtataagcagatacgccacatggagaatgagccatctgacctgacatttcaggaggtgacatcaccaggtggaaaagaaagatgtatgtccctagatgcaaaagctcaagagagccttgctggtgactaagaccctgggtgccgaggcttgagaagagcagtgtctggatctggtctgagaattgcaaacagtgtgctgtggcctacagatgaggtcccgaagctttgatctctgtgaattcctttttatcccactctacttggaacaacaatacaatatcaatcttcctccgctgcccctgggtgtgcttctcccagccaacaaccttccagagattgccaccaattacaggaaaaaaatccgtactactccagcaggaatttaaagcctccttctttctctgtcccccacctctgtggtctgccttccactcctctccagtagaggtgtgctggatccacacacgcctcccttatgcctattacaacattgctcctgccgggaaacgtttcccaaattcaaccccattaaagggaggaaaggcaggaggctgaggactctacatttatccaacaaagagaaaatggatctcttaattagacagtggcagttggcaaggattggcacctgtttatttttgaccaagaagaatcaatcataggctctagagcagcaggagacttctgaggtgatctcattgagggactatgtggcatttgaatcttccttataaaagagtaaagagaacactgctctactataattttaaccccctttgagggaatttgttgccttgcaaggcaatgtatctacttgctatatagttttctaatgcaaatcaataaagtgactccactataaacattt

SEQ ID NO: 1321 - DNA, 3279 bp, Homo sapiens
atgattataagcttcctgaggcctccctagaagctgagcagatggcagaaccatgcttcctgtaaatcctgcagaatcaagaaggaactgagtctctaagatggaggatatacaactgacaagtagtaaagtcaagatacacagccagacagtgtctcagtctggcatccaactcaggctggagtgcagtgacatgatcttggctcactgcagtcttgacctcctgggctcaagcaatcctcctgcctcagcttcctgagtagattataaataatcttaatagcagtattcacgtttgcattctcgcatccgtggcatggagtcctacacacaataggcgccctaagaaagcgtgtttgacttgatcgctggagcatctgccggcaccgcccaggacccgcccaggacccgccccgccccctgcggccccgccccccgcatgctgaatgccatataggcgagtgacgtcaggccgtttgttgtcattggcggctcccaagatggcgtccatcatggaagggccgctgagcaaatggactaacgtgatgaaaggctggcagtaccgttggttcgtgctggactacaatgcaggactgctctcctactacacgtccaaggacaaaatgatgagaggctctcgcagaggatgtgttagactcagaggagctgtgattggtatagacgatgaggacgacagcaccttcacaataactgttgatcagaaaaccttccatttccaggcccgtgatgctgatgagcgagagaagtggatccatgccttagaagaaacaattcttcgacatactctccagcttcaaggtttggattcaggatttgttcctagtgtccaagattttgataagaaacttacagaagctgatgcttacctacaaatcttgattgaacaattaaagctttttgatgacaagcttcaaaactgcaaagaagatgaacagagaaagaaaattgaaactctcaaagagacaacaaatagcatggtagaatcaattaaacactgcattgtgttgctgcagattgccaaaagtactattaatcccgtagatgcaatatatcaacctagtcctttggaacctgtgatcagcacaatgccttcccagactgtgttacctccagaacctgttcagttgtgtaagtcagagcagcgtccatcttccctaccagttggacctgtgttggctaccttgggacatcatcagactcctacaccaaatagtacaggcagtggccattcaccaccgagtagcagtctcacttctccaagccacgtgaacttgtctccaaatacagtcccagagttctcttactccagcagtgaagatgaattttatgatgctgatgaattccatcaaagtggctcatccccaaagcgcttaatagattcttctggatctgcctcagtcctgacacacagcagctcgggaaatagtctaaaacgcccagataccacagaatcacttaattcttccttgtccaatggaacaagtgatgctgacctgtttgattcacatgatgacagagatgatgatgcggaggcagggtctgtggaggagcacaagagcgttatcatgcatctcttgtcgcaggttagacttggaatggatcttactaaggtagttcttccaacgtttattcttgaaagaagatctcttttagaaatgtatgcagacttttttgcacatccggacctgtttgtgagcattagtgaccagaaggatcccaaggatcgaatggttcaggttgtgaaatggtacctctcagcctttcatgcgggaaggaaaggatcagttgccaaaaagccatacaatcccattttgggcgagatttttcagtgtcattggacattaccaaatgatactgaagagaacacagaactagtttcagaaggaccagttccctgggtttccaaaaacagtgtaacatttgtggctgagcaggtttcccatcatccacccatttcagccttttatgctgagtgttttaacaagaagatacaattcaatgctcatatctggaccaaatcaaaattccttgggatgtcaattggggtgcacaacatagggcagggctgtgtctcatgtctagactatgatgaacattacattctcacattccccaatggctatggaaggtctatcctcacagtgccctgggtggaattaggaggagaatgcaatattaattgttccaaaacaggctatagtgcaaatatcatcttccacactaaacccttctatgggggcaagaagcacagaattactgccgagattttttctccaaatgacaagaagtctttttgctcaattgaaggggaatggaatggtgtgatgtatgcaaaatatgcaacaggggaaaatacagtctttgtagataccaagaagttgcctataatcaagaagaaagtgaggaagttggaagatcagaacgagtatgaatcccgcagcctttggaaggatgtcactttcaacttaaaaatcagagacattgatgcagcaactgaagcaaagcacaggcttgaagaaagacaaagagcagaagcccgagaaaggaaggagaaggaaattcagtgggagacaaggttatttcatgaagatggagaatgctgggtttatgatgaaccattactgaaacgtcttggtgctgccaagcattaggttggaagatgcaaagtttatacctgatgatcagggcagtaggcataattcagcaacaaacaatcttcctttgggagaaacctgttcattccaatcttctaattacagtggttcttatctcagggatactggactttctgacgcagatgaacaattaaggggaaaagcttcccttttccctctgtggcagttacgattttgacttcagtcctgagaaaaacttcaggttttgaaaatcagatgatgtcttctccttttccaaacaccacacgttgaaagcatttataaatccaagtctgaaactctgcgctctagtactgctgttaagatacacaacttgtttcttagttcatataatctcgggatacacacacacacacacatatatatacacacacatacgtatacacacacatacatatatataaatatacctgatgccagatttttttcataaatattctgcctactgtaaatatgggttcctctgagttgttttagaaaattagcgcaatgtattaaaatcaagtgttaggaaatttcatggtcttacctacaataacttttattttggaattgaactattattaaattgtatctaatcctg

SEQ ID NO: 1322 - DNA, 4554 bp, Homo sapiens
agatgcgacgaggttagcggggcccgaccactccttggcttcccaggggtgagcctcgcgagttaggagttgggtagagagtcagcccggggcccggcatccgctttttcgttgaagcaacgactttggccggatgactccccagggtcggcatcagcgtgggactgggaacaggtgaagggaaacagaagagagcctgagaagaccgctctcctccgatcctaattgactgagccaatgagagccaaagaggtcacatgctcaactgggcggggagcgggtttccacctgcggcatctttcgcgagcggggagatgagtggggcggaatatgggagaaagggagggcccgccacgctctggctggacacggccttaatcggcccgttcactcgacgtttttggttctacgttgaccccgagaaaccgaaaccgcagggcctagggcgggtggaacgagagggaactacatttcccagcaggctgcggaaacgggactgcggccactacttccggcgtgtaccgagagactgacgtccggcgtgtaccgagagactggcgtccggtgtgcaggtggccacatggatcctggcagccggtggcggaacctgcccagcgggcctagcctaaagcacttgactgacccctcttatggaatcccgcgggaacagcaaaaggcagcgttgcaggagctgacgcgggcgcacgtggagtccttcaactacgctgtgcacgagggtctcggcctcgcggtgcaggctatacctccctttgaatttgctttcaaagatgagcgtatctcttttactattctggatgctgttatcagtccacctacagttccaaaagggaccatctgcaaagaggccaatgtttatccagcagaatgccggggccgaaggagtacctaccgtgggaagttgacagctgatatcaactgggcagtgaatggaatctcaaaaggaatcattaagcagtttcttggctatgttcccatcatggtgaaatccaagctttgcaacttacgtaaccttcccccacaagccctcattgagcaccatgaggaggcagaggaaatggggggctattttataatcaatggcattgaaaaagtcatccgaatgttgattatgcctcggagaaattttcccattgcaatgataagaccaaaatggaaaaccagagggcctggttatactcagtatggagtttcaatgcactgtgtgagggaagaacattccgctgtcaatatgaacctccactacttggaaaatggcaccgttatgttgaactttatttaccgaaaagaactgttctttcttcctttgggatttgcacttaaggcacttgtcagcttttctgattatcagatctttcaggagctcatcaaaggaaaagaggatgattctttccttaggaactctgtttctcagatgttaaggattgtaatggaagagggttgttcgacacaaaaacaggtccttaactacctaggtgaatgcttcagagtaaaactcaatgttcctgactggtacccaaatgagcaagctgcggagttcctgtttaaccagtgcatctgtatccacttgaaatccaatactgaaaagttttatatgctttgtctcatgacgcgaaagctctttgctttagccaaaggagagtgcatggaggacaatcctgatagtttggtgaaccaggaagtcctcacaccgggtcagctcttccttatgttcctgaaggaaaaactggaaggttggttagtgtctattaaaatagcttttgataagaaggctcagaagaccagtgtttccatgaacactgacaatttgatgaggatttttacaatgggcatagaccttacaaaaccatttgaatacctttttgctactgggaatctgcgttctaaaacaggtcttggcctcctacaagattctggactttgtgttgtggctgacaagctgaacttcatacgctacctctcccatttccgctgcgtgcacagaggggctgattttgccaagatgaggaccaccacagtacgcaggctgctgccagagtcctggggcttcctttgtcccgtgcataccccagacggggagccctgtggcctgatgaaccacctaactgccgtatgtgaggttgtcacacagtttgtgtatacggcatctattccagctttactgtgcaacttgggggtcactcccattgatggagctccccaccgatcatacagtgagtgctaccctgtcctgctggacggtgtcatggttggctgggtggataaggatcttgctccaggcatcgcagattctcttcgtcattttaaggtgttgagagagaaaagaattcctccctggatggaagtggtccttatacccatgacaggaaaaccaagtctgtacccaggattgttcctttttaccactccttgtagactggtacggcctgtgcagaacttagcattgggcaaagaagagctaattggaactatggaacagatcttcatgaatgtcgctatctttgaggatgaagtttttgctggagttaccacacaccaggaactctttccacacagcctgctgagtgtgattgccaacttcatccctttctctgatcacaaccagagtccacggaacatgtaccaatgccagatgggtaagcaaactatgggctttccacttctcacttatcaagaccgatcggataacaaactgtatcgtcttcagactcctcagagtcccttggtgagaccctccatgtatgattattatgacatggataactatccaattgggaccaatgccatcgttgctgtgatttcttacactggctatgatatggaagatgccatgattgtgaataaggcctcttgggaacgaggctttgcccatggaagtgtctacaagtctgagttcatagacctctctgaaaaaattaaacaaggagatagtagcctggtgtttggcatcaaacctggtggcccacgcgttctgcagaagttagatgacgatggattgccgtttataggagcaaaactgcagtacggagatccgtattacagctacctcaacctcaacaccggggaaagttttgtgatgtactataagagtaaagaaaattgtgttgtggataacatcaaagtgtgcagtaatgacactgggagtggaaaattcaagtgtgtttgcatcactatgagagtgcctcggaacccaactatcggagataaatttgccagtcgccgtgggcagaagggcattttaagcagattgtggccggctgaggacatgccttttactgagagtgggatggtcccagacattctgttcaatccccatggttttccatcccgcatgaccattgggatgttaattgagagtatggccgggaagtctgcagctttgcatggtctctgccatgatgctacacccttcatcttctcagaggagaactcggccttagaatactttggtgagatgttaaaggctgctggctacaatttctatggcaccgagaggttatatagtggcatcagtgggctagaactggaagcagacatcttcataggagtggtttattatcagcgcttacgccatatggtctcagacaaatttcaagtaaggacaactggagcccgagacagagtcaccaaccagcctattgggggaagaaatgtccagggtggaatccgttttggggagatggaacgggatgcgcttttagctcatggtacatcttttctccttcatgaccgcctcttcaactgctcagatcggtcggtagcccatgtgtgtgtgaagtgtggcagtttactctctccactgttggagaagccacccccttcttggtctgccatgcgcaacagaaaatacaactgtactctgtgtagtcgcagtgacactatcgatactgtttctgtgccttatgtttttcggtattttgtagctgaactggcagctatgaacatcaaagtgaaactggatgttgtttaacttgatgttgaccttttggattaagaggactatcagattaaagcaaaatgtaattttaattcaatgaagatatcattaccaggttactcttgagatttttcaacggtgttagaactctcaaccaagacctgaaaaccaagtatgcaaggtttctgaatctctctggtagattaactattgacgatgattttctgttatctttgttcaaaaagttcatgtcttctcaaaatatgaaatattgataaatggaagagcatacggtgacaagtctcctttccaaccccaggttccctacaccctgctctcagcaggcagtgagtgtcacacacctgttaatccatcttgagcaggacagtactatacaaatagaatgcaagctgtaatgtaattttatattttcttatagccacgttgaagtaaaaacaaacaggtacagtgttttttaccagctttatagaagtacagttgttacatatttaatgaatacaatttgatgggtctgactatatgcacacacctttgataccatcaccacaatcagggtaataaacatacctgtcatctcc

SEQ ID NO: 1323 - DNA, 4261 bp, Homo sapiens
attccagtttggaattataaagatgctatgaacattctttttcttcaacatctgttttgtggacatctagtttgattcctgttggataaatacttatgcaaaactgtacaatctaaagtggactgcattttgcaagaagttgagaagtttacagacctagagaaactctacctctaccttcagctgccttctggtctcagcaatggagagaaaagtgatcagaatgccatgtcatctagtcgggcacaacaaatgcatgccttttcctggattcggaataccctagaggaacatccggagacttcactgcccaaacaggaagtctatgatgagtacaagagctattgtgacaatcttggttaccatccattaagtgctgctgattttggaaagatcatgaaaaacgtctttccaaacatgaaggcacgtcgtttgggcacaagaggcaaatctaaatattgctacagtggactaagaaaaaaagcttttgttcatatgccaacactgcccaaccttgactttcacaaaactggagatgggttggaaggagctgaaccttctgggcagcttcaaaatattgatgaagaagttatctcttctgcttgccgtcttgtgtgtgagtgggcccagaaagtgttaagccaaccatttgacaccgtcttggaattagcccgcttccttgtaaaaagtcactatataggcaccaagtcaatggcagctctaactgtaatggcggcagcaccagcaggaatgaaaggaattacccagccttctgcttttatacctacagctgaaagtaattcctttcagcctcaggtgaagactttgccatctccaattgatgctaaacagcagttgcaacggaaaatccagaagaagcagcaagaacagaaactacaatcccctttgccaggagaatctgcagcaaaaaagtcagaaagtgctacaagcaatggagtgactaatcttcctaatggaaatccttcaatcctttctcctcaacctattggtatcgttgtggcagctgtccctagtcccattccggtccagcggactaggcaattggtaacttcaccgagtccaatgagttcttctgacggcaaagttcttcccctcaatgtacaggtggtcactcagcacatgcagtctgtgaaacaggcaccaaagactccccagaacgttccagccagtcctggtggggatcgttctgcccggcaccgttaccctcagatcttacccaaaccagcgaacaccagtgcactcaccattcgctctccaactactgtcctctttactagtagtcccatcaaaactgctgttgtacccgcttcacacatgagttctctaaatgtggtgaaaatgacaacaatatccctcacacccagcaacagtaacacccctcttaaacattctgcctcagtcagcagtgctacaggaacaacagaagaatcaaggagtgttccacagatcaagaatggttctgtcgtgtcgcttcagtctcctgggtccaggagcagcagtgcggggggaacatctgctgtggaagtcaaagtggaacccgaaacatcatcagatgagcatcctgtacagtgccaagagaactctgatgaggctaaagctccccagacacctagtgcccttttggggcagaaaagtaatacagacggagcactgcagaaaccttcaaatgaaggtgtcattgaaataaaagcaactaaggtctgtgaccagaggaccaaatgtaaaagtcgctgtaatgaaatgctgccaggcacgtcaacaggcaataatcaaagcactatcactctatcagttgcttctcagaacttaactttcaccagcagcagctcaccacctaatggtgactcaatcaataaagaccctaaattatgcactaaaagcccaagaaaacgactgtcttctacattgcaagagacccaggtgcctcctgtaaagaaaccaattgtggaacagctttcagcagctaccatagaagggcagaaacaaggcagtgttaagaaggaccaaaaggttccacattcagggaaaacagaaggttcaacagcaggtgctcagattcctagcaaggtatcagtaaatgtcagttcacacataggagcaaatcaacccttgaattcctctgcccttgttatcagtgattcagctttggaacagcaaacaaccccatcatcatctccagatataaaagtaaaacttgaaggaagtgtctttctcttggacagtgattcaaagtcagttggcagctttaatccaaatggatggcaacaaatcactaaagattctgagtttatatctgccagttgtgaacaacagcaagatatcagtgttatgacaattcctgagcactctgatatcaatgacttagagaaatctgtttgggaattagaaggaatgccacaggacacatatagccagcagctacgtagccagatacaggaatcttctttaaatcaaatacaagcacattcttcagatcagttacctctgcaatctgaactgaaggagtttgagccttctgtttcccagacaaatgaaagctactttccttttgatgatgaacttacacaagatagtattgtggaagagctggtgcttatggagcagcaaatgtcaatgaacaattctcattcttacggcaactgtttgggaatgacccttcagagtcagtcagtaactccaggagctccaatgtcatctcacacttccagcacccacttctatcatccaatccacagcaatggcactccaatccacacacccacacccacacccacacccactcctactccaaccccaaccccaaccccgacatctgaaatgattgctggatctcagagtctgtcacgggagagcccttgctccaggctagcccagactacacctgtggatagtgctttaggaagtagccgacatacacccattggtactccacattctaactgcagcagtagtgtcccccccagccctgttgaatgcaggaatccgtttgcattcactccaataagctccagtatggcatatcatgacgccagcattgtctcaagtagtcctgtgaaaccgatgcaaagacccatggccacacaccctgacaaaaccaagcttgaatggatgaataatgggtatagtggggttggtaattcatcagtttctggccatggtattctcccaagctatcaggaactagtggaagaccgtttcaggaaacctcatgcttttgctgtgcctggacagtcttatcagtctcaatccagacatcatgacactcattttggtcgtttgactcctgtctctcctgtgcagcatcaaggtgccactgtaaataacaccaacaaacaggagggttttgcagtccctgcccctcttgataataaaggaactaattcatctgccagcagcaacttcagatgccggagtgtgagccctgctgttcatcgccaacgtaatcttagtggaagcaccctctatccagtatctaatatcccacaatctaatgtgaccccctttggaagtccagttaccccagaagttcatgttttcacaaatgttcacacagacgcatgtgccaacaacatagctcaaagaagccaatcagttccattgacagtcatgatgcagacagccttcccaaacgctcttcagaagcaagcaaacagtaaaaaaataaccaatgttttgttgagtaaacttgattccgacaatgatgatgcagtgagaggtttgggaatgaacaacctgccctctaattatacagcccggatgaatctcactcagattttggaaccttccactgtttttcctagtgccaacccacaaaatatgatcgattccagcacttctgtttatgagttccaaacaccatcttacctcaccaaaagtaatagcaccggtcagatcaatttttctcctggagataatcaagcacaatcagaaattggagagcaacaattagatttcaatagcactgttaaagacctgttgagtggagacagcttgcaaaccaaccagcagctgtgttcttgtccttcctctctgctggctggaatgcaaatgtgatggctagaactcaagcagccctcctggacttcatgttaaagacacatgctgaggatgattgagcaacaagatacaaggagcccagggcatgatgactttggaagggaagatgcccaactagtcctgactgcttacctctggatgtgttttacatgagagaaataaatgtctttctggtttaactcac

SEQ ID NO: 1324 - DNA, 4453 bp, Homo sapiens
agagtatgtcctgcctggaggcaaggtagcttggcttttacattccttcatccatctgtcactggctatgggccctcctgggtgggccatcacctcccaagcacttccagctctccatagtgttagggcagttgcagtagcaaaagagaaatttctgaagaaggctgctacagatactgctgcagcagtatcttctgttgccatccagattaccatttccattctcagccttctgaagaaggctgcagttggaaataaagcatgtaaaagctgggaatgggagcacagaccctgcaaaagggacagaggtggcaactctggtggcagcagcagtatctgctacgtcctcttgggttttataggcaccagcaaaacacatcttttgttaaaatggtggccttctgacgggaagggcaggtctactactgaggtcaaaattcatgtgttatttttgtaagcagctactaaagcagtatcagtccagagaaacgagtctatctttgaagaccaaatacccaaaagatctgcttcaaccttccccagttaatcttttgccagaagattcacaatctgaatgtggctgtgagtatttgattagagtattagtaggtgaaggaaggtggtatgcaagaatcagctttaatattatccccgtagaagggaataattggtgattagttttcaggctatataggactattcctcctaaatgaatggataagctgagagatttacttctaaagaggtatggtcttttcattttaactcgagattttaggaaagaccaacttaaaaagaaagcaaaggaagtttcaggagatttcagaatttagaaggaattctgaaattctcttctggggaaatgaaatcctaagacttgcatggatatttctgaaaatcaaaatgaaatattttggttgcataaatcgtcaactgtagtttttaactaaggaaatgtaatttaaaaaatccaagtgttcgatttacataagaaatagagttatttaaatagaagatttccaaaacgctgttagtggtctttgacgtctttaaaaaggcatttatatttgtgaaaagatgatctattttaaggtgtaattatttctaatgtgcctcattttggggtctcttgagagattagaaattgctaataagcaattttaaatattttcgaggtaagttaataaaacacttcatcggtaattcatgacttgttatcattctcacattatccttgtgtgggtaaaggcctgtccatcattggaagtaattggaaagaaaactttgcctgaagctacatgagaactggaacccttaaatcatgaatggtggcaagattccaaaattaattatgaagactattggaatgatgtagcatcctttaactcttattgtgatcgacagaaagtatcatagatggacaactcactttccctttgctctgtgcttcctggtgattttaggtcacgtccactctgaaatctgagctgtcattaaagccatgtcttcgtgtctgtctgtctgaagcagcaaagatgagacagtctgtcgctgtgtgtgaccccagtgagccccataagcagaaggccctgagtctcaatttgtttcttttgattactggcagatcactcactgtgccatttctctgatgtgactgagcatattagctgtgccctcccctaattattcatgcttccaatgttacccattcaaaatttatgaccatgaggatggtgggttagaagcctgaggaactgaggctcaagcctgttgccagagatttactgtcattgttttaggtgcaaagtattaacaggcaggccaactcacttcaattcctgacttagtacatttagtggagaattagttgagaatgagtacattttccctgacacagctgcaaaatcaaacacacgaggagttattgaaaaactgggatttaagcttaaacctatcatttctatatctgatgggcgccatcccatatctgtgaaaatctgacattggggaagtgaaatgcaggcttaaaagaatgctttcaaggtgcatagcaaaagcaatcttactcctttagtgtttcccatttaatacttttcaatttttagttagttaattaaggagaaaatcacttaataatcacataacatagattgctactataaatacctgtattgtctatgttacaattttcgcatctattttactttattatttgtaatctgttgggttttgtgaccttgtgctccaaatgattttgcatctgtaaggtggttgggagttagatacccttcatcatatcttttgccatctttgagtggcttttttaacctttccttttaaaaaaaaatcccttaatccacagtctaataaagtaggaaaaacaatcaataaagcatacctacaaaagttccattttaaacttttagtgaacttaagtttactcatagtgcatttaatcttcctttctgtctgtcagttagcaaatatttattaagccccaacaatataacagagacattgctggctgccaggtcagggggcaagagccatgatgcatttcatcttactttgaggctgtcggtctacaaatatttattgagctcccaacaatatgccagggactttgctagctgctgtggattcagagatgaaaagacatagttccttttattcacagaatttacaggagtgatacaaacaaaacaacataggagacataagatatgtactctgattgtcttggtctgttcagactgctattacaacaataccttagactggttaatttataaacattaggaatttattgcttacagttctagaagctgggaagtccaagatcaagggcaccagcagagtcagtgtctggtagtggtctgttctcatagatgagtgcttttaaactgtgtctgcacttgtcagaagtgcaaagggacaaacaggctccctcaagtctgttttgtaaggacactaacctcatttgtgaggggatgtcctcatgacttaatcgcctcccaaaggccctacctcttaatacgatcacagtgggagttaagtttcaacataggaatttggggggaacacaaacattcaagcaacaacagtgatgatggttaggccaagaacggtgcagtcctcaaggagaaaagctttatatctgctagggagagtaaggaaagtagccttggagctgaggcttggtgcacagagaggagtttgccaggcggataagagcaggagaggtctttcaaagcaggggaaacaacatggtcaaaagcatgaagacctgccagagcttccagaatctatcagagactttgagttgttggagaatgaagtataaggcaaggagtgactgcagctgaggcatggttggatgagggtcagattacaaagaaactgtatatgctgttcaaagtggttcctatattttcttcctgctggttattagaagggcatgtgccccttttaggaggcatctgctatggttaagataatagaaaagggaattttcctacaactcagattacatagttgcgagtgagacacattcctaggtccctctccccaaaaagccttcagaattggaacagattttttgatggtgaagtttgtggtgacatcactggtttgctgctctaaaggccactggaattaggaatgcccgtggatgaaagatattttttgccatggacttaggaatctgggtgtgagtattttctcattggtgggtcaagactgacagctgccctctgcaagctctttgaaaaggtaggaagccctgaaggacctaggtgatgctattacttgatggctcaagcagatcttcacaaattcaatacatgaaagataggaagtaagacgtatgagtgatgggggagtgaggttagagtggtacatctatcatagactggatagaaaggaaagaaaagcagaggaggggaggatacacaacttggcaatgtcgagatccagccatccaaacaagcatggaagtccttggtgaagcttgactcccaaggggcattgctttgcatcaggcacctgctagtctctgtatgcaaagacagcatggctcttctagactgtaatgaatagccaccaaaatctcttggatgtgaacctgctgacttcccttgtgaaaactatgcctaaaggtcagtgaatcctgttttggagctgcttagggtcactaacaccaagaaaacttcatacttcacttttctcttatccctgcagaatgctggaatggaagaaaaaaaaaagatgaaaagtaggtcatataaattggtaatgcctaattctaatccagtgatctcatatagcattagaataaattagaatacattttgatgaaaatttccattttattaaatagttgcttcgtgcataagcagtgcagctggaccacactgtttctaagattgttttcaataaaatctcattagctcac

SEQ ID NO: 1325 - DNA, 4352 bp, Homo sapiens
aatttattaaggctttaatgaaatctacctattttatggtatataatctcattaattgtccacttggaaagaataataacagatatttatttattggccagttactatgggccacaaattatgctgagctttttttaatttcatttcattttattttattttttgagatggggtctcactctgtcacccaggctggagtgcagtggcgcaatctcagcttattgcaacctctgtcttccaggcccaagcaatcttcccacctcagcttcctaagtagctgggaccacatgcatgtgccactacgcctggctaatttttttttgtatatttggtagagacggggttttaccatgttgcccaggctgctaagctttttatatacagtatatagaaagagttggttttcttaaacaatatttatttctcataataactctatgaaagcaggtatagacttcttgctttctagggttggtatcttgcttgttgaggacctacccttttgtgttgccgaatttttcattgtttgagttctgtcttttgtttcagaaagccatggagttttgaaattattgttatatcattatttgttacataattatttctacttctagaatctcatgctaacttggaagtgtcttctcagcatcaagcctgatatggaggggcagctacaccctaatacgctccaaaactagttatgctttgttttatacgtaatgcttctgttattagacaagtggtttccaaatatcagaagcagtgctaggacttaaaggaaaagggggagtgttttttcttctaatagaacttttgagcagtgatgaaaggaaaacaagaagactcaaaagattataaatctcaggcacgaattagtgttctgccaattaggaacattctgattgcttgacaaggtctatattttgctgatgaggagtagaagcctgtgggaggtgggggtggaagcagcagaaggaaaagagtagcaagtatttagtaaaatgtattcatcatagtggataaaaatcaagctttggggaaaaaggtcaaactccttcaatgatgctgtacatctgtacctttactccatcctatagcaaatatttgtataactgcgcagaagaaattggacaatattccttgaaaaattcttagaaagttcaactttccaagttagtatcaccccaaggaaaattatatgagtaggaatacctaatttctagccatactctagttccagttagcttctctaagtagctggaactgcaggcgtgtgccaccacacctggctaattttttgtatttttggtagagaaggggttttgccgtgttgcccaggctgctaagatttttatatatagtatatagaaagagttggttttcttggccaggcatggtggctcgcacctgtaatcccagcactttgaaaggctaaggcaggtgaatcacctgagctcaggagttcaagaccagcctggccaacatggcgaaactccgtctctactaaaaatacaaaaattagccgggcgtggtggcacgcacctgtaaccccagctacttgggaggccaaggcaggagaaccacttgaacccaggaggtggaggttgcagtgggccaagattggccactgcactccagcctgggtgacagagcaagactctgtctcaaaaaagaaagagttggttctgttaaacaatatttatttctcataataaccctatgaaagcagatacagacttctggctttttaggattggtatttcacttgttgaacacctacccttgtgtcagatgtatagcaggttaacaaagtcaatacagtgatacacttgacataatctttgttctgagtttttttcccaattatagtaaaattggaggtcttaactgttctacattagataaatatatgcatttgttttaaagagctaagcaatgagaatcttacaactagagctgaagttcaagaaataaatgtccaatgattaaattttttccactgctgttcacatcatgatttgttgtgattaatgtatgtggatgaggacataatagaaaaagaaaatgatgaggcttgtatatattgtgtttctgcacaatgagttcctttgaatgtttttcgttttaggaataaaattgaagggtgtttttcttagagaacatcatttgtcatatttatttgatcaagaagttgaagatttatataataaggtatgggacttacacatttattttgataaaagaacacagaaaaggtcaggtatgagcagaaaattgacatttatttcagcctaatgtggatactgtactctgaattaaaaatttcttttccttactcttccagcttttaaagataagtattatttcaaaatagtatttttttaattaatagattcaattcaggaaaggcattggagggggtggagcttttaactttgacagtctcactctgttgcccaggctggagtgcagcggcgcaatctctgctcactgcaatctctgcctcctgggttcaaatagttattgtggcccagcttcccaagtggctgggattagaggcgcatgccaccacacccagctaattttttttattaagtagagaccatgttttgccatgttggccagactggtctcaaacttccagccaccaacctcagcctcccaaagtgctgggattatagtcataagccaccacacctggctgttggttatcttttcttagaaataatgatataatcttttcagcacctgatattcttaaagatccagggtttacaaatgactgttagatatgccaaggatgactagcctataacttaaggaactgttcaggaacagtagaaaagaaggtgataggaaactgggaatcttaaatctaatactagttctgtcatgaattaggcttgttattgtagttgtttctcaaatttaagaaaatatgaggggtcttgaaaaagtgcatggaaaatgcatatcatgaaaaaactatgcatggatttcaaaatttttggaccaaaataaactcctactaacttgttataacatgtctgaacaggatctagtttgaagcactaagaagaataagacatcagtttgaaaagaggctctatcagaacaacacgaattctgctaaaattgaagcaagaacaaacatcaaatatatgttgacacttgggtggaagaatggtgaactaattgatgctttatgaaaagttgatagggacagtgctccaaagaaatcagtttacaaatggataactcgttttaagaaggcataaggtaatgttgaagaagaagcccacagtggcagatcatccacatcagtttgtgagaaaaaagttagttcatggcgtaattgaagaaaaccaacaattaacagcagaaacaacagccaacaccatagacatctcagttggttcaccttacacaattttgactggaaaagttcagcaaactttatacctgataggtaccaaaaccattgcacccagatcagctacagacaagaatagagctttcaatggaaattttaaataaatgggatcaggatcttgaagcctttcattgaaaaattgtaacaggagatgaaacatggctttaccagcgcaatcctgaagacaaaacaaagcagtggttaccaagataagtagttcagttaaagcacaagaggactggttgagagcaaaggtcatggcaacagcttttgaatgctcaaggcattttgcttgttgactttctgtagggccaaagaatggtaacgtgcttatcatgggagtgttttgagaaacttagccaaagcttcagcagaaaaatccccgagaaagaccagagagttcttcaccacaacaatgttcctgctcatccctctcatcaaacaaggccattttgcaagagttttgatgggaaatcactaggcatccaccctacagtcctggtttggcaccttctgactttttgtttcctaatcttaaaaaaatttttcagggcagtacatttttctcaagttaatgtataaagaaactgcattgatgtagataaattcccagaactctcagttctttagggatggactaaatagctggtatcatcacttacaaaagtgtcttgaatgctatagagctaatgttcaaaaatatagtttatattttttatcttttaaccatttttccacaaactttttgaagtctccttgaatatgtaccatttataaaggggaaaaattctgtgactactcatgttgacttaatgctgacttaattttctgttttgtaaatatatacaaacaagttgatacaaattttgtttatagcccttaaacaaatttgtgaaataaatgcattcagaaacaaact

SEQ ID NO: 1326 - DNA, 3845 bp, Homo sapiens
gttgaacaaacccagcctgtgacataatcaaagcataccttaatttgtatctcccagtgtcctttctaagatgtatttggtagagaaacattttccctgccactgggtgaaatctccccattattcttctgcttgttctgaggaaacaggcaattctatggtcactttaggtcacaaacacaacctcaatttagaaatgagaatgtccagtcaagcttctaaccaaaattcccaatttgatttgggtttaaaccttctcccctcaccctcaggcctgcttcagggaggtggtgtgggtgactccttctctatctctccttccctcacccacccgtggggtacagtggggggtgttggagatggcaaggggagaggaagggtctcccttgagctgccaccatcctggctggcttcaagctgcccctttctgtcgtgggctccatggagatggccactgtcacaggggccctctcactcttaaccttgggggatgcatctctcctcataggggtcccttgcaagtccttcgtcagcccttaggaacccaacatccaactcaagcttcttgctgctgccacacctctgcccctccaggaggctctaggggacaggacccaagaggaccccttgtaggtgctctctgccaacactggcccatgggaaacactccagccagcagcctgtactccgaaagtcctgggaatgtggcttaccttagcacgcccacactggctccttcaccagttcagccaggcagcccgtttctctcagcctctagatgtccatgcccacatgagaccactgggccccctcacaatggccacacattattctctacatatagtggcccctctcatggaagagcccccatgaccccattccacccttccagggagatggtcaccaaagaactctttgcttcctcttcccatcctaggagaatgtggtgggtataggggtaatagtaaatgtgggggttttgggtagccatggccaaattttagcagctgtgggtttggactgggctcttttttgttgttgttgttgttacgtaaattaacccatttattacaggccagtgatgtctcaaagagtagaggagcgtctactggtctttcaactccttcaggcttctgatggcggactttaccgtgatagcggaggtggtattgtatgtccaggcaccgccagccactgtcttcacgcgggaaccacagtgccagatccccgcagctcatctcttcatcttggtttcgccacagaaagagcaagtgtacttggcctgctggctgatttcaactttcttcaccattttccagagggaggccccatagcgggtcccgtatttaccgacgatcccgactttcttggtaggtttggccatgtcaccgcgaactaggtccgagcccagagagttggactgggcttttaaaaaacagttactggttgtcacagcagagctttctagaaacatcttacaagtcatgtccaccacccccagcctcagttttttcatatccttactgcgggtggcagcaccttactgggtgggggtttgtggtgagggctgagtgaagtagtgaatttgcggagctaacactccagaattccacaatcacagacctgcaaattccatctccgtgggaccatttacaagtgatgtggcttctctgagtctgtttactcctttgttaaatggaagagcctctactccattgcatctctgtaaggttagttaagtgaatacatatgacatgcttagcacgggacctggcacctggtaagaactcagtccatgctgggcgtttttaatacaacggtgggtggctggtactgacggaggggatttgggatctccaccccttccgtttccctcactattccaggccctgttttggaaatgcttcagccaggctgggatccagggcccctgggaacagagaggacatactgtacctccaagcagccatgctgactcaggttaggaaatcaatgtgtgaccacaaaaacacagccaggttcttcccacttctgggaaatctgcacagccaacccatgggcatctctttaccctgtcccgagaggtggccagcttcgttctaggacctgattctgcagcttgtgagcacaaggctggcacatggagaaacaggagtctctcgctccttagggaaccccaggcccggggtcacaagctttgcacgaccctctgattggggtcaaacatgtctggtgtttgcgaagcctctgacttcccccagcctgcgtctggacacttctcaagccaagccaggctccggaccactggttgggcaacgcatgacctcaaactgggtcagacccatcagatgagcatctgtttaagagtataggacactttgttctttagaatcccaagggtcagagtatgaaccctccccgtccccaattcaaactcctcctccatcacttactgccatttacttactctgttactttgagcaagtttttcagctctctgagttctagttttcctagccaccaaatgcagactaacaagtaccttcaccttccagggttgatgtgagattcgggtagtgaatgtcaaagaatggcacacatattagcaggcactccataagggggagttattattgcaaacaggggcactagacaccaagtaaaaaacagtatggtacatatgctacagtggatgagagggcagagctgaaagccagactgcctgggttccaaaccaggctactggccaggtgcggtggctcatgcctgtaatcctagcactttgggaggccaaggcgggtggctcacttgaggccaggaattcgagaccaacctggccaatatggcgaaaccccatctctactaaaaatgcaaataaaattagctgggcgtggtggcatgtccctgtaatcccagctactcaggagactgaggcaagagaatagcctgaacccaggaggcagaggttgcagtgagccaagattgtgccactgcactccagcctgggccacagagtgagacgctgcctcaaaacaaaataatacaaaacaaaacaggctgccctgccacctcctgtgtggccacagggaaagtctctaagcctcagttttcttctctgtaaaatgggaataatcataatacagttataaggattcaattagattagttgcactggaaacagtgcctggcacatagtatcacctaataaccattaacgattttttattttgttttatttttccagtctctgccccagttgggaagcatgaactatttttaattagccacacaagttagtaatgtcggtaatggtgctgaaatcacacgggtcagtgttttgaacaaaattcacatggaagtcatatttagtgagcatctacctacatacctggtgctaacagaaaccatacatttagatacatgtatatgtacatgtaaacacacatatgcacacacacatagtgtgaagtaagtgttgctgtcctcattttttaaaacctttatattatagagcaaaacagttgcagaaaaccacacaaattaaatttgtagcagccaggtgcagtggcttacacctgtaatcccaccactttgagaagccgaggtgagtagatcacttgagctcaggagtttgagaccaacctggggaacatggcaaaacctgaaatgccatctctacgaaaaatacataaattagccaggcatggttggcacgtacctgtagccccagttactcaggaggctgaagcaggaggattacttgagtctagggaggtctgaggccacagtgagctgagatcacactactgtactccaccccaggcaacaaagtgagacactatctc

SEQ ID NO: 1327 - DNA, 972 bp, Homo sapiens
aagatgcagcttttgaaaaggtaagacattcctctccactttctcgcccacctgtaacaaagctacaaatcttccagtttccatttctatgatggtttattttttgcacttcaaaacaaaaaagttaaccaaattaattaacctggcacatggaaaccctcaatcccttttaaaatctgagagccgatgaatcttgaagaaatggcgcacagttccagtgctgttgatttgaccatgagccctggtcttatcattggaaagtcttttgctaagaaaaatgaatacggtggtgaaacaatatatctggaggagcttttcaaaattagtaaacttgggcatgaaacctggtggcagagattagcagcaccaggtaagtcagccatgggatgtgctgggaccagcaggcttgttagatctctggcctgccaggtgatgagcacacagactgtggatattgggtggggtttagctgccaaaataaatttttctcattagaggcaagatgatttccaagttagatttttttttttaagatttattttaggaatgactgagaaaaagaacattgtacctaaattaaatgtccaaatgcctgacggtggcataagattgcatcatagcgcttcctttgtcattaagtgagttttaaaattgtgaaaaggggtggggaccatgttaagaaattaaccattggccaggcgcggtggctcacacctgtaatcccagcactttgggaggctgaggcgggtggatcatgaggtcaggagatcgagaccatcctggctaacatggtgaaacctcgtctctactacaaatacaaaaaaattagccaggtatggtggcgagtgcctgtagtcccagctactccggaggctgaggcaggagaatggcatgaacccgggaagcggagcttgcagtgagccaagatcataccactgcactccagcctgggcgacagagcaagactgtctc

SEQ ID NO: 1328 - DNA, 3608 bp, Homo sapiens
agcgagtacgcccggaaccgaagcttgcgaagcgggtcgcagagagagatgggcgttgcagaatcagctggggtcacttatttccggtctcactccagatgaaggagccactagccggcgagagttcaccgagggaacgtgacactcatatctcatcgagggaccgtgttgagggagcccctacagagaggccaaaggaggagagggcctacggagaaatgaacctctgtaaaagctgctctttagggatcagtctttttgtgactctagcttcatagcttggtctctccattactccagccttcctttcaatcatacactgcctctctccagcaccaccaatggatacttcttttctaaaaatgtttttctgtgggttgctgccgtgtctgtgagaagctggacacaaactcattcctaaaatatgtggatggaagctatggtaaccatggagacagggcaggtggcaaggagaggcagagacagtgtgagagaccaatagacagataggaagagagaagatataaggaatgtttcagacagagatcgtcaagcaagatggaaaaaataagacgtctaagcaagactgagattaaagagatgcaatgtgagagagtgtattacaagtgtgccatgtgccgtgtatggcaggtcaggtctggcgcacaggagcgcacaaacacaccaagtgcggagaatggggatctgctgaatctcagcgaagaatctggatgatggtccctgtctgggtcgcggaggagtcccctaaggaacacttaggtttgttggggctgaggggaggtcggctgagaaaaggaagtcaggattggagcctctaggtttttgagggtttatgtgtgcatgagtgggggagcagtttggtgcctgacgcccccacccgcagtgactaggctataaatagcacagcagagctccgccccccccccccccccccgccaagcttctctcctcccgagtcggcgctgtgcccggggcgctccgggaggagggaccaggatccagcgccggggcgcagatactgacaccaagggaatccgggtgccccccccccacgccatgcgggcccccaggaaactggctccgccacctcggctgccccgtggccacggccccaatcctggccaggcggagattctgcggacattcagggatcggcttcgtcactgagacctcaggcctctgccagccactccccctccccatacccctagtcatcctcggcaggtctcagtcccggccccatctgtgccctcgccccagccgcagctatgttgcacaccgagggccacgctcttcttcgggcggtgggtcagggtaagctacgcttggcccgtttgcttctggagggaggcgcctacgtgaatgagggtgatgcgcagggggagactgcgctaatggcagcctgtcgggcccgctacgacgacccccagaacaaggcacgcatggtacgctacctcctggagcaaggcgcggaccccaatatcgcagaccgattagggcgcacggcgctcatgcacgcttgcgccgggggtgggggcgccgcggtggcctcgctgctccttgcccacggcgcagacccctcagtccgagatcacgcgggcgcctcggctcttgtccacgccctggaccgcggggaccgcgagacccttgccacactgctggacgcctgcaaggccaagggtacggaggtcatcatcatcaccaccgatacctcgccctcaggcaccaagaagacccggcagtatctcaattctccaccatccccaggggtggaggaccctgctcccgcctctcctagcccggggttctgcacgtcgccttcggaaatccaactgcagaccgctggaggaggagggcgtgggatgttatcccctcgcgcccaggaagaagaggagaagcgggacgtatttgaattccctcttcctaagccccccgatgacccatccccttccgagccgctccccaaaccaccacgccatcccccaaaaccactcaaaaggctcaactccgagccctggggcctagtggcccctcctcaaccagtcccacccactgaagggagaccggggatcgagcgcttgactgccgaattcaatggcctgaccctgaccggtcgaccccgtctttcccgacgtcacagcaccgaaggccctgaggacccgcccccatgggcggagaaagtgactagcgggggtcctctctctcgccgaaacacagcaccagaagctcaggagtctggtcccccttcagggctgaggcagaaactgagccgcatggagccagtggagctggacacccctggacacctttgccctgactcgcctgagtccagccgcctgtccctggagcgccgccgatacagcgcctccccgttgaccctccctccagccggctcggctccctctccgcgccagtcccaggagagtctgccaggggcagtatctccgctaagcggaaggaggcggagtccggggctgctggagcggaggggctcggggacgttgctcctggaccacatctcgcaaacgcggccgggtttcctaccccctctcaacgtcagtccccaccctcccatccctgacattcgcccacaacccggaggtcgggcgccttcgttgcctgcccctccttatgccggggcgccaggctctcccaggaccaagcgcaaattggtgagacgccactccatgcagactgagcagatccgcctgctggggggcttccagagtctaggtgggcctggggagccagggcgctgagaggagtgagaggagccaaggagggtggggattaggaccttaatgggataggtgggagaaccagctcacacacacaccacgaacaaagggatctcttgcatgtgctcatgggtgcacagtgcacccacacatggttaaacatgtgtccataagcacagtactcttattagcaagaaagaataagtactctatttactgggtatatacacacatgtattcatgccctggtcatttcacatgcatatgggattacttgtgtacctacaggcacagcatatcaataaacacacagggctagggtcccaaactctcttgcatttgttcagaagcagtagggaacccttacttatgggcagtctccgatgtctttgccctcctgcagaagcaatcccttgctttccatgtatgccctgaaacacagcttatcatgattttgcacactctctccgtggacatcccagcccattctgcaggtcttgcttctttctccaggcctggctccttattcacaccctgcttctaaccccaaccacttttcaggatatctttttcactcttcttgggggttcctgcagcaacccccagcctcagttctgctgctgtctttactgctctcaacttcacttctcaacttcctgctttttattcccaccctgttcctccaacaactacaacagattgtctcattttcccagggggtgggtcatgggctctaagctgctcttctgtctgtctgagcttatgaacacccccacaggtagaagtggggagaaaccctaaatcactcctctctccacttgacatatcaaataaatgtgttcagaagtc

SEQ ID NO: 1329 - DNA, 5897 bp, Homo sapiens
cagcccggccttttgcttcagcaaaagcctcctgacgaccccgtggtgaagcccaaggatcgaccaccgtctgcccgtgtgaaaaaatcttcttgctctcgtatagtgcttagctgtgatgactccgttaagatcactttcaaatgtgaaacagaatatgcattcagtttagacagcaaatataccaacaacccactggagaaaactgtagtaagagcattacatgggccctggaatactgatttgcctgataatgtggaagaagtgaagcttttacttcatatgtgggtagctctgttttacagcaatcagaacaaaatcatacgatcttcccgaaaggttgtagaacacagcaacccagcaaaatatgtgtctataaatagcacgttagaatcttgtgagctccgtgaaattgaggagtcccttggtttggaaaaatgttctgcagactctctgttggagactaacgaaatttccagggctcatgctgctgaagtatccttccgtgatcctaactgcttgcttcctttcattaaaacaccacttacccaaggcttggaactctgtgtacaaaatgaacagaaaaaaacttttgcaagagagtgtgatccagacacccaagaagaccagaatttcatctgttcttacaataatgaggtaactggggaagaagctaaacaagaatcattggagacttctaatcttgtgctttcgggtattggaagtacacaaactaatggaccttctgttcctagtgaagaagaaattgttcagccactggatagcacaagagtggcttcttacagtggcactgttactcaagccacattcaccaggacttacgatgggcctggcagtcagccagtgatatgtcagagctctgtgtacggcacccttgaaaacaaagtggatattcttgatgcagcagtgcaaacaaaaacaggtactttacaggaccttatccaacatggcagccccataaacaatgaatgtcacccttccttggaaagaaaggatgataatatggggtgtgcagtgattaacccggaaccaattactctcacctttgaaaaaaatgcacatgtaccaatacagacagaaggtgtaaatactgctgatgaacctacaacctttaagaaggagttgattaagcaagtatcacctgctgcaagccttagacatcctgtatccacctcggaaaatgcacgaacacaaggcctgagggacattccctctctagtagttgcaggacagaagggcactaagtacctttgtgcctcgtcagtaggtggagagacacttgataaagcagtgtgttcattacagaaggagacgccccttccagtctctctaccatctgataaaacaatggtcatggaggcactatcattagctaaaagttctagtcatctatcacccagtgaagaagtgagatgcactcaggatttcctttcacagactcagagtctcctcggcctatcttcagaagggcttctagaactgacacaggttgaagtggactcatcatcagcctctaccaccttgggaaggcagtgttcacttaattgcatttcgtcaggatgccacacatcaggtgactctttagaactaaggaagaatcacaagaatggtccaaacactgaaaatatgaatttggaagcgtttgattcagtatttatcaaacaaacaagcctgtctgtgagtagagaggtcagcctagagttatcagaggaagattctgacattgacttagctctaacaatatcaccacctacaagtcccagagaagaaatgccagctggtgaaatagagcaatttgaggaggccccattctcaaatttagaacttcaggatgtagctgaggaaataggtgaaccggaagaggtggctctcacagaaagcagagaagtgagttctgctgacaatgtgtcagtatatccctcagtgtcagaagaaccagtagaaaataaggagagaaagggggataatttacaaccagttactttaatactttctaaagaaaattgcacccttgagattgcagaggaaattaatgtgacctctgattttccctttgattctgtaattgaagaagtatcaccagcgtctagtcctgaacctccagtaccagttaaagagacacgaccatatcaggctgtgactccatgcattttaaaacttcatggtacacagtgtgagaagagcaaccaaatctcccaatgtgagtcagaagacttaggcataacagaaaaagaaaatgtttttgttggtcctacccatccagtggggcaagataactttacccaggtacaacaaatgcaggtctctgccgaaatgcctctaatattaactgatcatccaggaagaacaggtagaccaacccttcctggtaaagtaactgaggaaattgtctcaagtgagcatgatgagggtttatctttctcaggaaaggtgcagtgctatggtagggagttaaaccagcctgcctcagctgccaaatgcacaggtgacttcagtccttctcctgaaaaactggtaaaatcaggaaatccattgcagccagttagtatagagaatagaaatttggacttaaaacatcttgtcttggagtccagtgaacctccatttggtcctagaaatgttattgaaaataagtctttgtctgacacattggtttccacaactgcaccaagtggtatagtgaatgtgtcagtaaaacagcagactagccctaaaagcagtcagaaccatctctttcccggtgatttgaaaacagatgaaggcatttatctgcaggtgaagtccttgacagctgcctcggttgatggagcttattctacacagggatgcatgtgctcagtggtccccacgctttgttcttcctcagacaatgctacattaacccattatgtaagaccaataaatgcagagccagcgtttcaagcacaggaaataccagcaggcagaatggccagtttgcttaagaatggtgagcctgaagctgagttacataaagaaaccacaggtccaggcactgctggccctcagtccaacaccacatcttctctaaaaggtgaacgcaaagccatccacacgctgcaagatgtgtcaacatgtgaaacaaaggagctattgaatgtcggggtttcctccctttgtgctggtccctaccaaaatacagcagacaccaaggaaaacctcagtaaagagcctttggcctcctttgtttcagaatcctttgatacttctgtttgtggaatagccacagagcacgtagaaattgagaacagtggggaggggctcagggctgaggctggttctgaaaccctaggcagagatggagaggtcggtgtgaattccgacatgcactatgaactctctggagattctgatctagacctgcttggtgattgtagaaatcccagactggatttggaggattcttatactttaagaggtagttacaccaggaaaaaagatgttcccacagatggctatgagtcgtcgttgaacttccacaacaacaaccaagaggactggggctgctctagctgggttccaggcatggagacgagcctccctcccgggcactggactgctgcggtaaagaaagaagagaagtgtgtgccgccttacgtccaaatccgagatctccacgggatcctcaggacttacgccaacttctctataacaaaagaactcaaagataccatgagaacttcacacggcctgaggaggcacccgagtttcagtgcaaactgtggcctgcccagctcctggacaagcacttggcaggtggcagacgacctcacccagaacactttagacctggagtatctgcgttttgcacataaactaaaacagaccataaagaatggggattctcagcattctgcctcctctgccaatgtctttccaaaggagtcaccaacccagatctccattggtgctttcccttcgacaaaaatctctgaggccccatttctgcatcctgcacctaggagcagaagcccccttctggtaacagttgtggagtcagatcccagaccacaggggcagcccaggagaggctacacagccagcagtctggacagctcttcctcttggagagagagatgtagtcataatagagatcttagaaattctcaaagaaatcacactgtttcattccacctcaacaaactgaaatacaacagtactgtgaaggaatctcggaatgatatttcacttattctcaatgagtatgctgaattcaacaaggtgatgaagaatagcaaccaattcattttccaagacaaagagctaaatgatgtttctggagaagccactgctcaagagatgtatctgcctttcccaggacggtcagcctcctatgaagacataatcatagacgtgtgcaccaatttgcacgtcaaactaagaagtgttgtgaaagaggcttgtaaaagtaccttcctgttctaccttgtcgaaacagaagacaaatcattctttgtaagaacaaagaaccttctgaggaaaggaggccatacagaaattgaacctcagcacttctgtcaagctttccacagagagaatgatacactaatcatcatcatcagaaatgaagatatatcatcacatttgcatcagattccttctttgctgaagctgaagcatttccccagtgtcatctttgctggagtagacagccctggagatgttcttgatcacacctaccaagaactgtttcgtgcaggaggctttgtgatatcagatgacaagatactagaagctgtaacattagttcaactgaaggaaattatcaaaatcctggaaaaactaaatggaaatggaagatggaagtggttgcttcactacagggaaaataaaaagctaaaagaagatgaaagagtggattcaactgcacataagaagaacataatgttgaagtcatttcagagtgcaaatatcattgaattgcttcattatcaccagtgtgactctcgatcatcaacaaaagcagaaattctgaaatgtttgctaaacctgcaaattcagcatattgatgccaggtttgctgtcctcctaacagacaagcctactatccccagagaagtctttgaaaataatggaatccttgttacagatgtaaataactttatagaaaacatagaaaaaatagcagctccatttaggagtagctattggtgactcaactacagcctgcctggatatggatgatgccaataaaaaattagtattttccctttggaaaacttgtgaacatgtgaatacacatgtgaacagtcttacatttgaaaaaccaatgttctacaacttggaaagttttcattttttatattttgctgaaatatgtcacagtggcattgcagttgtctgttagctttgggttgcagtgctagatattgttttaaattattttcattttaaacaagatgccttctaagctattgagcttattaaaaataattttacatgtttacttagttggagcaaaaataagtctattttaacaaatagctttgtttttgcatgctaatgtcagaaaggcatacgatgcacattatgctgttttaaaggttttaccacccttgtaaaaactataatcttaaatggttttatttgctgttacacaaacaacactacataaaacattttttcctaaatggtacaaatttataaactatcatttttcacttacggtatttgtaaatactacactacaaaaatcagctttctgagaaagaaataatcatttatttatgatattgaaaatttctacagtaaacactcaaaaccaagcaaaaaacatttgtaagatacacggtatctatttggagcaacggtttttgtaactaatgtgtttcattttttaaataaagacaactaaaaat

SEQ ID NO: 1330 - DNA, 3587 bp, Homo sapiens
cttgcaaggctgtctctggtttcgtttcaccacccaggataaacctcagcttcagtaactctcctgccgctgcagtcctccagtcttgcggtggtagggaacccaattccaacgcctagtgctggggcactcgccacactcactgctcaattctggctttgtgggccatttcctgctcagagcatgtgctccaatctccagccagcgactaaaatgcctgcagtggcccctgctgccaggtggccagtgactgactttgtataagccagggttaaagattgcgtcctcatctcagtcccaagtccgggaaaatggctgcagcttttcctggtgtctctctgtctcttcgcctctctccaagttatctccagggtttgagagaaacaagttattctccctcggcctggattgcacggatccctagtggaaaggtgagtcacggaaactggctctctgccccctcacgtactggagtgtcagttttatcagccagagactatcatgggggccacctgtccacctcctcctcctcgggatctggggtgtcttttgctattcccgtgagtttccgtgattttttatttttttcctcacggagtggatctttacgcattattttgctatttccaagtggctgaggcacaccatgttgggaaaattccattatcaatttatgccattaattccttccaagttcttttggtgtattttgtcgtctatctctacttggatgagtttgtcattaaatcatcattttcagtatatgattaaagcatataaactaacactttagttgcatcctaccaagtcttacatgcagcttccatttatttaaaaattgttgatctcttactgtgccaggcatccttgtagttgtatgggaaagataaaaattgctgcccttatggagtgggaagatacattttacagttaacatgtgtacatacatgcacacatacatatatagggatagatgcaatgggaaaaagtatattaaaaagcagttggagtttaaggggtacagttgctaaagtaacaatattcactgtcatttgaagtattttctaattttcaacatgatttgacatttctagaagttaatactttcaatccaagcatatggacatttggcatgtcttggattatctacataattttttaaaattaaaaacatctaaaaactgatatttgtacatattagtggggtagatgtggtattttgttacatgcgtagaacgtgtaatgataaagtcaggatacttacggtatccatcacctcgagtatttatcatttgtgttgggtacatgaccagttctctcttctagttactttgaaatacattgtaaagcaaatgtatacactgttaactacagtcaccatctctatttcataggtgatttctaatcttgtcttataaggtgatttctcttgtctgaaaaactattacggtcttcagtattaagttttgctttgtggtctactataatgaatttttgtgaatatgttattccatgtgtatttggaaaagttttacctaatagtccagtgacaatttattatataatttcattagatccagcttttaaattttgctccattcttttatatatgtattcaccatgcccggctaatttttagatttttttgtgacagggtttcaccatgttgcccaggctggtctcaaactgctgggctcaaatgatgtgcctgcttcagcctcccaaagtgctgggattacagacatgagacaccgcacatggcctattactattcttatgggtttcagcttctcattgtgaattgcttcatatattttgaggctgtttcagagctgttataatcctgaattgctccatttatcattgttaaaagcttactctttattcccacactccctttattattttaccttaaaatcaattttaaggtaattccaaagcaaaatcaattttatctgattgtcacttctcttttgatagatttttagtatatcttttccaatctatttgtaactattacatcattatgtttaagaagtctctgtaaccttttttttttttttttttttgtgattctcctgcctcagcttcccgagtagctgggactacaggtacacgccaccacgcctggctaatttttttttttgtattttttagtagagacggggttttaccatattggccaggctggtcttgaactcctgaccttgttatccgtccgccttggcctcccaaagtgctgggattacaggcgtgagccacccgctccccaccaaagtgctgggattacaggcataagccacggcaccccatgcctggcccacatgtggtctttaaacttgcaagtttatggtacttattgtaactacttagatatttggatttgttattttgtgatttttttcttcgcttctctgttgcctttaacagggttcattttattacatgttgtttcttccttatttatctaaatttaacctgatttttgcctaatacacaaatactttcaggtttatactgctttatcaccacagctggacacaactggtttcatactgccttctagcaattgcaggatgtctgaactcccttgaacctatttccttaccttttaaaatggtaaaattttgtggataaaatattgggtacaatcagacaatcacctctgaaaggttacaactcttacctcattaatcagtaggaacagggttttgatttaaagcaaaactctatctcattcttccaaactcaggagttagcaaaatgggaatgaactgccagttattcagccttctagactttattcgcatttgtttaaagtgcataggcgtataaacacttttctggattgaggatccaaatccttcaaatttcccaagttgtccaaccacaaaaaaattattaagcaccaaatgctccagtctagaccggggacctcaaccattttcttttcccaacatgctaagctatttgacacatttttattaggaacagcaattctcaaaactgaggagctattatcagaatcactggggcaggaagcgtccatttgcctgttgagaatttctaaagtcttaaaattcatttattcctgggttgttctctaacaacaatacttccaacattagcaaagtactattttagttttcagaatcaatagtatctgaaggtttgaaaaatttcccaggttacttaaaaaccctcattgccaagtaaatttttataaatgaacttgatgatctgtccacagaccatcatcaaatcaataaagttcaataggtgaaaattaaacctcaggtgtgcaaaattcatggttcaaggagtaggtagacatatttattataattacacgattgttaacaatgtgtactgccatccaaaaatgaacatttattgctactttgttcactagcataaagatgcaatttacttacatagaaaatattttatatgctttgatactgccatgtgtaaacattcttatggatatgtttgtgaactaaaattgacaaatacatattcctatgttaccaacttaagatcataaaccattctcatgtctgctcattaaagctaaagggtctatt

SEQ ID NO: 1331 - DNA, 4154 bp, Homo sapiens
ctgcgagcccgcgagccagcgagctgcggctgcggcctcccctgcgcgcagctacccgggcgtcccggcccgcggccccgctaaccccggggcccgcgcccccgcggcagggatgcatcatggccacgctggcttgccgggtgcagttcttggacgacacggaccctttcaacagcaccaacttccccgagcccagccggccgccgctgttcacgttccgcgaggacctcgcgctcggcacccagctggcgggggtccataggctgctgcaggcgccgcacaagctggatgactgtactctgcagctctctcacaatggcgcctacctggatttggaggccaccctggcagagcagcgggatgagttggaaggcttccaggatgacgccgggcggggcaagaagcacagcatcatcctaaggacgcagctgtctgtgagggtccatgcctgcatcgaaaaactatacaactccagcggacgagatttgagaagggccctcttctccctgaagcagatatttcaggatgacaaggatttggtgcatgaatttgtagtggctgaaggtctgacatgtttgatcaaggtgggagctgaggctgatcagaactatcagaactacatcttaagggctttgggccagattatgttgtatgtggatggaatgaatggagtaataaaccgcaatgaaaccattcagtggctgtacactctcattgggtcaaagttccgcctggtggtgaagacagccctgaagctgctgctcgtctttgtagagtactcggagtccaacgcacctctcctaattcaggctgtcactgctgttgacacgaaaagaggggtcaaaccttggtcaaatatcatggaaatcctggaggaaaaagatggagttgatacggagctactggtttatgcaatgactttggtgaacaagacgttatcaggactaccagaccaagacaccttctacgacgtcgtggactgcctggaggagctgggcattgctgctgtgtcccagaggcacttgaacaagaaagggactgacctggacttagtggagcaactcaacatttatgaggtggcgctcaggcacgaggatggcgatgagaccacggagccaccccccagtgggtgccgggaccggaggagggccagcgtgtgttccagtggcggaggcgagcaccggggcctggaccgcagaaggagccgcaggcactcggtgcagagcatcaagagcaccctgtcggcccccaccagtccctgctcccagtcagctcccagcttcaagcccaaccaagtgcgagatctgcgtgaaaaatacagcaattttggcaataactcttatcactcctcaagaccctcatctggatccagtgtgcccaccacccccacatcatccgtctcacccccacaggaggccaggttggaaaggtcatcaccgagtggtcttctcacatcatccttcaggcagcaccaagagtcactggcagcagagagagagaggcggcggcaggagagagaagaaaggttgcagagaatagagcgggaagaaagaaacaaattcagatacaaatacttggaacagttggcagctgaggagcacgagaaggagctgagaagccggagtgtgagccggggcagagccgacctctccttggacctgacctcgccagcagccccagcctgcctggctcctctgagccatagcccctcatcttcagactctcaagaggctctcacggtgtctgcctcctccccaggaacccctcaccatccccaagcaagtgccggggatcctgaacccgaatcagaggcagaaccggaagcagaggcaggggcggggcaggttgctgatgaagctggccaggacatagcctctgcccacgagggtgcagagactgaagtggagcaggcactagagcaagagccggaagaaagagcctccctcagtgaaaaagagaggcagaacgagggggtgaacgagagggacaactgctctgcctccagcgtctcgtcctccagcagcacgttggagagggaggagaaggaggacaagctctccagggacaggacaactggtaaatgaagccccttgtttcagtcggcatgtgccagggaggcctggggtgcaggggctggttctctaagagcttgtccacaggctggcctctgaggtgacctgggtcaacccactcatgtggctgtgtcacccagtgtctggggacaaggagtgtggccacgctggcagccagccagcagccttctgccctgtagaaagacagcccccaaactgtctgccacaccatcacattcatcacctccacacctggggaaaagggccccgataaggagggcttttcctgaggaataagccccaggagagaaacctctcacttccccctgactgttccattgtgaataatagtaaggttgataatagtaaggctttttccgtttttgatataagtttagaaactgtcacattgtcatctattcctttaaaaatgtgtttactgaagtgtgttaatcattttgactggacatttcagactgggaaagatttgtttaaatggattgaatgagtatttccaaaaaattgtacacagtttactgaggtcaatttgatgtactggaatatagataatttgttttctatattacactcataactattcttttctttgtataaagtatatgctttttcttatggaagtatatctttttgatgttacacttaatactcattcagttctcctatgaatggtaactttagaattagggaccaaatggaatgttagattataggtttggtttagcctgaaagaacctcaccaaggacttgagaagggtgccacagagggttataggaatcgtgaataattcatatgatctgtgacaccacaggattacttttcctacccatgacttgtgtgctatcaaggtggtagaatgcctccttcctcaacaaacactcctaaccagtggagtcatgtcttatgggccagcctttcttaagctacatatgagtggcacccactcgagtcgatgtcttaggcccaaagggcaatatgacacctctacaaaggcctgccaaccagtgccatgacccatgaatggcttattcattcctagattaaaaatacattgtctcagaagcatggatgaacgaatgaatgaaaccagaatgtcttccaatagacctgtcagtcaatggcgtagtctaaaatagttactatttggattttttcccagttagaatatactactagattttatgctttatattgctggtcactatgatgcagtaaaaacaagaagataaaagactttattagtttacatcttaggaattattgcattgaaaatccagtgtcttcatttggttgaatatgtatgtgccaagaggtattatatatactgatatttacttaatttctttcaaagtcagattacagttggtcccccaaattcttcttatcattcatattaatgtaattattgtcataatactgggtgtagggtaagtcttattgatcagattggtcttaaatcatgttttatttattaggaatagctttaagaattattaatcataactgggtttagcaggcctaaaacatatcaagaaattggattagtaaaaatataccaggcgacagggctttcttggatcagattgtccaatattcttccaaagaaggacaattttccaaaagtggaaaccgttcccagtgaagaaccactgactttctaccaaagtgggcaatgtccaagtatttagaagcagaaattagggctttgcaatgatttttctgctttgcttcagtgctgttatgagagttggtcatgtttatttactgtagcttattggttcctaaaaaatctcactgctcacaggcatcatcagccactgtggagtccgggcagctatgtcattatagctcttgcttttcagagtgctgtcaaatcacagagcaaccttagagataaaaaattattctcaaacgtatttctaatgattatgtcaaaaatgaatttgtaggacttgaaaaagtctcattccagttatgtggtttaatttttctttgtttaatgtgttctactttagggcatgcatgtgagaagctttatcataacatacattttacttttttgt

SEQ ID NO: 1332 - DNA, 3828 bp, Homo sapiens
ttactcctcgtggggctgcaggctggagcccgaggttgggcgtctgcggggctgggctcacagctgctccctttgaggctgcagtcggcccttctcgctgtcctcacacagtggagagaggtgggagctctttggagcctctttcataagggccctcatctcattcgtggggcccccatcctcatgacctcacctcccaaaggcgccacctcctcaccttgtgggtgaggatttcaacatgtgggttagggggacagcagtgttgagtgcacagcaccacactcccacatgcacccacgtcctctctccccttcccatgggccccggctctgcttgtgtagctcagattgtcttgttgcatcatcttgctgcctcacctccctgctaaaatgtcagctcctcaagagtggggacccagtagttcccacctgctgtctgctgctcctttctcatgccaaacacagctggtgcttaacgtgtatctgcaacacacgggagacagatgcgggcagacataccccttccttggggctcgcacatgtgcagggaaagcagttgccgcacgttggccacgttgcatggttgtccattggtgattcagttgttgctgggtgtctgctgtgtgcctggcacggtgtagtgctggggatatactgtcaacaaaatgtgttttgattttatattctagctcaggggcagacaataagcttatgaatatacaggacactagagtgagtgccacatgtcgcttttgtcctgaggcctcctctgaccaacactaaagtgaccattccagccatgctttacgttagtgtcctgttttactcacctcacctcaaatgtgtgttcacacatgtgtgtactgtctctccccacacccgacaggcatttccactgatgggaacagagccttttggttattgtcatcacttaaaccagggccaggcttataaccagcttgcggatgttcgctgaatgaatggactctcctccagctctctcctgggtcacgtgtctttgtgaatcttccagaccacgtgccttgctttggttcagtgaaagaaggaaaagttgataacttcataattgaacctgtgtttatacatccattcccccacctacttgctcagtcagtatcctctgggctcagctctctgtgggttacccatgtgggctattctcattcctaccaggcagctaatcaggcccattcctgtgccagtgcatggagggtgtaggccagaagaggactgtgccaaagcaggctgcaggtttacaaaccacgtgtccctgctcagggtgttggctgaggctggctcctagtcacagcctgcgcaggcatggacggatggtggatgccatgacccagcctggtccacagatggggcgggatgaatgtgccagactttccagagaagaacagtccaggagaccctcagcataaagtctcctgaaaacaacacagtctgacagtcctgaaggccagccctgtctttgcagggacttgtagagaacaccattcccagctccccattttacagaagggaaaactgaggcccagagatcggatgaagcttagcaacacaagcaaaatctgtattgtccatggctgttcagaagcattgcggttacctcaccaggcagtgttgaagaggctatcacagaagcctcagggtagtggttttcaataggtgcccccaaaccactggtgttcctttaaatggtccttgcaagattgtccccagctcactgaatcagcgtgcgaactcggattcacttacagctggcattcaaaaggagacacagggctgtgacttgttcacaagatcaggcaaggcacaaaccagcttgtagtggcagcttgaggatggcatcaggtggtgattgtaattatttttagagttacaagatcctgggtaaagtgttaaaatgccaatagccacaacacagagtatcttcttagagaaccaagtgagagtctgttgagtcaagtcctaggctgtggatggggactaggagatcacatgtgatagtccccttcagagcacagtctgaacagtctgaacaggaaggaggacttcggaggcatggtagccacggaaacgtgagcctcacctcttcagtgctgcccccagaaatccgccaccactgcacgtgcttcccagtgcaccatggacagcaccgctaagctcccagttcaggactgttcctgggagacacggggccctccgagtatgcatctgacagcctggctgagcgcacctagaaatgcagtgcagtcttagatgtaccccaccttcgctgcccccctcccctgtgccctaactgtgttgatgtcctccagtgctcccagctccctcccgccctccctgtcttccctcacaggcttagtccctaatcaatctcttacctagctgtttccatctggatgtctgcttctcagaggatgccagtaaacacaggaggccatgagctcaccccgaggggttccattgctccgagcatctttggagcagccctcatgctgcatggggctgtgggctgcctgtctctgtggttcctggtgatttgggagctcgggagccacgggtcactccttagcatcatgtgcacaggtcacaaagtggagtccaactctcccagccttctcaggcctccagtgtagtgggaagctctgaaagtcagggcagcctggcttcacgtcaaggcctttgtggagggaggcaagttaacgagcagcctccctgccacctgccagtccctactcagtgccgcccatccctgtgctgctgtgcctgctcagagccatctggctccctgggatttgagtctgctgtttctcctctctctctctgcaggggtgctgatggtctgtatagtgattggtgctcgaaagctcggggtcaacccagacaacattgccacgcccattgcagccagcctgggagacctcatcacactgtccattctggctttggttagcagcttcttctacagacacaaagatagtcggtatctgacgccgctggtctgcctcagctttgcggctctgaccccagtgtgggtcctcattgccaagcagagcccacccatcgtgaagatcctgaagtttggctggttcccaatcatcctggccatggtcatcagcagtttcggaggactcatcttgagcaaaaccgtttctaaacagcagtacaaaggcatggcgatatttacccccgtcatatgtggtgttggtggcaatctggtggccattcagaccagccgaatctcaacctacctgcacatgtggagtgcacctggcgtcctgcccctccagatgaagaaattctggcccaacccgtattctactttctgcacgtcagaaatcaattccatgtcagctcgagtcctgctcttgctggtggtcccaggccatctgattttcttctacatcatctacctggtggagggtcagtcagtcataaacagccagacctttgtggtgctctacctgctggcaggcctgatccaggtgacaatcctgctgtacctggcagaagtgatggttcggctgacttggcaccaggccctggatcctgacaaccactgcatcccctaccttacagggctgggggacctgctcggttcaagctccgtgggccacactgctgctgtgccaagaaggtgtacagcctccccaggatggggcctcatacaacccttcatctgcactcaacatttaatcgtgtccttgctgtctttttattttcctttttgtttgttagcaaaaacctctatttagatttcaataatcagagaagtgtaaaataaaacagattatattgt

SEQ ID NO: 1333 - DNA, 4317 bp, Homo sapiens
atgccacacatcaggtgactctttagaactaaggaagaatcacaagaatggtccaaacactgaaaatatgaatttggaagcgtttgattcagtatttatcaaacaaacaagcctgtctgtgagtagagaggtcagcctagagttatcagaggaagattctgacattgacttagctctaacaatatcaccacctacaagtcccagagaagaaatgccagctggtgaaatagagcaatttgaggaggccccattctcaaatttagaacttcaggatgtagctgaggaaataggtgaaccggaagaggtggctctcacagaaagcagagaagtgagttctgctgacaatgtgtcagtatatccctcagtgtcagaagaaccagtagaaaataaggagagaaagggggataatttacaaccagttactttaatactttctaaagaaaattgcacccttgagattgcagaggaaattaatgtgacctctgattttccctttgattctgtaattgaagaagtatcaccagcgtctagtcctgaacctccagtaccagttaaagagacacgaccatatcaggctgtgactccatgcattttaaaacttcatggtacacagtgtgagaagagcaaccaaatctcccaatgtgagtcagaagacttaggcataacagaaaaagaaaatgtttttgttggtcctacccatccagtggggcaagataactttacccaggtacaacaaatgcaggtctctgccgaaatgcctctaatattaactgatcatccaggaagaacaggtagaccaacccttcctggtaaagtaactgaggaaattgtctcaagtgagcatgatgagggtttatctttctcaggaaaggtgcagtgctatggtagggagttaaaccagcctgcctcagctgccaaatgcacaggtgacttcagtccttctcctgaaaaactggtaaaatcaggaaatccattgcagccagttagtatagagaatagaaatttggacttaaaacatcttgtcttggagtccagtgaacctccatttggtcctagaaatgttattgaaaataagtctttgtctgacacattggtttccacaactgcaccaagtggtatagtgaatgtgtcagtaaaacagcagactagccctaaaagcagtcagaaccatctctttcccggtgatttgaaaacagatggaggcatttatctgcaggtgaagtccttgacagctgcctcggttgatggagcttattctacacagggatgcatgtgctcagtggtccccacgctttgttcttcctcagacaatgctacattaacccattatgtaagaccaataaatgcagagccagcgtttcaagcacaggaaataccagcaggcagaatggccagtttgcttaagaatggtgagcctgaagctgagttacataaagaaaccacaggtccaggcactgctggccctcagtccaacaccacatcttctctaaaaggtgaacgcaaagccatccacacgctgcaagatgtgtcaacatgtgaaacaaaggagctattgaatgtcggggtttcctccctttgtgctggtccctaccaaaatacagcagacaccaaggaaaacctcagtaaagagcctttggcctcctttgtttcagaatcctttgatacttctgtttgtggaatagccacagagcacgtagaaattgagaacagtggggaggggctcagggctgaggctggttctgaaaccctaggcagagatggagaggtcggtgtgaattccgacatgcactatgaactctctggagattctgatctagacctgcttggtgattgtagaaatcccagactggatttggaggattcttatactttaagaggtagttacaccaggaaaaaagatgttcccacagatggctatgagtcgtcgttgaacttccacaacaacaaccaagaggactggggctgctctagctgggttccaggcatggagacgagcctccctcccgggcactggactgctgcggtaaagaaagaagagaagtgtgtgccgccttacgtccaaatccgagatctccacgggatcctcaggacttacgccaacttctctataacaaaagaactcaaagataccatgagaacttcacacggcctgaggaggcacccgagtttcagtgcaaactgtggcctgcccagctcctggacaagcacttggcaggtggcagacgacctcacccagaacactttagacctggagtatctgcgttttgcacataaactaaaacagaccataaagaatggggattctcagcattctgcctcctctgccaatgtctttccaaaggagtcaccaacccagatctccattggtgctttcccttcgacaaaaatctctgaggccccatttctgcatcctgcacctaggagcagaagcccccttctggtaacagttgtggagtcagatcccagaccacaggggcagcccaggagaggctacacagccagcagtctggacagctcttcctcttggagagagagatgtagtcataatagagatcttagaaattctcaaagaaatcacactgtttcattccacctcaacaaactgaaatacaacagtactgtgaaggaatctcggaatgatatttcacttattctcaatgagtatgctgaattcaacaaggtgatgaagaatagcaaccaattcattttccaagacaaagagctaaatgatgtttctggagaagccactgctcaagagatgtatctgcctttcccaggacggtcagcctcctatgaagacataatcatagacgtgtgcaccaatttgcacgtcaaactaagaagtgttgtgaaagaggcttgtaaaagtaccttcctgttctaccttgtcgaaacagaagacaaatcattctttgtaagaacaaagaaccttctgaggaaaggaggccatacagaaattgaacctcagcacttctgtcaagctttccacagagagaatgatacactaatcatcatcatcagaaatgaagatatatcatcacatttgcatcagattccttctttgctgaagctgaagcatttccccagtgtcatctttgctggagtagacagccctggagatgttcttgatcacacctaccaagaactgtttcgtgcaggaggctttgtgatatcagatgacaagatactagaagctgtaacattagttcaactgaaggaaattatcaaaatcctggaaaaactaaatggaaatggaagatggaagtggttgcttcactacagggaaaataaaaagctaaaagaagatgaaagagtggattcaactgcacataagaagaacataatgttgaagtcatttcagagtgcaaatatcattgaattgcttcattatcaccagtgtgactctcgatcatcaacaaaagcagaaattctgaaatgtttgctaaacctgcaaattcagcatattgatgccaggtttgctgtcctcctaacagacaagcctactatccccagagaagtctttgaaaataatggaatccttgttacagatgtaaataactttatagaaaacatagaaaaaatagcagctccatttaggagtagctattggtgactcaactacagcctgcctggatatggatgatgccaataaaaaattagtattttccctttggaaaacttgtgaacatgtgaatacacatgtgaacagtcttacatttgaaaaaccaatgttctacaacttggaaagttttcattttttatattttgctgaaatatgtcacagtggcattgcagttgtctgttagctttgggttgcagtgctagatattgttttaaattattttcattttaaacaagatgccttctaagctattgagcttattaaaaataattttacatgtttacttagttggagcaaaaataagtctattttaacaaatagctttgtttttgcatgctaatgtcagaaaggcatacgatgcacattatgctgttttaaaggttttaccacccttgtaaaaactataatcttaaatggttttatttgctgttacacaaacaacactacataaaacattttttcctaaatggtacaaatttataaactatcatttttcacttacggtatttgtaaatactacactacaaaaatcagctttctgagaaagaaataatcatttatttatgatattgaaaatttctacagtaaacactcaaaaccaagcaaaaaacatttgtaagatacacggtatctatttggagcaacggtttttgtaactaatgtgtttcattttttaaataaagacaactaaaaat

SEQ ID NO: 1334 - DNA, 4166 bp, Homo sapiens
ataagacactattctaagcactggggtcccataagaataagacaaagcccctatcctcaagaggctatcatcaaactatagacagagatgggatctccctctgtcatccaggctggtctccaactcctggcctccagtgatcctcctgcttcagcctcctgagtagctgtgattacaggtacaagccatggcacctggcgagatgacattttgctggaggaaagggagatcttctaagagcaaagagctttccaggagctgggaccaggactatcacagattgccctatgtcgtccatgctggtctggaactcctgggctcaagagatcctctcaccttggcctcccaaagtgctgagattacagagctagagtctcatgatgtcgtccaggctggtatcgaactcggcttcaagcagtcctctcacctcagcctctcgagtagctggaattacagttgagagccactgcatccagctttgctctttctttgaaaggaggcaaaagaatggacgggcacggagatcctagaggcgaagcaagttgtcagcgcccctgcccaggccccgccctgcccggcccagtcccgaccccgccctgccccgccccagcagctccaccctcaccggctctcctcgccctccagcagcttgcggtaggtggcgatctcgatgtccagggccatcttgacgttgaggagctcctggtactccctcaggtgccgcgccatctcctcttttagctgtcgcagctcctcctcgagccgcgcagcgcccgcctggtagccccccgcctccagggcgaactgctcctccagctctctcaactgcctgagcagcgcctcgttctggggtaggagagtggaaggggccagttgcagaacatttcatcgtccgctccccgggcccgagcgcgcagcttcgtactcaccgtgccgcgcagcccgtccacctcgcacgttagactctggatctggcgtcgggactcgttcatctcctgcttggcctggcgcagggcctcgtggttccggttggcagcgtcggacaggtccgcgtactgagaagtgggggtaacccaggctttagtcggctgggacgcgcgacaccaccccagcgtcccgcctcgcaggccctcccggctcttgcaccttggacttgtaccactcctccgcctcctgcaggttcttcgcggcgatgctctcgtactgcgcgcggatgtccctcagcgctgccgtcagctcgggcttcaccgtggcttccacctccacctgctgcacctgctggctctccacactcacctgcaggtctcgcagctcctacggccgggagcaggcagaggatggacagcggcgcaaattccacgcgggccacgcagttcgtgcacagaaaagagaagaaacgcttgaacgaacagaagtgggcgccagggagggcagggcgtacagccctgcgcccccgcgggcgcgagaccagaggccaggtttcggagctccagcgagaccaccccacaacctcagaaaccgcccctgataccgggcccacttacctcctcgtgcagcttcttgaggaactcaatctcatccatcagagactcaatcttgcgctctagttccaggcgggacagagtggcatcgtccacgtccttcgaggggtggcagtggaggttcaagataagttaggggctgcgcagaccaaggaaggaccaggccttccctgtctgcctcaggaggcatctgggttacccccttctccccgcgcccaccgatgccacctctggatactgagatcgggggtagcggtggggaggctgaactcggagaggggctcggactcaccttgcggaagagcacgaggttgtgctccgcgtcctcccgcttgcgcgtctcctcctccaacctgacgggaagagcgtgcagaggctgaactgcggggtcgccgcccagctcgcaccccagaccgcacgccccccaggatccggttagaggctgttctgctgcccaggactctaaatggagggctgaggctgtctaatggaattgccccgcattgtctctaacggactgggagctgaaaagggggtttcctcattactcaggggaggcacagatacccacttctcccacctccccaaacactcagagcaaaggggtagcggggggcacttggagcccgtgggcagggatgctgcccgcacacacctgggttggtaaggggagccacacccttgggctgctgatggagaggggaagcgaggggaggcaagagcagccgcctcgacggccgcttcgacctcgcctcgacggcagcggcccagccctgccccctgacctctgcttgagcgccgccaggtcctccgccagcccgtcgcgctccacctgcacccggtcacgctcgcggcccaacagctccagctctcgccgcagctcgcgcagctcctgctggcacagctggtcggcgcgcgccggctcctggccccgggcttggctcagctccccgcgcagggccgcgttctgctgctccagaaagcgtaccttctcgatgaagttggcgaagcggtcgttgagctcctgcagctcctgcttctcgttgctgcgcgtggccaggaactcctggttgagggcctcggccatggagaagtcgaggcgctccgagggcaggcgcaggagggcgcccgctcccgctcgggggctacggaagctgcccaggcgcaccgaggagctcggggacgcggagcccagcaggcggctgctggagaagcgggagctggacgagtaggagaaggccccgggggatagtgagggcggtggaccgaagacggcccagcagaggttgtctgctgatgtttcagccttaaagacacagcccccaaacctagacctaccccgcaacaagccccaataagcttccagaatgcaagcacaacctgcccaggagtggacagaggcagctcggatggtctgcaggagccgggttgctgaggtctgctgggtttgccaggaaccatagggctggggctgctgctgctgctggggactccagcgctgtcctgtgagacaggtctgcctcagatgggacctgaggacaagagagtgcatctggggaagcaggtttcaggttcctgcctggatatctggctgggggtaaggagggcggctccctggctggccagctcctcagtattgcagggcagcagccccctcccccctttgtgcgtcctgtgagatgggccagggccaacgccctgctcacgtccctaccgccttcgtctcctttccaggcccctccttccttccgggccattagtctctccctgcacagctgccagttccttctccttgatgggtctggtttggttgccaggggagtgggaagcgggaggaagggagagatgggacaggacgaataaatgacagcttggcctcccctaactcctgggaattgggaggggtagggtcccacccgggatagggccgggaggcttggtgggtgtgaggaggggctagggaagccttggtgcttcctgccgcagtcctgggcactgagccccagctgctgttggcctggagccccatctatcccggatttggccccaccctccaggagcagggagccagctctgcatcaggagaggcgggcaaggcctggggaggaccagctcaggccctgtctacagggcactagtgggggacccaagcctctgagagtagaggctgctggggctgcagctgggcctggggagttccagatggagttcccgtcctcaccctgcttaagggctccgctggccacctacatgcctcggaggagaagggacagagggctgccacagcagggctctggagctgtggatcaggcctgggtggggaactgccaggcagaagaggctcctcccctaaagcagaaggagcaggccagcaactccaggcggagcaaaggtaggcaaagagtctgggttaagagccgggctctggcatccagctgccacacttcccatctgatccaccactctgttgtagaatttaggctcgtcactacgtcccttcatgtccctcaagaaaagggagataactaactgtagcttctacctcatagtgttgttgggaggactaaaggaataaataaatacatgtgaagtgcttaggacacacatcttaaagcctgaaaatgg

SEQ ID NO: 1335 - DNA, 4885 bp, Homo sapiens
atatctcagagttaaaagttgcaaattatgttattggaattctgagaacaatattgattgctgcttcatgttacactaactttactttttaaacttctgaaacgatttcatttgacagggtggaccttaattaaatatatgtccacaaggagagttgactctaaatgtcccacaggatttcagaaacacagtaaatacctttcttctatctattctgatctccttgctcataggctctcacatggaatctttggggcagctgtcagttcttcatattttccagccccaatgccctttttataaaattgggtagctgttaatacattgatacttgggcgcacagagttggcactcaataagtagccgttaagtaaattaatcaaaagaattgcaagatacaagatacctggtcccttctatcaaagagtttataaatcaagtatgaatgacaatacctgaaaccacttaaaaaaaatctatgtaaacaccgttatatgtgacatgtcaggataagagggaacaactaataaattttgtacacattcagtaaatggagagaaaggtttttggagatgaggggcttgagccagaccttgtatgtgtgctattagaagctttctgggctggacacatttaaaaactgccctttgatactaatagtattaaaattctgtctccttggaagcagactgcctgttgctttagctttaaaagagatttatatccaagcattgcattatgcaagccatagaaagactgttttatgtgaagatgcactgattgcacttccctctctatattttattgtagttagttgtttagagctgtctctgtgtagagtgtgaggtccttgagggaagggaccttcttggcctcttatcccctgcatactttgcatagaggaggcacttcataaatgtttgttgaataaatgctacactcctaatgggtaagaatgtgtcatattactctttgttttcttatgtgtactgaaacaaattgtttcttgagattggtccttagaatatttattcagttttcactgattctcttgctacaggttagctaaccatgcagcaggtgcttgagtttcacctttctccagtccagcagaattacattttgatgacctccattttgatacttgtagaccagatctaatccgaagattaatctttaggtaacagatggagagtgataatgataacttctgtgaagacaaacccatgcacacattctgttgtctgaataatatttaaatgaatccttctgctcccaagtcatcaacttgccccttaacacacatccctctagagcacaaatctgagctccttgtagatctttgccctcttcactctccagaccttcctaattaatgtcttctcagaatcgaccttctgtctctcttaatcattagttaaaagaaaaagtggcagatgtaggacctggggatacattgccacatcccatttccttctctatgagcaggatttccaatttccaagcctgatgggatctcccagctggaacaggatctacaggtctttgatctggaaactaagactagagaagtcttaagagatgactgctcagatggagagaccagagaagagaacaagctgttgattcctaagcagaaaatttcggaagaagtgcattcatacaaagtgagagtaggaagactcaaacacgatattacccaagttcctgagactagagaagtgtataagtctgaggacagattagaaagacttcaggaaattctaaggaaatttctgtacctggagagagagtttaggcaaataacaatcagcaaggaaaccttcaccagtgagaagaacaatgaatgtcatgaacccgaaaaaagcttcagtctggactctactattgatgcagatcagagagttcttagaatacagaataccgatgacaatgataagtatgacatgagcttcaaccagaattcagcctctggtaaacatgaacacttaaatctaacagaggattttcagagtagtgaatgtaaggaaagcttaatggatctctcccaccttaataaatgggagagcatccctaacactgagaaatcctataaatgtgatgtatgtgggaaaattttccatcagagctcagcccttactagacatcagagaatccatactagagagaagccctacaaatgtaaagaatgtgaaaagtctttcagtcagagctcaagtcttagtcgacataaaagaatacacactagagaaaaaccttacaaatgtgaagcatctgataaatcctgtgaagcgtctgataaatcctgtagtccaagctcaggcataattcagcataagaaaattcacaccagagccaaatcttacaaatgtagcagttgtgaaagagtcttcagtcgtagtgtccaccttactcaacatcagaaaattcacaaagagatgccctgtaagtgtactgtatgtggcagtgacttctgccatacttcatacctacttgaacatcagagggtccatcatgaagagaaagcctatgagtatgatgaatatgggttggcctatattaaacaacaaggaattcatttcagagaaaagccctatacgtgtagtgaatgtggaaaagacttcagattgaattcacatcttattcagcatcaaagaattcacacaggagagaaagcacatgaatgtaatgaatgtggaaaagctttcagtcaaacctcatgccttattcagcatcacaaaatgcataggaaagagaaatcgtatgaatgtaatgagtatgagggcagtttcagtcatagctcagatcttatcctgcaacaagaagtcctcaccagacagaaagcctttgattgtgatgtatgggaaaagaactccagtcagagagcacatctagttcaacatcagagcattcataccaaagagaactcatgaatgtaatgaagatgggaagatatttatcaaattcaggcttcattcagcatctgagagttcacaccagggagaaatcatgtatgtactgcatgtggtaaagccttcagtcatagctcagccattgctcagcatcagataattcacaccagagagaaaccctctgaatgtgacgaatgaagaaaaggtattagtgttaaactcttaatcgactcctgcaaatctataccagtgagaaatcttataaatgtattgaatgtggcaaatttttcatgctattagtattttcataccttagtcacatttggagaattcacatgggaataaaattccattgctgcaatgaatgtgaaaaagccatcagtcaaagaaactaccttgtttagtatcaaattcacgccatgcaaaaagattataaatgtaataagcatgtatgtgtgtgaggagattcagtcataacccaacgctcattcaacatcaaagaatttatacctaagagaacttatttgggtgtagtaaatggcagatctttcaataggagtttaactagtctttgtcatatcagaatatccatagtagacaagaatttgatgtaacgcaaatggaaaaactcgacaccacatttcaggctttacccaacatcgaaataatggagagaaaattgttgattatttgtttatgaaattgttaatacatagtcccaatctttttcattgcacaaaaatctagggttgacttggtaaatgcagtgacattttctcatggagttcctttatttaatatgtattctaagtaggtacgtttatttttacttttttattataattttgatattaaaaagaacagagatggggtcttgctttgttgcccaggctggtcttgaactcctggcctcaagcgatcctcccacctgtcctcccaaagtgctggggttacaggcgtgtgtcactgtgctgggcctattttatttatagaactcatttaagctgtttttattttaatatgccctataaacatttttatattttttgaaattggttcttagtgttcacaacttccataagatactgctaatgcaccagtattaaaacacatcgacgtaagtagctcatttagctttttctgctgttcttggcccaagttctttccaaaaccaactcttaggcctgctctttactagggatcttatgtcgtattgctttacagccacaacacttggattcctgttgattaacttctccattctcttaagcacctttagaagatttagaagtttcctagttttaagtgtttcaccagcaagtattccatacctacttgatgttgctggtctggtgtcttatttcctaaagtgaagcatctttttttaaaaaagaatttgattgacaatatatccagtccaatataagtatgaaggattctctctcctgagattgtagcaggcagccaaacattttcaaatgatgcccaaggttttagctgtcttgtgtgcatccacagtctgcgaagaagacatgataaggacatcagggagccaacaagactcctaatagcctcactacattcatccagtgcctattctgcatgcctaagcttagagttcttttatatacctctacggccagcaaaatgctcaggtctgctcttggtagggtaaacataaagaagatacacaggccgggcatggtggctcacacctgtaatcccagcactttgggaggctgaggcggatggatcacgaggtcaggcagtcgagaccatcctggccaacatggtgaaaccccgtctctactaaaaatacaaaagttagccgggtgtggtggcacgcgcctgtaatcccagctactcaggaggctgaggcaggagaactgcttgaacctgggaggcggaggttgcagtgagccgagattgcaccactgcactccagcctgggcgacagagcaggactctctctc

SEQ ID NO: 1336 - DNA, 6183 bp, Homo sapiens
ggtctcgcccttgcacgggtcacgattatacaccttcgtgacctttagcgggcttacatatgtatctttttgtgttccgcaggctatgaccacctgctgtatgtacaatatgtgcttgttacatttgtacaccatctcccttctagaatttaaagacctagctattacatcttgtttactcaatatcattcccccattaaggaaaaaaaaaaacctacatgaactgaacatgccatgtttcaatctggccccagtggctttttctctgaaagcaaacgtgtgtcttttacaccagggctttctccccaccccagggggtgtcttccatccttttgtggctcagttgaaggcgaaaagggctccaaaccactaactaaccagaggagagccccttcttccacctccagggagaatttcagatttaatttgtccgaagatagcgtgctctcttcttactcatttgccatcattacgaggaaaacaaaccaccaccttggcttcaagatcctgggtagaggctcacggtcttttcaaccatctttggcgaggccttgcttccttccactcgaggtatgttctgtcttgtgctttttcttttagaagctactaaagggtgttggggatgcttctgactattatgaaggccaaaaggcctgttgactggggctgcttttaaccctttcctatttgctgagaatgcagccgtgtgacagtaactg[450 bp omitted]cgatctccagtgctgaagagtttgatgacgacgagaagattgaggtggatgacccccctgacaaggaggacatgcgatcaagcttcaggtcgaatgtgttgacggggtcggctccccagcaggactacgataagctgaaggcactcggaggggagaactccagcaaaactggactctctacgtcaggcaatgtggagaaaaacaaagctgttaagagagaaacagaagccagttctataaacctgagtgtttatgaaccttttaaagtcagaaaagcagaggataaattgaaggaaagctctgacaaggtgctggaaaacagagtcctagatgggaagctgagctccgagaagaatgacaccagcctccccagcgttgcgccatcaaagacaaagtcgtcctccaagctctcgtcctgcatcgctgccatcgcggctctcagcgctaaaaaggcggcttcagactcctgcaaagaaccagtggccaattcgagggaatcctccccgttaccaaaagaagtaaatgacagtccgagagccgctgacaagtctcctgaatcccagaatctcatcgacgggaccaaaaaaccatccctgaagcaaccggatagtcccagaagcatctcaagtgagaacagcagcaaaggatccccgtcctctcccgcagggtccacaccagcaatccccaaagtccgcataaaaaccattaagacatcttctggggaaatcaagagaacagtgaccagggtattgccagaagtggatcttgactctggaaagaaaccttccgagcagacagcgtccgtgatggcctctgtgacatcccttctgtcgtctccagcatcagccgccgtcctttcctctccccccagggcgcctctccagtctgcggtcgtgaccaatgcagtttcccctgcagagctcacccccaaacaggtcacaatcaagcctgtggctactgctttcctcccagtgtctgctgtgaagacggcaggatcccaagtcattaatttgaagctcgctaacaacaccacggtgaaagccacggtcatatctgctgcctctgtccagagtgccagcagcgccatcattaaagctgccaacgccatccagcagcaaactgtcgtggtgccggcatccagcctggccaatgccaaactcgtgccaaagactgtgcaccttgccaaccttaaccttttgcctcagggtgcccaggccacctctgaactccgccaagtgctaaccaaacctcagcaacaaataaagcaggcaataatcaatgcagcagcctcgcaaccccccaaaaaggtgtctcgagtccaggtggtgtcgtccttgcagagttctgtggtggaagctttcaacaaggtgctgagcagtgtcaatccagtccctgtttacatcccaaacctcagtcctcccgccaatgcagggatcacgttaccgacgcgtgggtacaagtgcttggagtgtggggactcctttgcacttgaaaagagtctgacccagcactacgacagacggagcgtgcgcatcgaagtaacgtgcaaccattgtacaaagaacctcgttttttacaacaaatgcagcctcctttcccatgcccgtgggcataaggagaaaggggtggtaatgcaatgctcccacttaattttaaagccagtcccagcagatcaaatgatagtttctccgtcaagcaatacttccacttcaacttccactcttcagagccctgtgggagctggcacacacactgtcacaaaaattcagtctggcataactgggacagtcatatcggctccttcaagcactcccatcaccccagccatgcccctagatgaagacccctccaaactgtgtagacatagtctaaaatgtttggagtgtaatgaagtcttccaggacgagacatcactggctacacatttccagcaggctgcagatacgagtggacaaaagacttgcactatctgccagatgctgcttcctaaccagtgcagttatgcatcacaccagagaatccatcagcacaaatctccctacacctgccctgagtgtggggccatctgcaggtcggtgcacttccagacccacgtcaccaagaactgtctgcactacacgaggagagttggttttcgatgtgtgcattgcaatgttgtgtactctgatgtggctgctctgaagtctcacattcaaggttctcactgtgaagtcttctacaagtgtcctatttgtccaatggcgtttaagtctgccccaagcacacattcccacgcctacacacagcatcctggcatcaagataggagaaccaaaaataatatataagtgttccatgtgcgacactgtgttcaccctgcaaaccttgctgtatcgccactttgaccaacacattgaaaaccagaaggtgtctgttttcaagtgtccagactgttctcttttatatgcacagaagcaacttatgatggaccatatcaagtctatgcatggaacattgaaaagtattgaagggcctccaaacttgggtataaacttgcctttgagcattaagcctgcaactcaaaattcagcaaatcagaacaaagaggacaccaaatccatgaatgggaaagagaaattggaaaagaaatctccatctcctgtgaaaaaatcaatggaaaccaagaaagtggccagtcctgggtggacgtgttgggagtgtgactgcctgttcatgcagagagatgtgtacatatcccacgtgaggaaggagcacgggaagcaaatgaagaaacacccctgccgccagtgtgacaagcctttcagctcgtcccacagcctgtgccggcacaaccggatcaagcacaaaggcatcaggaaagtgtacgcctgctcgcactgcccagactccagacgtacctttaccaaacgtttgatgctggagaagcacgtccagctgatgcatggcatcaaggaccctgacctgaaagaaatgacagatgccaccaatgaggaggaaacagaaataaaagaagacactaaggtccccagtcccaagcggaagttggaagaaccagttctggagttcaggcctccccgaggagcaatcactcaaccactgaaaaagctgaaaatcaatgtttttaaggttcacaagtgtgccgtgtgtggcttcaccaccgaaaacctgctgcaattccacgaacacatccctcagcacaaatcggatggttcttcctaccagtgccgggagtgtggcctctgctacacgtctcacgtctctctgtccaggcacctcttcatcgtacacaagttaaaggaacctcagccagtgtccaagcaaaatggggctggggaagataaccaacaggagaacaaacccagccacgaggatgaatcccctgatggcgccgtgtcagacagaaagtgcaaagtgtgcgcaaaaacttttgaaactgaagctgccttaaatactcacatgcggacacacggcatggccttcatcaaatccaaaaggatgagctcagccgagaaatagccacagatgctccatgaggaaaatccctgtccacattggaataaaaaagacatttttgttacaaagtttgcagtataatagagttaacagtactgtctaggctgttgcaatatattctctttcaatgtaccttccttcacctcgtcgtatatatcctcgataagtattaaaacagtatttgagtttaaaagagtttgtatatatttaaatgaataactttttatactctttgttacatgtttgtatcagtatttagtggaaaaccatttgagttgttttgggttagaatttttctttttgtactgtttctttaaaacagagttcttagtaacaggggcagttcctgaattcaaataaaccattttgtatgtttggattttgaatgggttaactaattacaggctaaaataatgccttttttagtgtttttaatttttagaattcactacataaattgtaagtaattgtgggtctcaaaaacactaggaactcttaagtgtcttagcacttcctcgatgtgcctgccctgagggagtgagttcacatttgagacaactgcactccagtgtggacgtgcctttgtcttcaggccatgccgaagggtgtttaaagcagtcttgcaggtcgctcctttcccagccgtggataaaaactgaagctaggaatctaataaggaatgctgatttcctcagttccattttgaggaatggggaaggctattctaaagaaaaaaatgggatttgttttctcggcagatctgcaaggctggctttaagagcacaaggagggaaagtaacgaaagggctggactactataaaagttacaaatacgtagttagaccaatagatttatatagtcaggtttttgtcatgtaatttattaactaactattacagaaacacagctaagaatatcaagtatttctctggctcttgacagaaaaaaatcagttgacttaaccctttgctgtcaaaagagttggcgtttcctgttctgggtgctactgccaaacgttatggtacttagagtcgggatgcacaacttcaaccaccgacttatcaatgcagccgcctgtgtattgcaattggccgttaccttaagcactgagccacccgggtttagttcagccatttcaagaagtatatttaacgtcggtagttctgctttattaaaatgcagcagaggtactcttctgtcccttccgtttatagttctctgagagagttctattttttggttttgttttgtgttttcttttgcattttgtatcttgtatttatccctgaacatgttttgtaccttttttttttttttttttaagaaaaggaattcttttgtgtatatatagatacttgcatgatatactgtagtcaatgttcggttcctcaaaaggtcttgctgctgtcaggtgttatgcactccatccatcataactgtatgaaacacatttcatatgtaaataaacgtgggacatttggcccttgtgcttctgtgagag

SEQ ID NO: 1337 - DNA, 4269 bp, Homo sapiens
gtttgcggtttagaccccaaagattcctgttggtggtctgggtcacaggaggcaggtttcgggagctggaaatgtgagcgggtacgacaggcaccgcgggtaaccgacgccccgggtccttgctgcagccgggtacgcgggataccggcaccccgccttctccgcccgagtgctgccaggcgtgggcctggaatctcttcacaccttctctttggagcccttaatgatacgacgaaccccaagtgtttcagaacatgaagtaaacaatggagaactgttctgctgcatcgacgttcctgactgacagcttagagctggagctggggacggaatggtgcaaacctccttacttttcttgtgctgttgacaacagaggaggaggaaaacatttttctggagaatcctacctctgcagcggagcccttaagcgattgattttgaatcttgaccctttaccaactaattttgaagaagataccttggaaatatttggcattcagtgggttactgaaacagcattagtgaattcatctagagaactctttcatttattcaggcaacaactgtacaacttggaaaccttgttacagtccagttgtgattttgggaaggtatcaactctacactgcaaagcagacaatattaggcagcagtgtgtactatttctccattatgttaaagttttcatcttcaggtatctgaaagtacagaatgctgagagtcatgttcctgtccatccttatgaggctttggaggctcagcttccctcagtgttgattgatgagcttcatggattactcttgtatattggacacctatctgaacttcccagtgttaatataggagcatttgtaaatcaaaaccagattaagctttttccaccgtcatggcatttattacatctccacttggatatacattggctggtgctagaaattctttacatgctgggtgaaaaattgaaacaagttgtatatggtcatcagtttatgaatctggcaagtgacaatttaaccaacatcagcctatttgaagaacattgtgaaactctcctttgtgatttaataagcctgtcactcaacaggtacgacaaggttaggtcttctgaatcattaatgagtgaccagtgtccatgtttacgcattaaagaattatgggttctacttattcatcttctagaccacagaagtaaatggtttgtctcggaatcattttggaactggttgaataaactacttaaaacactgcttgaaaaatcaagtgaccgaagaagatcctctatgcctgtaatccagtccagggatccattaggttttagttggtggattattactcatgtagcatcattttacaagtttgatcgccatggagtaccagatgaaatgagaaaagtggaatcaaattggaactttgtagaagaactgctgaaaaagtccatcagtgttcagggtgtcattctagaagaacaattacgaatgtatcttcactgttgtttgacactttgtgatttctgggagccaaacattgcaattgttaccattttatgggaatattatagtaagaacctgaatagttccttcagtatttcttggcttccttttaaaggccttgctaataccatgaagtcacccttgtctatgcttgaaatggtgaagacttgctgttgcgataaacaagatcaggaactatataaatccagcagtagttatactatttttctttgtattctggcaaaagttgttaaaaaagcaatgaagagcaatggccctcatccttggaaacaagtcaaaggaagaatatattcaaaattccatcaaaaaagaatggaagaactaactgaagttggtctacagaacttttttagcctttttctactgttagcagctgttgcagaggtagaagatgttgcaagtcatgttttagacctcctgaatttcctcaagcctgctttcgtaatgtctcagagagccctcatttggaagggtcacatggccttcctcttgatgtatgcccagaaaaatctggacattggtgttttggctgagaaattttcatgtgctttccgggagaaagcaaaggaattcttggtgtctaagaatgaggaaatggtacagagacagactatctggacccttctttccatatacattgatggtgttcaagaagtgtttgagaccagctattgcttgtatccttcccatgaaaaactgcttaatgatggatttagtatgcttctgcgagcatgtcgagaatctgaacttaggacagtattgagcttcctacaagctgttctggccagaatcaggagtatgcatcaacaattgtgtcaggaacttcaaagggacaatgtggacctatttgtacagtcttcattatcggctaaagagcgccaccttgctgcagttgccagtgcactgtggagacatttcttttcatttttgaagagtcagagaatgtcacaggtagtgcctttctcacaacttgcggatgcagctgcagactttactttgctagcaatggacatgccaagcacagctccatcagattttcagcctcagccagttatatcaattattcaactttttggttgggatgatatcatctgccctcaagttgtagcaagatatttaagtcatgtcctacaaaatagcacattatgtgaagcactttctcattcaggctatgtatcttttcaagccttaaccgtaagatcatggattcgttgtgttttgcaaatgtatattaaaaacctctctgggcctgatgatttgctcatagataaaaatctggaagaggcagttgaaaaagagtacatgaaacagttggtcaaactgacaagattactatttaatctctcagaagtaaagagtattttctcaaaggcccaagctgaatatttatccatctcagaagaccctaaaaaagcacttgttcgattctttgaggctgttggtgtaacttacgggaacgtccagacactttctgataaatctgccatggtcacaaagtccttggaataccttggtgaagtattaaaatatattaagccttatttgggaaaaaaagttttcagtgcagggctgcagctgacttatggaatgatgggaattcttgtgaaatcatgggcacaaatctttgccacttctaaagcccaaaaattactattccggatcatagattgtttactgctgccacatgcagtattacagcaagagaaggaactgcctgcacctatgttgtcagcaattcagaaaagtcttcctttgtatctccagggcatgtgtatcgtgtgttgtcaatctcaaaatccgaatgcctatttgaatcaattgctagggaatgttattgagcagtatattgggcgatttcttccagcttcaccatatgtttcagatcttggacaacatcctgttttgctggcattgagaaacacagccactattccgccaatatcatctctaaagaaatgcattgtgcaagtcataaggaaatcctaccttgagtataaggggtcctcacctcctcctcgcttagcatccattctggccttcatcctccaactcttcaaggaaactaacacagacatttatgaagttgaactactcctccctggcattttaaaatgcttggtgttagtcagtgaaccacaagttaaaaggctggccacagagaacctgcaatacatggtaaaagcctgccaagtggggtcagaagaagaaccttcctcccagctgacttctgtgtttaggcagtttatccaggattatggtatgaggtactattaccaggtttacagcattttagaaacagtagcaacattggaccagcaggttgtcatccacttgatttctacccttactcagtctctgaaggattcagagcagaaatggggccttggcaggaatatagcacaaagggaagcctatagcaaacttttgtctcaccttggacagatgggacaagatgagatgcagagactggaaaatgataatacttaatatattttgtgattcatcctgtctattaattatcagtatctaaagccacattgttccactctaattcctacttttaattaattgtataatgttctgtttaaaataatttctaggattttttttccttttatatctgtaagtaaaaaatgtataaataaggaactgaaggttaattagcaactgtgtaataggatccttggaactttttacaaaactgcattctaccttgatgaaattttagttaaactaaattaaagaaacattttctgag

SEQ ID NO: 1338 - DNA, 4358 bp, Homo sapiens
taattttgaaaagaaaatcttaaagtaacttgacacccaaccatcttgaagaggggatttgaaatgctgtaattttatcccagctttgttcagccatgacaagtgacctgtcagatgcttagtattgtaataacctcatttccctttccaaatttagagtatctttaatactattttttttagacagagtctcgatctgtcacccaggctgtagtgcaatggccgcagtcttggcttactgcaacctccatctcccgggttcaagcgattctgcctcagcctccttagtagctgggattacaggcgttagccagcacacccagctagtttttgtttttttagtagagacaggctttcaccatggtctcgaactcctgacctcaggcgatccgcctgccttggcctcccaaaatgctgggattataggtgtgagccatggcacctggcctaatactacttttaactaccattttcactttttattagttcaagaaaaggcatacacatttattcaacatgtatacctggggagaaccagtcattaccccgatgttcattattttgatcaccacgatagagctgactactctgctatgtagtgcattttgggactgcacttatgtatgtttttgtttaacgtggacaaagacttacagataggtgcaaaaaataaatcctcttttgcaacccagaactcattgttcagtatgagttttgatacatataagaagggatattatgatacctgagacagttgattgatgggagtattgatagccataaaggttggttccaggccaggtgcaatgggtcaagcctgcaatccccacaccaaggtgggagtattgcttgaaaccaggagttcaagaccagcctaggcaagaaagtaagaaacacatctccacaaaaatttaaaaattagctgggtactggggcatgtgcctgtagttggagttactcagaaaggggggaggctgaggcagagttggaggctgcactgagctttgatggcaccactgtactccagcctgagtaacaaagacagaccctgtctcttaagaaaaaaaggttgattccaggcctgtagaatagataaacagcatgggatatgagggaaatcctcagcagtattaattttgcattccaatttcatgttgatgatatacacaatggctttttgttttaaaggcttttatcttgagaacatggtgtctggagttaaaggtatgtctcaatttgagttttcacatcatatttgtttatgtgtaggaaacagtatgttgtcagagcaagtttcattttattcagggacatttctaccatgcttttaattcccatttatactgatttctgaaaagaagaatcctagattcacacattttatagtgatgtgtcagattcattttagttgcaagcattagagggtcctgaatttgttagtttgtagcaataatcagaactttggatttcctacttgaagcctacagcattattttgaattaatgcacaatctaaaatgaggcagaggattttatggtttaatgcaaaatatagtataataaaagatgattacacaggtcataagaattcataaatttgaatgatgtagagtttgattaaaagttatataatgccaaagtcgtaacttacaggcacattatattcctgtattttataatggatgacaattaatcttgagccaagaattaaaatttgctgaaatcttcgaattgggaaaacaacatcctctgttgcaatactgaagttcataacaacagttagactttaaacttaaatcttaagtttaaatctttttcctttggttcatgtaaaggagctacttgatgttactttttatttatcattcctctggctcctaagcacaacgtgattgtgaaattattgtttttgtgattaacgtagtaggaagtttctgcagttggcaatattgtaagagcatattgcagtttctgctcataatttctttcctatggagtgttagactttgttatttatgtgtataaatactagctggacacagtggtgcctgtggtccccagctactctggaggctaaggcaggagaaacacttgagcccagcggtttgaggctacagtgagatgtgatcctgccacatctcactgtagcatcgaacccctgggctcaagtgattcagcaagaatcacacgatttttaaaagacatggcagatcctgtgtctttaaaaaaaaatcaaaaccttgtaaatagtggttgaggtctatcccgatggggcttttcctgtagcctgcacatcgttggaaacgcctcatagagtaactctgtggttttactttactcacaggactattgttagatctgtgggaaggaattacaagacagttgctaaaagtttgaaaaagacggttgctaaacgttatgaaaaaccagataatctacttttttaccttaggtattggcatactccacacatctgtaccattcttgagtgatcgcttaggtaagttttaattggtgacagtataatcttttgggaaataatgattacagttcagatgatgaatttaactgttcaactgctgaatgataacgggcatgaactaaaacttaattctgacagagctggatatggctgtataataaactggatcttaaatttatacttgggttttagttttaataactggaaatgtatcctttctaaatctttaattggtactttctataggaatgaatgtgatttgaactcattcatgttgagaggtaagtaaaatatttaacttataataatcaaggactcaaaagatgaaaaatagaaattacaccatcccagtatttcaggtataacacagaattagtaagatactggcaaaaatattacaatgtatatatttgtatagagaaggaaaatgaagagactgcatgtctatacctaccaaacgaaactacctgtgttctttgcatcattattcaactggcagttacacatatttcatcctaaagtcacgtaaacctgtgtggatatgttgaatcaatagggatatgaattacataaaaagaattttgtgtaactggcagtttgagcaacaatgagcttgacgtttgttgtctgatctgttaagttacatgtatatattccatctttaagttttatagagagactgggcaaagattaggcaaagactagagttgtagcttaaaatgtagttaatgtagcttccttattacagtgacaattaggaaaaaagctcaaattattgtacttgttaaaggaatttgagaggtttgtgaaagcatttctcagcaatattgcaaatttgggaatacgagttgtacagttcagtcataattgcactgcatggtatctgcactcagcagtttacacctgctagggtgttcaaaggtcagtgctatagaaattcagtatctggcatcgttggttttcttggctttgtgcttgttaaacctggtatttctactgatacagtatttgtgtaggtttctcagagtgttcagtttgatatactctaaaatagtaagcaatgcttttttttccagggtgtcaaattgagaaccaggtagatccccaccacctacagtaaaaaggaccctaaagtaaattggttgaagaaattagatcccaaagattcttggtgaattttgaagtcttcatcagtatatccatattaaaacgagatgacagaagccaaagtaattatggcaagtaatggtttttatcttaactataagttatttgctcaagggtgtaatggtcattaccaaggcttttagaatgcagtttctcatttgctgtggacatgaccataaaaaaatttcccagtaggttttctatctgctactttgctagcaatcagcttatggggaacagttgattaactgtaatagaaatgcaatacaaataaaatgtgaaccacatgtgatttttctttaaaatcagtgagatttgaaaattctcctagatctcttggatcatgcaaatttgctttgcctttatattgtaacccttgtgggttgctaataaccaagcagtttgtagtagagttaactcaggctcgttctagggactcattcatgttcactcactgtacactcatctctggaaatgtaaaatttacttttatactattgttatgtagggctgacaggacaactggatcagtttcattaaaaagggcaaacttgaagataaatcttttgactccagctctttagaggatctaaagtgaccttgatggacagtggaagaaatcacaacatggaattcctcgaataacaatttattgactttaaataattttgtctaatgctacatatacacaattaaaaaacctttacact

SEQ ID NO: 1339 - DNA, 3329 bp, Homo sapiens
aaaatcactctccctcaacgctcactgggcgccggcaggaaagtgggcgtggcgggaagacgtgacagcagcaacaaccaaggaaaatgaagcaaggtctcaactccgggagggtcagccaatgaaaactcactgataaccttgttgagccggtcgtaatcctcctcgatgcccacgctgtccaagatcttcttgatgtccttggcgctgggggaggagttacccccgagggcagccagcagcccgtggaagcctcggaaggcgtggccagggcagggcatccaagccgagcgccgggggttggcaccgtctctctccctggcacggcggagacaactgaatactgaaagacaaaaccaacacaccgcgaggaatgagccacgcctccatccacgccacaaagggcttgacagttaatgattggtcgctgaaggagccgagcggaggagcgagagggacgcgagcaagagagcgagggagggagcgcagggccagagcggagccccagccggccgcacaggcaccgcctcccgtcttccgggacccggcacttcgggggttttgggcgccggagacgcgcaagggcgccgatggaggcagactcgccagcgggccccggcgccccagagcccctcgcggagggagcggcggccgagttctccagcctgctgcgcaggataaaaggcaaactcttcacctggaatattttgaaaacaattgccctgggtcagatgttgtccttgtgtatatgtgggacagccatcaccagccagtatttggcagaaagatacaaagtgaacacccccatgcttcagagctttatcaattattgcttgctgttcctaatttatacagtgatgctggcatttcgatcaggcagtgataaccttttagtaatcttgaaaagaaaatggtggaagtacatcctgctgggactagcagatgtggaagctaattatgtgatcgtcagagcctaccagtacacaactctaaccagtgtccagcttttggattgctttgggattcctgtgttgatggctctgtcatggtttattcttcatgcaagatacagagtgatccacttcatcgccgtggctgtctgtctgttgggtgtaggaaccatggttggtgcagacatactagcagggagggaagacaattcagggagtgatgtattgattggtgacatcttggtccttcttggggcttccctctatgccatttcaaatgtttgtgaggaatacatcgtgaagaagctgagcagacaggagtttttaggaatggtgggcctgtttggaacaattatcagtggtatacagctattgattgtggaatataaggatattgccagcattcattgggactggaaaattgccctgctgttcgtggcatttgccctgtgtatgttttgcctgtacagcttcatgccattggtgattaaagtcactagtgccacttccgtcaacctgggcatcctgacagcggacctctacagcctttttgttggactctttctgtttggctataaggactctacatcctgtccttcactgtcatcatggtggggtttatcctgtactgctccacccctactcgcacggccgagccggctgaaagcagcgtgcctccagtcaccagcattgggattgacaacctggggctgaagctggaggagaacctccaggagacccactctgctgtcttgtagctggagaagatggcgcacccatcccccaccaggataaagcagagcctgctgcctgctgaggggacacttggggaaatagcagactcagaatggacactctacaaccctgggttggatccagtggttaggttttagaaaggaacactgaacaaagttcaaaagtagaaataccaaaatagagcagaaaccaagctaagagtgtgtttctgtgtttgaggaccaatatctgttcgtgttcaggagatgaggtgcagactccacactggggtcttagaggcaccagtgggaaagcaggactggggagagatccaggactgagccagcctcaggccagggcgggaaagcaggctgtccaggctgggcttggtggtcaggaacaggggcagctcacggtggctctggagtacgtttcctctgtcagatgcttcaaggtttttttttttttttttttgctgaggcagttattgtccacaggcctttgggtacagatgaggcctcggggctgactgcatgtggcagaaaacgggtgggtcagcccttgaaaagtcctgagatataagtgtgagtactatacaagcattaaactggagtgcagtaaacctaggaaccttcccacaattgtttttttgtttgtttgagatgcagagtctagagtgcagtggtgcaagctcagcttactgtaacctctgcctcctggattcaagtgttagtagctgggattacaaaagcatgtggccccacgcccagctaagttttgtatttttagtagacatggggtttcaccatgttgcccaggctggtcttgacctcccgacctcaagtgatctgcctgccccgacctcccaaagtgctgggattacaggcttgagccaccgtgccaggcctgttttgtttgtttttgtagagagatggggtttcgccatgttgcccaggctaatctcaaattcctgagctaaagcgatctgcccacctcggcctccgaaagtgctaggattacagatgtgaaccactgtgcctggcctgtttgtttgtttgtttaaaacatttctccatcactcattccaggtcccagagcaaactctctctgctctcggagcctgtgacactggctatgtgctccacagtttcagtcccaggtcatactctccaacagttttcagagctccatatatatgtagatgccatcctttctaaaaacttctcacgacctcctggaatattcctattgatctcattttatttagcatcagctcaagaaactaagtcttagtgcacagtatcacaacaaagaaaaagctttgtttttataactggtaaaaacaagaaaagattctcatcaaaatgaaaatataaaattaatcatttctcaccaaagagtatgcctgggagcctccagctgttaaaagacaatgctattactacttcttatcaaaaatctgtaatgccctgtgatttttatgatacttcttcaatacaaagtgttaatatgtgtcatcagtataataacaaccaacaaaatgccactttcagaaaactgtatgtaaattttttgtaacaatgtaaaaaagaaatggggagtaagtgttcacatcattaaaaggctttgaattcatggaaatac

SEQ ID NO: 1340 - DNA, 3947 bp, Homo sapiens
agtgttgatggagttattgaagaaatgatggagtaagagactcttttctaagcaactcaagtttgcagtgattcaggcctacttctgaagagacagccttttatctcaatgaatgacacagaaaaaccagcagatactccctctgaggaagaggactttggtgatccaaggacatatgacccagatttcaaggggcctgttgccaacagactaaactgggaactccgtgagagaaagcatctcatctgtgtggttcaccaacgtttcatagcatctgccacagtatccggcacaaaataggagttgtacagatgttctgtgctgtatgatcttcctactgtattattggctacattgttttaggacttgtggcctgggtacatggggaccccagaagagcagcctatcctacagacagccagggccacttttgtggccagaagggcactcccaatgagaacaagaccattttgttttactttaacctgttacgctgtaccagcccctccgtattgctaaacctacagtgccctaccacacagatctgtgtctccaagtgcccagaaaaatttttaacctatgtggaaatgcaacttttgtacacaaaagacaaaagctactgggaagactaccgtcagttctgtaagaccactgctaagcctgtgaagtctctcacacagcttttactggatgatgattgtccaacagcgatttttcccagcaaaccttttctccagagatgtttccctgacttctctaccaaaaatggcactttaacaataggaagtaagatgatgtttcaagatggaaatggagggacaagaagtgttgtagaactcgggattgctgcaaatggtatcaataaacttcttgatgcaaagtcacttggattgaaagtgtttgaagactatgcaagaacttggtattggattctcattggcctgacgattgccatggtccttagttggatatttttgatacttctgaggttcatagctggatgcctcttctgggtcttcatgattggtgtgattggaattataggttatggaatatggcactgttaccagcagtacaccaatcttcaggaacgcccaagttccgtattaactatctatgacatcgggattcagactaacataagcatgtactttgaactgcaacaaacatggttcacatttatgataatactctgcatcattgaagtgattgtcatcctcatgctgatcttcctcaggaatcgaatccgagtcgccattatcctgctgaaggaaggaagcaaagccattggatatgttcctagtacattagtctatccagctttaactttcattttgctctcaatctgcatttgctactgggtcgtgacagcagttttcttggcgacatcgggggtacctgtatacaaagtcatagctccaggggggcattgtatacatgaaaatcaaacctgtgacccagagaattttaatacaactgaaattgccaaagcttgccctggggctctgtgtaactttgctttctatggtggaaagagcttgtaccatcagtacatccctaccttccatgtatacaacttatttgtctttctctggcttataaacttcgtcattgcattaggtcagtgcgcccttgctggtgcattcgctacttattactgggccatgaaaaaacctgatgacatcccacgatatccactttttactgcatttggacgagccatacgatatcacacaggatccctagcatttggatctttaattattgcattaattcaaatgtttaaaattgtactagaatacttggaccaccgtcttaaacgtacccagaacacattgtctaaattcctacagtgctgcctgagatgctgcttctggtgtttggaaaatgcaataaagtttttaaacagaaatgcctatattatgattgcaatatatggcagaaacttctgcaggtcagcaaaagatgctttcaatctgctgatgagaaatgttttgaaagttgcagttacagatgaagttacatactttgtattattcctggggaaacttctagttgctggaagtataggtgttctggccttcctattcttcacacaaagactgccagtgattgcacaaggaccagcatctttaaattactactgggtacctttgctgacagtcatttttgggtcttacctgattgcacatgggttcttcagcgtctatgcaatgtgtgttgaaacaattttcatctgcttcttggaagatttagaaagaaatgatggttctactgcaagaccttattatgtgagtcaacctttgctgaagattttccaggaggaaaatccacaaactaggaagcagtagaagagcaaactggtcgtcctacagctgtgtgttaccttttctccatctgctgtgtctgtgcaacatttgtttcataagtgctttgtgtttagcaacactgtattcacgaccttgttggcttgcatttgcatgttttataccaaagcttatactgtactatgtgaagccatcagaagtcgcaagggaattgttaataacataaaacatttttatactaagatcatttgttttgtaattcgtttttaaagagtggcttggatgttttgaaaatactactgaatatgttaatattcttttaaatcttagattgaaaaatgatacattacttaaattgatagctcctaatatatttttaaaattacaactaaaagaagacttcttctgcagggaaaattggtcagcaaagtgaaattaaaaattttaaagtttttcccactctcgttggacagtaaatcagtgaaaggactgccccagttgagagtttgctctctttaagtatagaatgtttcctcttaaacaaattgccaatcatccagcctttactacttagccctctgacaaagtgccttactggctatttaatattacccagcttttatgggcaagtttacaaacattgttttttaaaaaattaaaacctgcaatgtttcgtgattaaaacaagtcttattgcatttgtttcactcttagctcactgattggaaaacatttgtcattttgctctgtttgatatcctcactattatggaatacattgtgcagctaaacaatttcccttgcgcctagtggacattcatgaatgtgtactacacgcaagaagaaacaaaccccgaaagaacacttgttggatttctttgtttttttttttactaaaagagaagttttaaaatgaaatgttttctatagtagatctttgaaaatacaataggtataatactgcatttctcagtgttttacaaagatcagaaagagaaacttctaggaattgcaaagggaaactttactcctcgaaagggtgctcacagatgtcatgtactgaatagctcccttttaaatgatcatttattttcatcaaagcctgttctatatatgccacttcattttctaacttttggtatgaaaaaatcagtttacttacagtatgttaattgtattgtactactataaacaggaacataatttccaattcagttttaaataattttaccagtactactaacttttaaggaaattaattcagttggttactcagtgtttgttacagaaagagtccagaaaagtattcaccctaagagaatgtcaatcatataatgataatttgtgaaagctttgagaatcaatcatcagtaagttactatcagtttataaaatattatcacatttgtttaaatgtgactttagatacttttatgccaaaaataaactcacatgagcacatgacagtctgagctctataatcagtgtgcttctgctgtgcagaaatgttagaaacgtattgtctaaatatctttgataattaaaatgtttaatatttaatgaaatttgttgttacttgttttaaatcttttttcttttaataaagatttaaataagaaat

SEQ ID NO: 1341 - DNA, 4504 bp, Homo sapiens
aaggctgcactgctcacgcctatgcgtgcctggactacacagctccagaagctgaagggacgctgcatgactgtgtttggagataccctcctatgttcagctgccatcatctacctgggtcccttcccaccattgcggcgccaagagctactggacgagtggttagctctgtgtaggggctttcaggaggctctgggcccagatgatgtggcacaggcactgaagcggaagcaaaaatctgtcagcataccaccaaagaaccccctgctggctacacactctcccttcagtattctgtccttgctgagctctgaatcggagcagtaccagtgggatggaaacctgaagccacaggcaaagtcggcccacctggcaggcttgcttctgcgaagccccacacactacagtagttgccgttggcctctgctgcttgaccccagcaacgaggccctcatctggttggacccgctgcctctggaagagaatcgatcttttgcgccagccctcactgagggtagagggaaaggcctcatgagaaatcaaaagagagagagtaaaacggacatgaaagaggaagatgatgagagtgaagagagtaatgaggctgaggaccagacaaaagagcagaaggcagaggaaagaaaaaatgagcaggagaaagagcaagaggaaaatgaagagaaagaggaggagaagacagagagccaggggtcaaagccagcctatgagactcagcttccatcccttccctaccttagtgttctttcaggtgctgacccagagctgggttctcagctccaggaggcagctgcttgtggtgagagctggtccccacccaccctggcccgtttttgacttgccccattctgtgaccccacaggcctcccacacctcagtctaacttcagttcccatccttcatcccaggcactaactatattgaagcgtcttgtgggaaccctcctatcagccacagggaagctggtcagagccagacctcgtgcctggggaatggggatcatgggtgctggcattgtgggtagggtgcctttgcctccctctcacaggcctgcctgtgttactgaccaatgtggagctgggtctagggtgcgaagaactgcaatggctgctgcaacgggagcagctgagtccaccccaggtgcagcctggcttctgtctgtatctcagcaccaccctctccctctgtgccatggaaaaaggtgaggcccagagggcaaattgccagcacagttgtgtggacacactaggccctcagcaccagccctaagagggcttcactcaacctggcccagagcaggcacaggtctatagcagggagccatactccctgtctactctaccccctggccctgccaaggggaagaggttaagcatctcccatgttaccccaagtgctaggttgtgaactgctaaaggggctgaatgtgttggatctgggcctgaacatggaaatactggaagaacagatgctgcatgaaatcttgtgcagagagtatcctgaactcgagacccgctggcaggacctaaagatcagagccctagatacctgcaaggctgtggaggctgctgaggagcggctgctgacgatgctgctgttccagaatccgaagcgtcagaagccagccaagtttctgcggaacatagtgagggcccaaggaaagctatgccagctgcatgctcattgtgaagagttagaagggcagaaactacaggagatggtattgtgggcaccctatcgacctgtggtttggcatggaatggccatggtaaaggccctaagccaactgcagaacctgctgccacttttctgtatgagcccagagaactggctggcagtcactaagcaggctctggacagcatgaagccacgtgagattaatcacggggaggacctggccagccatctactgcaattgagagcacacctgacccgccagctgctgggcagcaccgtgactgcactgggccttacccaagtacccttggtgggtgcattgggcgctttggctctgctgcaagcaacagggaaagcatcagagctggaaagactggcactctggcctggactagcagcctctcccagcacagtccacagcaagccagtctcagatgtggctcgaccggcctggcttgggccaaaagcctggcatgaatgtgagatgttagagctgctgcccccatttgttggcctgtgtgcctccctggcaggccactccagtgcttggcaggcttacctgtcactgtcatccacagtgctgggtcctgcacctgggccagggcctgagccactcagcctcctccagaagctgatcctgtggcgcgttctgcgacctgagtgcctggcaggtgccctggcagacttcaccactagcctcctgggtcggcccctggatgaaaacacgtatgctcccaccatgccctttaaacatagtcaggctactcagcccatgctgatcttgttgccaccgcctggccacccctcagccactctgcatcctctgactgtcatccagaaactggctgccaagtatcagcaggggcagaagcaactgcaggtgatagccctgggctctgaagcctgggacccagtctcagttgtggtcagcactctatcccaggctatgtatgaggggcactggctggtgctggacaactgtcatctgatgccccattggccgaaagagctgctacagctcttgctggaactgttaggcagagccaaggtggttgcagacctggaatcagaacagcttttagaccaacctgaaagcaggaatgtaagcactgttcacagagattttcgtctttggcttattgtgcctgcagagtctagtgcttctttgccagctgtgctgactcagcactccatgcctgttttctggaaccagtccctggagctgggccatgttttgattgacagtgtggagctagcccagcaagtactctacatgcaaccccccacccaggcactacctctgctcctcctccatggcctcctgctacaccggcagctctatggaacaaggctgcaggcacacagggggcgctggagtcaagtgactctaacccaggttcttcagacccaagaccagctgtgggcaagtcttagcaatccccgtgctgccatgcaagagctggctgcttcagttttctacgggggtcctctgggggacactgaggacagggaggccctgattagcctcacacaagcctgcctgagccccagtagtgggagctgggtccagccacacacacctcagtctttgctggccacgctcatgcccctcccagagctaagggagctggatgcaatggcagagtgcaaggcccagatgcacctactgccctcaccacctgaaccccggctctgcggactgagtgagggcccccaagcctggctgttgcgacgccagagtcgcgctctcttgagtgcgctgcagcggagttcacccgtgtgggttcctgagtctcgaagaggcgcccagcttgcggaaaggcgactgcggcaacgcctagtgcaagtcaaccggaggctggagtcactgcaggatctgctgacccacgtgattcgccaagacgagtccgacgccccgtggtcagtgctggggccaaatgcacggcggcctctggagggcgtcttagagaccgaggctctagaactgagccagttggtgggcacgctacaacgcgaccttgattgcctgttgcagcagctgaagggcgcacccccgtgcccctcccgccgctgtgctgcggtggcccacgctctctggactggccgcctacccttgccttggcgacctcatgcgccggccggtccgcagccgccctggcactggctgcgacagttgtcgcgccgtgggcaactgttggttcgttacttgggcgtgggcgcggacgcgagcagtgatgtaccagagcgcgtcttccacctgtcagcctttcgccacccgcgccgcctgctgctggcattgcgtggggaagctgccctggaccagaatgtgcccagctcgaatttccctggtagccgaggctcggtctccagtcagctccagtataaacgtctggagatgaacagcaaccctctgcacttcagggtggagaatggtccaaatcccacggttccagagagagggctgctgctgatcgggctacaggtcctacatgcggagtgggacccaatagctggagccttgcaggacagtccttccagccaacccagccctctgcctcccgtcagcatcagcacacaggccccgggcaccagtgacctgccagccccagccgacctgactgtgtactcgtgtcctgtgtacatgggagggccccttggcaccgctaagctgcagagcaggaacatcgtgatgcatctgcctttacccaccaagctcacccccaacacctgtgtccaaaggagggtccatgtgtgcagcccacccctgtcttgagcccgtctaccaaaataaagttgtagtgattccatg

SEQ ID NO: 1342 - DNA, 5275 bp, Homo sapiens
cgggagaagggagaacggagggggaggggaaaccagggccagcgagggctgtgcctgccgagacagcgtgcgtgacctcggggactcggctggggcccaggatccgaaaccttcagattgacctcgctgctcagtacataaaggctgccgtgaagaacgttccctcggtgttcctgatgacagactcccaggtggccgaggagcagtttctggtgctgatcaatgacctgctggcctcaggagagatccctgggctgtttatggaggacgaggtggagaacatcatctcctccatgcgaccccaagtcaagtcccttggcatgaatgacactcgggaaacatgttggaagttcttcatcgaaaaagtgcgcagacagctcaaggtgatcctgtgtttctcccctgtgggctccgtgctgcgggtacgagccagaaagttcccagctgtggtcaactgcacggccatcgactggttccacgagtggccggaagatgcgctggtgtccgtcagcgcccgcttcctggaggagactgaggggattccgtgggaagtcaaggcctccatcagcttcttcatgtcctacgtgcacaccaccgtcaacgagatgtccagggtatacctggctactgagaggcgctacaactacaccacacccaaaacctttctggagcagatcaaactgtaccagaacctgctggccaagaagagaacggaacttgttgccaaaatcgagaggctggagaacggcctgatgaagctgcagagcacggcttcccaggtggatgatttgaaagccaagttggcgattcaggaggctgagctcaagcagaagaatgagagcgcagaccaactgatccaggtggtcggcatcgaggccgagaaggtcagcaaagagaaggccattgctgaccaggaagaagtcaaggtcgaggtcatcaataagagcgtcactgagaagcaaaaggcctgtgaaacagacctggccaaagcagaaccggccctgctggcagcccaggaggctctggacactctgaataagaacaacctgacagagctgaagtcctttgggtccccgccggatgctgtggtcaacgtcaccgccgccgtcatgattctgaccgcacctgggggcaagatccccaaggacaagagctggaaggcggccaagatcatgatgggcaaggtggacaccttcctagactccctgaagaagttcgacaaggagcacatccctgaggcctgcctgaaggccttcaagccctaccaaggcaacccgacgttcgaccccgagttcatccgctccaagtccacggccgccgccggcctgtgctcctggtgcatcaacatcgtccgcttctacgaggcctactgcgacgtggcgcccaagaggcaggcactggaggaggctaatgcagagctggcagaggcacaagagaagctgtcccggatcaaaaacaagattgcccagctttccaacttggttttgcaggaacttaacgccaacctgagcaacctaacctcagcgtttgaaaaagcaacagctgagaaaatcaagtgtcagcaagaggccgatgccacgaacagggtgatcttactggcgaacaggctggtcgggggattagcatcggaaaacatccgctgggctgagtctgtggagaacttcaggagccagggggtcacgctgtgtggggacgtcctgctcatctctgccttcgtgtcctacgtgggctacttcaccaagaaataccggaatgagctgatggagaaattctggatcccttacatacataacttaaaggtccccatcccgatcacgaatggcctggatcccttgagcctgctgacagatgacgcggacgtggccacctggaacaaccagggcctccccagcgaccgcatgtccaccgagaatgccaccatcctgggcaacaccgagcggtggccgctgatcgtggacgcccagctccaaggaatcaagtggatcaaaaacaaatacaggagtgaactgaaagccatccgcctgggacagaagagctacctggatgtcatcgagcaggccatctcggaaggggacaccttgctcattgagaacatcggcgaaaccgtggaccccgtgctggaccctctactgggcaggaacacgattaaaaagggaaagtgagttgtttccgcctccgtggcttgagccaggtacattaagatcggtgacaaggaggtggagtaccaccccaagttccgcctgatcctacacaccaagtacttcaacccacactacaagccagagatgcaggctcagtgcaccctcatcaacttcctggtcaccagggatggactcgaggaccaactcttggccgctgtggtggccaaagagcgcccagatctggaacagctggaggcaaacctcaccaagtctcaaaacgaatttaagattgttctgaaagagctggaagattcgctcctggcccgtctgtcggctgcgtcggggaactttctgggagacacggccttggtggagaatctggagaccaccaagcacacagccagcgagatcgaggagaaggtggtggaggcaaaaatcacagaagttaaaatcaacgaagcgagagagaactaccgcccggctgcggagagggcatctctgctctacttcatactgaacgatctcaacaaaatcaaccccgtctaccagttctccctcaaggccttcaacgtggtgtttgagaaagccatccagaggaccacccctgccaacgaggtgaagcagcgggtgatcaacctgacggacgagatcacctactccgtctacatgtacacggcccggggactcttcgagagggacaaactcattttcctggcacaagttacgtttcaggtcctgtccatgaagaaggagctgaacccagtggagctggatttcctcctgcggttcccttttaaggccggagtggtctcaccagtggacttcctccagcatcaaggctggggcgggatcaaggccctctcggagatggatgagttcaaaaatctggacagtgacatcgaaggatctgccaagcgctggaaaaagctggtggagtcggaagcccccgagaaggagatcttccccaaggagtggaagaacaagacggccctgcagaagctgtgcatggtgcgctgcctgcggccagatcgcatgacctacgctatcaagaacttcgtggaggaaaagatgggcagcaagttcgtggaaggccggagtgttgagttttctaagtcctacgaggagagcagcccctccacgtcaatcttcttcatcctctccccgggggttgaccccttgaaagacgtggaagccctgggaaaaaaactagggtttaccatagacaatggaaaactccataatgtgtccctggggcagggacaagaggtggtggctgagaacgccctggacgtggctgcagagaaaggacactgggtcattctgcagaatatccacctggtggcccggtggctgggaacactggacaagaagctggagcgctacagcacgggcagccatgaggactaccgggtgttcatcagcgcggagcctgcccccagccccgagacccacatcatcccccagggcattctggagaacgccatcaagatcaccaacgagccccccacgggcatgcacgccaacttgcacaaggccctggacctgttcacccaggacaccctggagatgtgcaccaaggagatggagttcaagtgcatgctcttcgccctgtgctacttccacgctgtggtggcagagaggcgcaagttcggcgcccagggctggaaccggtcgtaccccttcaacaacggggacctcaccatctccatcaacgtgctctacaactacctggaggccaaccccaaggtgccctgggacgatctccgctacctttttggtgaaatcatgtatggcggccacatcacagatgactgggaccgtcggctgtgcaggacctacctggctgaatacatccggacggagatgctggagggagacgtcctgctggcccccggctttcagatcccccccaacctggactacaagggttaccacgaatacatcgatgagaacctgccccctgagagtccctatctgtatggcctgcaccccaacgcagagattggctttctgacggtcacctcagagaagctgtttcgcactgtcctggaaatgcagccaaaagagacggactcgggggcaggcacgggagtgtcccgcgaggagaaggtgaaggccgtgctggacgacatcctggagaagattccggagactctcaacatggctgagatcatggcaaaggcagcggaaaagaccccctatgtggtagtcgcctttcaagaatgtgaaagaatgaacatcctgaccaacgaaatgcgccgttcgctcaaggagctgaacctggggctgaagggagaactgaccatcacgaccgacgtggaagatctgtccacggctctcttctatgacaccgtgcctgatacgtgggtggcccgggcctacccctccatgatgggcctggcggcctggtacgcagacctgctgctccgcatcaggcggctcgtgtgtccttgcaggaactcgaggcctggacgacagactttgccctgcccaccaccgtgtggctggccggcttcttcaacccccagtcgttcctcacggccatcatgcagtccatggccaggaagaacgagtggcccctggacaagatgtgtctgtctgtcgaggtgaccaagaaaaaccgagaggacatgaccgctcctccgcgagagggctcctacgtgtacggactcttcacggaaggggctcgctgggacacccagactggagtcatcgctgaagcgcggctgaaagagctgaccccggccatgcctgtcatcttcatcaaggccattcctgtggaccgcatggagaccaagaacatctatgagtgtcccgtgtacaaaacacgcatccgcggccccacctatgcctggacctttaacttgaagaccaaagagaaggcagcgaagtggatcctggcagccgtggcgctgctcctacaggtttagctcgctcctgcctcacagcccacactccctggggctggaccacaactcagcccttcgcctgtgcacctgtgacttattctttacaggaactggtggtggtttttcgttctcttaaataatcaggtgctttgtaaccaagcacatcggaaccagagggtggaggttggtgtggaagaggtggggcagattaaagccagtggagcc

SEQ ID NO: 1343 - DNA, 3867 bp, Homo sapiens
cctccagaatgcggcgtccctgtcttcaaggcacgtactgtgaccagcacactaatctctgttactctagcggatggccttcagcttttggaaccagcccggcaacctcctttccccttgctcatcagtccccgggaacgagcccagtgacctcccctcagctcactcatgtacccttggaaactggacccatgatttcgcctcctcctacacataggaccccgggaacttgcctcacgatttcacctcctcttgctcgccggccggtggaaactagtcctatggcctccccaaccctttctcacagagttttggaaactgggctgatgatctctctgccctctcactggttctcagggagaagttataatgacccccttctctccccagcatcttccccacctactggcagcttttaccatggcagccttaagcctctagactcttgtgaacccaaaccacagcttgacctgccccttgagaaaaattgttgtggcttcccactctcttctcaggcaggcatgcctggctctcccagctcacctcaggagggctcttatcattactcccatctttcctcagaggcctacatacctacccctgggagtccttgctatgccatctgcctgtgccccgggagtactgattctccttgctcaccccagtcccaggctcccaggaaggcttgcattgagtcccttctctcctgggaggcaactgggaactcttacctcatcctaaccccggacaccacaacttctggtcccccctgttcccaggaaccatctcgtccccatggtcctcattctgtcctttccttcccttcacccctgggcaaccagtttatatctccaccccagtcacttccccgcagaagctataatgaaccccctcttcccactccagtttccccccaaccgaagtcccctaagtccccagagttaagacagtcacatactccccacaaatgtctctccctagtcaacactccccagcacaccccttctggccagcccaagcccgctaaggcccacacctgtcccccacctccctcctgcctctctggtccttcttgtatgcagccatacatcacaactccttcaaattccagccccaaagaacttcccccagggactaccttactgactgtggtccctagagctctcaaaagtgttatccccacttcttttcccctctgccttccttgtgatcctgtctcggccaatagttatgctcagagcagccgccatggaccctccatagggcccccctgcaatacccatatatgctctgtggttccctccaccccccatccctgcccactgtctggctccctcaatcattcgacaggcccccctcccattgtgcccctgtgtgacacctatagcactcccaggggcccaccccaacctcgttgtcagcctgtgatgcctccttgttctacccacatctattcttttatccctttgagaacaccctttgatcctcaaagtttacccattgtcccccgagtccgggcctaccctgatactgtcccctgtggcctccatatctaccctgtggcctctcaaggcccttgcaaagagcctctgcagatcccctacagctgccctttgccttcatccaaggattccagctgtagcaccaatcccagctgtagttcgactattattagcaaatgccagagtagtgacagcgagagcaggagttcccaccaaagccaaagccggagccaaagcaagagtccccatgatggcagaagtcagagctggagcaagaggcatcatctgagcagaagtccaagtcagaaaagcagtccctatcctagcagaagctggggccggagcagtaatcctcaacaaaacacaagtcagggccagagtgagagtccccaacttagcataaatgagcaccagggtgagagtccccaaattagcagaggtcagggcaagagcaagagtctatgatggcaaaagtcggaaccggagcaagagtccccaacatggcaaaggtcaaggccagagcaagagtccccaacatagcaggagccagagcaagagtcccagcgaggcaaaagtcacagagcaagagtcctcaccataacaagaaatgagggccagagcaaaagttctgaccagaccaaaaatctaggccagagcaaggcatagatagtaacaagattgccagctatagcaagcatcccagctgcagcaaccaggaccgacttgtgcactcctcatctgaagtcttcatttctcttttactctgcctccttgttcttgtcctcttgtcccctgctacccccatagcagtcatcctagaagtccctgttttggttcacacctcaagattctgtgggccctccttatccaacctttctggggtctgggaactctcccagcatgaccctcaaccctctgattctaagcatggtggtgctagtcactgtgtgacgctaggctgccacagagcccaaattccctgctgttcgactggctttgcagaattttgacatggcttacagtgtgcagtttggagatctttggccatcaatccgtgtcagtctcctctcagagcagaagtatggtgcactggtcaataactttgctgcctgggatcatgtaagtgctaagctggagcagctgagtgccaaggattttgtgaatgaagccatctcccactgggaactgcagtctgagggtggccaatctgcagccccatcccctgcctcctgggcctgcagtccgaaccttcgatgcttcacttttgacagaggggatatcagtcgcttccctcctgccagacctggcagcctgggtgtcatggagtactacctgatggatgctgcctccttgctgcctgttctggccctcggcctgcagcctggggacatcgtgcttgacctatgtgcagctcctgggggaaagacactagcgttgcttcagactggctgttgccgcaatcttgctgccaatgatctctccccgtcccgaatagccagactacagaagatccttcacagctatgtgcctgaagagatcagggatggaaatcaagttcgagttacctcatgggatggcaggaaatggggagaactggagggggacacctatgaccgggtgctggtggatgtgccctgtaccacagaccgccactcccttcatgaggaggagaacaacatctttaagcggtcaaggaagaaggagcgacagatattgcctgtgctgcaagtgcagcttcttgcggctggactccttgccaccaaaccaggaggccatgttgtctattctacctgctcactctcacacttacagaacgagtatgtggtgcaaggtgccattgagctcctggccaatcaatacagcatccaggtacaggtggaagatctgactcacttccgaagggttttcatggacacattttgtttcttctcatcctgtcaggttggggagctggtaataccaaacctcatggccaattttggccccatgtacttctgcaaaatgcgtaggctgacatagtatcacccaatccctgaagcaagaatacaaagggtatactctgttggatgcaccagaaactggaaactgggaccagtggcagagatgcactctcggtcctgtctccatcctgttcgtgtctttctgcagttttcggcaataagaagtagaagatttgctgtcctgctgtccaattgtggagcatcagcaggtttccaactcactcattaacccctaccccatctccaggcctgtactaaagtttgctgcccgcttaggggcttagaaggagaagccagtgagcaggctcacactaagttgtaaacataggagaagcatttggccaataaagttgttgaaactctat

SEQ ID NO: 1344 - DNA, 3946 bp, Homo sapiens
ctttttgcttctctgcgcccagagctccagtccttctcttcactgctctgcgtcctctgctcctggaggccaagcctctgtggccttgtgtcctgcaagtattcgcagatttatggctaaaagaccgggaccccctggaagccgagaaatgggactgttgacattcagagacatagctatagaattttctctggcggaatggcaatgcctggatcatgctcagcagaatttatatagagatgtgatgttagagaactacagaaacctggtctccctgggtattgctgtctctaagccagacttgatcacctgtctggagcaaaataaagagccccagaatataaagagaaatgagatggtagccaaacacccagttacatgttctcatttcacccaagaccttcagtcagagcagggcataaaagattcactccaaaaagtgatactgagaagatatggaaaatgtggacaggaggatttacaagtaaaaaaatgctgtaaaagtgtaggtgagtgtgaggtgcacaaaggaggttataattatgttaaccaatgtttgtcagctacccaaaacaaaacatttcagactcataaatgcgtcaaagtctttggtaaattttcaaattccaatagacacaagacaagacatactggaaagaaacatttcaaatgtaaaaacgatggcaaatcattttgcatgctttcacgcctaaatcaacatcagataattcatactagggagaagtcttacaaatgtgaagaatgtggcaaatcctttaactgctcttcaacccttactagacataaaagaattcatactggagagaaaccctacagatgtgaggaatgtggcaaagcttttagctggtctgcatcccttactaaacataagagaattcatactggagagaaaccttacacatgtgaagaacgtggcaaagtctttagccgctcaacacttactaactacaagagaattcatactggagagaaaccctacacatgtgaagaatgtggcaaagcctttagccgctcttcaacacttactaaccacaagagaattcatactggagagagaccctacaaatgtgaagaatgtggcaaagcctttagcttatcctcaacccttaagaaacataagatagttcatactggggagaaactctacacatgtgaagaatgtgggaaagcctttaccttctcctcaactctaaatactcataagaggattcatactggagagaaaccctacacttgtgaagaatgtggcaaagcctttagcttaccctcaaccttcacttaccacaagagaactcatactggagagaaaccctacaaatgtgaagaatgtggcaaagcctttaactgctcctcaacccttaagaaacataagataattcatactggagagaaactctacaaatgtaaagaatgtgggaaagcctttaccttctcctcaactctaaatactcataagaggattcatactggagagaaaccctacaaatgtgaagaatgtgaccaaacttttaagtggcattcaagtcttgctaatcataagaatatgcatactggagagaaaccctacaaatatgaataatgtggtaaagtccagccctcaggccttataatacataaaataatttatactggaaaaaatcactacaagtgtggagaatgtggccaattctttaaccagttccaaaccactgctgtccataagataattcatattggacaaaagtcttataaatgtaaaaaaaaaagtaacagcctgggtgacagagcgagaatccatcttaaaaaaaaaaaaaaaagcgtaaatgtgattactgtaaaaagacctttcagaaaacataggcctttaaagcaaagactatttattctaaagacaaacattaaaacataaagaggattgtgtagtacctttatttgtattacggattttattgtacacattttatatcaaaggaaaaccctgaaacagatgctcaaactttgttgaacatcggagaatttatattggagagaaagtgtaaatgaatgtcaaaaaatatttgttcaaaaactacagtttagaaaacactagtttatactaaaaaaatatttttgcagatgcagtaaatggggaaaatatgtttaatcaaaaattaagtctacataaacatttgaggattcacagtagaaagaatgaaggtgctgaaacttcagacattacactaaatcagagtgttgagtgtaaaaaagatataaatctaacaatataaatttaaagaagtagatttatttggagatttataattacattcgaggtatgcttctttctttgtaaaaaaaaatatagattttctgaaaagcaaatagtaatgtaactcacgtttcaaattacttcatgttgatcctttcttcccattgtttctgtgaaagtattggaccaattgttgaatcagagatatgagattgttttttataggtgtccattattcatgaactttcctatggatgagtaaggacattaagttgtaagatgcataatgaaaatctaaatggagaggttctttgtggttgacttataacattgttttagtgatgtataaggcgagcgttcagagtaatattctaaattctagtgaggaaaacctttgaacgtcagtagtaaattattttatcaattgtacctttatgtaaacaaagttgtttttaatgagctaaaactattgtgctttgaaagaagtattaagctgccattgactctatcgtgtctcatcttaaggttctgcgtaaaagatggtgacaatatactatttgttaatgtaggggaatgacatcactagtagtctcttttttgccagtgtttttgtttgtttgttttgagactaagtcttactctgtcacccagactggggtgcagtggtgcgatctcagctcactgcaacctccacctcctgggtccaagtgattctcctgcttcagcctcacaagtagctggaactaggggcaggcaccaccactcctggctaatttttgtatttttagtggagatggggtttccccatgttggccaggctggtctcaaactcctgacctcaggtgatacacccacctcggtgtgccgaagtgctgggattacaggcatgagccaccatgcctggcctactagaggttttaaacagcaaacaagttgaagaattttgttcccataggacaaatttgtacttttttaccttatttaatttttttttaatttttgtgggtagtgtgcatacacacttatggcatatatgagatatgttaacacatgcacataatatttaatgatcacaacagagtaaatgaggcattcatcaccttgagcatgtatttatcctttgtattacaaacaatcccattatacagttttagttatttcaatatgtgcaattgaattactattaaccacagggtcattttatgatcataaaaattacatgagtataattaatacccatacatttctgagtcttgattaaatatttttaaaattttgttttataaattttttgcacatgtggcatctctgctgacaaacaaaaacagacttttagtttcaatttacatagagttacatatacaaatatattactctaaagatataccagccgagcacagtggctcccagcattttgggagcctgaggtgggaggatcatttgaggttaggagttcaagaccagcctggccaacatggtgaagccccatctctactaagagtgcaaaaagttagctgggcatggtggtgcatgcccatggtcccagttactcaggaggctgaggcaggagaattgcttgaacctcggaggtggaggtggcagtgagctgagatggtgctactgcactccagcctgggtgaaagagcgagaaaccatctcaaaaaaaaaataaataaataaaagatataccttaagcat

SEQ ID NO: 1345 - DNA, 4166 bp, Homo sapiens
cttcaagcacagagctggtgggttggagtcaggcatctgcacccctagtggctgtctggtgaggaatttcttgtttcttcccagcttgcggcttcagtgcttgatggggctgcctgttggtggatcagtttttgcagtgcctggtaggagtggagagccgtgggaagaggtcctgcggcgcccaagcctgggttcaccccaagactaagttctttcccaagttagagaagaagagagaaagcaaaaagaagagaggaaagttcccccttcccctcctccgtgcctgtcatgtcctctaagccagagccgaaggacgtccaccaactgaacgggactggcccttctgcctctccctgctcttcagatggcccagggagagagcccttggctgggacctcagagttcctggggcctgatggggctggggtagaggtggtgattgagtctcgggccaacgccaagggggttcgggaggaggacgccctgctggagaacgggagccagagcaacgaaagtgacgacgtcagcacagaccgtggccctgcgccaccttccccgctcaaggagacctccttttccatcgggctgcaagtactgtttccattcctcctggcaggctttgggactgtggctgctggcatggtgttggacatcgtgcagcactgggaagtcttccagaaggtgacagaggtcttcatcctagtgcctgcgctgctggggctcaaagggaacctggaaatgaccctggcatcaaggctttccactgcagccaacattggacacatggacacacccaaggagctctggcggatgatcactgggaacatggccctcatccaggtgcaggccacggtggtgggcttcctggcgtccatcgcagccgtcgtctttggctggatccctgatggccacttcagtattccgcacgccttcctgctctgtgctagcagcgtggccacagccttcattgcctccctggtactgggtatgatcatgattggagtcatcattggctctcgcaagattgggatcaacccagacaacgtggccacacccattgctgccagcctgggcgacctcatcaccttggcgctgctctcaggcatcagctggggactctacctggaactgaatcactggcgatacatctacccactggtgtgtgctttctttgtggccctgctgcctgtctgggtggtgctggcccgacgaagtccagccacaagggaggtgttgtactcgggctgggagcctgttatcattgccatggccatcagcagtgtgggaggcctcatcttggacaagactgtctcagaccccaactttgctgggatggctgtcttcacgcctgtgattaatggtgttgggggcaatctggtggcagtgcaggccagccgcatctccaccttcctgcacatgaatggaatgcccggagagaactctgagcaagctcctcgccgctgtcccagtccttgtaccaccttcttcagccctgatgtgaattctcgctcagcccgggtcctcttcctcctcgtggtcccaggacacctggtgttcctctacaccatcagctgtatgcagggcgggcacaccaccctcacactcatcttcatcatcttctatatgacagctgcactgctccaggtgctgattctcctgtacatcgcagactggatggtgcactggatgtggggccggggcctggacccggacaacttctccatcccatacttgactgctctgggggacctgcttggcactgggctcctagcactcagcttccatgttctctggctcataggggaccgagacacggatgtcggggactagcttggtcactcaacattttccccatccctctgcactttctatttgaaatttttcttttgttcccctgtccctcctccaccccacactcccacctctttctaggacttcactttgataccaaattctcattattttcaatgggaatttttatacattgagccaagtttgtatagcaagaatttgggaaacacagatggcctgagataagcagtacaagtaggtttttgagacaatcaccaagtgcagtttcatggtgggtgcctccaggtgatgtggactggagcaggggtgttttgtctggaatctggggacatggggtttggctttagcaacctgtcttggccctaatgagaaaccctttgtaagtgggctctggatttttggttttgttttctttttatctgttttgttttatttttggttttggttgaacagagggacagaagaataagtaacactcccaaacacagacatacttttgtagaagtggaccaacttcaaagctctggacaggagacacctgctccaggcccctgtgatcccagttctgttctcttgccctctggacctaagcgttcccactcgcagaaagagtaaggtggactgacttttcaatttgtgcacatgcctcttgttcaatggcctggtcaacatcaacaacccctccctctgatcatttccagttgattgtcatatccaggaaaaaatggaacagtgcactcttctccctgttgacccatgtccacctattggttccccaaaatccacattctccctgggcccagatgactttgtctccctgggcccagattctttgtctctcttcaaccttcatctcaaattgtctctaagcactaccttccccagagcttgccaggttgggttttgagattagggtcaggtcatgggtatgtggagaatggtttggaggttgaggacaaccacaggtgtctcattgctgccatttctcctgaggacataatcacttggtcaccttggaccctgtcacttcctaaaattactcgttctgtcatgccatagaggtcagttttcctctttcttggcttctacccacaaacattcaccaatcatttattcgttcatttagcaaatatgcagcctccgcaagatgagctctcctgcagacaagcatggtctgaaacattctttgagcaatatttattgagtgcctactatgtgttaggtactgtgccaggcactgataagccagtggtaagggaaacacagctctaacctcacctcattctcctttccagacccctactctgtgcagtgctgaccacagctagagccaccgccccattgctcaaccagtatttatttccctaaacgacccttcctcacattcccttccctccacctctccttaccaagcacccaaaagaggatttagaactagcagggtggacatcatctggttgtttctacttttctctgcctagcacaaaattgggagaaaactggagcctccatccgcagtcacacgtgtacagatctggggatttggatgtaggctttttctaacttctctctcagaagcttctacagaaacccttccatctgtagcctcaagggcccacctccaagggaaggcttaggcaatgatcctgtttctaccaacactgcaccttatcccaggaacctgccctagacctccagagaccatattttctctccctccatttctacccagacctccaggcctccttctggaatcatagaaccgtagaattggaaggaattttagaggttttctagttggagttgtgtccaacagaattcattaacaccagcctgggcttgtttttcctcctccctctggacttttttcatcttttcctccacctcaaaaaatacttacacacagattcttcttgtacaggcatcaaaaccaactcctctgcccctaaggctgtgtccctgtggtctccagccacccctaccccagtcactcgccccttcctcatctctggaatttggccaggcagtcccagaagactctggagtgacctcctttgcctaaaaagcagacagataggcatgccccaggccctgagtgagcagaggaggactgtagggtgagagggaaagaaaatgaaggtgactttcatggaagtttcatttcttttccccgattgtaccaactgcatgtacttttggcctggctgcaaggagcaatattggtttactctcgtatccttaaaaagttacagaactgtgtcttaagagaattatttatagttactataactgaattgacaaatgtcaacttaactgataaattatatttggtaaaataaagaggacgtttattt

SEQ ID NO: 1346 - DNA, 3559 bp, Homo sapiens
aaccctgcctggctccgcccccttcacgccccctcttttccgctccgcgcctgcgcactgccaccctccactctcgcgccagcccggcggcggccggctgtgggctgcagcacgcggtgcacgaggcagagcccacaagccaaagacggagtgggccgagcattccggccacgccttccgcggccaagtcattatggcagccactgagatctctgtcctttctgagcaattcaccaagatcaaagaactcgagttgatgccggaaaaaggcctgaaggaggaggaaaaagacggagtgtgcagagagaaagaccatcggagccctagtgagttggaggccgagcgtacctctggggccttccaggacagcgtcctggaggaagaagtggagctggtgctggccccctcggaggagagcgagaagtacatcctgaccctgcagacggtgcacttcacttctgaagctgtggagttgcaggatatgagcttgctgagcatacagcagcaagaaggggtgcaggtggtggtgcaacagcctggccctgggttgctgtggcttgaggaagggccccggcagagcctgcagcagtgtgtggccattagtatccagcaagagctgtactccccgcaagagatggaggtgttgcagttccacgctctagaggagaatgtgatggtggccagtgaagacagtaagttagcggtgagcctggctgaaactgctggactgatcaagctcgaggaagagcaggagaagaaccagttattggctgaaagaacaaaggagcagctcttttttgtggaaacaatgtcaggagatgaaagaagtgacgaaattgttctcacagtttcaaattcaaatgtggaagaacaagaggatcaacctacagctggtcaagcagatgctgaaaaggccaaatctacaaaaaatcaaagaaagacaaagggagcaaaaggaaccttccactgtgatgtctgcatgttcacctcttctagaatgtcaagttttaatcgtcatatgaaaactcacaccagtgagaagcctcacctgtgtcacctctgcctgaaaaccttccgtacggtcactctgctgcggaaccatgttaacacccacacaggaaccaggccctacaagtgtaacgactgcaacatggcatttgtcaccagtggagaactcgtccgacacaggcgctataaacatactcatgagaaaccctttaaatgttccatgtgcaagtatgccagtgtggaggcaagtaaattgaagcgccatgtccgatcccacactggggagcgcccctttcagtgttgccagtgcagctatgccagcagagacacctacaagctgaaacgccacatgagaacgcactcaggtgagaagccttacgaatgccacatctgccacacccgcttcacccagagcgggaccatgaaaatacatattctgcagaaacacggcgaaaatgtccccaaataccagtgtccccattgtgccaccatcattgcacggaaaagcgacctacgtgtgcatatgcgcaacttgcatgcttacagcgctgcagagctgaaatgccgctactgttctgctgtcttccatgaacgctatgccctcattcagcaccagaaaactcataagaatgagaagaggttcaagtgcaaacactgcagttatgcctgcaagcaggaacgtcatatgaccgctcacattcgtacccacactggagagaaaccattcacctgcctttcttgcaataaatgtttccgacagaagcaacttctaaacgctcacttcaggaaataccacgatgcaaatttcatcccgactgtttacaaatgctccaagtgtggcaaaggcttttcccgctggattaacctgcacagacattcggagaagtgtggatcaggggaagcaaagtcggctgcttcaggaaagggaagaagaacaagaaagaggaagcagaccatcctgaaggaagccacaaagggtcagaaggaagctgcgaagggatggaaggaagccgcgaatggagacgaagctgctgctgaggaggcttccaccacgaagggagaacagttcccaggagagatgtttcctgtcgcctgcagagaaaccacagccagagtcaaagaggaagtggatgaaggcgtgacctgtgaaatgctcctcaacacgatggataagtgagagggattcgggttgcgtgttcactgcccccaattcctaaagcaagttagaagtttttagcatttaaggtgtgaaatgctcctcaacacgatggataagtgagagagagtcaggttgcatgttcactgcccctaattcctaaagcaagttagaaatttttagcattttctttgaaacaattaagttcatgacaatggatgacacaagtttgaggtagtgtctagaattgttctcctgtttgtagctggatatttcaaagaaacattgcaggtattttataaaagttttaaaccttgaatgagagggtaacacctcaaacctatgaattcattcacttgatattggcaaggtggcccacaatgagtgagtagtgatttttggatatttcaaaatagtctagaccagctagtgcttccacagtcaaagctggacatttttatgttgcattatatacacccatgatatttctaataatatatggttttaaacattaaagacaaatgtttttatacaaatgaattttctacaaaatttaaagctaccataatgcttttaattagttctaaattcaaccaaaaaatgttttactcttataaaaaggaaaactgagtaggaaatgaaatactagattagactagaaaataaggaataaatcgattttactttggtataggagcaaggttcacctttagatttttgtattctcttttaattatgctccttggcaggtatgaaattgccctggttacattccattattgcttattagtatttcactccataacccttttttctgctaaaactactctttttatatttgtaaaataattggcagagtgagaagaaacataaaatcagataaggcaaatgtgtacctgtaaggaatttgtactttttcataatgcccagtgattagtgagtatttcccttttgccagttgacaagatttttccaccctcgagcagcgtgagagatgcctctttaacacttgaaattcatttctatctggatacagaggcagatttttcttcattgcttagttgagcagtttgttttgctgccaacctgtctccacccctgtatttcaagatcattgataagccctaaattcaaattcttaagatatggaccttttattgaaaatatcacaagttcagaatccctatacaatgtgaatatgtggaaataatttcccagcaggaagagcattatattctctttgtaccagcaaattaatttaactcaactcacatgagatttaaattctgtgggctgtagtatgccatcattgtgactgaatttgtgcaatggtttcttaatttttttactgttatttaaagatgttttacataattcaataaaatgaaatgactt

SEQ ID NO: 1347 - DNA, 4403 bp, Homo sapiens
aattgaagcgctaagattgccagagcagcctgtagacgtaccatcggagattgcagattcatccatgacaagaccgcaggagttgccggagctgcctaagaccacagcgttggagctgcaggagtcgtcggtggcctcagcgatggagttgccggggccacctgcgacctccatgccggagttgcaggggccccctgtgactccagtgctggagttacctgggccctctgctaccccggtgccagagttgccagggcccctttctaccccagtgcctgagttgccagggccccctgcgacagcagtgcctgagttgccagggccctctgtgacaccagtgccacagttgtcgcaggaattgccagggcttccagcaccatccatggggttggagccaccacaggaggtaccagagccacctgtgatggcacaggagttgccagggctgcctttggtgacagcagcagtagagttgccagagcagcctgcggtaacagtagcaatggagttgaccgaacaacctgtgacgacgacagagttggagcagcctgtggggatgacaacggtggaacatcctgggcatcctgaggtgacaacggcaacagggttgctggggcagcctgaggcaacgatggtgctggagttgccaggacagccagtggcaacgacagcgctggagttgccggggcagccttcggtgactggggtgccagagttgccggggctgccttcggcaactagggcactggagttgtcggggcagcctgtggcaactggggcactggagttgcctgggccgctcatggcagctggggcactggagttctcggggcagtctggggcagctggagcactggagcttttggggcagcctctggcaacaggggtgctggagttgccagggcagcctggggcgccagagttgcctgggcagcctgtggcaactgtggcgctggagatctctgttcagtctgtggtgacaacatcggagctgtcaacgatgaccgtgtcgcagtccctggaggtgccctcgacgacagcgctggaatcctataatacggtagcacaggagctgcctactacattagtgggggagacttctgtaacagtaggagtggatcccttgatggccccagaatcccatatattagcttctaacaccatggagacccatatattagcatccaacaccatggactcccaaatgctagcgtccaacaccatggactcccagatgctagcatccaacaccatggactcccagatgttagcgtctagcaccatggactcccagatgttagcaactagctccatggactcccagatgttagcaactagctccatggactcccagatgttagcaactagcactatggactcccagatgttagcaaccagttccatggactcccagatgttagcaaccagctccatggactcccagatgttagcaaccagctccatggactcccagatgttagcaaccagctccatggactcccagatgttagcaaccagcaccatggattctcagatgttagcaaccagcaccatggactcccagatgttagcaactagctcaatggattcccagatgttagcatctggcactatggactctcaaatgttagcttctggcaccatggatgctcagatgttagcgtctggtaccatggatgcccagatgttagcgtctagtacccaagattctgctatgttgggttcaaaatctcctgatccctataggttagctcaggatccttacaggttagctcaggatccctataggttgggccatgacccctatagattaggtcatgatgcttacaggttaggacaagacccttatagattaggccatgatccctacagactaactcctgatccctataggatgtcacctagaccctacaggatagcacccaggtcctatagaatagcacccaggccatataggttagcacctagacccctgatgttagcatctagacgttctatgatgatgtcctatgctgcagaacgttccatgatgtcatcttacgaacgctctatgatgtcttatgagcggtctatgatgtcccctatggctgaacgctctatgatgtcagcctacgagcgctctatgatgtcagcctacgagcgctctatgatgtcccctatggctgagcgctctatgatgtcagcttatgaacgctccatgatgtcagcttatgaacgctccatgatgtccccaatggctgatcgatctataatgtccatgggtgctgaccggtctatgatgtcgtcatactctgctgctgaccggtctatgatgtcatcgtactctgcagctgaccgatctatgatgtcatcttatactgctgatcgttcaatgatgtctatggctgctgattcttacaccgattcttacactgacacatatacagaggcatatatggtgccacctttgcctcctgaagagcccccaacaatgccaccgttgccacctgaggagccaccaatgacaccaccattgcctcctgaggaaccaccagagggtccagcattgcccactgagcagtcagcattaacagctgaaaatacttggcctacagaggtgccatcattaccatctgaagagtctgtatcgcagcctgagcctcctgtgagtcaaagtgagatttcggagccttcagcagtgcctactgattattcagtgtcagcatcagatccctcagttttagtatcagaggctgctgtgactgttccagaaccaccaccagagccagaatcttcaattacgttaacacctgtagagtctgcagtagtagcagaagaacatgaagttgttccagagagaccagtgacttgtatggtatctgaaactcccgccatgtcagctgaaccaactgtgttagcatcagagcctcctgttatgtcagagacagcagaaacatttgattccatgagagcctcaggacatgttgcctcagaagtatctacatccttgttggttccagcagtaactactccagtgctggcagagagcattctggagccgccagccatggctgccccagagtcttcagctatggctgtcctggagtcttcggctgtgaccgtcctggagtcttcgactgtgactgtcctggagtcttcgactgtaactgtcctggagccttcggttgtgactgtcccggagcctcctgttgtggctgagccagactatgttaccattcctgtgccagttgtttctgcgctggagccttctgtgcctgttctggaaccagcggtgtcagtccttcaaccttctatgattgtttcagaaccatctgtttctgtccaggaatcgactgtgacagtttcagagcctgctgtcacagtctcagagcagactcaagtaataccaactgaggtggctatagagtccacaccaatgatactggaatctagtatcatgtcatcacatgttatgaaaggaattaatctatcctctggtgatcaaaatcttgctccagagattggcatgcaggagattgcattgcattcaggtgaagaaccacatgctgaggaacacctgaaaggtgacttttacgaaagtgaacatggtataaatatagaccttaatataaataatcatttaattgctaaagagatggaacataatacagtgtgtgctgctggtactagtcctgttggggaaattggtgaagagaaaattttgcccaccagtgagactaaacagtgcacagtattggatacctaccctggtgttagtgaagctgatgcaggagaaactctatcttctactggtccttttgctctggaacctgatgcaacaggaactagtaagggtattgaatttaccacagcatctactctcagtttagttaataaatatgatgttgatttatctttaactactcaagatactgaacatgacatggtaatttccaccagtcctagtggtggtagtgaagctgacattgaagggcctttgcctgctaaagatattcatcttgatttaccatctaataataaccttgttagtaaggatacagaagaaccattacctgtaaaagagagtgaccagacattagcagctctgctcagccctaaagaaagtagtggaggagaaaaagaagtacctccccctcctaaagagacactgcctgattcaggattttctgccaatattgaggatattaatgaagcagatttagtgagaccgttacttcctaaggacatggaacgtcttacaagccttagagctggcattgaaggacctttacttgcaagtgatgttggacgtgacagatctgctgccagcccggttgtaagtagtatgccagaaagagcttcagagtcttcttcagaggaaaaagatgattatgaaatttttgtaaaagttaaggacactcacg

SEQ ID NO: 1348 - DNA, 4103 bp, Homo sapiens
gcagtcatcctaacatccccagcttatcatcctcaggttattgggcaactggcttccccaacccaaattatacctgagactatggaataaaggtcttctgggcttccacattagtgaaataattgggacccccccccctcccaagaattcgggtccattgaaacctattcaaattacatatttttatgtgtgatgagatgaaccaggacaaccaaagctgaactctcttaaaatgtgacttatcttttccctaagccttatagatttcttggcataggcagtcggagaatacctactttttttttttttttttttttttggagatggagttttgctctgttgcctgggctggagtgcagtgtgcgatctcggctcacggcaacttccgtctcctgggttcaagcgattctcctgcctgtctcccaagtagctgggattacaggtgcacgccaccacacctggctaattttgtatttttagtagagacagggtttcatcatgttggtcaggctggtcttgaacttctgacctcaggtgatccgcccacctcagcctcccaaagtgctgggattataggcatgagccaccgcgcctggccaatacctacccttttacgagctactcagtctaaagcaacaggcagcaaatattttcttaaagggccagagaataaaagtgttggctcacaggccatggggtgtctgtggcgaccacccaactccgctttggaagtagcaccacagctaccatagacaataggaaaatgatggctgtggttgcgttctattacaactttaggtactgacaggcgatgcactggaattggcccacagggtcttatttggtcaacccctgctctggtgtaaagagggatgtgttcccgtggtcatccctagggaatgagtggtgcaaacactggtccactgttattctgctggacagtgagatggtgatgggagacccctcatcatcagtggcagggccccatccattgtctggtaatgccaaagccagagatgtgagagagactttacagtggtagaggacttgttgacccagatgggccgatgccttgtttctgggaagccacacctctgtctatgcattaaagacttccaggagaacaccccagcacagtgcaacccagagctgccccctcatagccagcacacacagaagaggaagcgggcagtggctgtgtgttgtctctgatgcaagcttgctctgtgaaagcctgtttcctcactgatggaaggaagcgtagggatgaaatagatgatagagataaaagagcttggatcagtgcttctcagttgagtttgcatgacgtcgtggagctcagcatccacgtgaaactgttgcaaggaaatgatgtcagtgtgcaaacatcttcgggtcacaatcgtcccttaagcacggcaggcatcaaccttacctccatcagtgttagagaggcacgtttcatttcctcacttctgccgtgatgcatggttgatagctctttcttggtatgtggagaagtttgctttgaagatgattctggcaattttgtgatgacctcccatcccaatggttacactatttctgtgtccactccattctcttcctgataccaggcaagtgcttgggggtaggaaatgagtcctgccctgcctcagtctttgaccaagaaacggcaaaggtctgcagtcaattagagacttggaaggaagccatggctggggtatgaaatacacagtgagggccgcatatgtgcagacaccctgagtataggctgtgatacacaggctatggccattggtacatttttcatcttgtgcaagagtctacagtgtggcccagaagccagcaggttctaatgaagaagggaggtgaaggtaggaaaatggcataggaagacaaccacaaaatcccaatctgccgagtgtgtgggagtgcaggctgtacccagccagcacaagaaggcaattggcttgagggtgtgggagacctggggcatctccactgcaagatctttttgtctctgttgctgccttactttattcaaagacaaatgtgctctcatacctcttccttctcttttttgtgagctgattctcacatggattggcctcagagactatggataaagcacacctttgcattcacctcctttgcccaattggataatttacagattagctattgacctctatggtctggcctgctctcatttgtactgtgtgtccggggcctgacattagaccccaggagggaggaccatttggcctgccttgaagtccaagggcagaaccttgtgagttaatgcaaatcaccgccctgttctgcccctgctggctgcctcacaacctgctgcagagcttttctgtttgactctggagggacaaacacaggcgatgtcccctaggatctcttgcagaaatcagcacctggagtgggctctccccagccctcatcctgagccctgctgtgtgcactgtgtctgatggagaggcagcctctctggatggcagctctctccatattccaaaggcattcttctcctgttctccttccctctttttaaattaaatgggaatgccactgacgtgatgtcgtttgcactgcaggatgacagaactgttgtgtgaataccattgtatttgccaaatggtccactcgtcatttcagaacaaacaaatggatggtgtctgtaagtcggcaaacaccggtgacatttagccttgtttatgttcctttccttttgctgcatatttttggctccaaaagctactggctgaatcaacagggcctctgaatcaggagagaagtctggtagcattaattttagttgctatgtccatattctcttcagactgcatgaatcctactgctcaggaccaagtctaggtgagaggagagggcaatcaacctctttggtttcggatgttgtgtgcaaagcccagggttcaaataagcagtaattatctcctattacttagtgctgatcaacagcacctctacgtctaattgccaacttgccctaatcatgttgactattcttgctttagccagagacagaaggaccaaattttataaataacactttattgtcattattccattaaacgattaggggatgtggccctgcccttgctttcaaatgcctctagccctgatggtttctggattatttaataaatctgcacattttcttgcaggtaagtgacactccctgtcctagtcggtctatctggacttgcccttgtctgttcgtggtcctcggtggttatctgcagcttgttaatcgtgtaaagtcaagagaagaatgtatacacatatgtgtgttgaataattactattggcataggtatgtgtatacacacggtgcaccaatctacagtatatatagcagagaatcagaggctaaaaatattaccccatatgttccagtattagtcatggattgcaaaggcttagtaacttgagcaggagagaaaactccctcaaagtcataaatcctgagtgacaactgctgctggatgacagatcccttcacctgtggacaacctggctgggggtggggggctgttccaccagctcacctgagcatgtagaggtgggtcctgcagtggtctcgtgggtattactgcttgtgtctgattgtcctgtattttgtaacactttagaagaatacagaaaagtgcagtaattctctttctccatagtatttaagcagaaatattgctagtttaatattgtgtcaggtcgtcctattaaccaggagcagatgacagtaaaatttcagtgaatagcaccttgacatctacaacttaaaaatggtgattgaagcaaaatatgtaaacttgtacggggtgatcgtgtgctttggaacagagtattgttgaagtaattagaagatatattaaggtgttcctggtaatgaaggcatgtaagttataataattgtagctttctgaataagtgtcaaactatatctttaagtgtgctgtatgctgagttacaagttaggtcatttatgaatggaatgtaaaataatactaaaaatgcttcaataacttatcttggtattgctaataaaaaaaaaaaagctgtgaaacatt

SEQ ID NO: 1349 - DNA, 4417 bp, Homo sapiens
gctggcaggggtgctgcagtggggctgtgcccctgccttcctgcacttcctgccagggagccactccattcttttttgccatctcccaggctggccaggggacagggtcgtgttcacacagtgctaagggaacacgctgacatgtgtgacatcaagaactccagtgcccacacagcccgagtccggatggtgagctccagggagacccagcaggcagggggagcactgactgagcccatgggggaaagaggctcctgccgagcccagagcccagagagctggccaaggggtagggttaggagggatggagctgggggcaacaggctagagaagagacagctgggggtgggaggatctctccagggtcgtctcacagcacccagcggactcgctctgtgctgctgcagagtgactctgacagtcagagccaggcagccggggacaggcacagagccagactcccttcctcctccccctccctctcgccgtgcagtgcctactcagtgctgggaggctctgaatggcacggggatggagagtgtaacaacagagcgttagggccctgccccagtccggcaggaagctcggtctggtggggagaccagcccaggcagacacagcagtgcatgcactgggcacaccctggctctggctggagggctcagaggcctcagggccttccagcactggtctccgtgtctgaaccccccatgggacaggatgggagctgccagcagaaccaacaactcagttcctggtaactccaagtggagatgggcaggaacgctcccaggaggcgcatcagcagtcagaaccaggggcttgggcctcaggaaggcaggctgctggccaggccccctggactcaggagcccaaggccaggacgttcaccagggccaaagagagcaacaccaacagggctgggctccaaggccgggccgcctcccctctagcttcccaacaccagtcctccctgaacatttccttccaggaagacaggggctattaactacgtcccatccgattcacagggacgtttgaaatcaggaaggagtgtgggttggatccacgtttctgttcataccaggcaggcacatcggaaggctcacggtcagaggatgctgggacaaacgccacgagaggttcctttttgtctggctcacccagaagagaggctcctctcctcccttccctgcagcacaacggcctggctggcacccaaagggcagccggcgtgggctgacctcagaggagcaaggcgtgtttgcagctctgccgctcacatccacagtggccatgacaacaggtgcagcaccatccattaaagctctgtgtcatttcacttaattctcacaacgacccccggagaaagggactactatccccattttccagatgaaaaaggaaattggtccttagagtgatcatccacccaaggctagtgacagggctcagattggaacccaaggccctccaagatctcaagtcacagacaaagaaagcccatctctgacttggcaggggaagggggaggtcacactgggagagctggatgttgattctgaaggcctcccccagtaaaccgctccaacaacaaaaaggggctttctgtacattatctgcgaaaagccaagtgagggggagggaggggaaagcaatcaaagcaaagatcaattgtgttgcagacaatgtggcaagaagacagatcttgctggaaattccttctgactggactctgccaggatcagagtatttttcattccaagattaagcaaaattctttccctgtcataacctcctacccatctgtgtccaaactcccactatcatttttacaccgtgcacattttaaaacctgttttgcagctttttctctgtgtgtgttagttgacgctaacctgcctccagctttaagaaaagcagagaagcacgagaggccccaggaggcacctgggctgggtgagcctcaggctgggaccctggcgggacagtggctggggtctagggcagctgggaccctgcttgctggcaggggcagctgcagccgtgaagctcagagaccccacggcctggcctggacagaaatggaaaacagatgggagaagagaatgggaatttcttaataagggattggatttgggaagtgaagggcgagcagaaactaggattgtgaggtctcctggttggggtggctgtgtggtggtgccatgtcggtgggagagagaagccagtcactgggtggtggaaatggtggtgaagaggtgtttggtggatgggaggaagcagggtagggtccaagcctgttcaatgagaggggtcaacagcatacacaagggaaggagcccagtctggagtaatggatttgtgggagagaagtctcccgttggaggggggagactgaagccatgggaatgggtgagttccacccagagacagacccaggaagagagcccaggaagagaaggaagccaagggcagggttccaggggctgctgactttcagggcaagccagcaaagaagattgggaaccaaacagttaggaacataagaggggccggagatgtagcatcatggaaaccatggcaacaagagcaggcagcagcactgaacgtcaccagcggagactgccgtgagatggaaccaaagtccttgacttggcaacagggacttctcagaacagtttcagtggcctgtatgggtgttaggaggggaggaaggagccaagtgacccgggaaagtattttttatgcattttcctactgacttcttagccttgggaaacaggagctgttgccacttgtgttttaccaaggaggaggtggaggctggtggggatcaagtaacttgcagcaggtcacgtgctgggaagggagggctgggcctccaaccccatctgcccatcgtcaaggtgcacggccttcttaggaggaagggaggcatcgctgcgtaggaggaggccttggcagatgttagttggagagagaaggccaagaacatccaccgtggggtgggagatgagatgctccaccgagcaggctgagggcccagccatggctggaaacccagccccttggcaaggttgacactgccattgtcccaccatccttggcagggatgactgagtggctacagcctcccagagggcccaagtcttccggacactgcatctctctctcgctgtacagctcagctgggtgacggcggctgctcatgatgagtcagggcatcacggggactctgcacaagatgctaaccgagctctgcctcttgggcctgcgaagctgactacgaaccatgtctttagcacaaatgtggccagttcagtacaaacttgtcccagatggaaagacgggctcaaaacgcaacctttctgacaacagatggccttccagtgggctggggctgtgcgcatgtgtctctgcctgacaatggtccctgtgaagccagacttcctttggggggccaatgcctttcattctctgggggagcggaggagcctggaggagccagggtgggcttctgcagcacccttagcatgggggaggcacacgcaacacccaggtgcccagaggccctcacagcccagaaggagcgagtgagtgaggctcctgcatgtggaacgaagctcagcaccgcactggacacaaccaaatggccagtgagggcctcggatttcaatcagaccgtcagaggcgcccagtgctgggaggccaaatgtggaagagagtggctagcagtgggtggtgagagctgagctttgggagaaagtgctggggagcgggcaccccagaatcactttggaaagcagggagcatcgtgctgggtggagcacgctgtagagatgtctccaacaggcctcggggctggcctggcctctgcagcctcattttttcctggtgtttgctgctctccaggcagcactcttccccccggggctctccctgtgagtgaggagtggcctctaagggcccttccctggcctgtctggctcccatcacttcaaacactggcccgcgagcccagtacttgcacatttggaaatgtaagtgcccagaataaacctgcagagacgctattcaaacagcaaggccgaaatcaacagattcaacttgaaacgtaaaacgccaaaagcaaatgtctaagcagctttatttgttctggaaatattgctgcagtggtttgaccggcaaaatcaagtgtcctgttaatagtgaacaggctcctggctaacacggtgaaaccttgtctctactaaaaatacaaaaacttagccgggagtggtggcatgtgcctgtagtccctgctactcaggaggctgaggcaggagaatagtttgaacctgggaggcggaggttgcagtgagccgagatcacgccactgcactctagcctgggtgacagagcgagactctgtctc

SEQ ID NO: 1350 - DNA, 4281 bp, Homo sapiens
aatccacctaagccgtgtccctagccctggccccgccctgatgttgccgtgtaactcagttcccgccgttttataggctaccgccccagccaggccccgccctctgatgtggccccgccccccgacgctgactttttctgtcttcactttagccctggctccgcccctagccttggcccgcctcagcgcggactctcagtctctgcgcctgccacggcctcgtcccgctcagccctggccctgcccctggagccgactctctccgcctccgccccggtcccgccctggcactgactgtctccgtcttcgcccctgccctggccccgccccctgcctgctctggccccgccccgccgctctctccgtctccgcctccgcccccggctcctccccggccccgccccggcactgacattctatctctctcccgtctccgcctctgccccccccccggccccgcccctgccctgccccggcgctggctccgtctgcgcctcagcctcgggcccgcctccagccctggccccgccccgccgctctccccttctccgcccctgccctggctccgcccccgcctgcccgcgcaccgcagaaggcctcctggaacttcctggacagcttctcgatgacgctgtagctctccacgtaatcgacgtgttcgtcctgcggctcgctggcgatctgccgcagcgtggccttgtccacgctgcccactccgatggcgaacaactcgacgccgctggcccgggcccgcgcagacacgtcctgcacgctgtcctggggcctcccgtctgtcaccacgatgaccacctgcgacacgcggggcggtgtgacaccgggctcccggaagcccacgggactgtccaggagaggaggctgaggcccggagaggcgggaggactgccgggtcgcacagccaggcggcacccgggggaagaggacccggctggccgaagaggagacccgtttcctctgactgagagacgtggctggggggctttccatctgcttcgcctccctcgggcaggcagctctgagatgcccggagggatgtgatgccccatcgccaaattggggtctctaaggtcagggccatgccttcccctcagactgaggcggctgagggcagggtcctcaggctgatggctgtgggagtcgtgccacgcccctcgtgcccccgggaggcccggccggggctgggtggggggatccggtggttccacatggtgcagttctgcgctttggccaccagatggcagccgaagctaagggatggggctgccgtctcccgtcttgctgtccttgtccctgtaagaccggggaccctggaccaggtaaccgacggagggccactcccatgtggatgcccaagggaccaacccaagaaagatgccgcccttatcctcctccactccccggtatgatacatgcccctgccagagagggaaagaatctgcctgctcccctcccactaggctcctctggtctgtaccctggaaagaaagaggtggcggactctgtcactgagatccggcttcgtgaccccctgtctgcacccgccctgaggctagggcgctcccagctctgcccagtctgggttaggcatccagtcccgctttgctgcttctctgcttctgacttgggtctgtttctgagtcctgggtcccatccttagccccaggtcctgacaccctgtcctgatgacaggcagttgagacaggccgtgtttagaaatgcagctccacaagctacaggtcaccttcctgagcctcagtgtcttcaactgtaaaaagggttgtggtgaggttgagtgagatgactcctggttagaagccagaaggggcaactattatttttaccatcattaccctgggctacctggggagtgactttgtacaatctcttcctctccaggggcctgggctcctggctctgaaaatctagctgtgactattcgctgccatcccgaggcccactgcctcctcgagtccctactcccctccctgcaacccagctttcagattgtctaccttgctgggtcctcccacaggtgaactccaggctgaacacctggagtctggtgccagctcccccagcgccgctgtgtcacctgctggaggagctctctcctcacttgcccaccccacgccaccacccccatctccttcaccctctccaccacctcaaccatcagcttcatctacagcaccccgtgctgaaacttgtagttggccccaagaccgacaggctgcctgatacgtcatttctctaaggggtggtaatggctgggattatatgctgttgtctctgtgaatgcttttcccacttattggctgagcaagttgcttaagcttcttatgcctcagtttcaccatctgtaaaatggggataccacctccgagcagaatcatgttcatttatccactgtgtgctagagagtggggtatggaggagggataagaaagaacctcccctgagctggggccctgagcagggaagtggcgactcgggctaacgaaggctgcagtggggaagtgctggagcctgtgggggtgccacaggaacagaggacacctggcttagcctcaggttctgtgctgagccctgaacatgacagtgaggatacaagtcctgggaaacgctcagccctctgcctggagccctcactgacagcacaggtggcagcacagcccttccatttctgagcccctgccctcggagaattatgaaattaaaaattatcaaatgccatgatgggaagccttatgcttttgaactcagtcctcagcagcacttggagaaggtgttatcattactcccattttacaggtgaggaaaccgagcaccagtgacatgacgtcacttgctcggggtggcacagctagtatggtggagcagggcgtgaacccaggcaggctggtggcggaggccacaccttcactcctcccataagcatctggcctgtctgcaatgtcttcaaggggctcagactggtcgggaaccaaggtcaactaaactgaaatgattctatgaaatggccacctcacggggcatcatgggaatcaaagtgtctgcaggcaaagctcataactccgagcgggagcctccaaacagcagcatcctagcagggtggcgtgcacgtaccttgctgatgtcaggggacctggaacgaccaccctctgcatcgccgaaggctttggtgatagcgaactggatggccaggccggtcatggtgcctgtggacagcggctggatacggcgcacagcctgcagcagtgcggccttggagacatgagcccgcagcgagaactcctgcttcacggtgctggcatagttgaccatgcccacccgggtggcattgggccccacgtccagcgactcgatgacctgggacaggaataccttcactttctcaaattcaacaggccgaacgctgcgagagctgtcgacaacaaacaccagggtcacacaagggccatccacggtgaccagcggtgagaaacgcaatgctgtcctcgtgccatgctggaggtgaacgaggagaacgtgagctggggtctcctcaccaactgctccccccaccccaacccccctgacggccagggctgtgtccggggctcagggcacaaggctccgttagctgggcagcagctggcccatgaaacagccctttcagctccacctctgaatggcagttctatgggctcctcggaagaacacaggcgccttctctgtgtcacttctccgctcattagcggagctgcagaaatacactacaggactcaaaattgagaacagtgtgtccggtatgagccagaaggaaaaaaaaatgcacgaaggggccttctgcaaggttgctcacaagtcaaacaggcagctgtgaagggctctgctgttccctcctcctgttttcacatccctcgggcttccagaaacttaaagccgttagtgtttcatgcaagagagagcatctgtgatccacggagaggcccctgggcagtgtggttcagtgggaagcacacaggactccctccccagtgctcccaggatcagctctttccctaaagagcaaacctggttatctcgcaatgacctagctaacacaaatgcaacatcagccggggcagcctgcccccttcactctttgcccaccatcagctgtttggcagtatccatatacgcctttaccagtatttatttaatctttttgtttaattcactctaaaccaactcacttcttaaaaatttctctgccttataagaaataatagccatgaaatc

SEQ ID NO: 1351 - DNA, 4215 bp, Homo sapiens
acttggcgggccctggctggggatgtgcgagactgggccagtgccattcgcgtcgcagctctggactgcatggaagagaagaaccaggccgtgtgccatgactacgacatccacttctaccccaccttccggtattttaaagcatttacaaaggagtttacaactggagaaaattttaaaggacctgaccgagagctgcgaacagtcagacagacgatgattgacttcctgcagaaccacacggaaggaagccggccccctgcctgcccgcgcctagaccccattcagcccagtgatgttctttcccttcttgacaagcgtggcagccattacgtggctattgtctttgaaagcaacagctcctaccttggacgggaggtgatcttagacctgatcccgtatgaaagcatcgtggtgacccgagcactggacggggacaaagcatttctggagaaacttggtgtttcttcagtcccttcgtgttacctgatctacccaaatgggtcgcatggattgattaacgtcgtgaagcctctgcgggccttcttttcgtcttatttgaagtcattgccggatgtgaggaaaaaatcgcttcccttgcctgaaaagccacacaaagaagaaaattcagaaatcgtggtttggagagaatttgacaagtcgaagctgtacacggtggacctggagtcagggctacactacctcctgcgggtggagctggcagcccacaagtccctggccggagcagagctgaagacgctcaaggactttgtgactgtcttggccaagctgttccctggacggccgccagtcaagaagctgttggagatgctgcaggagtggctggccagccttcccctggacaggatcccctacaacgccgtgcttgacctggtcaacaacaagatgcggatttctggaatattccttactaatcacataaagtgggttggatgtcaaggaagccgatctgagttgaggggttacccgtgttctctctggaaactgttccacactttgactgttgaagcctcgacccacccagatgcactggttggcacaggctttgaagacgacccccaggctgtgctgcagacaatgaggaggtacgttcacaccttctttgggtgtaaggaatgtggtgagcactttgaggaaatggctaaagaatccatggactcggtgaaaaccccagaccaagccatcctctggctgtggaagaagcataatatggtgaacggccgcctggcaggccatctgagtgaggatccccggtttccaaagcttcagtggcccactccggacctctgcccagcctgccatgaggaaattaagggcctggccagctgggatgaaggccacgtgctcacattcttgaagcagcactatggccgcgacaacctcttagacacgtattccgcagaccagggggattccagtgaaggaggaaccctggccaggggtgaggaagaggagaaaagactcactcccccagaggtgtcccatggagaccgagacacccagagcgtccgtccacctggtgcactgggccccaggcctgcccttccagagagcttgcatcacagcttggacgggaaactccagagtctggatgggcccggggcccacaaggaggtgggcggggccgcacccttcctcggggttgacttctccagcctggacatgagtctctgtgtcgtgctgtacgtggcttcatccctgttcctcatggtgatgtacttcttcttccgggtgaggtccaggcggtggaaggtcaagcaccaccacccggccgtgtgagtgcccgggtgctgccagccacggcggaagctcccttggaggcagccctgccccgtgccacctgcagctttaatatttatgatcagggattttataaacatgcgggcctggtttcacatcggatggcaccttttggcttcaaagtcctggttttacaaacgctcttctaacaagggaagaacacggggtaattttgtggggatatttgcattcctggcgtactcaagtctgttcatgctccttttgcaggtcttacagcaaaaagacttctgtatttttactcttctagatgtgaaaagagggagcagagtccaggccagatagtcttccccacacactttcatctcgtttcctccactccgccccatcctgcagggccttgtttttgtatttggagaacctcgcccatcccccccgcggctcctggctcccccccccccaccttggccctccctgcaccctccactcccctcgctccccctccccccgctccccccacgccccctgctccaggctgccaagtgttttcctttagccgggcggggacagacagagccggaagcgcagtcggcctctgcagcccctccaagcaagtgctccagggactatcctgtgtttgtagctgcttccctagggcaggttcctgagggctctccttgttcctccgggtgttcgacaccagacgtggggatttcaacaggggaggagccaaggaattctgtggctgtgctgcgtttcagaaaataacccccagaggccttgggctgtggacctgggggttggaaggatgggggctcatttaaccctcagaggcagcgcctttgtctgtctatctggtgacaagagagagacaagtaaatgggggccgttgggacggcgggtgcctggagggcagctctgggctcagcgggcagtgcttagagcacaggcccctctgttgggggatggggaggagagcagtctgcccttgggagcgtaggccccagggagacttctaaagccccccctgtcgtctgctcttcacccagcaccacagaggcacctgctgcacacacaagcatctcactcggcccacggagggggccaggcttcctttgcctgaagctgttttgggaagggtctccacacaggcactgatctcccaagctttggtcatgatgtcttttaccatttgataattttaaacattgtttttaaacccaaaacatttagtggtccgttgcctctgaagatgtaaacaaacaaatacactatttctgggaacatttatattgagattctttgtggctattggtgtgtctcacaggcaaaatttgatttggctaaaataggctcagatgtatttgtgtgcccgtgtgtgtgtgtgtgtgtgtgtgtgtgtgtgtgtgtatgagagagagagagactttgacggttgtagatattttttccgctttgcctactttatgttgtataatcatgtgtttactaacaagttgatgacatggatgtattcataagaccatgtaatattgatgtgattgttgtcgcttgagaaaaaaaggcaacagctgattctttcaacaactgtcacagaatggctgggctgagaacgctgcccagggccctgcagctggcgggagaggtgtctggtgggagcggtgtctggtgcgtcagcctgctgcttcgtgtctcactcgagagttgcttctggtttcacactttttaacccctctgtgctttagcagccgtgaccttgccttcattgcttcatccagtgcaggcctgggttattgaagacaccaaagtgtttctcttccagtttgaaaaccaggcaggtttatacgtgggtttcagtgtatttgcctttgaacccttcaaactaaactttagccttttggctggtgttgaatgtctttagctggggtgacctggagtgacctgggacggtgttgtggtttaccgtctccagcttcagcctttccagaaacccttgtggagggcagtgttggctgcaggtttcatcatattgcagtttgaggtcaccactatttggggaacaagcttgcgtcctgctgaggggcaggattttcagcagagcgtcggtggggctgggccgtcgtggaggtggccccaggagtcatatggccatactcagacacaccttgtgtggcctgctcagagctggatgccacctttaggcaatgtttagagtctattttctaaagttttaagtattttaagaggtattgagactaatgaatataatagttcagtaatttaaatgcttatttattttcagtggaaggatttttattaaaaagaagctaattgacatggaaatgtcagtgaaatttcttacctgcaaggaaagtgaacattttgtatttaagtaaactataatgtgcacattttaataaagaaatctgacatttg

SEQ ID NO: 1352 - DNA, 4513 bp, Homo sapiens
agcagtcgcctcctccttggcaaatagtcctcggcagggtccgagttcttggataattcgagagaaaaggcacgataagttgcagtacgaggacacggaaacgaccaggagaggaggacagggagcgaagtttcctcaatagtgtgtgaagttagttaaaaactccctccttcctcaggatccctccgcctgcggtagcggtggtgaggccgagggagccgccattttggatgttcggttcctgctgccactgctgccgccgcccccggagctgctggtttcattcgaggtttcgggccgtttcaggggtccagtcccaggctgtgggtgttgagaagagaagacagagaagctgggccaggagaggccgggagccccaggggctgctccgacttctggagggccgaccccgaggcctcggaccgggaggttccgcgcgccgcggcgttccgtgttgtggcgttgccccgccgctcctggccctgcggacgtcagcgtctaataattctcccggtcttcctgattgcctgaaagagtcgggacggttcggttgattgtgtttcccggttaggactcggtgtaggagatccatcgaaccactcgctcagggtaatgtttatgaagcagattatgtttatgaagcagattaaatggcttttgggaggcaagagctgtcaaatgttttctcatatgtggattccctccctgtgctgaatacttagctttttggtgcttactgacacttgtgtggtatttttttttctcccctattatatatccctgagcacggaaatctgtccatggagaaaaatattaatctgaggaactgtcaaacactgaacacctatgtaatgctcactcatttaaggatgccagcccccatcagattgcgggagctgatccggaccatccggacagcccgaacccaagctgaagaacgagaaatgatccagaaagaatgtgctgcaatccggtcatcttttagagaagaagacaatacataccgatgtcggaatgtggcaaaattactgtatatgcacatgctgggctaccctgctcactttggacagttggagtgcctcaagcttattgcctctcaaaaatttacagacaaacgcattggctatttaggggcaatgctgctgttagatgaaagacaagatgtccatcttctcatgaccaactgtatcaagaatgatcttaatcatagcacgcaattcgtacaggggttagcactttgtaccctcggctgcatgggctcctcagagatgtgcagagatcttgcaggagaggtagagaagctcctgaaaacctccaactcttacttaagaaaaaaggcagcactgtgtgctgttcatgtcatcaggaaagttcctgaacttatggagatgtttttaccagcaacaaaaaatttattgaatgagaagaaccatggtgtcctccacacatctgtagtcctcctcacagaaatgtgtgagcgaagcccagacatgcttgcgcatttcagaaagcttgtgccccaattagttcgtattttaaagaacctcatcatgtccggatattcaccagaacatgatgtttctggtatcagtgacccctttttgcaggtacgaattttgcggttattaagaattttaggacgaaatgatgatgattcaagtgaagctatgaatgatatattagcacaggttgccactaatactgagactagtaaaaatgtaggaaatgctattctttatgaaacggttttgactatcatggatattaagtcagagagtggattgcgagtcctagccataaatatcctgggtcgtttcttattgaacaatgacaagaatattagatatgtggctctgacatctttgttgaagactgtacagacagatcataatgcagtacagaggcacagaagcacaattgtggactgtcttaaagatttggatgtctcaataaaacggcgtgcaatggaattgagttttgccctggtaaatgggaataatatccgaggcatgatgaaagaattactttattttctggattcgtgtgagccagaatttaaagcagactgtgcatctggaatctttcttgctgcagaaaagtatgcaccttccaaacgatggcatatagacacaattatgcgtgttttgacaacggcaggaagttatgttcgtgatgatgcagtccccaatttaatccagttaataactaatagtgtggagatgcatgcctatactgtccagcgcctgtacaaagcaattcttggtgattattctcaacaacctttggtacaagtggctgcatggtgtataggtgaatatggtgatcttcttgtatctggccagtgtgaagaggaagagcctattcaggtaacagaggatgaagtgttggatattttagaaagtgtcctaatctctaatatgtccacctctgtgacacgaggttatgccctcactgccattatgaagctttccactcgattcacttgtactgtaaaccgaattaagaaagtggtttccatctacggaagcagcattgatgtggaactccagcagagggcagtagaatataatgcacttttcaagaaatatgaccacatgaggtctgccctacttgagagaatgcctgtcatggaaaaagtgaccacaaatggccctactgagattgtgcagacaaatggagagacagaaccagctccactagagaccaaaccgccaccctctgggccacagcccaccagccaggccaatgatttattggatttgttgggaggaaatgacataacacctgttattccaactgcgcctacaagcaaaccatcttctgctggtggagaacttcttgatttgctgggagacatcaaccttacaggtgctccagctgctgctcctgcccctgcctcagtcccacagatatcccagccccccttcttgttggatgggctttcatcacagcctctcttcaatgatattgctgcaggcatcccctccatcacagcatacagtaagaatggcttgaagatagaattcacctttgaacggtcaaataccaaccccagtgtaacagtgataacgatacaggcctccaacagcacagagctagatatgacggactttgttttccaagctgcagtaccaaagacattccagctgcagctcttgtctcctagcagcagcattgtcccagcatttaacacggggaccatcacacaagtcattaaagttctgaaccctcagaagcaacagctgcgaatgcggatcaagcttacatataatcacaagggctcagcaatgcaagatctagcagaggtgaacaactttccccctcagtcctggcaatgagggtttggcaccattctcattctttatcccactcaatcaaaggaactctgggaaggaggttgtgattgctggcaagtcccccccaactgtaccacgggcatgaggagctgaagagaactgctgaggaggattttcctaaagttactgctgaccttgaagcattgttaaagactaatgtcctctcctccactgttgaggctggctgcttctggaggctactttgcactcttcctcttctcctttttccgcacttctccacccctcccacatttacagccagaatcaacattccctgggcccctgaggaaataagcagctggtctggaggagaggactgcaatccatggcgaaaaaacactcactttgtctctgcagcaaagagttgccccttctttctactgttgtttctctgtggactgggcaaggtggggtatttattcctcactagctgggttaccatcttcaggcacttttaacatctggcattcggaatggaaatgtaataatggacattagggagccctgcctttttctactggttcccccaatgtttgaaagaggcattaggctcctggtagccttttctgtgcattgctgtatacacacagacacacacatgtatgtttgttaccaagaactggtcagaccttgcgagtttatttgtaaacactggacagatggagttaaaaagagcttttgttgagatttggcatgaaggatatggtgctctatttgtaatagaaacttccaaggctcttccagctcccctttctcgccattctttagctgtagtcatgaatagtctccatgattttcaaaattgattccctttaaagtgcaaaatggtcaccttctaaaagatatattcatagttattaatgaccctattcccaccacaaattttaaagtgctcctaagcccataacttgcctgtttgaactatggtaatgggtggaagaggagttcaccagtttcaaagatcagactctgtatcaaaagtacctttgcccttaggaagagtgagtattggagtcatcttatctattactccaaacctccctttttatttcttgagcctggcttggaccttggcattccgtttgaattccttctaactggaacatttgtgttgtatctgtaacactggcactgaaataaagaccacacggttaaag

SEQ ID NO: 1353 - DNA, 3214 bp, Homo sapiens
agatccagagtggccaccgccggatgggagtcgggggaagggaggcagagaagcgggccctgaggacaagctctcagtgcttctgtgggaagtggcggcaagacggcagctcccagcgggggatggaggccgagtcagtctgctggtcactggaggccaggatgctgcctaacacagccgtcccgctccgggcctcaccaccagggcggctctccccactcccggcctgctgcccacacagactgcggggttccgggggagcaggacccaggccgttctgcgcctgtcttcttggaaggagcaggccggagcgcgggagcgccgtgtagctgtacctgcgaaggcacaggattccacgggaagatcccgcagtttcgggccgtcgtcattgtttttatacctgtggcaaatggcatgaccagacacacggttatgtctggagaaacccctgtagaggagcaggaggttgtggacatgctgtggcccggacagtggctgccgagcagttggagcctgcacccgcccaacttggctaaagaagtccccatactctctgtggaaaagatttccagaagctgttgtgtcaatatcaaagcctcaaaacaacaacaacaacaacaaaaacatgaaattatcaacaataaagatcatccttgagtctgctttgaaaagtagggtgaaattctgcagaggcattcaactggcaagataccaccctcatagccagatctgcaggtctcagccatcatgccagggaaaatgctccattcaccactcctcagcttctgcttctggtttcagaggtctctgtattggaggggctttaaagcaagaagggtctttacccacttactcttattcacagatgtgaatatgtaggtccagtggggaaagtgacatgtcctaagtcagaatagagtcaacaagaaaacagggcccaaaatgacttagcctctagtgtataatgggcattgatgagctactggaaatacagagatgaagaaaacacagtcccatcttcaaggagctcaatctagcaagggagactctttgtaggtgggaccgggcttccctgcagcagaaggaagcttgaaattggtaacgagcctcagaagggacagaggcaggccaccatgctaccctgagaggatcgcatgtggacacggggctatgacctggccctgctttgacccactagctgtgctgtagggccaggtggagcctggagtggcctgtgctaaggggctactatgagctctttccactcccccaaggcattgcataaataatgtcactttctgtttgcacagcaaaatcagggacacaattttctagaacatggggtgcctcccctccccccagcccaacagaagttctacaatgactgatgggcccttgtttttgtttgagacggaacaccccacagggttccgagtggtgatttgtggcccacaggccactggcaagtggaggcagagctgcagagccctcgggagccacagagggcctgctggccgccacgacatgccaactcagctgctgctggccctcctgtgggcggcagtgctagtgatgtgcagaatcttaggactagtgccaaggaacctataaataccctgggtgacccaggcgtgcactgctgtggtggccttcacagtcagaagatgacaagctgagaaggggagaatcggcccaaggtgagatccacagaaaggccagggccaagatgcggccagcacctcaggctggtggtggtcttacgttgaccatgccagaggccagtccttgattgctccaaaccctctgttcgagggttccaaatgaaatgagcaggtcctcgtgtcaggacctaggttagtttctgaaaaagcatgaaaagcaggcctcctgaacttccccgagtgactgatgcaaagtgcgtcctgcatgcttcacagcaccatggagaggatcttcaggggcaaactgcagactatctgaatgacggcactgaccatcagcaaaccgcagagctgcctgaccaagaaattgcgagacagaagcaatgcttgcaggcgaagaagaaggggccagacacagtggctcacgcctgtaatcccagcactttgggaggccaaggcaggcggatcacttgaggtcaggagtttgagaccagcctgggcaacatagtgaaaccctgtctctactaaaaatacaaaaaattcgccaggcatggtggcaggcacctgtaatcccagctgcttgggagactgagacaggagaattgcttgaacccaggaggcgaaggttgtaacgaactgaaatcgtgccacagcactccatcctgggcgacagagtgagactgtctcaaaaaaaggaggagaagaaggaaaggccaaggcaggaatgaaacaggccatgaatgttggagtgaagcaactggcctcctcgtgctaagcggctactgtgagttctttccactcccccaagacattgcataaataatgtcactttctgacactcaccccgctgaatgtcctgcctctgctcaagggtggtatgatggggacttggcagtggaggggaacagggaaaccagacatggtggtctccccgcttcctggctacaagtccctctgaagaaatccaaaggagtaaagagcttggagagtaggcctctgtagggtgcaagggcacagctggagacggagctcctgaggctgcagctgatgctgcccgctctgcctgaactgcaccaaaaacgtgatgaggccatagcgggagtccacggaggaggatgcctactgcccgacctctagcagagactaagcaaggtgcatgaaaacttgaaccacatgtgtcacacccatgaccactacatgaagatggcccaaaacctggcccaggaattgaagaaagactcttccaatttgctgtaagaaaatggcccagggggcaagcacggtagctcacacctgtaatcctagcactttgggaagctgacgcaggcagatggcttgagctcaggagttccagaccagcctgggcaacatggtgaaaccccgtctctaccaaaaatacaaaaattagccgggtgtggtgatgcatgcctgtggtcccagctactcaggaggctgaggtggaaggattgcctgagtctgtggggcagaggttgcagtgagctgagatcacaccactgcactccagcctgggtgacacagtgagaccccatctt

SEQ ID NO: 1354 - DNA, 3369 bp, Homo sapiens
cttgccaggtgaagagcatgttcagggagggaacaaggcaggaaacgggggtttacagagagaaggaagagaacaaagagaaggctgcttagttggggagcagggcgttccccgcaggcctgaggaggagtgtgggcggtcaggcccccagccctgcctgaccctccctcctgcccccgaccaaggcttcctggggctgaaggaagtgagtgcagccacaggccaacacttccttggctgaccagacgacggaaaatgtgtctggctgcgttcaggtgtttttccaagtttgaaaccctggaaagtttttcctctcagaacaaaagcttcaggaggaacctgacgggacaagacctgcgggttcctaggccgaggagagggccaagcggagactcatgcaggcaccggaagctggacggctggtggacgggccctggaggcatttccaacatttggcaaactctttggagggctctgaatgtgagggctctccctccaggtggctcagtcaggagcctcccaacccacagaaggcagggagaagggcaggtcccttgtggctgacccccctgcatgcctgcccttggggagggacagtgggatgcggccccggcccagcccaagcttcttgctgcagttgcccagttcctgctggcagagctgtgcgggctgcgaggacagagctggggcaagcaggacccgggtgggtgggaggacaggcgcgaggccctccacctgcaaccagggaaagctgactggtccgtgaggctgggctcaggaggtacagcaggctccctggctgctgggacatgtctgtagtcactgccccagaggcctggcagtgctggctcaggaggacagctgtgctctctggggtcaaatcccatagacagactcaggagtcaggggagcctccagcaaagtctggccaggacagggtcaggactccgtgacgctgggcaagctacttcacgtctctgtgcctcagtgtcctcatctaccagcaaggggaggcagaagcagggctgggaccactccacaccaccccttctgtgactggggaagagccagctgcctggctggatcacagcccagaccccagagctccttggaggtgttggaagtgcctccatctgtgcagacagctgtgcaagtcttacctgacgctgagttcacgctgtggcagcaacacaggaagacacaagggaacggtggcgcgtcagtgaccagggcaggcggccaggccacccccacccaggaatggacatgctgcaggcccgcggggacacagccagccatggggggtggcaagcttctaatgcctgtaacctggggaccacctgggccagacctgcagttctgcgttggggcaatcagagccaggaccctgggctctgttctgcaggcctcaggccttcaacatcctggtagggagtgtgttcagagccactcaggctccaaggcccagccatagaatgcctcagggagcaggggacctctggtgggggtgtcgctcctggggtgaccccctgagaaagagaggagcctggcctggcgtgggactcagcagtgaaaccccacaatcctgggccagcaggtcatgcctgtcttcccaaaagctcaggctgggtgtgctgagcgggctgcaccctcggctgggtcctgagcacctgtacccccaccccagcttcctcagggaacccaggccctgcacagcacaacgggatggggtctgggctggacaatctgactggccaagcaggctcaggacactcagggctggcacctggcaggggacagtgaacgcagggggatgaggtgaccaggccactgggggtggtggcagcggagaagtgggtagaggggctgggggctaggccgtggggacgtgggaccccgctcacctcctccagctggctgtgcacgtgctgcacaatcaggtcgatggccaccgtgttgccgctccctggggcgggatgggggggcgggtgaccgggggctgggccgttggcctgcccgacacccacccaacaggcagcccagcaggctcacctctggggaccacgatgtctgccaggcgcatggtgggctggatgtactggtcgaaggagggcttgacaaacttgttgtactgcttgatgacaccctcgatgtcccggccgcgctcactgatgtcccggcgcagccgccgtaccaggcggatgtcggagtctgtgtccacaaagatcttcatgtccaggagctggtggagacagcgggccagtgagtggccagatgccagcagtgggcatggagacactgggaccagcccctgcactgaggccgcctggtccgtgggcctggccagagccacttccccagggcaccctggcaggtggggaggagtggggaggtgggggtgtctgcacctggtccttgggcctggcccgagccacttccccagggcaccctggcaggtgggaaggagtggggaggtgggggtgtctggggatgcggtgctgcccgtcaggggcttaggtgaagaggcatggcatggtggctggctaaggaatcaggcaggaatggggctgggcacatgtgatctccttactttgcttggggtaacttgcaccaacacactggggaatgggggacgtggcgagtttagggtctgtccccatgctcagcacacagtagttggcccgtgaagaggccttgtggaggctgggggctgctatgtgccggatgatggagtcctctgggcctgtacaaggggcaggacctgggccctgggatcaggccaacctgagtcacactcagctgtgtcctgaaggcccccttgagctacagcaaaatctctcaaacacaccagccctgggtcctcacctgtccgtcaggactacggcaagggacgagaacgccaaggacactccaggtatgcgcacaggcctcagccggtggagaggaaccactgcctcaggcagccacgctctgccttttggggccggcagatggacccagctgtggcatgcctggggttggggttggggtagggagtggctggcctaggcctatacagtgtggaggccttggggacagggcaggaggacgcacacctcatggacagggcggccagggctgagataccagcggggtgggtattcccggcgggtgcttacctccaacagtgtcttgtcagcaaaggccatgatgccctcaaagatgatgacgtttgcaccatacagtgttttctgtgaagaaacccaggagttgcggagcctggctcatgtgcctgcagccccccgaggccccctctgcagggccctggcctacccagtccttcttccggctgtgcgtggtgaagtcataaatgggcaccttgacactctt

SEQ ID NO: 1355 - DNA, 3861 bp, Homo sapiens
gaagtctcttttgccatataaggtgacatgtacaggttctggggatgaggacatgcgtatctttaggggctgtactcagccttccacactgggccagggtgtgcactcaccattgatgaaagctcagtttatcacccaccattcccggaaacaggtaaagccaggggagggctgggggagatcctccttcaccagagcttgcagggaccatacaaccatcttgagtgggaataggtctttcagtgctgttgctgctactcctgcaaaacacaaacacatgcacacacgcacgcacactcacatgcacactcacacaggcatgcacacactcacgggcacacacgtgcacactccacacactcaaatgcacacacgcatactcacactatcacacatgcacactcacgctcacacacatgcacacactcacgggcacactcacacacgtgcacactccacacatgcacacactcacgcacactcacactatcacacacgcacactcacgctcacacactcacatgcacactcatgcacactcacatccacaatcacacacatgcacactcacactcacactcacatgcacactcacacatccacactcacacgcacactcacactcacacacactcacatgcacactttcttatcactagtaagccatctcgctggttacatttcatgccagtttattttctccagtgaaaaccccagactctgtcactagagctggtctgatttgaaggccttcaccaacctcagtgccatgtagaagggagagcactgggaatcacaccaggcagtggattgcggccctggttctgccattcattgtttaaccttggctaagccacttcatttctccaggttcagcttttatgccccaatctgagtttgtctagagctggatttccatagaatgtggtgtatagcataacagctgctccttgtaaagaaagggtatcttgaccgaatacactgggaaactgtttcagcgtgcatatacctccatccctcttggagagtcataatgtacataaacttggcaaagtctctgagaagtcctgcataaatgcagttgggtaactctttaacctagtattttgtaaaccatttaaaaatcacagaacaccctcgcttgtttttttctttttaaatactgaagagcggactttgagaaatgctcatcatggtagtctctaaggaaatcaggattcctgctccattaccttgagggtgacttttgaaattgagatgttttgccaacaagctgccccctgagaaaggtggaaaatgtctcatgttgccttacctggcctcttggaggccttgttcatcttcatcattaatcttaaggggtgccaggcctgcaagctagaatccatgagccagccctgatagtgagatgcccaccttatagaggcccttcttcctgccatcctccctttaaaactcattttcattccccaaggatttcttcattgtcttctaggagcttaggcctggggatggggacaacagagagaccttgagaaacttaacatttctgttgagcaaatgaccatctccgcacaagccagagaaaggaaaaggaacagccaggcactgagccttggccaggagagggctgtgcttccttcattttaattgagccttgtgaacatcttctgaggtagatgttactcttcccttgagaaggcagaagcccaaggccgagagaagttaagtcacttgtccaaggccacatgcttaagttgtggcagaatcaggattcagcgttgctcagatgaggtgtaagaaggcgtggcacatacaggtagacagggccagacctgggggaagaaggaaggtgcacaccaggctggaggaatccgggactgtggggagagccgtggctgggaggcaacataacatccaagttcaagtcctgggtctgtgccattagcctttttggttttctcaagtgaggacactggaaacgatgctcttttagctgtgaagttaatgaatccacttctagttagggggtgagacttgagcaagtctgggaaagagattagaaggcagaggcaagcaggaacaaaaaccagaaagtgaagaaaagcttgtgtgcactcagaaaaatattcatccagcgctatctggcagacaccatgctgggacctgtgcgcatcacagggaacaaaacagagccaagccctgatcttcatgaaggttacacacttgaagggagacacacaaaactgaaaatattagaaggtgatgagtgtcaaggaaaaaaaaatgcaaaggaaaaggaaccaggagtggggttgtatcctagataggatggtcagggaaggcctccagtgaagatgatatttgagcagaaacttgaagatgaccgagaagtggatggggtagattctggagtatcctgagcagaggagcagcctgcgtgtaggtgctgaggtgcggagacgctgtggttgccatcttcagggagggacaaggaggctaccagcaagtggaaggtgagggaggaggagagtgaagagatgaggctagtaatgttgacctctttcattatgcaaaaacttggggagaaaagttcagtggtataggcattctatttgttggatacaaatattagaaattttaaaataaaaagttttgtgacttagtccaaaattctagaggacacgggcctcggtccttggttagactctgtgtccaagaaacaaatagcatcccaagaattgcctctccctctccctggggacctaggtaccatgtctctcttctgctctctcaaggatatccaaggctctgcgcatgactgaagcatgcacagacaatggttggtaacatttgtcacatttttacgttgctttacatgacttttgtcaacattgatgtggaaaccagactgtctagcatcacatgagttggttgtaaaagccatgggtttcttgttatttagaatggcttttcctagcactggactcctctgactttaccactaatggtgtgctcttgatccaatcacttaaatcactctgagtgttgctttatttgtctattaggtgggtgggtgtagactagatgattagtaaagttcctttattaaacagatctgaaaaccccctgttctaccctttctagcaaacaacattcctttcacccagtgtctctcttctcagaggtcaaactggtaattatccatcccttttgcctgtgtgtacgacatgcataattcataggtagccttgcaaaatggaaacgggtgtccattccctggtccccacatgactagtgctcatgcaccagaaaggttaccaaggacaaattctgtttttcttccacctccagcccctctcatttctaccagcccccaagacgtctatataataatcaattgcaagactatttatcacccatttatacaatgttagatcctgtagttccatagcctcatgtgacagctaaggacactgaggctcagagagatggctgactttcccaaagccacagagacatgccatggggccggaacgaaactgcagtttctgaacacgagctgagattccttccccaacttcttgttgcctctattttgccaagtactaaccgtgccctgcaaattataagatgtctaaaaatacgttttaaggatgatgatggagaattctgaaaagaagcttttttgttttgtttttaaatacgccctcatagatccaatgcagttgaaacggcgatcaaagccaatttccctagaaacaccagatcgaaaacacgtggtgaggctctgatctgtagtgcttcatcctaaacaatacattttacaaaccctgaaaaataaagaaaaaggaaagactc

SEQ ID NO: 1356 - DNA, 4172 bp, Homo sapiens
aagagatgatgggcctgaagctaaccggtgcagactaggggcgagtttggagcaagtaactgtcagtgaggttgcagttggtctgggctgtttggctgtgagcgaaatagctgccccccacttctcacttgcacaccacgggatactcctcctgaggctccggatgattcagatggactgtgaaaaacaacaagatggatgatcatatggagattgcttctaacataaatctgcataaaaatttttctgaaacatggctggaatatttaaggagttttttttcagtactgaggacctccctgaagtcattctaacattgtctttgatcagctccattggagcatttttgaaccggcacttggaagactttccaattcctgtccctgtgatattatttttacttggatgcagttttgaagtattaagctttacatcttcacaggtccaaagatacgcaaacgccatacaatggataagtccagacttattttttcgtatatttacaccagtagttttctttactactgcatttgacatggatacgtacatgcttcaaaagttattttggcagatacttttaatttcaattcccggctttttggttaattatatcttagttctttggcatctggcatctgtaaatcaattacttttgaagcctacccaatggttattattttcagctatccttgtgagttcagatcccatgctaaccgcagctgctgtaagagaccttgggctttctagaagcctcatcagtttaattaatggagaaagtctgatgacctctgttatatcattaattacatttactagtattatggattttgaccaaagactacaaagtaaaagaaaccataccttagctgaagagatcgtgggtggaatttgttcatatattatagcaagtttcttgtttggaattctaagttcaaaactgattcaattttggatgtcaactgtttttggtgatgatgtcaatcatataagtctcatcttttcaattctgtatctcatcttttatatttgtgagttagttggaatgtcaggaatatttactctggccattgtgggacttcttttaaattctacaagttttaaagcagcagttgaagaaacacttcttcttgaattctggacttttctatcacgtattgcttttctcatggtgtttactttctttggacttctaattcctgcacatacatatttgtatatagaatttgttgatatatactattcattaaatatctacttaacattgattgttttaagatttctgacccttcttttaatgagccctgttttgtctcgagttggtcatgagttcagttggcgctgggtattcataatggtctgtagtgaaatgaaagggatgcctaatataaacatggcccttctgcttgcctactctgatctttattttggatctgacaaagaaaaatctcaaatattatttcatggagtgttagtatgcctaataacccttgttgtcaatagatttattttgccagtggcagttgctatactaggtcttcgtgatgccacatcaacaaaatataaatcggtttgttgcacatttcaacactttcaagagctaaccaagtctgcagcctctgcccttaaatttgacaaagatcttgctaatgctgattggaacatgattgagaaagcaattacacttgaaaacccatacatgttgaacgaagaagaaacaacagaacatcagaaggtgaaatgtccacactgtaacaaggaaatagatgagatctttaacactgaagcaatggagctggccaacaggcgtctcttgtcagcacaaatagcaagctaccagagacaatacaggaatgagattctgtcccagagtgctgtccaggtgttggttggtgcagcagaaagttttggtgagaagaagggaaaatgtatgagtcttgatacaataaagaattattctgaaagccaaaaaacagttacctttgctagaaaactactacttaattgggtgtataataccagaaaggaaaaagagggcccatcaaaatacttcttttttcgtatatgccatacaatagtatttactgaggaatttgaacatgttggataccttgtgatattaatgaatatatttccctttataatctcttggatatcccagttaaatgtaatctaccacagcgaattaaaacacactaactactgttttcttacactttatattctagaggcactacttaagatagcagcaatgaggaaggactttttttcacatgcctggaacatattcgagttagcaattacattaattggcatcttacatgtaatacttattgaaatagacaccattaagtatatttttaatgagattgaagtaatagtctttataaaagttgttcaattttttcgtatactacgcattttcaagctcatagcaccaaagttgctgaaaataatagataaaagaatgagtcatcagaagaccttttggtatggaatactaaaaggctatgtccaaggcgaagcagacataatgaccataattgatcagattacaatttctaaacagattaaacagatgttattaaagcaagtgataaggaatatggaccatgctacaaaagagctaggctacttagagtatgatcacccagaaattgctgtcactgtgaaaacaaaggaagaaattaatgttatgctcaatatggctacagaaattcttaaggctttcagcttaaaaggaattattagtaaaactgaaggtgctggaattaataagttaatcatggccaaaaagaaagaggtgcttgattctcaatctattatcaggcctcttactgttgaagaagttctatatcatattccgtggctagataaaaacaaagattatataaacttcattcaggaaaaagccaaagttgtaacatttgattgtggaaatgatatatttgaagaaggtgatgagcccaaaggaatctatatcattatttcaggcatggtaaagcttgaaaaatcaaagccaggtttagggattgatcaaatggtggagtcaaaggagaaagattttccgataattgacacagactatatgctcagtggagaaataataggagagataaactgcttaactaatgaacctatgaaatattctgccacctgcaaaactgtagtggagacatgttttattcccaaaactcacttgtatgatgcttttgagcaatgctctcctctcattaaacaaaaaatgtggctaaaacttggactcgctattacagccagaaaaatcagagaacacttatcttatgaggattggaactacaatatgcaactaaagctctctaatatttatgtagtagatataccaatgagtaccaaaactgatatttatgatgaaaatctaatctatgttatcctcatacatggagctgtagaagattgtctgttacgaaaaacttatagagcacctttcttaattcctataacatgccatcagatacaaagtattgaagatttcacaaaagtagtgattattcaaactccgattaacatgaaaacattcagaaggaatattagaaagtttgttcctaaacataaaagttatcttacaccaggattaataggttcagttggaacattggaagaaggcattcaagaagaaagaaatgttaaggaggatggagcacacagtgccgccactgccaggagtccccagccttgctccctgctggggacaaagttcaactgtaaggagtcccctagaataaacctaaggaaagtcaggaaagagtaagactgttaagaagaccgaagcatgtattaatgctgtggctatgagaggcctcctgctgcagaaacacacttccctacatcaagaaggagtaacttcaggttggatcctgtgtggatgatcttggtgctaagcagaaaagaaatttggaccttgaaaccagcagttcaacatatatactttttgcaaaatttccttgatttaaaatatttgttattttaaatatacaaaacattttagaaaatcttagagtaaattttagtcttaaagccagaaaataagtttatagccatctagatattttgcatattgctcttacagcaataatggtttggttcactttatgaaaaataaaatgtattaaaatatagtttaaatgctgttcttg

SEQ ID NO: 1357 - DNA, 3329 bp, Homo sapiens
aatctcaacacttggggaggctgaggagggaggagtgcttgagcccaggagtttgggcccagcctgctgtacatagcgacacccctgtctctacaacaacagcagcaacaaaaaattatccgggcgtgttggcgtgcatctatggtcctagctactctggaggatcacctgagcccaggaattagaggttgcaatgagctgtgatcgtgccactgcactctagcctgggcgacagagtgataccccgtctcaaaagaaaagaaaatagccatagttccttgtccgtcttagctgcattcgtgtctcactgcggctttgccaattttcctttcttttctgcaggttgcataccctgtcctgagggcgcggcacggagtgcatgcgggccgctgccatgacgaccgccatcttggagcgcctgagcaccctgtcggtcagcgggcagcagctgcgccgcctgcccaagatcctggaggatgggcttcccaagatgccttgcactgtcccagaaacggatgtgccccagctcttccgggagccttacatccgcaccggctaccgccccacggggcacgagtggcgctactacttcttcagcctctttcagaaacacaacgaggtggtcaacgtctggacccatttactggcagccctggccgtcctcttgcgattctgggcctttgccgaggctgaggccttgccatgggcgtctacccactccctgcctctgctcctcttcatcctgtcgtcaatcacttacctcacctgcagccttctggcccacctgctgcagtccaagtcagagctctcccactacaccttctactttgtggactatgttggcgtgagcgtttaccaatatggcagtgctttggctcatttcttctacagctctgaccaggcctggtatgaccggttctggcttttcttcttgccagcagctgccttctgtggctggttatcttgtgctggctgtagctatgccaaatatcgttaccggaggccttatccagtcatgaggaagatctgtcaagtggtgccagcaggtctggcttttatcctagacatcagccctgtggcacaccgtgtggcgctctgtcacctggctggctgccaggagcaagcagcctggtaccacaccctccagatcctcttcttcctggttagcgcttatttcttctcctgccccgtgcctgagaagtacttcccgggttcctgtgacatcgtgggccatgggcatcagatcttccatgcatttctgtccatctgtacgctctcccagctggaggccatcctcctggactaccaggggcggcaggagatcttcctgcagcgccatggacccctatctgtccacatggcctgcctctccttcttcttcctggctgcctgcagtgctgccaccgcagcccttctgaggcacaaagtcaaggccagactgaccaagaaagattcctgaggctggcaagtggggcaacgtgtggaggaagcccctcataatttggagaaaacttgatacaatagaagctgacttttaaggcattggcttttaaattaatacatatatccaaggatatgttatagctgcagtgtttgaaagccaaaggatttaagagttttgttgttgttaataaaaggaatactccttttccttttggatcatagcttaacaaggcacaggaagggaagggatcttgactaagattcatgagacattgaattaaggagaatcatcttcatgcctgaaaatttagcaaaattccgactatggcctccaggggcaattcctaaaagctgaatggataataaaattggactggaaagtaagtaggtggctggtcctcaccctgttggaatggctatcctactatgctgttctttggtaatggaataaattgacccaaggaccgaatttcatttggatttcaaattgtccagagtggaaaagccttcaagatgacatgatgaattactcagttcatctgatttctggtccctcctttctcgacaactataatactaacccttttctcaggataactgtctacacctggcagttttctctgacgtgctgttcactcacatccctaccttgcatggtaatataaaggactaggaagcagtcatacttccaggaaatgcttggattcatgtggacattcaggaagcttattctcatataatactaatctaaacagtactagaaattacagtgccaagagccaccaggaggcccagccaataagcatagatactatatggtatcatgggacccatctattttttaccagtggactacaggattacttgagagttatcagggctgcctaacagaccaggagatctgggggttgcaccagggaatcgccatatttgaccagcatgttttaaaagctcttggtaggattagttggttctaaggatccctctagggacctcattatttcaagaggaacccaaagtccagcctcctacatagatgctgccccacgaaggacccacaaaactaacctagttcagggttctcaggcaggcagttctgcttcagcttagagcagaacccataaaatactcaagtactgggataggcaagcatgtgtgtttactgtggattggtccctgaaggctcctttgggtgagaacatgtgaaccaggcaccctggtttgtttggagcattgctgcccagaagcttctatgggataggtggtgcttgggattgatgtgttgtggccatgcagccctccctgaggattgacttctgcactaatccagtgaaggaggctgtgtcaaaagaagggctcagaagccctcttttcagaggcaatgattcctgtcagtatgaggtcccttagttactaaaaagggacatgatttaactccagtttgatgaacctcctccgagtttactttattgtcttcaaatcttttgttttcttcctttttgtgagatttgtgggttttgtgccttataaatggaaatgtatgaacacaatatatgctcatgtagaattttctgttctgggttattgggataagaaaaaatatatattgctcttcaactagtgaatgaaagaaacttcagaaagctagaattgcttatcaatcaaaagactttctcaatctattttggccacaaacaaacatattcaactgaagctttccaataatctttatatcaagaaagcatgcgtcttgtcagctacattgttttcttagatggatttctcctgttaatcctcaaatatctgaacttctgtgttacccaagtgtcttatacaagcttctggtgtctaggacaaatttatggcaaataaaattagcaaaactg

SEQ ID NO: 1358 - DNA, 3925 bp, Homo sapiens
cagatggaacttaccttgctgttggatgcaatgacagctcggttgatatttatggagttgctcagcgttataaaaaagttggcgagtgtttgggatcccttagtttcatcactcatctggactggtcttcagacagtagatatttgcagacaaatgatggaaatgggaaaagacttttttatagaatgccaggaggaaaggaagtgacaagtacagaagaaataaaaggtgttcattgggcttcatggacatgtgtttcaggccttgaagtaaatggaatttggcccaagtattcagatatcaacgatataaattcagtagatggaaattatattggccaagttttagttacagctgatgactatggaattataaaattattccgatatccatgtttaagaaaaggggccaagtttagaaaatatattggccattcagctcacgtaactaatgtcagatggtcacatgattatcagtgggttatttctattggtggagcagatcactctgtctttcagtggaaatttattcctgaaagaaaactgaaagatgctgttcacatagcaccccaaggttatattcacttatatttgcacagacatttaaatttgatgtagcggtcattggggagccagtgaagggatttaaaggagctattgagtttgcagtgagtggagaggaagataatctgtagtacagtttactgacatctgtgtcacttgaatagaaagtctggctgactctcatagtgatgaatcagattcagatctgtctgatgttccagaactggattctgaaattgaacaagagacacagctcacctaccgtcgacaggtttacaaagaagatctacctcagcttaaagaacagtgcaaagagaaacaaaaaagtgctacttctaaaagaagagagcgggctccaggaaatagtattcgattacactttgttcacggttacagaggttatgactgtcgaagtaatctgttttatactcaaattggtgaaattgtgtaccatgtggcagcagtgggtgtcatttataatcgacagcaaaacacacagcgtttttatctgggtcatgatgatgatattctctgcctaactattcatcctttgaaagactacgtggcaacaggccaggttggtagagatccctcaattcatatatgggatacagagaccattaaaccattgtccatattaaagggccaccaccagtatggtgttagtgccgttgatttctcagcggatgggaaacgtttggcatcagttggcatagatgatagccatactgttgtgctctgggactggaagaaaggagagaaactttcaatagcaagaggaagtaaagataagatttttgttgtaaagatgaacccctatgtgcctgataaactaattacagctggaattaaacacatgaaattttggcgtaaagcaggagatgtgtgtatctggagagacatctttcttgtaaaaacagtgaaagcgcatgatgggccagtgttcagtatgcatgcattggaaaaagggtttgtaactggaggaaaagatggtatagtagctctttgggatgactcttttgaaagatgtctcaagacctatgctataaaaagagctgcattggccccaggatctaaaggtcttctcttggaagataatccatctatacgtgccatatcattaggacatggtcatattttagttggcacaaagaatggtgaaatactagaagtggataaaagtggcccaataacacttctggttcagggacacatggaaggagaggtgtggggtttagctacacacccttatctgcccatctgtgctactgtaagcgatgataaaaccttaagaatatgggatctctcacctagtcattgtatgttggctgtccggaagctgaaaaagggtgggaggtgttgctgtttttctcctgatggtaaagctttagccgtaggtctcaacgatggaagcttcttaatggcaaatgcggatactctagaggatcttgtgtcttttcatcacagaaaagatatgatttcagatattcgattttcacctggttctgggaaatatcttgctgtagcatcccatgacagctttatagatatatacaatgtaatgagtagtaaacgagtaggaatatgcaaaggagctaccagttacataacccatattgattgggatattagaggaaagcttttacaggtcaacactggtgctaaggaacaattattctttgaagctcccagagggaaaaaacaaaccatccccagcgtggaggtagaaaaaattgcttgggcatcatggacaagtgtacttggtttatgctgtgaaggaatttggccagtaattggagaagttacagatgtaactgcttcttgcctcaccagtgacaaaatggttctagctaccggggacgatttgggatttgtgaagttatttagatatcctactaaagggaaatttggaaagtttaagaggtatgtggcccatagtacacatgtcacaaatgttcgctggacttatgatgacagcatgttggttaccctaggcggtacagatatgtctttaatggtgtggacaaatgagatggaaggctatcgagaaaaaaggccttgtgatagtgaagaatccgacattgattctgaagaagatgggggctatgacagtgatgttacaagggagaatgaaatcagttacaccatcagagccttatcaacaaatattcgcccaatgttaggaatcaagcctcatttacaacaaaaagaaccctcaattgatgaaaggcctccagtgagcagggccccaccacagccagagaaactccagacaaacaatgtaggcaagaaaaagagacctatagaggaccttgtgttggagctcatttttggttatcgaggcagagactgtaggaataatgttcactatttaaatgatggtgatgatataatttatcacactgcatctgttggaattctgcacaatgttgctacaggttctcagagtttttatcaggaacataatgatgatattctgtgcctcacagtaaaccagcaccccaaatttatcaacatagtggcaactggccaagtaggtgattcagcagacatgtcagctacagctccttctattcacatctgggatgcaatgaacaagcagactttatctatcctaagatgctaccattcaaagggagtatgttcagtcagcttcagtgctactggcaaactattgctgtctgtgggactagacccagaacatactattaccatttggagatggcaggaaggtgccaaaattgccagcagagctggtcacaatcaacgtatttttgtggcagaattccgaccagattcagatacccagtttgtctcagtgggagtaaaacatgtgaagttctggaccctggcaggaagagctcttcttagcaaaaaagggctactgagcacactggaagatgcccggatgcagaccatgctcgctattgcatttggtgcaaataacttgacgtttacaggtaccatcagtggtgatgtctgtgtgtggaaagatcacatattgtgtagaatcgtggcgagagctcacaacgggcctgtgtttgccatgtacaccaccctgcgagatggacttatcgtgactgggggaaaggaaaggccgtcaaaagaaggaggagcggttaaactgtgggatcaggaactgaggcggtgccgtgccttcaggcttgagacaggacaagccacagattgtgttcgttctgtgtgcagaggcaaagtatttacaagagaggattttgaaagtttccatcacaaagaaatgataaatgtctgaggtgatggttatgcgtattaccctatgccctatagatatgtataattatgtgtcaatttcaaaataaaaattcaaaactacaactcctatg

SEQ ID NO: 1359 - DNA, 3920 bp, Homo sapiens
catcttttcctaaccttgtcaggccctggagctccctttgtccatgccagtgaccatcggtcctcagaatgtgcagtggaagttgctgtggacagtgctccctggtctctgaggccctcttcgtcctggtctggccaaggacttcccagaaaactgtgcttagctgtggcgggaggcacggccggtcacgcagccttcctcccgccctggagtgggcaggcctgcttgtgttgtgcagcggcagaacccttcctgacttccaggtttttcctggggtgcggcatcccatcgcagcattttctctggttaccctcacgagtttcctcctgcgtttggttcttgatctccagggccatctcccacgtcttccttggaaaggggcattgtcatcctttttgtattttgatgattttgaaagatttcccatagtaactgttaggaagttggcctcagaagcaaaaattcttcttttgtcttggcccctgtgaacaagtgttctgctctcagatgaagcagggaggctgcactggagcttggtggccagcaggagggaatcaccagggtggtgaagcctgcgagatttctccccgggtgtctctgatggggccacatggtggatttcataatccaccgattcgtttttttaagcctttattgttaacatcaactgtgtgccatgctcagagacctgaagtgaaaaggtgaggaaggcgtgctcacattccagcactcaccacccggcaccgggccagctgactcagcacgtgccgtttaggttgctgtacacagccggtgagattctcccctctggtgggcagtgcgtgtctgacaaaggcagtcgggcggagaacagttcctccgctgtggtcctttgccactgtaccaggcccccaagagctggggggagccccagggagcctcagcctgttgagtgggggcagctggtttgtcctccgaggtggaagaggtgatttctgaggaggtcatgctccgcttggctcgttcacagcatttcagagagtccgaaagaggagaaagaccttggcaaggggtgtgtcaggggtgggcccagggacgctggtggcctcatgtggactgactttcatgaacagaaactcagaaacagttgcttctggattttggcttctcagataaacattctttttgtagttcgtttgttcatccctcattttgctgtctgactttgcctttcttttcccttcactattactgatgaccaaggaaactggaagttaattccagaggcagtggggttgctcctgttgtctgtgcagactggagttcctctgcctctgtcagcatctcctctgtccttccccagccttggcaggagaccagtaatgacctctgtccccgtgcaccccagtgatggccgccgtccccgtgcaccccagtgatggccgccgtccccgtgcaccccagtgatggccgccgtccccgtgcaccccagtgatggccgccgtccccgtgcaccccagtgatggccgccgtccccgtgcaccccagtgatggccgccgtccccgtgcaccccagtgagggccgccgtccccgtgcaccccagtgagggccgccgtccccgtgcaccccagtgatggccgccgtccccgtgcacaccagtgatggccgccgtccccgtgcacaccagtgagggccgccgtccccgtgcacaccagtgagggccgccgtccccgtgcacaccagtgagggccgccgtccccgtgcaccccagtgatggccgccgtccccgtgcaccccagtgatggccgccgtccccgtgcaccccagtgatggccgccgtccccgtgcaccccagtgatggccgccgtccccgtgcaccccagtgatggccgccgtccccgtgcaccccagtgatggccgccgtccccgtgcaccccagtgatggccgccgtccccgtgcaccccagtgatggccgccgtccccgtgcaccccagtgatggccgccgtccccgtgcaccccagtgatggccgccgtccccgtgcacaccagtgatggccgccgtgcccgtgcaccccagtgatggccgccgtccccgtgcacaccagtgatggcctctgtcccccatgcactcccagacaggcaatgtccctgtgggcctgtcccaggctctgttctcagcaggctgggctcagccctggtgcagggagtgaggaggtgggagtagtagagaccagaaaaagtggcagctgttgacaactctgccatctctttctgaatgtaatgggaggtcctgtcttttcagcttgcaaggaaggagggtccgaggcaactccgctgttgcacatttagggacccctgaacttaaatgacagaatgccctgaccactctggaaggcactgtgttcatgtttgtgtgcttgactcttgatccgtaaaatggctgtttgtgcaggtcattaactgtgagattcagagagtaggtgcacacgtccctgcagagattccagcaggactgaaaaccagtagaaatatatcagcacctggatcttgcctcctgagtcagtaaggatatgccacagtcacgaaggcagtgggatttcgagggagggaagggaaggcggcaggcggggcatgccctccggggtgcccgaacacacctgctgcatccacatgtcttcagagccctctccctgtgggaggcctttttcaggacagccttggtgaactggaaacggaatcccagcccttggtggccctgcagtgacttggacctttccgaggtcaccctgccactgcgtgcccttcagtccctcctggcaggtgggggcacatcccccagccactcccatttcctgacattgtcactttgtataactggaagccgtctgtgaaattttagttttcaaagcattatctggtgatgggcaacccagggcagcgaatcattcagaattttcttatctaggctaataaacataataaaatcaataaggactttgaaagtaactccactgggttcaggaaactgagtgtggccgccctgtggggtggtgtttggtgagtgcttcccggaggtgagtagttaattcacaggagtgactaatggcagcgtcccactcactcctccttccggggtcatggtctcaaggggtcactccatgcactggggatgtcagctcattacagaatgatatattcgggaagtgtctcagttctgagtgcctttgagggaatttgcacttccgttcccacacagccttgcattgtgtgtgttagaggctgtgggccttgggcaggaggggtgagtgttggcacatacctcccgtctctcccagccttctctgactctgactttccctcttgaaggctaccggctctctgaccagttccacgacatcctcattcgaaagtttgacaggcagggacgggggcagatcgccttcgacgacttcatccagggctgcatcgtcctgcagaggttgacggatatattcagacgttacgacacggatcaggacggctggattcaggtgtcgtacgaacagtacctgtccatggtcttcagtatcgtatgaccctggcctctcgtgaagagcagcacaacatggaaagagccaaaatgtcacagttcctatctgtgagggaatggagcacaggtgcagttagatgctgttcttcctttagattttgtcacgtggggacccagctgtacatatgtggataagctgattaatggttttgcaactgtaatagtagctgtatcgttctaatgcagacattggatttggtgactgtctcattgtgccatgaggtaaatgtaatgtttcaggcattctgcttgcaaaaaaatctatcatgtgcttttctagatgtctctggttctatagtgcaaatgcttttattagccaataggaattttaaaataacatggaacttac

SEQ ID NO: 1360 - DNA, 3809 bp, Homo sapiens
gattgtgcagcgactccccgtggcggttgaggggcagtggtggcggcggaagcccaagtcgatgctgatgttgatgctggtggcggctgtgaccatgtggctccgaccgctggtcacagctcagctctgtcggaccgcctgtattttcatcctacaacaacacgcttgattaaacatccttgcgagaaaaatatagcactatatctagggaaacaagtttttttcacaatggataactttgagactagtctccttccatttaccatccctacatcaatgcaggtcggcgtaccagaagtgacatcagcacattttgctggttcgttattgctgttagtagtggatcaaaaagtctatatttatgattatgaaaataattcttggagcatgtctttaggtataaaacaccctgttacacatgtctctggtgataattgttgttatactggaagtttgttttgtgtgcatgtcagtaatttggtttttgcatatttccgtggagatcagatatcccagacttatatatattattcaaatactgggggattcagtttttggaagtatcactatgacagacaggttgcgatgcttgtagtgaatcaagggaagggcatgttcaagtactcagatcaccccctcaaccggagtttcgggctgtcttttgactataatgggactctagacatcctcatcgcccccggccagagaggcatcctgctcctatggtttgagaacagcctgttgttttcccataatgcagtttcactctgtcatcgagactggagtgcaatggtgcaatcgtggctcactgcagcctccccacctctcaggctcaagtgatcctcctgcttcagcctcccagtaactgggactacaggtcagctcgtcgacaccgtccgggtgaaaaaaggagaccagaccttgttttcttccatttttgaagccaagatcaccatccacaacattgctgtcactgaaaatgaactggcagttataactcgggaggataatttgtattatggcaatctgggcatcgtgccaagttccataatcaaatttgcagaccaatacatctggtcagaagacgtggccctgatgttcaggagcccagggactctggaaatactgaccccactgcgtgacacagcctttccagcttttgatttccagaagtgcctcgtgaatatccaggcgcttctcatggaccctgaactccacgttggaaagtgcaagatagagtttctgacaggagaatttatatacaggatgtataccattgacatgcacagccagctggaattgactgcttcgttgataccccagccaggcacatccctgattcctctggtgatggtgagcaacccccactccctggggttccaggccaccttctacgagaacggttacacatcagatgggaacaccaagtacaaactggatattttcctaaaacagcagcagcactggggcaggaccgactccaacttcacttccagtttaaagaaagccaccatgtctaccttaactgtggacatagcaaacaaggaaatttcatgtgtggatatcaagccactgtcgacactgatttcagttggctgcgacctggataaaaagatcgtcatccagaacaaagtttccgcctgttccatgggcatcctggaccccttgaccctgcaagacaattacagcttcatcatcgagaaggaattctacgaccccggcttccaggggcagcagtcctccgaggacctgcacgtgttttactcctaccagcagctgggctgtcctctcctcgtctactatgacaccctatggaagcccgtggtggagctgctggagtgcagtggcatgaacacagttcattgcagccttaacctcccaggctcaagcggtcctcctgcctcagcctcccaagtagctgggactgcagttgcataccacaatgcccggttaattttttttttttttttttttttttttttgagacagagtctcgctctgtcgcccaggctggagtgcagcggtgtgatcttggctcaccgcaagctccgcctcccgggttcacgccattctcctgcctcagcctcccgagtagctgggattacaggcgcccgccactgcgcccggctaattttttttatttttagtagagatagggtttcaccgtgttagccaagatggtctcgatctcctgacctcgtgatcctcacgcctgtaatcccagcactttgggaggctgaggcaggtggatcatgaggtcaggagtttgagaccagcctggctaacatggcaaaaccccgtctctactaaaaatacaaaaatcagtcgggcatggtggcggacacctgtactcccagctactcaggagaatcacttgagcctgggaggcagaggttgcagtgagcacagatcacgactgcaaaagactcgaaggtcctttaggggatctagcaggaaccccaattccttttaggggtgtacaaggcctttgaggatttaaggaactgaccgaaggacgggaaatgcaggcaccaaggtgttcagggggctttgctgatgatgagaaatgcctgggaccatcccaatgcttgctactgagggatggatggaattcccgggctgtcttactcagtgtgcatctgttttatttttatttcttttaggcagggtctcactctgtctcccaggctggagtgcagtggtgcaatctcagctcactgaagactcaagcctcaagtgatcctcccacttcagcctcccaattagctgggactacgggtgtgtgccaccatgcccggctaatttttgtatctttttttttttttttttgtagaggcagggcttcagtatgttacacaggctggctttgaactcctgggctgaagcgatcctcccatggattataggtataagtcaccacgctcagcctcagtgtgtatttctatcatacgagtgatgtcctgtccctacaaagagattgcatcagtccacgtgtatcttcccgggacacaatgttttgtatcaggaatgcagtgcatgcagcaaagccaccagcagatggtgtcctggctctttttttgcatttgctttttttttttttttttttgagacggagcctcactgtgtcccccaggctggagtgcagtggcgcaatctcagctcactgcaacctccacctcccgagttcaagcaattctcccgcctcagcctcctgagtagctggacttacaagcacctgccaccacgcccggttaatttttgtatttttagtagagacggggtttcaccgtgttgcccaggctggtcttgaactcctgaccttgtgatccgcccgcctcggcctcccaaagtgctgggattataggcgtgagccactgcgcccggtcggctctgttggtatttctatatgcattcttcatatgggctgtctcattgcaaattgcatgagtgcatttaagagatggccccattactattttttttccatcagctgtggtgagtggctgcttttgtagaacatgaagttttcctggacaggcacagtggctcacgcctgtaatcccagcactttgggaggccaaggtgggcagattacttgaggacaggagttcaagaccagcttaacatggcaaaaccccgtctctactaaaaatacaaaaattacctgggcatagtggtgcacgcctgtaatcccagttactggggagcttgaggcaagagaatcgcttgaacccaggaggtgaaggttgcagtgagccgaaactgcaccactgcactccggcctgggcaacagagcgaggctgtttctc

SEQ ID NO: 1361 - DNA, 2654 bp, Homo sapiens
aacataattggctttgcagtgcgcatccgggtctgcgtcaggaaggcccaagtttccatcgcgcgaggctgagccacacagcgtgcgaggttcccccagcagcaccgactccgatctccgggaggcgcccccagagctccgaggactcgccccgcgtcgcgcggtcctgccgacacctgttacctcaaagaggacttcgccgccccgagccccccgcacccacgtcccctgccaggcccaggagcgccgtccgcagcgccgtcgaggtgatgggcagccggccctgcagccccagcgcctgccttgcgccctggtggggacagcagccaggaggaccaggccctgccaagcgcagccgattggaggagcccgcgggccccgaatcccgagcggcgcccagcccggaagacccggcggggaccccggccgtggacgcgctcacctccatggtggtcctggacgcgggctgtgccctgcgtgtgcccctggaggacgtcgacctggtgctggagctcgcgccaatgtcggtcctgcgagtgtctcttggtggacacaccctcatcgtgatccccgaggtcctcctgagctccgtcgacgaatgctcaggagcgcagggcgactggtctgccggcctggaagtggacgttttcctgggcgctcacggggaagacgtcgtcgtcgagcaggaagtctgcgcatctgtcccagagatcgctgccgaggaagaggcctacgaggaggacgcggactctgagttcccggagctctggatggactccgcagccggctcagccgctgggctctacccctccgctagaagtatgttcagcccctaccgggagggccccatccgagggccctgtgctctggcccccaaccccagttcagagagacgctctccacgccccatcttcgacctggaattccatcttctggagcctgtccccagctcacctctccaacctctacctccctctccgagtccaggtccccacgcgcgcccggagctcccagagcgccctccgtgcaaggtccgaagacgcctgttccaggaatgagttgcctcccacaatcccttgccaccctgctgggctccaggagaccgtctcctgatagccgttgtgtgtatgttgcgcaacctacaaggatctcggagagtggataacggatagatgcttttttgatacaggctgcgttgcagaattctggatcagtggctgacttagaaagtctggaaaaaaaagatcctcctcctcagcataaaaatacgctagttgaaatacagtctactttcagactgtgagattgctgcttcgggcctgttttgtttggaagtcacccctaggcagctccattccccctggttttgctttgaacctcagttccagcacatttctctaaaaatccgccctttccccagcacgttaccatggcacaccttttctcccaagttaatttactacatttattttgtttaatgggttttggccctagtctctgggctagtttatgacgaccttctcaacatggaatttttccctatggtggcctgagcccttttgggtgatcttgcacatagttgtacctggacaaatgtttgttgtttgcaaaacagaccgaactgggaataatgatcatgtaccctcctttttttcatgattggtttagcaaattgtttatgttattgggctttatttcccccctaactcttagagccagctcttttccattcatttcttcttctatgtttttaatataattattttatcctggaaaagcttataattctaagactctgtgtgtgtatgtgtgtgtgtgttgtttgtttgtttgttttttgagacaagagtttcactcttgttgcctaggctggagtgcaatggcacaatctcagctcactgcaacctttgcctcccaggttcaagcaattctcccgcctcagcctcccaaagtgctgggattacaggcacgagccatcgcacccagccggaaataatttgtttcttaggttgatgtatcaaatgcaattactgaatttctttaatggtgtatgtgtagattctcaattgattgattgattgattgataaaaacaatatctccaaataatgagaatattgtcttttttgacaagcttcatacatcttatttttctttaatcttttatattggacattacttcaagtccagattgaacagtatggttaatatgggcattcctgttttatgccttgtgttaatgcttctaaattttaccataaagtatgatctttacatggttgttagataacccttaatctattgaagcagttaattttcagtctttcagatcatgaaaaactgttgaatttttgctttgtttttgcctgttactacaaagatgttatcaagttgttttaaatgttgacatttaattatttgtgtgtatacaataatacaatacaatagctagatggaacctttgggccacaagagtacgtacagaaacctggcaagagcgctaatgagaccaggctttgggcttcagggatttaaaacaattggatgctttatgaggacttgagaagacacaagtggaaggagaaaggcagtaactgtagggtgcatttaaggttttaaatgttaaaaattaaagaaacttttttttctgtatgc

SEQ ID NO: 1362 - DNA, 3795 bp, Homo sapiens
aaggacacccgaggatgtctaaaagaagctcagcgggaaagctgagcgctcagaagaacgagggtaacaatgggacaaagtgaaagcagacattctgcttatttaaatttcttaaggcattgattatgaagagggggaaagatagtaatttgttatcactctttagtgcagtaaagcagctttgcccatggttcctggaacaagggattatggagttggatgaatgggagagaattggcagagatttaaaaaaaagtgtataaagatggagcaaaaattccagtctcggtttggtcaatgtgggcactaataaaagtagctcttgagccatttcaaacagatgatgaggcagattcagatgaggaagaggaggatgagtgtaaaaaactaacctcagattctgaatgtgaggaacggaaaatggaggaaattaaagaaaagaaaaagaaactcagaggctgggcgcggtggctcacgcctgtaatcccagcattttgggaggccgaggtgggcagatcacaaggtcaggagatcgagaccatcctggctgacacggtgaaaccccgtctctactaaaaatacaaaaaattagctgggcgtggtggcgggcaactgtagtcccagctactcaggaggctgaggcaggaggatggcgtgaacccgggaggcggagcttgcagtgagccgagatcgcgctactgcacttcagcctggggaacagagtgagactctgtctcaaaaaaaaaaaaaaaaaaaaaaaagagagaaactgaaaaaaaagtatgttttactagcccgacggctccacctactgaattaagtgaaaggccacctcctctctctccccctaatgggcgagaagatgaattagctatgaaacttactgctcctgtagttgcaacattaaaacctggagcaattgatggtgctatacaaaattctattcaaaaggctagagccgagggagaccttgaagcatggcaatttcccataactataatccagcagggagaacagaatatagctaattggaccacctttccttttaagatgctctcctccccaatttctacccagcttaccccactgcaatactatctttaagccttggctccttggccagggccttagaactgataacccagtactttaataactggaactgggtctacgacaacataatagatcaggacggaaacgaattcagtaaattaaagtgaggcgcatattcctatagtggcaaatgggggcaatgagagaatgtccttctgctgtgtttccaaaatccatctacaaaggagaaagaaagagatatacaagtagttaaaggaaaaacagtgtaccctattcctttaaaagccagggtaagtttaaaacatataattgatagttgagggtcttctctgtgactctataactctccaatactaccttgttgtcagtgtaaacaagggtgtagcccgaaagcactgagaccactgaccaccactagccttcctatcaaaaaatccctaacccagtaacccgtgaatggcccaaatgcattccatcggtagcagcaactgcttcgctaacagaagaaagtggaaaaataacctttagaggaaacgtcattgtgagcacacctcaccagtccagggctatcctaagaaaaaaaagcaaaaaggtagcttactaactaaaaaatcttaaagtatggggctattctgttagaaaaaggtgatttaatattaaccactgaaaattcccttaacccagcaggtttcttaatgagggatttaaatcttaattaccatacaaaggtctgagcagacctaggaggaactcccttcaggacaggaggatagatggctcctcctgggtgattgaggggataaaaccacagcaggtattcagtaattgatagggagactcttgtagaaacagagttagaaaaatcgcctaataattggtctgctcaaatgtgcgagctgtttgcagtcagccaagccttaaagtacttacagaattaaaaaaactctatcttaaccctgacacaaaaggttacctacaccctctctgaaacaaattttcataagaattgtttatgggagtgcatcttgaaggagcagctgggttgttatgaaatactccggaacccagcccagctctagaactcgcccctgagctcaaaggcaatgttgggcatgctggtaaaggaccactagaatccagcagcgtagactcctttctttgtggtcaagaaaggtgggaaaacagatgcaggaccagtacattggtcagtgtaacgagtccgataaacagaagtccatgggtggttatgcaccctggaaaggaataagcattaggaccatagacgacactctaggactaatgcttatcagaaaatgactaggggtgctggcatccctatgttcttttttcagatgggaaatgttccccacaaggcaaaaacgcccctaagatgtattctggagaatttggcctagtcagagtgtatgcaactttttacctctcagatttgaaacaaattaaaatagacctaggtaaattctcagataaccctgatggctgtattgatgttttacaagggttaggacaatcctttgatctgacatggagagatataatgttactgctagatcagacgctaaccccaaatgagagaagtaccgtcataactgcagcccgagagtttggtgatctctggtatctcagtcaggtcaatgataggatgacaacagaggaaagagaacaattccccacaggccagcaggcagttcctaggctagaccctcactgggatgcagaatcagaacacggagattggtgccacagacatttgctaacttgtgtgctagaaggactaaggaaaactaggcagaagcctataaattattcaatgatgtccactataacacaaggaaagaagaaaatcctactgcctttctggagagactaagggaggcattgaggaaacatatctctctgtcacatgactctattgaaggccaactaatcttaaaggataaatttatcactcagtcagctgcagatactagaaaaaacttcaaaagtccaccttaggcctggagcaaaacttagaaaccctattgaacttggcaaccttggttttttataatagagatcaggaggagcaggtggaacaggacaaacaggattaaaaaaaaaaagggggccaccactttagtcatggccctcaggcaagcggactttggaggctctgggaaagggaaaggctgggcaaatcgaatgcctaatagggcttgcttccagtgtggtctataaggacactttaaaaaagattgtccgaatagaaataagccgcccccttgtccatgccccttatgtcaagggaatcactggaagtcccactgccccaggggacgaaggtcctctgagtcagaagccactaaccagacgatccagcagcaggactgagggtgcccggggcaagcgccagcccatgccctcaccctcagagagccccaggtatgcttgaccattgagggccaggaagttaactgtctcctggacactggcgcagccttctcagtcttactctcctgtctcggacaactgtcttccagatctgtcactatctaaggggtcctaggacaggcagtcactagctacctctcccaaccactaagttgtgactggggaactttactcttttcacatgcctttctaattatgcctgaaagccccactcctttgttagggagagatatcctggcaaaagcaggggccattatacactagaattaggag

SEQ ID NO: 1363 - DNA, 3796 bp, Homo sapiens
tcccattttccttagaattaccttttctttcttggacctgcctgcatacagaatagatctgtctgcattgagtgtattcagtgagctaagctaagggaagactgcagtgggcagggccttactttcttgtgagtgaactctttgcaggttttaaggaatatgactactctgctttaagggggtgtggggagcactttgttaaagcaatgtgcattctgaatccatttcataggcgtccttactccgtggcagctacacctttaatcgtggattataataacttttaaatgagtgcaaaactttcaggatcttttccttaagttgggaaatgagattttttttttctgctcttttcaagtatcacttaaattaagctctggtacggagtcaggagtctttttctttacactccttcagcatgttttccatggtactagccgacactgtgcaggtgggtgagggacaggctggggcgtttcggcagctgacctgggctgctcttccatttcaggtgatcgtgcagtccggccgccaccccacagtgctgcagaagctctgccagttgcccttccagtatttcagtgacccacggctgatcaaagtactgttcccttcacttatcgctgcttgtgacaacaaccatcagaacaagatcattctggagcaagagatgagctgtgttttactggccactttcattcaggatttggcacagactccaggtcaagcggaaaaccagccttaccaacccaaaggtatgtctctattgaaattaaatttcatgtgtttgttagccaaatggacatctttcttatcctttcctctggaactgctacattatatgtaaaattttatacataacctaaaaatatttgagattcagataccaagtatatttcagtaagtaaagaaatcgattttgtcatgaagcatgaatgcatccaaatatgtatagaaatctgtgggagtaaaagaaaagcacaaatatctttgtataatttataatcatctcatgcaagatatattaaatggtaaataattactaaagagccgctttgtaatacaggagccagatcattaatactggcccacatttctcacataaatgctgaaatcacataggtttggttccttatccatgttcagaataaagttatcagtaatagtagcccacagtttccccccaagttcaagtagttgaacttttgttttgaaaataattgttttacatggagaaaaagtcatctaattggcaaagtccagggcaaaagatttacaagttgtttttttttcctatagcattcctgctggggtgtttgctgtgatcagagttagagatgtagaatttttaccacatttttacttttttaaatattctgctacccagactgtaattgagaagtacaagttgctctttgggtgttatgacagcatctctgatgaatgagaacctaatccagatcttcttcaattcttccattagtttgatagtctttaaagtggccatttagaggtacactcccagcaggaccctttagggcacccaccaagaaacccttacttggtgggggtgggggtgttaccttggactctttcacacacacacacacacacacacacacacaaagtcctctacagtggacaggtgttgaaaagtgcacagaagaaaatataactaaagctattacaatatcatgaaaagaaaaaaaaaagacgttttattgactcaggcacccagaaaagttaaacagaaagctatgcaacttttcagaaattcaagtccacatccttgtcggtaccatttgtctgagcaagaattagtctgcaagttcagttctgccctgacccagtcacagccctttttttgttttgttttgttttaactactggaggatacttggggagaaatcagcaaaatgtgttactgttcttacaaaacaatttcattttgaataaattaaaatgcttagaaaaatctaatgtatttattttcaattgtacagcagttttgttttgttttgtttgccactaagaagtataagcatttttttcttactctttctcctgatcataaagatgagtcacaatttgttacattgtctggaagacacagtcccagaagctgcctctctctgcttggtggactgaggcctgtggaagtctcaaccttctttcttttccaagggaccatcttccctgattttcatgctttcccccagttacagtaggcttaacccacagaacagcaaagggggaattggtctctcctttgctcagaaagggtcatcactatgttaatgacagctcataatatgttgcttgattttttttttttaatgatgatgcctaagttgccagtttgcaccttgggtatttgttccccttttgcctagattaagtcctcataaaatgtctcaagatattttgagttcattgtccaggtaaacctttaaatataaaagcagctcttggtaataccacattcctattgcccaggaagaattttggttttcaaatacctactgcctgtctagctgcaattgtttactttacctatgtcactggccagtaaagctcctatcattcattcctactgctttgttagataggctgtgctatatttgaataattttaaagatatacttaaaactacattcatgttttaaattaaatagactttcagaaaacgtcatcatttacatacagttttcccctttcatggctaacttaaggatagaatataggactgtcattttagtttgttctttttttgttttttgttttttgttttttttgagacagggtctctctatgttgcctatcctggagtgcaatggctactcacaggtgcgatcatagcaaactatagcctctaactcctgggctcaagcattcccccgacttcagccttccaaatagctgggactacaggcgcgcaccactgtgcttgcctggttgctaatttttttctcattgtggagtccaaaaacatctttttgtaatttatataggggttaatgtctgaatatgttaaaggacaaactggattgtggttaaaatatatgtcatatattttatactacagatagattgatacatatagatcaatcaccttatttacctaaattgtgtcatggtttatttgaagtggatatctccattttatactcagatatcaaaataagtttaatttatgaatcttcaaagaatttaaccctcttttatttaacttttttctcttttatccccctctcagggaaatgccttggttcccaagactatcttgagctggctaacagatttcctcagcaggcctgggaagaagctcgacagtttttcttgaaaaaagagaaaaaataaatgttttggttgattctgtatttgagtacccttgttaatattttaaattgtccaaacaaacattctaattgttccttaagaactcattttcccatgtttatactcttcccacactgtagatatggcatgtactttacactatttataatgactgtagatacttgaatgttctacttgctaattttgcaagttgagtttatttcatttatgcagagtatcttggagtttggtaatttccatcttatgataatatatactttgcatttgtgatatgggtgaaaggagacataaaattagcaagtctgttttgttcttgtaataaagtaacttattctgttttcattgttgacttttcatgttaaggaaatacgaatctgaaagaaaaatgttaactccagctcttgaagtatcttaaataaagacttaattaaagttt

SEQ ID NO: 1364 - DNA, 3287 bp, Homo sapiens
aaaaaacctgcagttgccgggtcagtggatcccatgtgcagagggcgagacggggccctggccaggcgttgggaggcgggaggctcggccggcgctccgggtgaggatggcacgcccccgcccttgcttctgcgcacagggaaggcattcggccccgaacttggggctcaaaacggttcagttcgctgcctttcccatcctgacccagccccgggttttttccgaagccgccgctggataggttgcattactaggcttcccccagccactctccctgcccaaagccttcagaagccgcccctctccccttcacctggcccttatccactgtcccagcctcatttctttccccctccctgaatgtcttctgctcccctttccttgggcactgcccttatcctggggtcctggctgctgccattcctggccctggaaaaccagtgcggaacccaaagaaaggtggaagagcagcttttagagaggtgtttttattctttggggacaaagccgggttctgtgggtgtaggattctccaggttctccaggctgtagggcccagaggcttaatcagaattttcagacaaaactggaacctttcttttttcccgttggtttatttgtagtccttgggcaaaccaatgtctttgttcgaaagagggaaaataatccaaacgtttttcttttaactttttttttaggttcaggggcacatgtgtaggcttgctatataggtaaattgcatgtcaccagggtttgttgtacagattatttcatcatccagataaaaagcatagtaccagataggtagttttttgatcctcaccctccttccatgctccgacctcaggtaggccccagtgtctgcggttcccttctttgtatccatgtgtactcaatgtttagcttctacttataagtgagaacatgtggtatttggttttctgtttctgagtgagttcatttaggataatggcttccagctccatccacgttgctgcacaggacatgatcccattcttttttatggctgcatagtattccatggtgtatatgtgccacattttcttttttttttttaaggcagagtctcgcttggttgcccaggctggagtgcagtggcaggatctcggctcactgcaaccaccaccttccaggttcaagcgattctcacgcctaggcctcccaagtagctgggatgacaggtgctcgccaccacgcctggctaattttcgtatttttagcggagacggagtttcgccatgttggccaggctggtctcaaactcctgacctcaggtgaaccacccgcctcagcctcccaaagtgctgggattacagacatgagccaccactccctgccaccacattttctttatcctttctaccactgatggacatttagtttgattccctgactttgcgattgtgtatagtgctgccgtgaacatttgtgtatatatgtctttatgacagaatgatttagattcctttgggtatataaccaataatgggattgctgagtcaaatggtaattctgtttaatcatgtcccatttgtcaatttttgctttcgttacaattatttttgggatctttgtcatgaaatctttttccgttcctatgtccagaatggtattgcctaggttatcttccagagtttttatagtttggggttttacatttaagtctttaatccatcttgagttgatttttgcatatggtgtaaggaagtggttcagtttcaatcctctgcatatggctagctagttatcccagtaccacttactgaatggggaattctttccccattgcgtatttttgtcaactttgtcaaagattagatggttgtaggtgtgtagctttatttctgggccctctattctgttccattgatctatgtgtctgcttttgtaccagcaccatgcttttgtaccagtatcatgcagttttggttactgtagccctgtagtatagtttgaagttgggtaatgcgatgcctccagctttgttctttttgcttaggattgctttggctttttgggctcttttttggtttcaaataaattttaatgctttttttttctgattctgtgaagaatgttattggtagtttgataggaatagcattgaatctataaattgctttgggtagtatggccattttaacaatattgattcttcctatccataagtatggaatgtttttccatttgtgtcatctctgatttctttcagcagtgttttgtaatttttgttgtagagatctttcatctccctggttagctgtattcctaggtattttattctttttgtggcaattgtgaataggattgcattcttgatttggctctcagcttggatgtcgttggtgtataaaaatgctaccatattttgtatattgattttgtctcctgaaagttagctgaagttgtttatcagatctaggagcttttgggccaagatcatggggttttctagatatagaatcatatcgtctgcaaacagagatacttcgacttcctttctttttggttgccttttatttctttctcttgcctgattgctgtggcgaggacttccagtactatgttgaataggactgaagtgccttgttctacttctcaagagtaatgctccagcttttgctcattcagtatgatgttggctgtggttttgtcatagatggctcttattattttgaggtatgttccttcgacgcctggtttgttgagggtttttaacatgaagtcaagttgaattttatcaaaagccttttctgtatctattgagatgatacgtgagttttgtttttagttctgccaaaccttttcttttaaagcccaacgaataaaacccatcacctttcacaagaccaccacagcaagtaggcaggaatgccagtgttaaaagtgaaatcttttgaatttgtagtacctttccttttccaaatctagctgaaatttctcacttgttttccttttgatgaagctaaccaccggcatttctcctaagaaatggatataaaaaaagtttgatatggttaaagtaagaagtgctagctcctagaatatctctggatattgctgtcccttgttacagagcatgagccctgcccaaagactggagtgtaatggcatagaaaaggtcaggagcccactgagccagaagtataggaggcttgcgacaaagtttaacaggggcctgttgctatcactgggtggagggacagatgggagaacactcacaccatggaatcttaggcagccattaataaaaataagccacactg

SEQ ID NO: 1365 - DNA, 3058 bp, Homo sapiens
acgtgagaccaccaagttcactgcttcaagcagcttagagtccagagggcatggacacatgccggagccaggacaagaagagccaccagaaagaaggctaggcattaaggaacagcaagtgcaaagttcctgagggaacaagcagacagagtctcactacgttgcccaggctgttctccaacactgggctagtgatcttcctgccttggcctcccaaagtgctgggattacaggtgtgagctgcaaggctaggtcctcgggctcctcaggccctgggccccctcccaggaatgagtcccgccgctccagcacaaaggggaagaagccctcgtcgccgctgggagaggcgccccctgagagcggcccggacgggaagctgggcccatctggagagctcatgtcacctgcagcatctgcggggacaggtggctgcgggacactctactctgcagcctgacaggggctcaccctccgcccagcacctggccctccaggaattctccacctgctgccagcctgcccggtcctgcagccagggcttcctgggccacaaagggttaatgacctgtgttttggctacccagttccgttaatgtccctggggtaaactgaggcaggaagcagaaggaaatgacctgcccagcctttggcctctgccagacaatctctgtccccaggaaagctcattccagtgctccagggccacaggccacctctgctccctgtcccctctcttcccagaacccagcagtttggcttgtagcccctcgccatctgagacagttcccagaacccaggttctcagggactcagcagttggagttgagcccagcctcttctctcaggaatgcaggaccctaaggcttgggaactgaggtatcttcgcccccaggaatccagctccttcccctgccagaagcccagatcccagcccctgacctcccgggtctctcgccctcattctcctgctacctcctgagcaggtgctttgactccaccctccagactcagaggtccccacctccaatgtcccccaccaaggattcccaccccagtccccattttccacgggactcaggcattcatgcccccacccctccggactcaggagccctgaccctcagccccccagtttcccagggccctggcgtggggcccaggacagggcgaggtaacaggttgtgccggccgcccggccgcagcgcggctcggagtttctgtttacttcccggtccgcccctggggacgggagccctgggctcccctagggcggctcaggggctggggttcaggggctcgggtcagagggcccgacacaacagctttaccagccccagccctccgggggctcaccacccactaggcacacacacccgtgctctccctcctcctctcgcccggtgtccatgtgcagccctgctcgcaggacgtgagtgtcacggtggtcccagcccagccgcccccaggccgctcccggggacctccctgacttggccctcgcgggccccgctcccccgcccccctccacgcgagagacagggacctggagaccgctccccctccccttccgcacctagctgcccaggtgttggggcctccagccccaggcgtcggaagcccagagaagcggctgggctcacccccgacggctgagttcctgccggcgcccccggttccccggcgatcccggttcccctgcccccgccccggctcccccaccttctccgccgacgcggccggaccaggccctccccaggctcgaggggcccggccctcggcgtcccccaggctctcacccgaagccgccgggctccctccgaggtccccgcggtctccggtcccctcttccggaggcggctccagagatgggattttgctctgtcacgcaggctggagtgcagtggcaccatcactgcagtctcgtcctcccaggctcaagcgatcctcccaccacagcctcccccgtagctgggactgcaggctggagtacagtggtgccatctcagctcacagcagcctccgctcccgggttcaagtgattctcctgtctcagcctgcctcccaaagtgctgggattacagagtgagccacctccccggctcaacttgttgactttcatgatgacctgatgacgaggaactgctgtcatccccatcttacagatgaggaagctgaggctcggaggcggaggggggtcctccaccttgtttggggtcccctggtcagaactggaagactccagggctccctgggcctcgtgacaggggctcctggcctggagagcaggacagatggaaggctgggagcagtggcgtgctggtaagcgtttaacaacaggctccccggctaaaacaatagccctcgctcgttgcatttgccaatatccatgatgcaatacctgctcctcggctgacttccagctactcacctggcgtcacggagtgcagaggtagaaggggctgtgcacatcagctctggctggctggtgtcagctgggtccgtgcacctctggctggggatcaggactcctgagtcttgggggactgggggctacttacttgggttctagaaaaataggaggagggtgggggctgggactcctggcttgtgggaaaaggggagcaaggactccttggaggggtgacttaggaactgggactcctgggtcctggggctgggacagggttttctgccagcagagagtaggggagccagagatttgtcttacagccacattgcccagcaagcctgacactttctcccactgcacctgtgggagcagcctggtagccactggaggactgaagacatcccagcctcccctgggtgctgctatgtgaccctctggaaatagaagctcagtgtcccctccaaatgccagtcaccctgggccccactcacacccacacgtagcacatcttgagcgcctcctgccaggctgagctcatcccaggatgaagtgattacagccctactcccagaaggttcacagtccacctgggccatgggagggagcgtagacctataaaccagaaatgaaccaataaaacagtacagc

SEQ ID NO: 1366 - DNA, 4439 bp, Homo sapiens
cttaaaaaagatccaacaaaatagaccgctagcctgactaataaagaagaaaagacagaagaatcaaatagacacaataaaaaatcataaaggggatatcaccactgatcccacagaaatacagactaccatcagagaataatatgaacacctctatgcaaataaactagaaaatctagaagaaatgtataaattcctggacacatacaccctcccaagtctaaagcaggaagaaatcgaattcctgaaaagaccaataacgagttctgaaattgaggcagtaattaatagtctaccaaccaaaagtccaggaccagatggattcacagccaaatcctaccagaggtacaaagaggagctggtactgttccttctgaaaccattccaaagaatagaaaaagagggaatcctccctaattcattttatgagtccagcgtcatcctgataccaaaacctcacagagacacaacaaaagaaaatttcaggccaatatccctgatgaacatcaatgcgaaaatcctcaataaaatactggcaaactgaaaccagcagcacatcaaaaagcttatccaccacggtcaagttggctccatacctaggatgcagggctggttcaacatacacaaatcaataaacttaatccatcacataaacagaaccaatgagaaaaaccacatgattatctcaatagatgcagaaaaggcctttgacaaaattcaacaccccttcatgctaaaaactctcaataaactaggtattgatggaacatatctcaaaataataagagttatttatgacaaacccacagccaatatcatactgaatgggcagaaactggaagcattccctttgaaaactggcacaagagaaggatgccctctctctcactactcctattcaacatagtattggaagttctggccagggcaatcaggcaagagaaagaaatatggggtattcaaataagaagagaggaagtcaaattgtctctgtttgcagataacatgcaatttttagatttagaaatatctacatctaaaatagattgagattttctaaataatatttagaaaaccccatcatctcagccccaaatctccttaagctgataagcaacttcagcaaagtctcaggatacaaaatcaatgtgcaaaaatcacaagcattcctatataccaataacagagaaccaaatcatgagtgaactcccattcacaattgctacaaagagaatacctaggaatccaacttacaagggatgtgaaggacctcttcaaggagaactacaaaccactgctcaaggaaataagagaggccacaaataaatggaaaatattccatgctaatggataggaagaatcaatactgtgaaaatggccatactgcccaaagtaatttatagattcaatgctatccccatcaagctaccattgactttcttcacagaattggaaaaaaatacttaaaatttcatatggaaccaaaaaagagcccatatagccaagacagtcctaagcaaaaagtacaaagctggaggcatcacactacctgacttcaaaccatattacaaggctacagtaaccaaaacagcatggtactggtaccaaaagagatatatagaccaatggaacagaacagaggccttagatataacaccacctatctacaaccatctgatctttgacaaacctgaccaaaacaagcaatggggaaaggattccctatttaataaatggtgttgggaaacctggttagccatatgcagaaaactgcaactggaccccttccttacacgttatacaaaaattagttcaagatggattaaagacttaaccataagacctaaaaccataaaagccttagaagaaaacctaggtgttaggaacagtttctcttcaaaggatttcacccgccttgtcctttgttctatttttaagttatctttcctgcctttaacaggcccaggcatccaccaagcttgtagctgacccacactgccttactttaagttgttaggtacaaacaataaacttcctggttctttgtcctattctaaatgctaaatctagtcaattgggatctgtttagattgtgcagtctgaccccaattaacgggggaggtgggggaggcagggaagacacagaaacaggagcggcattaggaataaaaacccctgctttcctttgttcggtgtgctcttgtgattgtgactgacgcaggcagcacccttctgcagaagtaaatttaccttgccgagaagtcttttgagtgttcgttttctttgcaactcccagctcatttctaacaatttgggggccctgcctgggatcccattcttctccggagaagggtctccggtcatcttctgggaggggatgcatcccactgacttggtgcagtggcctcaaaggctggagactgagacccacccgttgtgacaaataaacctggaatctcagcaacgcgagaagacaaggactacaaatactgtggcgaccaggtaactatgtgcacagaccaaggtaagaaaagccgctggggtggtgaagtgcttccttgatggttggagtatcttggaggttgaaagtgcgtgaatggtaacaagcactactgctgtgcagagtgagtgagtccaatctgcagttccgtggtcaactcacatggcttatggcggccctttgggggtcccgtcagggttttctactgatccatcaatgttaagagggacctaaattccctctggggaagtagccagagaagacgaagcaaaaggagaagagtgcgagaaacctccagtggttggggggcagggggcgggttgaggctataggaaaggaaaggcaagaaatctccagcaggggggcattgagcttcacacaaacttccaatagttgggaaggcaagaaacttccaataggagatattgagcctcaccccaaaacccccaagatgggaaacaccccaaataaggtagggcataaaaaggataacactagcagcaataacattccccctgatagtcccctagggcttatgttaaaatatggaaagataatgaaaggactaaacacaagaaaaagcaacagatgataaaatattgttgtctcattcggacccaggaaccaatcctcgaaccctcagttttttggccaaagtttgggtcatatgaggattggatgtgtcagctttcaatagaacatattaatagtaagagccctacctcccaagaggaaataggttatgccctatgttggtggcaaggacctgtactccttcaccccctaaagactggagggaacaagtcaaaaactaacctttggtggaaagttggttgtaatcacacctcatcaagttagaaccatcttaaatcaaaaggcaggaaggtggcttactgactcaagaattttaaaatatgaagctatcctgttagagattatttaacactatccactgatgattcacttaacccagcaggtttcttgactggagatccaaatctaaagagacctgaacatgagtgtttagatttaattaattaccatacaaaagttaggcctaatttaagagagacccctttcaaaacagggcagcacttatttataggtggctcttgctgagtaactgaaggaaaaagatataatgggtactcagtagtcaatcaatggggaagcccttgaagaagtagggcttgaagtagcccttgaagaagtcaggaagactgcccaataattggtctgcccaaacatgtgaattgtttgcattatatcaagcctaaagcacttgcagaaccaagaaggaactatttatactgattccaagtatgctttcagggtagctcacacttttggaaaaatttcgattgaacaaggctttattaatagcaaaggtcaagacctagttcacaaagagttaatcacccatgtatttaataatctccagggccaggcgtggtggctcacgcctgtaatcccagtactttgggaggccgaggtgggcagatcacctgaggtcgggagttcgagaccagcctgaccaacataaagaaatcctgtctctactaaaaatacaaaaaaattagacagtcatggcggcacatgcctgtaattccagctacttgggaggctgaggcaggagaattgcttgaacctgggaggcggaggttgctgtgagccaagatcacaccattgcactccagcctgggcaacaagagtaaagccctgtctcaaataaataaataaataaataatctccagctgccagaataaatagctattgtccatgtcccaggacacaagaaaagcctttcttttgaaagtcaaggaaataaccttgcagatcaaatagccaaacaagtggctgtttcctctgagaggcctgtttttcacttaactccttgccttcctccccctaccacagtccccattttctcttccactg

SEQ ID NO: 1367 - DNA, 4231 bp, Homo sapiens
ggttaccgccgtgtccgcaccgacccggccatcccggggctcggcggtcctctcgggctcctcgtggctcgtccgggccccgctgctagccaaagggcagagtcggaggagctgccggtgccgggcccggcaagagggcgccggtgaggagaagaagaaaatgaggcaaagattgaaaatgtgcagaaaacaggtttcatcaaaggaccaatgttcaaaggtgttgcttctagtcgatttttgcccaaaggcaccaaaacaaaagttaatttggaagaacagggacgacagaaggtgtcattcagcttcagccttacaaagaaaactttgcagaataggtttctcactgcacttggcaatgaaaagcaaagtgatactccaaaccctccagctgtacctcttcaggtagactcgactcctaaaatgaaaatggaaattggtgataccttatctactgcagaagaatcttccccaccaaagtcaagggtggaattgggcaaaattcattttaagaaacatctgcttcatgtaacatccaggccactgctggctactaccacagcagtagcatctccacctactcatgcagcaccattaccagcagtgatagcagaatcaacaactgtagactcaccgccctcatctccgcctccaccgcctccacctgcccaagccacaacactctcatcaccagcaccagtaacagagccagtggccttgccacatacaccaataacagttctaatggcagcaccagtacccttaccagtagatgtagcagttagatctctgaaagaaccaccaattataattgtaccataatctttagaagcagatactaagcaggacactatatctaatagtttagaagaacacgtaactcaaatattgaatgagcaagcagatatttcctcaaaaaaagaagattcccatattgggaaggatgaagaaattccagatagttctaagattagtctgagctgtaaaaaaacaggttctaagaagaaatcctcacaatctgaaggcatctttcttggttcagaatctgatgaagattctgtacggacttcttcaagtcaaagatcacatgatttaaaattttcagcaagcattgaaaaggaaagagattttaaaaagagctcagcacctttaaaaagtgaggatctagggaaaccttcacgatctaaaacagacagagatgataaatattttagctattcaaaacttgaaagagatactcggtatgtatcttcccgatgtagatcagaaagagagcgacggcggagcagatctcactctaggtctgagagaggctctagaactaatttatcctattccaggtcagaacgatctcattattatgactctgatcgtcgctaccataggagctccccttatcgagagaggacgcgctattctcggccatacacagataacagagcacgagagagttctgactcagaagaagagtataagaagacatactcaaggcgtacctcatctcattcctcttcttacagagacctaaggacatcatcctattctaaatctgatcgggactgtaaaactgagacctcttacttagagatggaaagaagaggcaagtattcttcaaaactagaaagagaatctaaaaggacttcagaaaatgaagcaattaaaagatgttgttctccccctaatgaactgggattccgacgagggtcatcatattctaagcatgacagtagtgcttcccgttataaatctaccctttcaaaacctatacccaagtctgataaatttaaaaattctttctgttgtacagaattaaatgaagaaatcaaacagtctcattcttttagtttacagacaccttgttcaaaaggtagtgaattaagaatgattaataaaaatcctgaaagagaaaaggctgggtctccagctccatcaaatcgattaaatgattcacctactttaaaaaagctagatgaattgcctatttttaagtccgaatttataacacatgatagccatgatagtattaaggaattagactctttatctaaagtgaagaatgatcaattaagaagtttttgtcccatagaattaaatataaatggatctcctggggcagaatctgatttggcaacattttgcacttctaaaactgatgctgttttaatgacttctgatgatagtgtgactggatcggaattatcccctttggtcaaagcatgcatgctttcatcaaatggatttcagaatattagtaggtgcaaagaaaaagacttggatgatacctgcatgctgcataagaagtcagaaagcccatttagagaaacagaacctctggtgtcaccacaccaagataaactcatgtctatgccagttatgactgtggattattccaaaacagtagttaaagaaccagttgatacgagggtttcttgctgcaaaaccaaagattcagacatatactgtactttgaacgatagcaacccttctttgtgtaactctgaagctgaaaatattgagccttcagttatgaagatttcttcaaatagctttatgaatgtgcatttggaatcaaaaccagttatatgtgatagtagaaatttgacagatcactcaaaatttgcatgtgaagaatataagcagagcatcggtagcactagttcagcttctgttaatcattttgatgatttatatcaacctattgggagttcaggtattgcttcatctcttcagagtcttccaccaggaataaaggtggacagtctaactctcttgaaatgcggagagaacacatctccagttctggatgcagtgctaaagagtaaaaaaagttcagagtttttaaagcatgcagggaaagaaacaatagtagaagtaggtagtgaccttcctgattcaggaaagggatttgcttccagggagaacaggcgtaataatgggttatctgggaaatgtttgcaagaggctcaagaagaagggaattccatattgcctgaaagaagaggaagaccagaaatctctttagatgaaagaggagaaggaggacatgtgcatacttctgatgactcagaagttgtattttcttcttgtgatttgaatttaaccatggaagacagtgatggtgtaacttatgcattaaagtgtgacagtagtggtcatgccccagaaattgtgtctacagttcatgaagattattctggctcttctgaaagttcaaatgatgaaagtgattcagaagatacagattcggatgatagcagtattccaagaaaccgtctccagtctgttgtggttgtgccaaagaattctactttgcccatggaagaaacaagtccttgttcttctcggagcagtcaaagttatagacactattctgaccattgggaagatgagagattggagtcaaggagacatttgtatgaggaaaaatttgaaagtatagcaagtaaagcctgtcctcaaactgataagtttttccttcataaaggaacagagaagaatccggaaatttcttttacacagtccagtagaaaacaaatagataatcgcctgcctgaactttctcatcctcagagtgatggggttgatagtacaagtcatacagatgtgaaatctgaccctctgggtcacccaaattcagaggaaaccgtgaaagccaaaataccttctaggcagcaagaagagctgccaatttattcttctgattttgaagatgtcccaaataagtcttggcaacagaccactttccaaaacaggccagatagtagactgggaaaaacagaattgagtttttcttcctcttgtgagataccacatgtggatggcttgcactcatcagaagagctcagaaacttaggttgggacttctctcaagaaaagccttctaccacgtatcagcaacctgacagtagctatggagcttgtggtggacacaagtatcagcaaaatgcagaacagtatggtgggacacgtgattactggcaaggcaatggttactgggatccaagatcaggtagacctcctggaactggggttgtgtatgatcgaactcaaggacaagtaccagattccctaacagatgatcgtgaagaagaggagaattgggatcaacaggatggatcccatttttcagaccagtccgataaatttcttctatcccttcagaaagacaaggggtcagtgcaagcacctgaaataagcagcaattccattaaggacactttagctgtgaatg

SEQ ID NO: 1368 - DNA, 3747 bp, Homo sapiens
cggagacccccatcggtcagctgccaggccccacgcgctcgcggtctccgcgccccgacggctgcgccatgtgtatctgcgggacggcgcactcggtgctggacgagggccccgtgcgctgccgggcgggcccccgagacctccttgaggcccgccgcccgcgggcccatgagtgcctgggtgaggctctgcgtgtcatgcatcagatcatctccaagtacccgctgctgaacaccgtggagacgctcaccgcagccggcaccctcattgccaaggtcaaagccttccattatgagagcaacaatgatctggagaaacaggagttcgagaaggccctggagacgattgctgtggccttcagtagcacagtgtccgagttcctcatgggtgaagtggacagcagcaccctcctagcagtgcctcctggggactcgagccagtccatggaaagcctgtatggaccgggcagtgagggcacgcctcccagcctggatgactgtgacgccggctgcctgcccgccgaggaggtggacgtgctgctacagcgctgtgaggggggcgtggatgccgcactgctgtatgccaagaacatggccaagtacatgaaggacctcatcagctacctggagaagcggacgacgctggagatggagtttgccaagggcctgcagaagatcgctcacaactgcagacagagcgtcatgcaggagccccacatgccgctcctgtccatctactcgctggccctggagcaggacctggagttcggccacagcatggtgcaggcggtgggcaccttgcagacccagaccttcatgcagcccctgaccctgcggcggcttgaacacgagaagcgcaggaaggagatcaaggaggcctggcaccgtgcccagaggaagctgcaagaggcggagtccaacctgcgcaaggccaagcagggttacgtgcagcgctgcgaggaccacgacaaggctcgcttcctcgtggccaaggcggaggaggagcaggctggcagcgcgccgggagcaggcggcacggccaccaagaccctggacaagcggcggcggctggaggaggaggccaagaacaaggcggaggaagctatggccacctaccgcacctgcgtggccgacgcgaagacgcagcaggagctggaggataccaaggtgacggcgctgcggcagatccaggaggtcatccggcagagcgaccaaaccatcaagtcggccacgatctcctactaccagatgatgcatatgcagacggcgccgctgcccgtgcacttccagatgctgtgtgagagcagcaagctgtatgacccaggccagcagtacgcctcccacgtgcgccagctgcagcgggaccaggagcccgatgtgcactacgactttgagccccacgtctccgccaacgcctggtcccccgtcatgcgtgcccggaagagcagcttcaacgtgagtgatgtggcgcggcccgaggctgccgggagccccccagaagaaggcgggtgcactgagggcacacctgccaaggaccacagggccgggcgaggacaccaggttcacaagtcatggccgctctcgatctcagactcggacagtgggctggaccccggccctggcgcaggggactttaagaagttcgagcggacgtcatccagtggtaccatgtcgtccacggaggagctggtggacccagacggtggagccggggcttcagcctttgagcaggctgacctcaacggcatgacccccgagctgccggtggccgtgcccagtggaccgttccgccacgaggggctgtccaaggcggcccgtactcaccggctccggaagctccgcacgcccgccaagtgccgcgagtgcaacagctacgtctacttccagggtgctgagtgtgaagagtgctgcctggcctgccacaagaaatgtctggagacgctggccatacagtgcgggcacaagaagctgcagggccgcctgcagctgttcggccaggacttcagccacgcggcccgcagcgcccccgacggcgtgcccttcatcgtcaagaagtgcgtctgcgagatcgagcggcgggcgctgcgcaccaagggcatctaccgggtcaatggggtaaagacacgcgtggagaagctgtgccaggccttcgagaacggcaaggagctggtcgagctgtcgcaggcctcgccccacgacatcagcaacgtcctcaagctctacctgcgtcagcttcccgagccgctcatctccttccgcctctaccacgagctcgtagggctggccaaggacagcctgaaggcagaggccgaggccaaggcggcgtcccggggccggcaggacggctcggagagcgaggcagtggcggtggccctggcaggtcggctgcgggagctcctgcgggacctgccgcctgagaaccgggcctcgctgcagtacctgctgcgtcacctacgcaggatcgtggaggtggagcaggacaacaagatgacccccgggaacctgggcatcgtgttcgggcccacgctgcttcggccacggcccaccgaggccaccgtgtccctctcctccctggtggattatccccatcaggcccgcgtcatcgagactctcatcgtccactacggcctggtcttcgaggaggagccggaggagacccccgggggccaggacgagtcatccaaccagcgagctgaggtagtcgtccaggtgccgtacctggaggcgggcgaggcggtggtctacccgctgcaggaggcggcggcggacgggtgcagagaatcccgagttgtgtccaacgattcggactcggacctagaggaggcctccgagctgctgtcctcatcggaggccagtgccctgggccacctcagcttcctggagcagcagcagagcgaggccagcctagaggtggcttctggcagccacagcggcagtgaggagcagctggaggccacagcccgggaggacggggacggggacgaggacggcccggcccagcagctctcaggattcaacaccaaccagtccaacaacgtgctgcaggccccactgccccccatgaggctccgtggcgggcggatgacgctgggctcctgcagggaaaggcagccggaattcgtgtgagctggggtggggctgggaccacaggtggcttctctctcgcctgctcctgtccctccagcacgtcccctgcaccacggcatagcttaggtgcgccgtcctggggtcgctgccgagagcgcctggacttcgacgtcccaccagcgggcgcctcctcccagaggcttccaggagcacgagggccttgcggcacaggactgtgccctgtactgtcccctgcaccccggctcagctgagctggggaacactgctgtcgtgtgaagtcacagtggccttgttggtgcccacagggctgtgtggatggaggaagctgtccctgcccagtgcatcccccaggtcatcacggggaagcaggaggcaggccctgccctgccctctcctcacaggtctgttgcagggactccagaaaccattctgggagccgtggatgggggcggagctggggtttggtgcagtttccagggtgcagtacagcagggcctgaatactggccctggactcccttttccagaacaccaggtgtggccacctggggctcaggtacacagtggggtctctcggaagccaccgtgtggttctttcacaggcacgtttattttgctgaaataaaaagtttttaatcggg

SEQ ID NO: 1369 - DNA, 3602 bp, Homo sapiens
cggcttatcatataacaaaatcagcaaaattgaaggcatagaaaatatgtgtaatctgcaaaagcttaaccttgcaggaaatgaaattgagcatattccagtatggttagggaagaagttaaaatctttgcgagtcctcaatttgaaaggcaacaagatatcatcgctccaagatataagcaagttgaaactgcttcaagatttgatttctctgatcctagttgaaaatccagttgtgacccttcctcattacctccagtttaccattttccacctccgttcattggaaagtttggaaggtcagccagtaaccactcaggatagacaggaggcttttgagagattcagtttagaagaggtagaaagactggaaagagacctagaaaaaaagatgatagaaactgaagagcttaagagcaaacaaacaaggttccttgaggaaattaaaaatcaagataaattgaataaatcattaaaagaggaggccatgttacagaaacagagctgtgaggaactcaagagtgacttaaacacaaaaaatgaattgctaaaacagaagaccatagaattaacacgagcatgtcagaagcaatatgagctggaacaggaattggccttttataaaattgatgctaaatttgagccactaaattattatccatcagagtatgctgaaattgataaagccccagatgaaagcccttacattggcaaatccagatacaagagaaatatgtttgccacagagagttatattattgacagtgctcaggcagtacagatcaagaagatggagccagatgaacaacttagaaatgatcacatgaacttgagaggccacacaccactggacacgcaactggaagacaaagaaaaaaaaataagtgcagcacaaactcgactatcagaactgcatgatgaaatagaaaaggcagaacaacaaattttgagagctactgaagaatttaaacaactggaagaagctatacaactaaaaaagatttcagaagcagggaaagaccttctttacaagcagttgagtggtagactacaacttgtaaataaattacgccaggaagctctggatctagaactgcagatggaaaagcaaaagcaggaaattgccggaaagcagaaggagattaaggacctgcaaatagccatagatagcctggattccaaagacccaaaacattcccatatgaaggctcaaaagagcggtaaagaacaacagcttgacattatgaacaagcagtaccaacaacttgaaagtcgtttggatgagatactttctagaattgctaaggaaacggaagagattaaggaccttgaagaacagcttactgaaggccagatagcagcaaatgaagccctgaagaaggatttagaaggtgttatcagtgggttgcaagaatacctggggaccattaaaggccaggcaactcaggcccagaatgagtgcaggaagctgcgggatgagaaagagacattgttgcagagattgacagaagtcgagcaggagagagaccagctggaaatagttgccatggatgcagaaaatatgaggaaggagcttgcagagctagaaagtgccctccaagagcagcatgaggtgaatgcatctttgcagcagacccagggagatctcagtgcctatgaagctgagctagaggctcggctaaacctaagggatgctgaagccaaccagctcaaggaagagttggaaaaagtaacaagacttacccagttagaacaatcagcccttcaagcagaacttgagaaggaaaggcaagccctcaagaatgcccttggaaaagcccagttctcagaagaaaaggagcaagagaacagtgagctccatgcaaaacttaaacacttgcaggatgacaataatctgttaaaacagcaacttaaagatttccagaatcaccttaaccatgtggttgatggtttggttcgtccagaagaagtggcagctcgtgtggatgagctaagaagaaaactgaaattaggaactggggaaatgaacatccatagtccttcagatgtcttagggaaaagtcttgctgatttacagaaacaattcagtgaaattcttgcacgctccaagtgggaaagagatgaagcacaagttagagagagaaaactccaagaagaaatggctctgcagcaagagaaactggcaactggacaagaagagttcaggcaggcctgtgagagagccctggaagcaagaatgaattttgataagaggcaacatgaagcaagaatccagcaaatggagaatgaaattcactatttgcaagaaaatctaaaaagtatggaggaaatccaaggccttacagatctccaacttcaggaagctgatgaagagaaggagagaattctggcccaactccgagagttagagaaaaagaagaaacttgaagatgccaaatctcaggagcaagtttttggtttagataaagaactgaagaaactaaagaaagccgtggccacctctgataagctagccacagctgagctcaccattgccaaagaccagctgaagtcccttcatggaactgttatgaaaattaaccaggagcgagcagaggagttgcaggaagcagagaggttcagcagaaaggcagcacaagcagccagagatctcacccgagcagaagctgagatcgaactcctgcagaatctcctcaggcagaagggggagcagtttcgacttgagatggagaaaacaggtgtaggtactggagcaaactcacaggtcctagaaattgagaaactgaatgagacaatggaacgacaaaggacagagattgcaaggctgcagaatgtactagacctcactggaagtgacaacaaaggaggctttgaaaatgttttagaagaaattgctgaacttcgacgtgaagtttcttatcagaatgattacataagcagcatggcagatcctttcaaaagacgaggctattggtactttatgccaccaccaccatcatcaaaagtttccagccatagttcccaggccaccaaggactctggtgttggccttaagtactcagcctcaactcctgttagaaaaccacgccctgggcagcaggatgggaaggaaggcagtcaacctccccctgcctcaggatactgggtttattctcccatcaggagtgggttacataaactgtttccaagtagagatgcagacagtggaggagatagtcaggaagagagtgagctggatgaccaagaagaacccccatttgtgcctcctcctggatacatgatgtatactgtgcttcctgatggttctcctgtaccccagggcatggccctgtatgcaccacctcctcccttgccaaacaatagccgacctctcacccctggcactgttgtttatggcccacctcctgctggggcccccatggtgtatgggcctccaccccccaacttctccatccccttcatccctatgggtgtgctgcattgcaacgtccctgaacaccataacttagagaatgaagtttctagattagaagacataatgcagcatttaaaatcaaagaagcgggaagaaaggtggatgagagcatccaagcggcagtcgg

SEQ ID NO: 1370 - DNA, 3312 bp, Homo sapiens
atcagctagcaagtattcacaggcacatccaacctccatccttacattccacaaggatttgagtgtctgttataggtataaaagcctgccgttggtggaaaaggaaaaggtggtccagttagacaagatgccaccggcttctgaaaccagacatctttgaaaacccacccatctacctgcaggaaaaggcaagggacctgacctcgcctgggctcagggaagaggttgctgggatcataaccccaggaagagacgggatggaaggagagcatgcagggagcagaggacaggctactctccaaggaggagagggaagaggccacagaaatggaaaaggggccaggacaagtcagtggagagatggtcagggcctggcgaggaggagcaggacaaaagcggtggagctcagccccgtggcggcagggccactcccattcatctggtcctctacttctgaagttctcgaatgcagaatgagatgtacagatgggccagcaggtgatatgttatctgtcataggttaaggcctcattattttattcatttttaaacttttttttttttgagacagggtcttgttctgtcgcccaggctggtttgcagtggtgccaccatggttcactgtaaccttgaagcccctgggctcaagtgatcctcctgcctcagcctccagagtaacgaggactacaggtgcacaccgccatgcccagctaattttttaacgttttgtagaggaaggctctcactgtgttgcccaggctggtcttgaactccttgactcaagcaatcctcctgtcttggcttcccaaagtgttgggattacaggtgtgagccactgctcccagccacaagttttattttaaatgtttacctttcaatgatcacttcgaggagatttaagcttactctttcttttttttttttcttgagatggagtcttgctgtgtcgtccaggctggagtgcagtggtgctatcttggctcactgcaacctctgcttcccaggttcaagtgattctcctacctcagcctcccgagtagctgagactacaggcatgtgccaccactccctactaatttttgtatttttagtagagtcggggtttcaccatgttagccaggttggtctcgaactcctgacctaaagtgatctgcctgcctcagcctcccaaagtgctgggaggcatgagccaccatgcctggctcattgtctagtttttaccaagaagatgatgagatatgccagagggctccgtatctgctatgagaacgtcccccaagagcagctggccgtggtgctgcagctggagctgtgcttggagctcttcttcacccccatggcggtcaccaccttctgccactggcactttgtgcagatcatgctctctggccccaagtggggacctggaggtgctgaagagccaagagactggctgccgtgaccctcttcaacttcctggtctgcttggaccctgtgctttgtctcccatggtgggttcccccagtggaagagtcaaattggtgggcaggcgcagtgttgttcagtgctctcgatgctgcattgaccccttgattttctttgtttttgtttttattttgttttgttttgtttttgagatggagtcttgctctgtcacccaggctggagtgcagtggtgtgatgatcttggctcactgcaacctccgcctcctgggttctcctgcctcagcctcccgggtagctgggattacaggcacccaccaccacacccggctaatttttgtatttttagtagagacgaggtttcaacccctactcaggctggtgtcaaactcctgaccgcaagtgatctgcccaccttggcctcccaaagtgttgcaattacaggcgtgagccaccatgcccagcctaaccccttgattttctgtttctcttcctccaccgtgcgcaaagcctttgacagagggccacggaggtggcagcacggcgggggtctcactgtctgggtggtggtgaaagctctggagagccagctgcagagagaagatgtggatcttagggacggccaatgtcaccttcacaggagattagaggcgccagcttggggtaaccttttggggaaggagggctcaaaaagaggaacaatgaaacagaactaaggtgagttctcctgtgcccagtttcagaggtcaaggagagtagtagatagctcaaacccaactcagccattgagtgagtgttttcattttgttccttggggtctatgatattttctattttcttttctttccttttgttttggtttgtttgtttgtttggttggttggttggttggttggttttagagacagggtttccctctgtcacccaggctggaatgcagtagtgtgatcacatcacactgcagcttctaactcgtgggttcaagccatcctcctgcctcagcctcctgagtagctgggactccaggtgcacgccaccatggccggctaattgtttattttttatagagacagggtttcactatgttggccaggatgttcaacaacttctgccttcaagcgatcttccctcctgggcctccccaagtgctgagtttacaagcatcagccaccacacccagcctatgacattttcttcattatggctggtactgcctcatgaaaagggggttcctcatgctggatctgaacaacccagcacaggcaagtctggggagcaaggcaggagcctgcatgtggactcaaaggaccggcacccgaaacaaagcagtggctggcacaggtggacaaaccaggcaagaaaagcaactgtccttcggagcagagtccacgtgatgggaagaaacagacacagtctcactctgttgcccaggctgaagtcaacggcatgatctcagctcactgcaacctccacctcctgggttcaagcaattctcgtgcctcagcctcccaagtagcttggattacagtaaaagctgccaaggtcctcttcaacgtgatggcgtaaatccagctctttctgcaagaaggctcaccagccttcccaccagctcttctccccaccccagccctgcagccctgcagcctgaccctaggtaatgagtggtggggagtgacccaggcatgcacgacctgcccagaggaaagggagttcaaagaaggacccgagaccctcacaggaacctagcagattggcacaagtgccagatgtatccaggacagacactttccccaggactccaggggtaaaggagtgccccacctctccactccttgcctttcttaactgaattcagattgtcgtgaacattcaagaaaagcattgtggctg

SEQ ID NO: 1371 - DNA, 3528 bp, Homo sapiens
tttagaataaatattactagacctaagaaaagagatacacagctgtacaataatcatggaggacttcaacaccccaccgacagcagtaagcagattagttaggcagattattaggcagaaaactaacaatgaaactgtggactcaaactgggctcttgaccaaacagacctaatagatatctacagaatactccacccagaaaccacagaatgtacatttttctcatttgcacatggaacattctctaaaattgaccacatgctcagtcataaaataagcctcaataaatttttaaaaatcacaactatattaagtgtcttctcggaccactgtggaataaaattagaagtcaatatcaagaactctcagaaccacagaggtacatggaaactaaacaatctgctcctgaaagacttttgtgtaaataacagaattaaggcggaaatttaaagaaattcctgaaacaaatgaaaatagaaacataacataccaaaacgtctgggatacagaaaaaacaatgttaagaggagagtttataacactaaatgcctacataaaaagagagaaagatctcaaattaacaagctaaaatagccaaacacactagaaaagaacaaaccaaacccaaagctagtagaaggaaataacaaaggttagagaataagttaatgaaattgggaccaaaaaaaccatacaaggaatcagcaaaattaaaaagttggttctttgcaaggacacataaaaatgatagattgctagttagattatacaagaaaaaagaagattccaataagcacaataaaaaattacaaatgagacattgcaaaggataccactgacataaaaaaagatcctcagaatatgtttgtgtgcataaactagaaaacctagagaaaatggataaattcctggaaacacacaaccttccaagactgaatcagaaagaaaccaaaagtccactagggcagtgccaacaggaaatatgggattgaagcctccacacagtccccactggggcactacctacaggagctgtgggaatggggccgccacctcgagatccctgaatggtagagccacgggaagctttcatcctgagcctagaaataccacaggcactcaactctgatccaagacagcagccatggtgactgtacactgcaaagccacagaggcagagctgcataaggtcttgggaacccaccccttgcacaagtgtgccctggatgcggtacatgaaatcaagaattattttggagcttgaaggttttatgtttgccctactgggtttcagatttgcctgaggcctgttgcccctttcttttgcccaacttcgccatttgggaattggaatatttacccaacacctgtactgcgttgaatattggaagcaaataacttggctttgatcttataggctcacagatggaggaacgtaccttgaagttcagatgagatttcggacttttgagttgatgctgaaacagcttgagatttttggggactactgagagatgataattgtattgtgcaatatgagaaggacatgagatttggtgggcataggtgtgaaatgacattgtttggatgtgtttaccctccaaatctcttgttgaatgtgatcttaaacgttggtggtgggcctagtggaaggtgttgaatcatgggggtggactcttcataatttgcttagctccatccccttggtgatgagcaagtccttgctctgttgtgtcacatgagagctggttgtttaaaacagcctgccgtgttccccttcttgctattcatttctctcttgacacgtgatacactggccctcactttgccttcctctgtgattggatgctttctgaggtctcacccaaacctgagcaggtgctggtcccatgcttctactgcctgcacaactataaaccaaataaatattttttctctataaatttaaaaaaaatctgaataaaccagtagttaattatgaaattgaatttgtaataaaaatatttatcaggcaggagaagcccaggactagatgaattcacagctgaattttaccaagcatacaaaaaaatagatggtatcaatcttactgcaaccattctaaaacattgaggagaaggaattcctctctaactcattctacaaaaccagtatcatcctgacactaaaatctagcaaggaaacaacaacaacaaactacaggccaatatctgatgaacatagatgcaaatatcctcaacaaaatgctagcaaaccaaatccatcagcatatcaaagatgtaattcatcatgattacatgggttttattcctgggatgcaaggactatttaacatatgcaaatcaataaatgtgatttaccatataaacagaatttaaaacaaaaatcatatgattatctcaatagatgcagaaaaaaatattcaataaaattcaacatccttgccaggtgcggtggctcaaacctgtaatcccagcactttggaaggcagaggtgggccaatcaacagaggtcgggaccagcctgaccaacatggagaaaccccatttagaactaaaaatgcaaaattagctgggcgtcgtggtgcatgcctgtaatcccagctactcaggaggctgagtcaaaagaatggcttgaaccggggaggtggaggtggcagtttgccaagatcacaccactgcactccagcctgggcaacagagcaggactccgtctcaaaaaaccaaaccaaaccaaaccaaaccaaaacaaaaaaaaccctgaaatcatatcaattattttttctgagcagagtggaagagtattaaaaaatcagtaacaggaggaatttttttcctgaccgtctttggctccctctctcaccaccctttttcttcctccatctaccccaaaactttttccccaccattttttccccactgcctttttgcaaagccttctatactttaccgctcacttccattttccccacccatctaccccaaaacttttccccaacgtcttttctccctctccctggccagccttttttccacctcctgctctcatcatcctcttttgctccttcaactcccaaaaacatttccctcatcttttcccaaagccttctccccactcctgctgctcgccaccctctctttccccttccatctacccaaaaactgtttccctatcatctttttctcccatcctccttgccaccctttcccttctccatctaccaaaaacattttcccgccgtctttttgcaaagcctcttctctcctcctgctcaccacgctcttttaacccatctacctccccaatttttccctgccaccttctcacaaagccttccccgcttcccgctcaccctcttctttcctctgtcctgcttgccaccctctttttgccttccatctaccccgaactattttccccatactccttacactattcctcatcacccaactaaaaatattaaacacaaactaccacctacctccctcaccaaagcccataaaaataaaaaattataacaaaccacc

SEQ ID NO: 1372 - DNA, 3921 bp, Homo sapiens
aaaatgaaaaaggctgactctaacaagtattggtgtccctgtagagcaactggtggggtataaattggtataagtactttgaaacactgttcagcagtacctggtaaagattgacatatggatataacctgtgagtcagcatctcctctctagggtgtatacctgtagatatcaaatgacatgtaaaaattgtgttcacatcagcacttttcaagatagccccaagctggaaacaatccaagtgtcatcaggagtacagcagataagtaaattgtggcatattcatacattggaatactatatagcagtgctttcttaacctacctgtaggtgaggaaccagatttttttccctaaaaatctgtcaggatgaaactcttgtgtaatacaatattacatacaacgccaaactgctcaaaagtttctaaatgttcacacataccttctgtactcatggtgttgcaggccagtgatgaacagggtggggaccagcagtggtacacaaacatacttcaaatagcactgctctcaaacaatgacaaagaacagactgcaactacacagagtagtgtgaatgaatctcacaagccaacacaagagtctgtattttatgattccatacgtgtaaagttcagtagcaaccaaaatactaacctgtgacattaacaagttagaattacccttgaggagcagaagatggtcatttgtagggggtatggaaagaattctgggattcttaatcttggcattgcatgatttttatgttggctatatgggtatgctcattttgtcaaaatttagctgtgtgcttatgatttgtgcacttttctgtatgtacattatacttaacatttacattaaaatttattgatgacctattaaacacacaccctctttcctcattaaggtagtagattagtggaggaaacaaagtgtatgcaagtaaacaaatgtgaaattacaaattatgatttcatgagagaaaaaagagtcttctcggagaagatactttagctgaaacctggagtatgcaaaggaaccagcgatgcaaagagcagaggcaaacaatccagggattttggtagttgttttgagtagagaaatagagctaatttagtggatttagagtaaaagaggacattgtagacatcgggtacaacttgggagttgatgttatcaaaactggaaaagagtgattctcatcagttccgtgtaatggcagctgtccttcgtcattgtttactaatcgtaggtccaactgaagacaaaacagaagagctacacagcaatgcagtcaaccttttaagcaatgttccagtctcttgtttggatgttctcatttgtccgttaacccatgaagaaacagcccaagaggcaacgactctagatgaactgcccagtaataaaacagctgagaaagaaacagttttgaaaaacaataccatggtatacaatggtatgaatatggaggccattcatgttttactgaattttatggagaagagaatagacaagggaagcagctatagagagggtctaactccagttctcagcttattaaccgaatgttcccgagcccatcgaaacatccgaaaatttctcaaagatcaggttttaccaccgttgagggatgtgacaaatcgacctgaagttggctcaactgtgagaaataagctggtgcgcctcatgacacatgttgaccttggagtcaagcaaattgctgctgaattcctttttgtcctttgcaaagagagagtggatagtctgctgaaatacactggctatgggaatgctgcaggactgttggcggccaggggcctcttggctggaggaagaggagataattggtactcagaggatgaggacacagacactgaagaatacaaaaatgcaaaaccaaactccattgaatttgaggagagaagccatctctcaagaggcaaataagcatgatctacatagttaatacatctaccttcccttatactttcttctaaggcctgattttctttgcttgggaagtgcattaatcttatcactggtcatttagaggaaccaatgccaaaccccatagatgaaatgacagaagaacaaaaagaatatgaagccatgaaacttgtcaacatgcttgataaactttccaggagagcagatgtgaaggacctgcaccaggatggtggttagcaacagtggcccgtgccaaagcacttaccaaagtgatgatgactaagaccctgtcattaattccatgtgtcaatactgccctgtagtacacagagcagacaagaaagaagagcccttgaaaacaagggaatgatttttgagtcgttatcaagctaagtggcaagcgggaagctgaaactcgtatagttgaacattcttggaggcttatctcttccctggccagatgcctgatcagatgagaagcccgccatgatactgtcacagtgcctagaatgggctctttatccagtagacaccactgtactttttgatacgagggcagtcttaacttgtgttaaggcctgtgtgtagcattgaagagaggagttgcttaaaccaatgggactaaaacctgatgggacaataacgcctttggaggaagcactcaaccagtactctgtcatcgaagagaccagctctgacacagactaaaagcatcacctgctcaactctcaatattgctttatcagcatcttttctctgtagctccaggggaatcttttctctaaaacatttatgcccttgctttggctagaaacacattaactggtttactcattgagaatccagcatatttaagaggtgaccctgtgttttttgtgatattgaggcattcatacagagctgcagttagacggggttacgggggctaaaagcagaaaaaaaattccatttcatcgggatggaactgaaggattttattctataaagcggccctggttgaatctggcaattctttttgccaagatccctagcagaagatttagccatgtccttcccctcacttgtgtgagtggccccttctgaatctctccagcagccagaggcacgtgagaagcagaaagagctggtaaataaagccttgggcaagcgacttcttagatcagaactcaccaaatggaagcctagcagctgctccataaacctagccccattcttcatatcaattttgtataaatatatagaaacacacacacagcctcagacttacaaactgattatactctaaaagtttgtatgtcagttagctaaaacttcagaatacatttctccctataaagagttataaatgatggtttagttctcaggcagctacaaatgcctatttattccctaatgtacctgaacactagtaccatagaactgaaccaccatctgtatcagcgcatggggagtgtgcattctgaggtctaacccggggtgccaggaacacacacatcctccatcccagcatagagaatggggactccctgagtaatgggagttctttcatggcctctgcttggggtgggggagtcagcagcacccatttgtacatataggtcattcatacatcacattttaaattggggactgtgtgtgctggtgtgtgtgtgagttctacgtttctaccatatgtgatcagtttaatagtaactttatttatttaaaaaaaagaaacacaattagttactgttaaactgataaagggtgtttatttttacttttagaattggtcctatgaagaagtagaaagtgagtcatgcactagacagtgggcctagctcatcagtggctaaagttgaaaaggggttggtttcctgtatatatatgtatgtatatacacacgtacatacattcatatatatacatatatacataatgtgcttaaccactgccttttaaaactttaaattaaataaaacattggggttgattc

SEQ ID NO: 1373 - DNA, 3211 bp, Homo sapiens
tccctgggtctgcggctccacgaccctcaaaccagaacaatacctctcctccctgggtcgccagcttcctgaccctcgaactaaaacaacaatgctcctccctgggtcagcagctccacgaccctgaaactagaacaagacctctcctccctgggtcgccagtttccggacccttggactacaacaaaatggctcctccctgggtctgcagctccacgaccctcgaactcgaacaagacttgtcttccccaagttgccagctaccagaccctcgaactacaacaacattgctccaccctgggtctgtagctccacgaccctcagaccggatcaagacctctcctccctgggtcgccagcttccggaccctcaaattacaacaaaattgctcctccctgggtcggcagctccacgaccctcacaatagaacaagacctctcctccctgggtcgccagcttccggacccttgaactacaacaaaattgctcctccctgggttggcagctccacgaccctcaaactccaacaagacttctcctccccgagttgccagctgccagaccctcgaattacaacaacattgcccctccctgggtctgcagctccacgaccctcagactagtacaagacctctccctgggtcgccagcttcctgaccgtcgaactacaacaaaattgctcctccctgggtctgcagctccacgaccctcagaccagaacaagacctctcctccctgggtcgccagctttctgaccctcgaactataacaacaatgctcctgccgcagtctgcagctccacgaccctgaaactagaacaagacgtctcctccctaagtctccagcttctggatcctcgaattgcaacaacgttgctcctgcctgggtcttcagctccacaaaaatcaatctagaacaagacctctcctccctgggtcgccagcttcctgaccctcgaactacaacaaaattgctcctccctgggtcggcagctccacgaccctcaaactccaacaagacctctccctgcatcgccagctttctgaccctcgaactacagcaacgttcctcctgcctgggtctgcagctccaccaacagcaaactagaacaagacctctcctccctgggtcgccagcttcctgaccctcgaataacaacaaaattgctcctccctgggacagcagctccatgaccctcagaccagaacaagacctctcctccctgggtcgccagcttcctgaccctcgaactacaacaaaattgctcctccctgggtctgcagctccacgaccctcaaactcgaacaagacttctcttccccgggttgccagctaccggaccctcgaactacaacaacattgctcctccctgggtctgtagctccacgaccctcagaccagatcaagacctctcctccctgggtcaccagcttccggacccttgaactacaacaaaattgctcctccctgggatggcagctccatgaccctcaaactccaacaacacttctcctccccgagttgccagctgccagaacctcgaattacaacaacattgcccctccctgggtctgcagctccacgaccctcagactagtacaagacctctcctccctgggtcgccagcttccagaccctcgaactacaacaaaattgctcctccctgggtcagcagctccacgaccctcagaccacaacaagacctctcctccctgggtcgccagctttctgaccctccaactgtaacaataatgctcctgcctcagtctacagctccacgaccctgaaactagaacaagacgtctcctccctaagtctccagcttccggatcctcgaattgcaacaacgttgctcctgcctgggtctgcagctccacgaacatcaaactagaacaagacctctcctccctgggtcgccagcttcctgaccctcgaactacaacaaaattgctcctccctgggtcggctgctccacaaccctgaaactcgaacaagacttctcctccttgggttgccagcttccggaccctcaaattacaacaacattgctcctccctgcgtcggcagctccacgaccctcaaactagaacaagacctctcctccctggatcgccagcttcctgaccctcgaattacaacaaaattgctccttcctgggtcggcagctccacgaccctcaaactagaacaagacctctcctccctgggtcgccagcttcctgaccctcggactacaacaaaattgctcctccctgggtctgcagctccacgaccctcaaactcgaacaagacttctcttccgccggttgtcagctaccggactcttgaattacaacattgctcctctttgggtctgtagctccacgaccctcagaccagatcaagacctctcctccctgggtcaccagcttccagaccctcgaactacaacaaaatagctcctccctgggtcggcagctccacgaccctcaaactccaacaagacttctcctccccgggttgccagctgccggaccctcgaattacaacaacattgctcctccctgggtctgcagctccacaaccctcagaccagaacaagacctctcctccctgggtctccagcttcctgaccttcgaattacaacaaaattgctcctacctggtttggcagctccacgaccctgaaactagaacaagacctctcctccctgggtcgtcagctttctgaccctcgaactacagcaatgttgcttctgcctgggtctgcgctccacgaccctcaaactagaacagcagcaccagctgcttcctggacttccagctcaatgactcgcagacttcaaaggcagcaacggctccacccccaggctccatctccaacaccctcagatctgagcagcggcagcaccagctcctttctgggtcttctgtttcacgatccttaaattagaacagcagcaccatcttctccctgggtctccagctccacgaaactcaagctagaatagcagcaccggctcctctgggatcttcagctccacgaccctaagacatcagtggcagcaccggctcctcccctggactccagctccaggaccctcaaacttgaacagaaacaccagctcctccccaggcctccagctccttgaccctcataaacaatcccttctcatgaaatgtagcagtcaggaaaactgtagaggaagtaaataaataaatgttttcctttc

SEQ ID NO: 1374 - DNA, 4427 bp, Homo sapiens
aaatggattttggtgtgatatcagttggtagtactgtccctggcaaacagacgcataactgtgcattgttctttgggattttgagagccttcatctcaatttcaactttaaagcagcttaatctttaaggaacatatctctgatctgggtaatttgtagaacttaatttgagggtcattacatgtgaggatagcaggagttgaagatgccaaggacctgaagggctactggagggacaggtgaagtgatttgaagatgtagcattttgaatctctttctggcccatcctctgcttcacaccagaatcattgtgacctgtagacctgcaaaacaaaggaccaaaggttagcatgcagaagtgaaagtgtcaataataaccaaaccactccatcaagttaggtctggggaaaagcagcagcaaaaatgagttcttacttctgggcacaaaatgaaagtaacagacctgatttactctgcgggcagccagctgactaccttgttgaagagaaacatttcacaacgcttgtatgcttcattgttgttttgggagggcttttgaagatgtgtttaaagaattgtgaagtcattgttttgacgattctttctctatcaggattcgtgataggacacatggcctacaattctgttgaggtgcaccaaattgtctaccctcttctaagaacatcaagtttttcactttattcttacttttcacctttaattatatttatggttgctttggatgtagaattttatacactcaagaaaatgttttggcaggtcttgttaactggattaattagcttttctacagcaagcatcataattggatatgtcgttataaaattcaataaagattcatgggatttgcaatcttgcctactctttagcatcacccttggcattatagatcctcttcgttctgtgaattcactaaaaactattggcatttctaaaatatacattgatctcattagaggagaatcattgatcatttgtagcatcgcatcaattttttttggaaattttcggggcaacagaatccacttttctatttttagagatttacatgtaggcattgaactcagctatgacattttgggaagcataatatttggatattggtgtgcaaaaatcattcagtgtatattggctgacgtttttagcaatatgctgactaatatcattctctgcttttcaatggtgtacatgactttctatattgtggaatttttaggaatgtcaggcactcttgccttagccgctgtaggactgaatttagattctttaacttttaaaccgaagatcgaacttgtaattactaagttcttaagaattttttcatctgtatatgaacatttaatatatgctttctttggcattgtgattggatgtggagaactcagccactatgaatttcacactatacctttcatattcattttatttacaacagtgaatttggtaaggttgcttactattttgttagtgagccctattttgatgcattcaaattatgaatataattggcgatggggagttgtaatcacgtggtctggaattaaaggagtttttaatttactctgggctcctgatgtttataatctcgctgaacgaaaagtggaagtaccacaaatgtttatactctatgtacaagtaatatcattattgacaatgggaataaattcatacgtgatgactcagtcagccaggaagttagatttgtgtgttctttccctcccaagacaaatgatcttgcaaaatgccactcagcacatacaggagatagtacagaacacaataactttatttaaaacagaaaaaattttgacaaatgttaactggaccttagtagaagataaaacgaggatcgaatacattcctttttcccacgtttcacataatgatatgaagacagaatccacaacagatgaagctttaatggaggaagccagattgcatgtagctgcaatacaaatgagtagctttgaaaaacagcgtaacaatggaattcttgaaatagaggcagcccggatattaattggtgcagcaaaatgctattactccatccaaggaaaattcatgagtatttatgatgtttcaacttatatgagaactagaagttggcttataaagtttaaaaatgttttaactttcttggaatattgtatagaaaaggtacattttattccacctgagagtaatacatttctgacttttatatttcacatagtattttctgaagaatttgaatatacaggacagattataaatttgatatatatttatcctatgataatacatctgtggccaatggcaagaggtttaaatgtatcagcactgatatcaataaactactattttatgtttttatatgtattagaatcaacattgaagataataattttgaaaaggaaatattttcaacaatgttggaatactttggaattttttatcctggttattggaatcattgatatcttttgtgtatactttgtgaaattgagaccagacaacttggctcttatacagcttacagtaataatgggatatttaagaataattaggtttcttcctctcttcaagataatagtaccaatactgataagaattgcagatgtgcagatcaaaaagcgcctcagcttgatgtatagtattacaaaaggctatatcaaaagtcaagaagatgccaaacttctaataaaacaaatagctgtctgtgaatcaatatatcagaaactatgtgaaattttggaaaccaacaaacaggatgctgtcaaagaattagtactcatggagcatgagggtcgtgatgttgtcattgctttgaagactaaacaggcaatccggaatgtgattgctaaagctctaaaaaatctcaccttcctttgttcaagaggcattattgataagcatgaagtcattgagataaataaggtacttcttaaaaaattaaaagcactaaataactttccaaaggcaatcccacccccaactcctgacatataccttcacaacatcatttggctggaaggtaaagatgttctcattgacttcttcaaggaaagagccaaacttgcctgttttgactctggagataccatttgtaaaggaggtgaaatgccacaaggaatctacttaattatttcaggaatggcaattttgcatagtttatctcctacctttggaatagagagtaatcaaaggtgtgatagagggtccagagacatgtttacagagttctgtactactggggacataattggagagctaagctgtctgcttaagcgtgaaattgaatataccgtcatctgtgaaactagtttacaggcctgctttatctccctggaggatttatatgaaggctttgatgccttctggccatctctggaatataaaatatggctaaagcttgctctcagtactgcctatcagtattttgaatcaagtcttattgatgaggacttaaggtttcagaactgtgtgatgttcaatcaagcatatgtggaaactttatcaagctatagtgacatgattattgataatatgaccatgaaatttgttatcattgtgtatggcagtgtaattgatactaagacagaggaaccatattttgcaccttgcattatacctacaacctgtgagcaggttcagggaacttctgatttaagcaagctgctgataatccaagcatctgagcttacccaaagaaatagtaacaccaatgtcatggcctcagtcaacacggtctttgaacaaccaggaaagaatataaatggaagacaaaagatgagttgaaaactggataccattttagaaaagggtattaatgatacaaatatgatgtgtggagtcaggttaaagaccaaactactttcctcgctcaaatactaaaggattatctgcaaggagtttacttagaagctactgaaacaggttactgctgcatttagtttataagcaatggatggacttctgtaaaacttcttaattttaagtagttgcattatatttgggatgttaaaaaagtcttcaggataatataaaatacactgaaacatatgtcctaccaaatgaaaccctgtttccagctaagagcaaattttaacatagtgcattataaaaagtgttgtataactgatatgttactctctaaagcatagaacctgtaattttcatttgtgaaattgttataattagtgcctccctaatattttcccgagtatagctattctccccttcccagtttggtaaatattgaaaaacagaattatattccacaatcttagtaactttcagtaagtaagtaacttttgctttcagtgaaatttaggagaaattaatattctcatattgcatagtactgtttgatgtcacctttcattttatttttaaaaatcaaataaagttgagttttatggttgtct

SEQ ID NO: 1375 - DNA, 3619 bp, Homo sapiens
actgtccagtagttggaggtcacacagccccttgccttattctcaaaccctaaccacatggctggatattcctgaaatgcattcctaaacctctgctgctgagaataattggacctgccatctattcccagtttaactgccctgtataccaaacaaatccaattcaagccaacaggcaaagtataggctcagacagagcccatcctatgtgcaaggcggtgagcaggggtggaaaatctcactgtgactcatccagctgatttctggagcacactaggtgatgcccctcacttggcacccgtgttggcgctggcatcatggacaatagaaacacccagatgtacacggagggtagaaccaaggctccagggacgcagccaagtcctggcctgaggatcaccataaagagggctggtgttgagcccatcataccaggagtcagcaaggtcatgtttccggatgcttcggaagtgggcagcaagaagcacctctcatcagcttcacgagggccagagaaggggcccagactcagagatgcatttgagaaggggccttcagagctcagaatccaggagcaggggcctccagcaagaccagggaagaaacagccctcttgggtcccccaggaagggtcccaggagctgcaagcaggccaggatcagagtgagctggggttgctgccttcctgggttcctgaagtacctgaagggctgcagcagctgggctccggaaaggagatcaagggccagcaggggaggcaacggaaccggggaatcggggaggatcagcctcctgagagctgccagggctccggatatcaatccacccccagtcaccaggcagacatggtgcagccagcagagccttgctgccgcttggccagccatggccagccactgggaggcaagcaccccaaggaggcaggtgtcccacacatcaggccacaggaggctccgccagagcccagcccagggggacatggggacagctctcaggaagcaatgcccccaatgtccgtcgtggctccagaggaaaagacagtcaaccccttcctgccatccacgcctggacctaaaaaagcaaaaggagggagggcagacaacaggcatgaacaaagccaagtggtgggaccaggagtaactcactcaagaccatggctcagccgggcgcggtggaacacgcttgtcatcccagcactttgggaggccaaggcggaggatcacttgaggaggtgagggacattggagagaggcgggagccagaccgtgcgcagcagcagcctcagaagcccgcggtggctgcagggacacagagcctcgggaacttccggcagggcttcatgaagtgcttgctggaggtggagaaaatggaggcctcccatcggagagcctcgaaggcccggtcccagacagcccagaagtcgcccaggaccctgaccccggtgcccacctcagctccaagcctgcctcagacccctgcctcggtccctgccagcggcccatcgtgggcccggctgccagctcctgggccagaacctgcccccatgggagccccggtccccacctccatgccttgccctgtcctgctgggccctgccctggacctgggctggagaaggatggaactcttgcaccggagcagcgagagaaccctgagctacgccaaggcgcggcaggagccggaagagcagagcctccaaaagctttatcaaaaccgggagaagtccgaggagcaactgaccctgaagcaagaggaagtagagacagtttcaccatgttggccaggctggtctcgaactcctgaactcaagtgatccacccacctcagcctcccaaagtctggaattacaggcgtgagccaccgcgcccagcctcgtgctaggtcttctgactcgaagtccagcgctctccctgtgccagagctgcctctctgagagaatgacagatgccctgcacagtgctttagccttccgcagctactttgagatcttcaatggtcctggtgaggtggatgcacagagcctgaagaatatcctgctcctaatgggcttctctgtgacgctggcccaggtggaggacgccctgatgagtgctgatgtcaatggagatggtcgtgtggacttcaaagacttcttggctgtgatgacagacaccaggcgcttcttctgctctgtggaacagaacgccctgtcggacatggctccccacaatccccacactctactctttgagatcctgtccctgctggtagagatgctggccttaccagaggcagtcttagaggaaatcacaaactactaccagaaaaagctgaaggaaggcacctgcaaggcccaggagatggaagcggccgtaggccggctgcggttgcagaagcttccctacaacccccagcaagaagagagctcagaagttccagaacgaaaggtcctcagtatcctgagccggctgaagcagcagaactatggcagccaggccaagggagctgagaggccagtttcccacttcgggcttaactgtgtacatcagaaaacaggctgataatcactattttccatccaggcctatgacaatggcctcctgcgttggactcctcccctcctgccttagcctgagcacagctcccaacctgcagagcccctatgcccaggtgccctgcatcctgctctgcccacagctggacaagaagatggtccgtaggcagccgagcaaccactatgcactagaccagtgcacaccccctggcctggatcctgacatccgcagccccttcttccagtcaggatctcaaggaaacagggaaccaacgagggagtgagcctgtgagactcagcttgccaccttggccaccacgtgctgccctcatcacaaaaaccacaccaaccactccgaaacgtatctgctggtcaggagcagggaggctgtctggctggctgagggataaggcgcagtgcaacggaagggatcaggaagcctgagaggagccaggaaatgtaccaggtatagttactgagctggggccaccaatggagatggagcactgcagacccctaagagttcaagccatgctggagtgggaagacctatccaccttctgaacatacgaggcagaaggctcagagtcctggaggcagactctctcctggttttccttgtgctgatggcaaaatactaaacaagtcttctctccgtcacttctaagcccagggatgcaatctcactccctggcactctgctttcttctagaagtagtaagcctggctggtagggaaccaccctgaggggtatgggaaggggaagtcggttcactttccctatctcccaaaatactagaggtggggttggcaccctccccaggctctccgagcctacagagctagcccagtctccaggcaaggcccagatgccctgggacttagctcggggagggaggtataggcatggggtgctcgtctgtcctggcggctgcagagccctgccccttttctgggcggcagtaggaatacagaagctaagctcaccaaaatcctattggttaatgtttctagtgaatttcccagaaacatttttaagtagactaccaaactaccctttcttaattaaaaattcattaaaccact

SEQ ID NO: 1376 - DNA, 4653 bp, Homo sapiens
aaaaaaagacacagttaacaggcaagcagccatcttatctcctgtctgagccactctttcttccacttttgtcaccctttcaagtcactaccgagcaggctgagcagatgcacttatccaagatgagtagaatgcaatttgcgtgggagcaggggacaagcccatgaatgagtatcgctccgttgtgtactatcaagtcaaacagccacgctggatggaaacagtcaaggtggctgtccctattgaagacatgcagaggatccatctgcgattcatgtttcgacatcggtcatctctggaatggggacagcaagaagatggaggatgccagcgcatacctgacccttccttcttatcgacaccatgtggaaaacaagggggccacgctgagcaggagctccagcagtgttggggggctttctgtcagctcccgggatgtgttctccatttccaccctggtgtgctccacaaagctcactcagaatgtgggcttgctgggtttgctgaagtggcgtatgaagcctcaactgctacaggagaatttagaaaagttgaagattgtggatggagaggaagtggtgaagtttctccaggatactctggatgccctcttcaacatcatgatggagcattctcaaagtgatgaatatgacatcctcgtctttgatgccttgatttacataataggactcattgcagaccggaaatttcagcatttcaacaccgttctggaggcttacatccaacagcatttcagtgcgaccttggcttacaagaaattgatgacagtgctgaagacttacttggatacctccagcagaggggagcaatgtgagccaatcctaagaacgctgaaggctttggaatatgtgttcaagttcattgttcggtcgaggacattattttcacagctttatgaaggcaaagaacagatggagtttgaagaatccatgagacggctctttgaatccatcaacaatctgatgaaaagtcaatacaaaactaccatccttttgcaggtggcggctttgaaatacatcccatctgtcctgcatgatgtagaaatggtctttgatgcgaagttactcagccaactcctgtatgagttctacacctgcatccctcctgtgaaactccagaagcagaaagtacagtctatgaatgagatagtccagagcaacctctttaaaaagcaagaatgccgggacattctgcttcctgtcatcaccaaagagctgaaggagctgctggagcagaaggatgacatgcaacaccaggtcctggagaggaagtactgcgttgaattgctcaacagcatcttggaagtccttagctaccaggatgcggccttcacctaccaccatatccaagagatcatggtccagctgctgcggacagtgaaccggacagtcatcaccatgggccgggatcactctgattagtcactttgtggcatgtatgacagccatcttaaaccagatgggtgaccagcactactccttctacattgagaccttccagaccagctctgaacttgtggacttcttgatggagaccttcatcatgttcaaggacctcattggaaagaacgtgtaccctggagactggatggccatgagcatggttcaaaacagggtcttcctgagagctatcaacaagtttgcagaaaccatgaaccagaagttcctagaacacacgaactttgagttccagctgtggaacaactattttcatctggcagtggcttttatcacccaggattctctgcagctggagcagttctcacacgccaaatacaacaaaatcctgaataagtatggggacatgagacggctaattggcttctccatccgtgatatgtggtacaagcttggtcagaacaaaatctgcttcatcccaggcatggtaggacctatattagagatgacacttatccctgaggctgagctccggaaagccaccataccaatcttcttcgacatgatgttgtgtgaatatcaaagaagtggggatttcaaaaagtttgaaaacgaaatcatcctgaagctggaccacgaggtagaagggggccgaggcgacgagcagtacatgcagctcctggagtcaatcctgatggaatgtgctgcagagcacccaaccattgccaagtcggtggagaacttcgtgaacctggtcaaaggcctcctggagaagctgctggattaccggggtgtgatgacagatgagagcaaagacaaccgcatgagctgcaccgtgaacctgctgaatttctacaaagataacaacagggaggagatgtacataaggtacctgtacaaactccgcgatcttcacctggactgtgacaattacacagaggctgcctacacgctccttctccacacctggcttctcaagtggtcggatgagcagtgtgcatcacaggtcatgcagacaggccagcagcacccccagacacaccggcagctgaaggagacgctctacgagaccatcataggctactttgacaaaggaaagatgtgggaagaggccataagtctgtgcaaggagctggcggaacagtacgagatggagatctttgactatgagctgctcagccagaacctgatccagcaggcaaaattctatgaaagcatcatgaaaatcctcaggcccaaaccagactactttgctgttggatactacggccagggattcccctccttcctgcggaacaaagtgttcatctaccgcgggaaggaatatgagcgaagagaagatttccagatgcagctgatgacccagttccccaatgcagagaagatgaacaccacctctgccccgggagatgatgtgaagaatgccccaggccagtatatccagtgcttcactgtccagcctgtcttggatgaacatcccaggttcaagaataagccagtgcctgaccagattataaacttctacaaatccaactacgtgcaaaggttccactactcccggcccgtgcgcagggggaccgtagacccagagaatgagtttgcttccatgtggattgagagaacctccttcgtgactgcatacaagctgccggggatcctgcgctggtttgaggtggtgcacatgtcgcagaccacaattagtcctctggagaatgccatagaaaccatgtccacggccaatgagaagatcctgatgatgataaaccagtaccagagtgatgagaccctccccatcaacccactctccatgctcctgaacgggattgtggaccctgctgtcatgggaggcttcgccaagtatgagaaggccttcttcactgaagagtatgtcagggaccaccctgaggaccaggacaagctgacccacctcaaggacctgattgcatggcagatccccttcttgggagctgggattaagatccatgagaaaagggtgtcagataacttgcgacccttccatgaccggatggaggaatgtttcaagaacctgaaaatgaaggtggagaaggagtacggtgtccgagagatgcctgactttgacgacaggagagtgggccgccccaggtctatgctgcgctcatacagacagatgtccatcatctctctggcttccatgaattctgactgcagcacccccagcaagcctacctcagagagctttgacctggaattagcatcacccaagacgccgagagtggagcaggaggaaccgatctccccggggagcaccctgcctgaggtcaagctgcggaggtccaagaagaggacaaagagaagcagcgtagtttttgcggatgagaaagcagctgcagagtcggacctgaagcggctttccaggaagcatgagttcatgagtgacaccaacctctcggagcatgcggccatccccctcaaggcgtctgtcctctctcaaatgagctttgccagccagtccatgcctaccatcccagccctggcgctctcagtggcaggcatccctgggttggatgaggccaacacatctccccgcctcagccagaccttcctccaactctcagatggtgacaagaagacactcacacggaagaaggtcaatcagttcttcaagacaatgctggccagcaaatcggctgaagaaggcaaacagatcccagactcgctgtccacggacctgtgagctgctgctgactagggctgcatgggagagccagggaggggagtttctggaagaggaaagccatgcgtggaacatcgaagcctcagagagtgggagactgtccccatcagttgtccttacttagaggagacagagaggccaatcaggtcccagagctggagtgctaacaagcccagcatcccctggggctgtgatcatggtggatgaggaagcctcaacgtagattcctgaactcaaggtaccagcaagaatgccttctcccagtgtgctctccccaacatcctaggcacagctttcataacccagtttcttaggtgtaagaaactgcttttatctcatttattaagtctcagaacttaacagaaaaggaagccttttaaatattctttttaattttattttagattaacagttttgtactttacatttttttatacaaccaaccagtttcttttctagccaatcatctctgaagagttgctgtttcttactgacaataaaaaatgttctcttggttcg

SEQ ID NO: 1377 - DNA, 4459 bp, Homo sapiens
atttctaatcaaacaccaacaagaagtgaagatttattttcccatcatgcttacacccaaatttctggcatttcctcatcatcctatgggaatgttatatcgttataaagtacaggtagagggtggcagtggcaactttacctggacttcttctaatgaaacagtggtcatagtaaccacgaaaggagtggtgactgcaggtcaggtcagggggaatagtactgttttggcccgagatgtacaaaatccctttcgatatggagaaattaagatacatgtcctgaaactgaacaaaatggaactgttaccatttcatgctgatgtggagattggccagattatagaaatacccattgcaatgtatcacataaataaagagaccaaagaagccatggcattcacagactgctctcatttatccttggatctgaacatggataaacaaggagtctttactcttctcaaagaaggtattcaaagacctggaccaatgcattgttccagtacacatatcgcagctaaatctcttggccatactctggtaacagtaagtgtgaatgaatgtgacaagtacttggagagcagtgctacatttgctgcttatgaacccctaaaggctttaaatcctgtggaagtggcattggtgacatggcagtctgtgaaggaaatggtatttgaagggggtcctcgtccatggatcttggagccctcccggttttttttggaattgaatgcggagaagacagagaagattggaatagcacaagtgtggctgccatctaagagaaaacagaaccagtacatctaccggatccaatgcctggatttaggggaacaagttctcacattccgaattggaaatcatccaggtgtcctgaaccctagtccagctgtagaggttttgcaggttcgcttcatttgtgcccaccctgccagtatgtcagtaactccagtatacaaggtgccagctggtgcccagccatgtcctctgccacagcacaacaaatggctgattcctgtatcaagactgagggacacagtcctggaactagcagtgtttgatcaacataggagaaagtttgataatttcagttcattaatgctagaatggaaatcctccaatgaaacactagcccatttcgaagattataaatcagtggaaatggtagcaaaagatgatggcagtgggcagacccggttacatggtcatcagatccttaaagtacatcagataaaagggactgtactgattggagtcaattttgtgggctattcagagaagaaaagcccaaaagaaatttccaacttgcccagatctgtagatgtggaactgctcctggtaggtgatgtaactgtagtgcctgagaatgccaccatctataaccaccctgatgtaaaggaaacatttagccttgtggaaggatctggttattttttagtcaacagcagtgagcagggtgttgtcaccatcacttacatggaagcagaaagctctgttgagttagttccattacatcctggattttttaccttggaggtctatgatctttgtttggctttcttgggtccagcaacagcccacctcagggtgtcagacatacaagagctggagcttgatctgattgataaggttgaaatagacaaaactgtgttagtgactgtgaaggttcttggctcttccaaacgcccattccaaaataaatacttcagaaacatggaactcaaactgcagttggcttctgccattgtcaccctgacaccaatggagcaacaggacgaatactctgaaaattatattcttcgagctaccactattgggcaaaccacacttgtggctattgccaaggacaagatgggaagaaaatacacatcaactcctcggcacattgaagtgtttcctccattcagacttcttccagagaaaatgacactgattccaatgaacatgatgcaggtaatgtctgaaggtggcccccagccccaatccatcgttcacttctccatcagtaatcagaccgtggctgttgttaataggagggggcaagttacagggaagattgttggcacagctgtggttcatggcaccatccagacagtaaatgaagatactggcaaagtcattgtgttttctcaggatgaagtacagattgaagttgttcagctaagggctgttaggatccttgcagctgcaactcggctcatcacagctaccaagatgccagtttatgtcatgggagtaaccagtacccagacccctttctccttcagcaatgctaatcctgggctcacattccactggtctatgagcaaaagggatgtattggatctagtgcccaggcattcagaggtttttctacagctcccagtagagcataactttgccatggttgtccatacaaaagcagcaggcaggaccagtatcaaggtcactgttcactgcatgaacagttcctctgggcagtttgaggggaatttgttggaactctctgatgaagtacagatcctggtgtttgaaaaactccaactcttctatccagagtgccaaccagagcagattctgatgcctataaattctcagctcaaactccataccaacagggaaggagctgccttcgtgagttctcgtgttctcaagtgtttccctaattcatccgtcattgaggaggatggtgaagggctcctgaaagctggttccattgcaggtactgctgtattggaagtcacttctatagaaccttttggagtcaaccaaacaaccataactggggtccaggtagcaccggtgacatacctgcgagtgagcagccaacccaagctatacacagcccaaggaaggaccctgtcagcatttcccttgggcatgtctcttaccttcactgttcagttttataatagtatcggagagaaattccacacacacaatacccagctttatctggctctgaacagagatgacttgctgcatattggaccagggaataagaactatacttacatggcccaggctgtgaacagagggctgacacttgtggggctttgggaccggagacatccaggcatggcagattatattcctgttgctgtagagcatgccattgagccagacaccaagcttacctttgttggagatatcatctgcttcagtactcaccttgtcagccagcatggtgaacctgggatatggatgatttctgccaacaatattctacagacagacattgtcactggagtaggagtggccaggagtccggggactgcaatgatttttcatgacatcccaggagtagtgaaaacatatcgagaggtggtggtcaatgcatcatcaagattaatgctcagttatgacctcaagacttatctcaccaataccctcaattcaactgtattcaagctcttcatcaccactggcagaaatggtgtcaatcttaaaggattctgtaccccaaaccaggccttggccattacaaaagtacttcttccagcgaccctcatgctgtgccatgtacagttcagtaatactttgctagacattccagcaagtaaagtctttcaggtccattcagatttcagtatggagaaaggggtttatgtctgcataatcaaggttcgaccgcagtcagaggagctgctacaggccctcagtgtggctgacacctcagtctatgggtgggctacactggtcagtgaacgtagcaagaatggaatgcgacgaatcctcattcctttcatcccagccttttatattaaccagtcagaattggttcttagccacaaacaagatatcggggagataagagtactgggagtggacagagttcttaggaagctagaggtcatctccagctccccagttctagtggtcgctggccatagccactctcccctcactcctggcctggccatttactctgtaagagtggtcaacttcacttccttccagcaaatggcatcacctgttttcatcaatatttcctgtgtactcaccagtcaaagtgaggcagtggtagtgagggctatgaaagataagttgggtgcagatcactgtgaagattccgccatcctcaagcggttcactggctcttaccagatcctgctcttgaccctctttgcagtgctggcatcaacagcttccatcttcctagcatacaatgccttcctaaacaagatacaaacagttccagttgtgtatgtaccaactctaggaacaccacagccaggtttttttaactccacaagttctccccctcacttcatgagtctacaacctccattggcccaaagtcggctgcaacattggttatggagtataaggcactaacctctgcttggacaagtttctcttaactgcaggggaatgaagatttctagtcctcgacaagaagcctaacagcaacttctacattaagtttccagataaggcttctgagaactataaataaagcatcctaagctgtttctt

SEQ ID NO: 1378 - DNA, 3590 bp, Homo sapiens
ctaggaaagagagaaaagagggtttgggttcacacggatgctgttttgttctctctatcgtgttccaacaaggaatccaattccaggtccagatgatgcgcagaataagcagtgagctcttcagggccactgagttttatgaaatgttttggtgaaagtggattttactattcccgggttgaagattgtcttggtggccttcaactgtgagtgacggtgaatcaagctgtggacgtggcatgcaggttttacatggccatcagttttcaaatcagtgggatcagtctctgagaatcttctgggacatgtggcacgagtccaccgagtttcgtgcagagccgcccaacgggttcccaaaggggctgtgccctgtcgcattcccacctggcagggacaaaggtccccgggaccgcacatcgtctcggcatttggtgtcgtcagtgtggcttgggaaggctcccgagcccctcatcctgccgccctcccgtaggttactgaactttccaccatttctcatgattttgttcattgctctctgtctcctcgggagccacctgggctccggccccacatatcccagccaggcccagggcttgcaaccaggaaggcactcagtctattgtgctagctgctccctgggcctggaaagcttttggtagctctgtcacccctcctgggtgacccctgcctctgctctggtgaagctcccatccctctggttcacgccatctccccagggctctccagccctgcaagccttaattgacactgcattgtggccaaaacatcatgtggtttcttagtgtatggctgacatccaggttgatctggtggaagttccaggggggacctctttcccctcatcttcatgacctccagggcagggccaggaagaggaagcagcctctgaacagagagaagactggctgccccacacggcagtcgtccacaggcagcccggaaggaaaggaaaggaaagaaggaaaggaaaaaggaaaggaaaggacaggaggaaggaaggaaggaaggaaggttggtttccttctgcagaaagctcctcctctggcttggttccttacaatccaactagtcctggagctcagctcacctttggtgctggcatcaccgtctctgcccaggatgtccgcctgaccatgccccctccaccttcaacccaggctctgcgttccctccagctggaggcttgggctctcaacacagcctggcctgtttgtcctcctctggctgacttcggaagggtcatacctcgtatttccaccagttctcggccttcaccttctcgacatccaggaagtgtgaccacacttggccccacatctatggagaatgcctttatacacgctgtctatcaacttgggacagaacactctgaagaaacagggtctggggcagccccagggaggatcggagcctgaggattctggaagtctccagtctctgacttgttggtttttcaggggatgtgcggtttacctaggaccaggcctccctcccacgattcagagttatgaattctcatcttgacctattccttccttcggtttgccagggggtgtccctatccctgagatagtcctggctcatgccctggcatcacactgtctccagcaagttgaggtttgcagggacaaacaggaaagctggtgaccagacctgctgtccagggtgaggacagtgtgtcacccaccctctgagaggcaggcagtgccaggacccagccatgggagcccatccccctgactctgtagagagcggtcacgggggccctccctccccatgtcacctccttgccactcctatatccctgcccgtcttgaagcatctggagccatttctctgtgcctctcatctcctgacgtctttgctgtcaactatgaccagaagttagcggagctaccaaggcttcctgaagcagcctttggatgctgtatcctgggctccgaggccctgacgggactgaaccacaaaaagaaccaggaaagggcaggccccggggactgagaccctctgactgaacaggcgtctgtgacctggcctcacgacctgggacatgccgtcctcaggccacagacactggactttggtcaagtactagcctccaggtggggtcctggtgcaagcagacagcaacccccgagccgtgactgcggttctcagtttggagtttggtcaaacaaccaatggggacagagtcttggggtcaggtccagcaggaactgccacccctcccagggacagcctgtctctcccactcaccatcgctggtgcccacgggctgctgaccacctgccaagtcctcctgtccctggaccagcctctcaggcagcaggtcttacctttgcctccagggcactgatcgatggcagctttgtctcactgtaaggcaacccagacagagctgagggcctgtgctgggccgggagctgtcctcctccttccctagcagtcctagggaaggaccagccgtgtctctccccaccccacccctggtcttagcccaggagacacacagggaaggtaggaagagggtctccctgtgggctgacgcctgtgaagggacaggacctgggagaagaggggtgtgtgggtggggcagggaccactagggccctgtagagcatgggcttgggctacacaacagggctgcccctcctgggctagaggcagtgccctctgcaggagctgagaatgtccagtcctgagaaaggacgtgtatggcccagggtgggtgactgggccccaaaagcagtcctcgagggagtgaccacattaccaggccaggatcctgagacctgcccagtgcactgagggtgcacctggggcctgtcccacctgatgtccccaagtgccccgcaaggtctgatctctcagcctccatctacctcccccggggggtgggggcttgctttgagctgtccccacctttctggatagaactaatgtacttcttacatatattgattgatgtctcatgtctccttaaaatgtataaaagcaagctgtgggccaggcgcagtggctcacgcctgtaatcccagcactgtgggaggccgaggctggtggatcacgaggtcaggagatcgagaccatcctggctaacacatagaaactccatctctactaaaaagtacaaaaaattagccaggcgtggtggcgggcgcctgtagtcccagctacctgggaggctgaggcaggacaatggtgtgaacccgggaggtggagcttgcagtgagccgagatcgcaccactgcactccagcctgggcgacagagcgagacgccgtctcaaaaaaaaaaaaaaaaaaattatctgggcatggtggtgggtgcctgtaatcccagcctttcaggaggctgaggcatgacaattgcttgagtctgggaggcagaggttgcagtgaactgagatcgcgccactgcactccagcccgggtgatagtgtgagacgccgtctcaaaaaaaaaaaaaaaaagcaagctgtgtcccaaccaccttgggcacatgtcgtcaggacttcctgagaccatcacgggtgcatcctcaaccttggcaaaataaactttctaaatt

SEQ ID NO: 1379 - DNA, 3644 bp, Homo sapiens
aggcggggctggctgttggaggaatgtgcgaggatctccgtggccggtgtctgaagtcgtcagtttactgcttgtaatgaacatagtgatcactgggaacctggaagtagagactcctttgcgccgtcccgccgtccctctggctgctgcgaatccccccgccagcctccaggaccccgggctggctcaacgcccccaccggccccgccgccccagggcccgctacgcgcccggcataatgggagaaaaatcaggacggaaaggcccagcccctcgccatgcagacgggaagctcggcctgcacatgtgaggacccttacgccccttggggcttcaccccctttgctggctccaatagtctgggtcggggcctccttgtcctgtgggggcctctgggccacaagaacacaggcccgagccccggcgagctcgcgggcctcccaccagccgtgctcaggctgcacttctgcaccccagccctgcacctgcgggaccacctgggtcacttttccattctgataaagtccccgtacttcgtggctgcaggctcctcaagccccaggtctgtgcagggatgagcaaaacagcagaatatccgcgctacatctttctggagcacccattttactaccagatttggaaggaacaaagttaagtaatttccaggataagtaattaaaattttatgatgaaaaggctggaaactcttctcctggtaataactgtcagacatatctgtgcctgaaatgtcagactttctctgagaaaaaaactgagaacctgtttcccattattttaaataggaaacattatagggcacagcaagtcaatagaaaaaaacctaccaatttcctaattcacagtgtggcagtaggtttaagttgcacgtaagttagcaggtaaaatgcttaaatgttaccacgtggtcacccacatttgatatggttgttaacatgcagttgccttggatgcagtagctttggcttgagaccagcaacatcacacgtgaacctctcctttgtcaacacaccaaagctttttgaagtgaccgtcatgatcctgatggtctaccagttgtttctggaagcaacatgtggcttttccagcaaagtatttagtttaaaatgttgtaatttttgaaagctcaaacattatctctacaaccatcagccgaaaaatttgagacaggttcttgctcttttgcctgaactgcaccatgataggggctccagcgatccacctgcttcagcctccccagaagctgagaccacaggtgtgtgccaccatgcctgttaatttctaaattttttgtagaaattacatctccccacattgccgaggctggtcttgaacttctagactcaagcaattttcctgacttggcctcctaaagtgctggaattacagacgtgagtcaccgaccgcacctagcctgaaaaatgttttgtgagataaatagctgctatacagtttagatattaaaaactaagatgtgttctcccaggaaagtaataattttggatatattctgtgtcacatcctgtatgatgaaatagatggcaaaagaatcccatttaatttaaagatggaagctgtaacttcaagtaaatttggagctgaggagtcctttcgggctatgaccccagaattctggggttctctgtactgatattttgctagtgtccacacacaagcattccttaatgctgtgcgttaaacaaatagaccttctttgaccccagatttctctccatttaccattctgtttctctgctccatgcaactacctcacctcatgtcctctcttgaacccactcctttctagcttttctccagggtactttgctgaaacgacttttatctcagtcatttagctgcatttgacacagatgatacaattaaggagttcctccttgaaactctttcttctggattttaaagaccttccgtcctggattccctctcacctttttcttcatcctcctgctcctcctctaccagatctctagtgatcctctcagaatgatcccacatagtctcatagctttaaataccatccatctgttgataaccactaggcttggggcctcttccctgaggggagcaccaagagtcttccctgactcttttcccttcgcccccaacccccatgcaaccatacagcaagtcctgtggctcttgagtgcaaccagcaacctgattcaccatctccatttccacaaccagtttcagtcatcttcctctcctactggtctactgccaaaaatcctcctactgccaaaaatcctccaacctccctgcatcctatcttgccctcctgcagtccagcctccactcaagcatccagagtgatctcttgaaaatgttaaaacatgatataagcatacccccacccctgtgtaaaccctgccactgtctactcattgcagtagaataaaagttcagacaacctggtgcctgcctcttaagcctcatctcctacccttgcttgttcttgctatgtgggtcagattttccggtctccagagctgaaaacaatcttaactgacaggcattagatcatagactctatctacagcataaggcatggaaggaaaagtctgagagaatgaagggccagaaaagttcatttaaaaaaaataaaaagcacaggaaactggaaacataactaacctgtatgtatatactcaaaagaacatggcagcaaaatgaactctttagaaactgagccaacagacttgcaaatgaatagaaatacctttggtcctactctgaaaacaaaaagaatccttagtgaatatacaagaacaaaaattgtacacatttctgggtcataatgcaataaaactagaaataatcgaaagagaatttaaagatgttcagcttcctgaaaatgtcagattatccttttaaacaaattaatgcctatgtcagggtgcaaatccaaaacacaaataccttgcctataaaaatatattttttcaagcaacagtgtatcaggatgtaaggagagagctcactaactcagaagctcccagagtgaccagatgtgttcatgggaaccggagcactgccctggagtcatttgacatcaccttattacaaacaggaacagccatgatggggaatgctcagatgccagtaataagtcagaggattccctcctgaacgggacctcccagtcctttttggcacagggttccaggtgtgaccacaaatccatgggtgagggctttcaagatcaacctgccctcaggcagtggagtggaaactggaactagcagctacagtggaaaaaaggaatgtcctctcagaatatgtcatctgccccatgcaaagactctggatctcagaagtcctcctggtaaggactcggagccagacaacttcatttcctgtcacctgggctgctctccctctgacagctatggaaattggtgaagcacaggaacgtattggaaatggcaatgatgtgcaatgccaatgtgtggaagtgtacaagttaagtaatattttaaaaacagaacacacagcagtttgcacaatctgatcaaagctctgtcatgtatgtttctaaacaagtttggaagagaatttggaaatggctgaatttttttaataaagctcatgtttttagtttgttt

SEQ ID NO: 1380 - DNA, 3864 bp, Homo sapiens
taaactgtctccagataagaaagttctagagcaactatcctatatttttgaagaaaaaacaattctatctggggaagttttattcttcagaaagaaaaacttacggaatgggaaaatcaaccctatctaaatcaaccctgactagtcaacccaagtcaactctgagtatctctgaggtgaaagatgaagcatgctgatgggtgtcaaatccaatcttgtatgaataaaataagcatcggggaagcatagatgtcatcttctaaggcaaacattctgaggatctggcagcataaatccatcagttaatttataatataattggacaccactatggccaaagtaaaagacacggccaaatctggatcaccttacaattttcaagatgctttcaagatcccccttgtcctgttatggctgagggaagcagtgatgggagtaggcaccatagtctgtaacccctccccttctgtctcggtacagacaaagcagataagctggggctctggtaatcttacacagtttacttcatgccaatttttatgctccatgagatccaggtaaactgagaatgctgtgcatctcctacatctaactacatcatttctaaatacttagaaatattttaagttttaatacttagaagtattttaagttaccgtaaagactttgaaactgtgacacaggtaccctcccctctgatgtttttcctagtcatcctgggtctcaggtagccacatggcacccaagatgggtatgaagggcaggtcctgtctgagtcctgaatttacgcacagctgtagacctcatgacagaagacagaaatgggaagacattgcctggaggacggaaccctcccaaaatagccaggaggcaaagctagggcaggggaaaaggggatatattgggcttgattctgccttgcagctggtggcctaggcattgagaatgtgtcctcatgcctcactgtgggcatacatccagacctctgactccagaggctcaaaaccaaaaacaagcaagcaagtatcaaattatatttaactgataattttgaagccatttctattttagtaacaatttacaactacctttatttactaaatattacatacaagtaacacatatagacacagacacaaagacagaagcagatattatagcttacataaaggattgtcatttgctggcttttgaatagtttttcttttccccattcagactatcattcttccattacctgtttcattgccctaaggagttgttagctaggcaaccttaaatttgcatttctaatgggacaactcttaggtgaaataaggtagaaaatttatatctcaaaagcacaacctaagactttaggcgtacatattgtaccctcatttgctcaaaccaaggaaaaaatgatgtgagtaaaaaatttcagttaagatgtccagaaaagcaccttaaacaaaggtttgacttgttacataaatttaaaactatggtaaaagtttctaatatacacaggcagacacccttacaaatggagatttcctttatagatgtaaatttcttttacagaagagtttcaggatagccagttaaatgccaggaaggtatattttagttgggtaggtggtttatttgacttagctactgtttcttggctaaaattactgagttcagggtagatggagcccattgaggaatagggcaaagaaaacagtactctgtgcttggactcagactggatagatctaaaaaagaagcaagtctgctttacccactggtttacattttatcaacattttatccaggatatcgttattttcactcttgaggcaggatagtatttatgccaaaagtttagcagatttaattattcttgtgaattattcacctgagctttttatttgccttttttttttttttttttaaagacagggtttccctctgtgtaatcacaaaggcacagtcacagctgatttgcagcctttacctcctgggctcaagtgaatttcccacctcagcctcctgagtagctggaactacaggtgtacaccaccacatccagctgatttttaattttttgtagagaggagatctcactatgttgcataggcttgtcttgaactgctgtgctcaagcgatcttcctgctttgatctcccaacgtgttgggattacaggcatgagccaccacacctggccctatttgccttttatgaagtcttttaataaagcaataaaaatattgaaatgtttttagaagcttctgcacatcaataggcatccttgaagactaattgaggacccctcatttttaagtgctgtgttgttcattaggaacggtccattgtaattttaagttacaaagattttgccatttctgtaagtagttatttcttctgaggcctaatatttatacattctaccttatagctagaaggtagaatacggtgttcttcagatactaaggatccaatatttccctagaatcctggatttggtcctcagatccccttcatcaatttagttaatgatttttccctacctaagggtacaagaaaaagaatgtagaacacaaaaatctctgcaaatttctgaagtctgcacccactgtaatattaccatttctgctagtttctgcctgatcctggacatctgcagcctcttaactgaatccaagtcagttaattatcagatccaatccaatcatggatccagtccagtttctgttgtgacttccaaacccagttcggatcagaagtttgctcaaactcggttccaaacagaaatctgtcgagcttcagaatctcagcgagaacttaccacgatatcagttgcttccagaaagcaatggacatcgtgagtctgaggggtaccttgcttggtcactccatgctcctgggcatgacatctgttgaaaaccttagacatattaaatttaacagagtttaactgagcaaagaatgattcacaaattgggtagcccaggaaccagaataggttcagagaggctctggtgcagtcccatgattgaagatttatggacacaaaaaggaaagtgatgtacagaaaacagagatgaggtacagaaacagccagatttgttacagttcgggcatttggagtatttgaacatagtttgaacagttggctgcctttgattgactgaaactcggtaattagcacaaaagtaggttacgatctgtttatacatctagttaagtttcagttcactgtgtacagagaaacctttaggccaaacttaaaatatgtaaggaggtggctttaggttagacttaatttaacagatgttatatatattggttttcatccactgttcctgtcttgtaactcccatagcccttgttaaagtctttttgttacaatgttgggtgtgtcaggtctcatgtgtctagacttaatttaacaaatgttacatatattggttttcatccattgttcctggcttgtaactcccatagcccttgttaaagtctttttgttacaatgttgggtgtgtcaggtctcatgggcaggcctcaggaaacagaatttctcaggctttctcctatccatctctcatctgccccaagacaagaccctataatcttccctgcctttctgattgggagttataagaccctcctcagagggcgtcccaccctatccttggaggaaggaatgctgatattttgaaatttccataaaaacccaggaggactaggttccagaagcttcaggatggctcaacacgtggaggttcttggagggtggcctgcacaggaagggcatagaagccctgtgccccttcccccatacctcactctgtgcatctctttatctgtaatatcctttacaataaaccagtaaatgt

SEQ ID NO: 1381 - DNA, 3354 bp, Homo sapiens
cctgccctccgacggcgtctccaggccccaaatggcctcgggtcggtgggcttctccaggcccagcttgggcctcccggcggcctctgcaggctcaagtggtcctgaagtcagcctctccaggcccagctccggcctcccagcaagcaagctcttttggctcagctcctgcccagctcccgccggcttttgtagaccctgaactttctccagcgatgctcctcagtcccacctgcctcccggtggcctgtacaggcccaggtctggctggagaacagcctctgcaggccccactcttgcctcctaggggcatctccaggcccagctctggcctcacggcggcctcccgggaccaagtccctgcctgcctcccagcagcctgtgtgcggcccagctcctccgtcacggtggcctgttcaggcccaactcatgcctctggcaccctttcgagaggcgtgagcccctgcctcacattggcctctctcacgctgagggagttcagcgtgggcccctgtctcacactggcctctctcacgctgagggaggtcagcatgagcccctgcctcacactggtctctctcacgctgagagcaatcctccctcacgctggcctgttgagacccagctcatgcctctgttggcctttccaggcccagcccctgcctgttggcggcctctagatgtccagcctctacctcaacagtgggccctccacgcccacctcttgcctggccgtggcctcttcgggccaggctcccgccttggggcagcccccgcaggcccagctcctgcctcacggccctccggaggccaagctcatgcgtcagggcagcctctcccagcctggcgtttgctcctttgcatgggctccaggccctggacttcctccagtcggcctctccaggcccagctcttcctcccggcagcctctgcaggaccagactgtcgtcaagtaggcctgtccagggacagctccttcctcccggcggcctctgtaggcccagactgtcatcaagtaggcctgtccaaggacagctcctgcctcccggtggcctctgttggcccaagtcgtcctcaagtctgcctccccaggcccagctctggcctctcggcggcctctccaggtgcaaaagttcctcgagtccgtctctccaggctcagctcctcctgtctcccagtggcctctttcagcccagcccagctcatgcctcccggtggccttcccaggccctgcttttgactttccgcggcctctgcaggccccgaacttgaccaccagtcggcctctccaggcctggcctcctgcctgttgacagccactagaggcccagcctctacctcaacagtgtgccctccaggcccacctcttgcctcgccgtggcctcctcgggccaggctcccacctcgggacggcctccgcaggcccagctcctgcctcacggaggccctctggaggccaagctcatgcgtcgtggcggcctctcccggcctggcgtttgctcctttgcatgggctccaggtcctgcacttcctccagtcggcctctccaggcccagctcttcctcccggcagcctctgcaggaccagactgtcgtcaagtaggcctgtccagggacagctcctgcttcccggcggcctctgtaggcccagactgtcatcaagtaggcctgtccagggacagctcctgcctctcggtggcctctgcaggcccaaatcatcctccccaggcccagctccggcctctcggcggcctctccaggtgcaaaagtttgaatcagtatctccaggcccaggtcctcctgtctcccagtggcctcttttggcccagcccagttcatgcctcctggcggccttcccaggccccacttttgactttccgcggcctctgcagattccgaacttgacctccagtcggcctctcctggcccggcctcctgccttccgaaggcctgcacaggcccagtctctgcctcacagcggactctccacgcccagctagctctcgcctcactgcagcctcccgagtccaaagctcctgcctcttggccgcttcggcaggcccagctcccacctgccagtggcctcttctggcccatggggttcattcctcacaacggcctttccaggcccattttttcccttccgactgcctctcaggacccagaacctctgggcccacttgaggagatgcagccaggaggaacagctgggcttgcagaggctgccatgcgggaggcagaggctgggcctcctgaagtcggcctctccagacccacttgcagactcccggcatcctctctgggctcagctcttcctcccggctgcgtctccaggcccgactccggcctcccaacaacctctttggactcagctcccgcccagctcccggtggccctggttggcccacaacttcctgaagccaagctccccagccccagctcaggcctcacggtggcctctccaggctcagctcctgccctctgacagcgtctccaggccccgaacggcctccagtcggtggattcctctatgcccagcttgggcctcccggcagcctctgctggcccaaatcgtcctgaagtcgccctctccaggcccagctccggcctcccggcagcctctccaggcgcaacgcgtcgtcaacgagggcccctccggggtcagctcctgcctctcatcagcctctagaggccagtctggcggcctctgcaggcccagactgcccttgagtcaggctctccagggccagctccagcctcctggcagactctgcaggcccaagtcgtcctcaagtcggcctggaagtgggcctggaagagctgcattttggcctccccgggcccagctccgtcctctcggcggcctctccaggtgcaaaacttcctcgagtcagcctctccaggtccagctcctcctgcctcccagtggcctctttcagcccagcccagctcgtggctgtaggcagccttcccaggccctgcttttgacttttggcggcctcttcaggcccagaacttgatctccagtcagcttttgcaggcccggcatcctgcctcccgaaggcctgcacgggcccggcctcggaatcacagcagactctccacgcccagctagctctcgcctcactgtggcctccccagtccaaagctcctgcctttcggccgcttcggcaggcccagctcccgcctgccagtggcctctttaggcccagctcattcctcacattggcctttccaggccccgtttttcccttccggcagcctcttggcctctaattttttttatcttttgtgtataaatcccaaaatatggaattttggaacatttccaccattatataaatattttggtaggt

SEQ ID NO: 1382 - DNA, 4268 bp, Homo sapiens
ctttgagatggagtcttgctttgtcacccaggctggagtgcagtggcccgatctcagctcactgcagcctccccttcctgtgttcaagcaattctctgcctcagcctcccgagtagctgggattacaggcgcatgccaccatgcctggctaatttttgtatttttggtagagacagggtttcgccatgttagtcaggctggtctcgaactcctggcctcaggtgatccggtctgcctcggcttcccaaagtgctgggattacaggcgcgagccactgcgcccgccccgtttttctttgtttaacccattccctctcatggtagtggtgcttgagaagggagtgaaagagtaattgtgtgctcattatcatcactgcccagaagcttctggcttcttcagcgccctgcaggtgactcttgcacatacccagcgctgagcaccatggtgcagctcatccccttcacctccacggttctggtatcacagtcttcagagtatagccactattttcctctaagcctctgaacatctttgagtggtatttaggtgctggtggggctgcctgttacactgtaagttgttccgtcagcacaactatgctgcctgcaaatgaaggtatgaaacctccccaaactgctgtctaatggtgtgggatggaaccagctccctttgagagaaactaaattgttttttgccacttcctttaattttttccatgttgcctttttttcctatacctccatttaaacatctattgtttttgagctctcttcttcaaaacttgcttctaggaactattacccctcttcaccatattgaactctaagtcttttctctcattctggaaggccatgatacctagaagtagaccacagggttctaacggggtgccctgggtcctgcagcagtcccctcatcgtgctttaacaacttatgacccagtagtttaaacaacgacctagggaagcttgtcccagcctgccctgcgtgtgcccctagtaaaaccatgagcggcaggaaggggagcccctcgcgatgcttgccatgaccctagaggagcagagcccagagatcatctttagggacctctccctctgggctgcactcatccagaaggtgcttccccgagcctgtctgtagagtcagccacagagcagggcgatgagctatcagagaccagggtgtgtgccactgggtccagcttctgctcttcttgtctcacagcaatatttgagtcctggtgctagccatggcgcagtcgttgggctggtatcagtgacaaggtctggagggtagacaggaagagtggccagttggctccaccagcccctgctcaggaaggacagaatgtgacaggcacccaggaaacctgcttctgagcgttttctttagcgcaccccctacaattagcagatgcagcttcttgctggattctgaggtcacacctcagaccagatgtagaggcccagcagtaactggagtcagtgcagaaggacccaccacggagagggagaggcctctgacaggccagaagagagcagcagtggagcctgtttctgtctggagccctgctctgctgggccagaagtttccaaatgtttttagcagtgggacccattcttcaaattaaaaaaaaatttttttgagttaggctcttgttccgtcacccacgctggagtgcagtgacacagtctcagttcactgtaacctcaacctcctgggctcaagtgatcctcttgcctcatcctcctgagtacctgggactacaggtgtgtgtacaaaatacaaaaaacactcccagctgtccagccttaaataaaatcttgtacataagccagatgtgttcaacaagtaacagcaaaactggtcccatgaaactgccccttccacaggggccctgaggcacctctgcaaggccagggccccacaggcgctgctggaaaactgctggtcttcgggccagtgaggacagagagagagctcagcacagcaggccccgggcagccatacccacctcgtaccacggtcagagtctcgaggagcctcagagatcatggtccccggctcctccagctaaggacacagaccacgaagaggaggtcctcctagtgtgtcagccctggctctgagaatttacctttaatttaattctagacctattaacatgggtatcgggtttttaagcccatctgaaattgggaagaatagaccagaagcaggaagagggtctgctacagggaaaaaagaactagaaagaccaaacagaagtcagaaagtacagctaccacggggccatgtgacaaatggcccaaccaacccacacgcctcagcgccccctgaggctgcacggatagacggacagacacacagcagcaccatgaatccttgagggaaagtaaagctcagcatgtgtcagtctttacggggattcaaggttaaaacagggagggagagagacttggagggaaaagaaaaggcagtgtggaaagcacaaatggccgcctggataaccgtggtttgtttgggttaggattatttccagaggcgtctttcctggggcatttgtgctgccgcttcaaaaaccctcggtccaccctggtattcctgaaacattcctgctgaatttcttccaagttctgataagtccatgccaaaatggtctgtctagatacatgtttcctttggctgtgaaatcttcagcatgtttttgtttttcagcctgggtttaccacattctgactgaggaacatgtgtgagtgtgtgtgtgcgtgcgcacacgtgtgttgataaaagctatgataaaagctcagctacaagaagtttgaagaactgtggtctgagccccagacacttgtgttttctttttcttttcttttcttttttttttgagatggagtctcgctctctcccccaagctggagtgcagtggcgcaatctgggctcactgcaagctccgcctcccaggttcacaccattctcctgcctcagactcccgagtagctgggactacaggcgcccgccaccacgcctggctaattttttgtatttttagtagagacggggtttcactgtgttagccaggatggtctcaatctcctgacctcgtgatccgcccacctcggcctcccaaactgctgggattacaggcgtgagccaccacgcccggcctgtttgttttttttttttgatacggagtttcactcttgttgccgaggctggagtgcaatggcgcgatctcggctcaccacaacctctgcctcccgggttcaagcgattctcctgcctcagcctcctgagtagctgggattacaggcatgagccaccacacctggctaattttgtatattttttagtagagatggggtttctccatattggtcaggcttgtcttgaactccggacctcaggtgatacgcctgcctcagcctcccaaagggctgggattacaggcgtgagccaccacgcccagcctcttttgcatttttatgaagtttttaatatgaataagccaaaattttagatcacctactacttttttttttgtttttttagtagagattaggtctcgagctactgggctcaggcaattctcctgcctcagtgtctcatagagctgggattataggtgtaagccactgtgctcggcctttttttttttttaattgaatttttttttatttttttgatacgtagtttcactctttttgcccaggctggagtgcaatggtgcaatcttgactcaccgcaacctctgcctcctgggttcaagcaattcttctgcctcagcttcctgagtaggtgggattacaggcgccccccaccacgtccggctaattttgtactttttttttagtagagacgaggtctctccatattggtcaggctggtctcaaactcccgacctcaggtggtccgcctgcctcacgcctgtaatcccagtactttgggaggctgaggtgggtgggtcacaaggtcaggagttcaaaaccagcctggccaaaatggtgaaaccctgtctctatcccagtactttgggaggctaaggtgggtggatcacaaggtcaggagttcaagaccagcctggccaagatggtgaaaccttgtctctactaaaaatacaaaaattagctgggcatggtggcaggcccctgtggtcccggctactcgggaggctgaggcaggagaatcacttgaacatgagaggcagaggttgcagtgagccaacatcacaccattgcactccagcccgggcgacaagagcaacactc

SEQ ID NO: 1383 - DNA, 4277 bp, Homo sapiens
acaccagcggctggacattgagaggatcacagcagtggaaaaagacacaagcacctagccgttgagaggaacgcactggcctaagaacatactgacagacgccggtaggccagcaggccggcaggccatcaacccgcggaaggacacggactttggccagggcggtataaggagcctaaaggacgtcatacccatgggccagacctaacattcctttctgctgatcccaagtttttagacaaagtttcccttccttaaccaattgcgaatcagaaaatcctcgaatccaccaatgacctataccagtaaagatgtcatctggccaatttgtgtgaaaaaagagaataattctcatccaaaccgcctgtctctggaaataagaaaagctctgagggtctccaaagttaccagaggaaggctgaattttatggtgattgataatatttccaagcttatggagaaaaaaatatcattagtcttttccatggtagaaaagagtaaagcctgtaacaaaaaaagtgatacagtggatgggatgatgagacccttgaaataagcaaggatggaccagaaactggtaacactcacccatggaatttcattatgaagtcgtggcaagggccaagccgacctggatttgaaacccatctcttcaacgatgtagattctgacaacatatttgatttctctgggcctcagtttgttatctgcacaaaagggagatatgagtggttacgttattggattgtcatgaacattaaataggataatgtcaaatcattcagccaagtttctagcatatagtacaggttcaaatattatcttttttttcccaccaacctcttttccaggaaaatgcaaagctactctttagccaaattttaaaacaggggatatttattttgggaatcattaatacccatctgccccttttttggtccattggacatattgaaatgaatgattaatacttatcacttcatggtgtacacattgttttgtttcttatatccagagtctagtcctcaactctaaccaaagtaaaggaaactggaaagacacacgctttttcagtcattaatagaaagttgtccagaaacccggcgagtgaatctacccagagctgaagcttcctttgcaacttgggaacaccagggccacagtgactttgtggcttggctttagataaatttgaccatggctgtagaacccagcagctcagaatccattaaaaggagagctgggaggaggctcctgccatacgccagacagttttgtagacacgaaggatccagagattagcaacacctttaccatttttggtgacagttaagcacccatctaagaagttttctttggtgagtgccaaaaagtgtaactcccattccccccacacccgcgccgcgatacgaccgctccaccctagagtggagatggagaccaagcacttggagatctaaatcaagtgtccccaggagctcagctgagcgacaaagctgagcagaaagcccagactgcgggcgcggcaggaccacggagagcgccgccgccaaggcctgggcggggcctgagctcgggttcccggggcaatgctcgtctccgtcagcaacccccagggggcgctcgcgcggaggtttcggaaccagtctcttgccgggttgctgggtgcatgggattcgtcagaaggtggaaatctctctgtgagaagctgccatctccccgccacccgctcgtccccttctctttctgccaccctcctttccttcctccctcgctccactccactccctccctcttttctcagtaccctcctctttactctccgagttaactgagagccgacctgacatctccaacattttcaccctcttcccccacccccatcaccgagaatggagtcagggtttccggagagaccgaactctgctctcagcacctttcccagccgctgttgctaaactgacctcggaggacgagaggggaaggaggtgcgacgccccttacatcagtacataactaccacaccaaccacctccacttcaaagccggattttgcatcctgggggcgggacagacctcgtcccgggctgaattctctctccactcttcgagattggcacacccagaatgaagaagatgagcaacatttatgagtccgctgccaacacactgggaatctttaacagcccctgcctgaccaaagttgagctgcgtgtggcgtgcaaaggcatttctgacagagatgccctttccaaaccagacccctgtgtcatcctcaagatgcagtctcatggccagtggtttgaggttgacaggactgaggtgattcgcacctgcataaacccagtgtactcaaaactgtttactgtggacttttactttgaggaggtgcagcgcctgcggtttgaagtccatgacatcagcagcaaccacaatgggctgaaggaggccgacttccttggtggcatggagtgcacacttggccagattgtttcccagagaaagctgtccaaatccttgctgaagcatgggaacacagcagggaaatcttccatcacggtgattgctgaagaattatctggcaatgacgactatgttgagcttgcattcaatgcacggaaattggatgacaaggatttcttcagtaaatctgacccatttctggaaatttttcgtatgaatgatgatgcaactcagtagctggtgcaccgaactgaggttgtgatgaataacttaagcccagcctggaaatcattcaaagtatctgtaaattctctatgcagcggagacccagaccgccggctaaagtgcatagtatgggactgggactccaatggcaagcatgacttcattggagaattcacctcgacattcaaggagatgagaggagcaatggaagggaaacaggtgcagtgggagtgcatcaatcccaagtacaaagccaagaagaagaattacaagaactcaggcactgtgattctgaatctgtgcaagattcacaagatgcattctttcttggactacatcatgggtggctgccaaatccagtttacagtagctatagatttcactgcctcaaacggggaccccaggaacagctgttccttgcactacatccacccttaccaacccaatgagtatctgaaagctttggtagctgtgggggagatttgccaagactatgacagtgacaaaatgttccctgcctttgggtttggcgccaggatacctccagagtacacggtctctcatgactttgcaatcaactttaatgaagacaacccagaatgtgcaggaattcaaggagttgtggaagcctatcagagctgtcttcctaagctccaactctacggtcccaccaacattgcccccatcatccagaaggttgccaagtcagcgtcagaggaaactaacaccaaggaggcatcgcaatacttcatcctgctgatcctgacagatggtgttatcacagacatggccgacacccgggaggccattgtccatgcctcccacctccccatgtcagtcatcatcgtgggagtagggaacgctgacttcagtgacatgcagatgctggacggtgatgatgggattctgaggtcacccaagggagagcctgttcttcgagacatcgtccagttcgtgcccttcaggaacttcaaacacgcatctccagctgccctggcaaagagcgtgctggctgaagtcccaaaccaagttgtggactattacaatggcaaaggaattaaaccaaaatgttcatcagaaatgtatgaatcttccagaacactagcaccatgaactccccacacagttttacagagttctgaaatactattcctgctaatatttcatatttaatacttctactactcctgtactttaaaaaaccaacaacatatacacatttaaaaatagcacgttttggtgatttttaactatctgacaattttttttgcatgtgtagccctgaggcctggatctgttaagcccttgtattgttaactttttacaaagaaacacagataacaataacttactatttacattacagcatgtcgccttgaaataaaatggtatctgtatccattttttatacaggtttgttgaaattttgctaaatttcttatctttacactctaaagcattttgaaacatttactgaatgttgatagacgaaatatacttggttttatctgctataggatgagagactttttaaaatggcagatgcatggactgtattttgcatgtttaaaataaaaaaagaaaaaccc

SEQ ID NO: 1384 - DNA, 3003 bp, Homo sapiens
ctggacagcaatgtaagtgtgaaatgtctttcaagagagtatggtgttggagtgaccaccatacatgacctgaacaaacagaaagataaaccattgatgttctgtgctgcaagtggtgaatagaggttaatgaaaaatagaaaaagcactccatgaagctaaaaatgaagatattgattgtgtattgaaacagtgaatccatcagtgttggcagtgaacacgtgcctcttaatggtatgctgatcatgaaacaagtaacgatctatcatgatgaactgaatgttgaaaggagctgtgaatattcaacacactggttgcagaagtttaagagaagatatgacattacatttttaaagatttgtggtgataaagcatctgatgatcaggaagcaatggagaagttcattgataaatttgccaaagtcatggctgatgaaaatctgccagaacagtttataatgctgatgaaatatatccctgttctggtgttattgtctcaaaaagacactgggctacagttgatgggacagcccctccaggaattaaggataccaaggacagaataactgtcctgggatgtgctaatgcaactggcatacataagtacaaacatgctctgataggcaaaacctttcacacttgttgttttcaaggagtgaacttcttaccagtccatggttactctgacacaaaagtatggatcaccacagacatcttttctgattggtttcataaacactttgtaccagtggcttgtatgtactgcccataagctagactggatgatgtaggagtttgttattccttgatatcacccaattcatcctccagctaaaattctcaaaactaatgtttatgccatgtactttccctcagatgtgacttcattaattcagccatgtgaccagggtatctttagatcaatgaacagaaaatataaatccactttcttgaacagcatgctggcagcagtgaacagaggcatgggtgcaggaaattttcaaaaggagtttagtataaagaatgccatatatgttgttgccaatacttggaacacagtgacaaagacacagttgtgcatgtctggcacaacctctggcctgcaactgtgtttagtgataatgatgaactgtgtgtgtgtgactttgaaggattctgtatgtcaagtgaaaaaaaatgatgtctgacctccttacatatgtaaaaaatataccttcagagttcagcagtaagctggaagaagtagatgtcaaagaagttttgaactttgataataatgcttcagttattcattcattgactggtggtaaaatagtcgaaatggttttgaatcagggttatgatagtgatgaagaaggtcaagataacaccacagaaaaggtgcttatagaagaagacatggtgaaaatgtatggtgggcatattgaaggattacggcagcgtgcattaacaacagaatgaaaaaccatgtcagtttttaaaattgaagagagacttctgagctaaaaaccatgttaatgaggcagatgactccacaagaaccatttttaaaagccttccagcagaatgtctcttcatcccccgtaggatccacttcctggtccctcagctgcttctgatgtttcttcttaactaaaaaacacagtttatagtaacctttgaataaaaacacagcatcataggtgaagactgaaagcctgctgttgtttgtagctgctttttccttttttttttttgagacgtagtttcactcttgttgcccaggctggagtgcaatggcgtgatctcggctcactgcaacctccgcctcctgggttcaagcagttctcctgcctcagcctcccgagtagctgggattacaggcgaccaccaccacgcctggctaatttttgtatatttgatagagacggggtttcaccatgttgaccaggctggtcttgatcttctggccttaggtgatccacttgccttggcctcccaaagtgctgggattgcaggcatgagccactacccccggctctgtggttggttttgtttaatagctgaaacaggtatcctggtgatgctactatgctgcttagttgtcctgacacattattttttcagtgttaatggtatgtcatatttttactgttaagtacttaatgtatgaataaatgtaagaaaacaattgcctattgttagcatgtagattaagagtcaggaatgatgactcttgttgacatgggtggctgagatagtgacacctttgctttctgatggttcagggtacacaaactttattacaggcacaaaattatcaaaaatacggtataaaattaccttaaggctatgtatataagggatgtgtgtatgtgtgtatacacacaaaaataaattttgtgtttccacttggatcccctccctaagataactcattgtgtacatgcaaatattagaaaatgcaaaaaaaagaaaaaaaaaagaaatctgaaacagttctagtctcaagcattttggatgagggatacccatcctctattttatcaccattttcatgctgtattaaaatgaaattgccaactcagttcaaaggaatttttcttcttagctttacattgttgattcatggtggaggcgaacaaactatcgactggtgggttggataccttggtccagagaggtccttgtgacatatctcatggcccattacctaggtgatgtgagtcttgccttctgcctgcaataaagttttgttggaatgcagctatgcccatttactagtgtattgtccatagctgcttctctgctacaatgtagattagcagttgtaacagagactatatggcccccccaggttaaagtatttattagctgtccttttatagaaaaaaatgtcccacatcagatttatggaaatgtctgttcctttgtttacgttttgcccatgactttttaacactttcacagacattattgttcattattatatgtcagaaataaactcactttttgtaaactttc

SEQ ID NO: 1385 - DNA, 3220 bp, Homo sapiens
tttctgattgagttatatgtgtagtagttcccccattatctgaggtttcactttctgcggtttcagttactgctatacgctacactaaacagtaagatactgtgtgaggagagagaactacattcacataacttttattagattatgttgttataattgttctatttttatttcttattaatctcttactgtgcattatttataaattaagcattatcataggtatgtacttataggaaaaaatatagcatatataaggtttggtattaaccacaatttgaggcatctgctgggggtcttggaatgtatcccctgcagataagggaggactactatactttatgaatttattaatggtaagatctagtggcaggtctaataactactttcaaagcagtggtgagcgtaaacaatatgttaagataactgcagcaagtatagtacaaaatgaaaaatgtctgtggtttctattgtgtcagggtgtttttaattttacctatattcatagtttgttgtctacattcataatttaatgatatgctaactactttcaaagcagtggtgagcataaatagtattttgaggccgtgcgtggtggcttacgcctgtaatcccagcactttgggaggccaaggcgggtgaatcactgaggttgggagttcgagaccagcctgaccaacatggagaaaccccatctctactaaaaatacaaaattagctgggcatgatggcgcatgcctgtaatccctgctacttgggaggctgaggcaggagaatcgtttgaacccgggaggcagagattgcggtgagctgagatcgccccgttgcatgccagcctgggcaacaagagcgaaactctgtctcaaaaacaaaaaacaaaaccaaacaaaaaacaaaactacaatattttgaggtaactgcagcaaatatagtacaaaataaaaaaatgcctgtgatttctattgtgtcagggtgtttttaattttacctacattcatagtttgttgtctacattcataatttaaagatatgctaaattttagccagaggttaatgaaaatgaaggtaacatttttttttaacccatcgaggttcacagaaccactgaatctattagtagacaccattaattaaacatccatggtactgttgattcttatttatcttttatatttcattccaaatgttgactcctcagagagtcattttctgatacccagactagatccaatttccctgttatactcttcaagcatctcacacttttcccttgcaggacttaactcagttggtaatggtacatttgtgcattggttgtctgcctctcttcacctctttccctgaggaaggagttggtatctgttagtcactgttgtattaccagcacatagtagatgctcagtaaatatttgttgagtaaataaagattaggaaagctatcaaactaatttattaccttagtaagtaggaaaagagcttggtaacttgagagactgactgaaggccagtgtctataatcattttcagggatatgtagttgtaaaatacatgtagctatagtcaggatgtaaagtaggtcacagtaaccaaatagcaaggggtttagggaaaattagggaactggagaaagggcaaattgttcatgagggaaaagagaaggtgtaatgtttatgggtggacttgttgcttgctctgtcacctctacccctattagtcctgccattaccattttacttaatcacttagccaggcctgatacatagtagtctttgctaactggatattatggaggtaaagctgaaggtttttgtttgtgaaatgttacactaagataggagcttgtgatagatctttaaataatgcttttaaaatgtgcctgtttatattaatcttcaccagaatgtcacaggtagactaatggttggcctacgttggtggaatcacattgatgaagatggaaagagccattgggtgtttgaatctagaaaggagtcctctcaagagaataaaactgtgtcagaggctgaatcaagaatcttttggttgggacttattgcctgtccagtactgtgggtgatatttgcctttagtgcactcttctccttcagagtaaagtggttggcggtggttatcatgggtgtggtgctacaaggtgccaacctgtatggttacatcaggtgtaaggtgcgcagcagaaagcatttaaccagcatggctacttcatattttggaaagcagtttttaagacaaaacactggagatgatcagacttcctgaatagagaaagcttatgtgctttgttacattggggaacaactgaagagattcttgactcaaccttttagagcttagtccatgttgcaacgaggagtgttggctttgtttttccacttaaaaactatttataaaaaggaaaagtagttttcatattaagtttttatttcctttccagcagttggggctagaaagtatgtgttggcactagaaacattgtcaagatttgttctgtggtgtaggtatgcacattccataggtatgcacacggccatgtaatatcagtatatcccaagttaatgaaagtgttcatttacataggcaatggagacctttgcattttgatccatagaacataggaggatgttcttagtctgtctcaaagctctatatgtttacatattatttctgtagattgttttcaggagaaagttttgcttctatggtaagagtgagcactttggcttatgtataagttagaaataattgttagtttttaatatgcacttcgtggggaaatttcttagacgtatgcaagcaagtgaaaacaattagggccagtggtattaactactttataaaattttatttttgtttgtaagaagtcatctacttaaggcccagttaatataagtggaatcatcatagtttaaggaatacccagagattgctgctgttctatttattttacagaaaggatagctagattgaaagctcttcagtggaccttgagctaatagatcttttaccactaaaagagcattattctcatgtcataatgagaataataatttacatacttggcataataaatgcctaaaagacattttattttctgaatctatttttttcttgctataatggggatattgtaaattatgcatttgtattaatggtatttcttaaagcaatctatgtaactgtaaattaaaccaatctacaaact

SEQ ID NO: 1386 - DNA, 3060 bp, Homo sapiens
gctgcgtggccctggccaagtgcactgggtgctgtctgggccacctctgtcactttccagacacttcatggagaccacaatgaagcccttctttcagttggtctgtgtcacctggcacaaagccaggatgcacagtatgtccagtggaaggagggagcagcttatctgccttcagctccagccccttctgtggctccctagtacctccgcccagctgtgcactggcccgtcaacctcactgcatgccagcctgagagctgattcactccaggccaataggtaacaatgactgcagtttctatgtcaccaagcagaaagcaaaggtatcaggttctagtggattctttttgttcacctctgaacttaagccaggtgtatgtgttgacagcatcaggaagtaggcagtgcaggtacgggacggtgctgtgtgcaccaatcaagatctctagctccatggccctgatttttcctgttacgatcatggcataagagtggccactccattctacttctttttttttatttttttttaatgcatacttgaaaaaaaaaacaaacagtcaaacaacacagacagataggaagttaagaaaagctgcctcctttcccagtagcgctctctccgcatgttttcttaggagcaaggcactgctgggtgtgctctggatgcatatgggccatgtatattctttgctgcctatgttctggacacgatggccttgttgagcctcctgtcccacaggcagggggatgtcctatgggaagagctagttaacttgtccttcagagctctgacctagacatgcttgtttggctgtcagtgaccaggaatgggccatgcccattttctcagggtttttacatgtgttgcaatgcagacttttttttgagacggagtctcactctgctgctcaggttggagtgcagtggcacggtctcagctcactgcaaactctgcctcccagattcaagtgattctcctgcctcagcctcctgagtagctgggattacaggtgtgcaccaccacacccggctaatttttgtatttttagtagagacggagtttcaccatgttgcctaagctggtctcgaactcctgacctcaggtgctccacctgcctcagcctcccaaagtgctgggattacgtgcatgagccaccgcgccctgccccaatgcagacttatcaggttgatctcagatgctgttttgtcagcacaattaacttgttagtgtgtggagaaagggcgtcacttccatcagttgagagcctggtgttttctggtctggctgaggtctggatgaaagcagtcttggcaccgagcagagaaagtgggaagctggtgctgcagcaggtgccagagtacgcagaggccatatggggagcccgccctgcctgcagaggcctcgtgttctcagcctgagggctctggctctgctcctccagctgctgcagtggaagtcagagaagatgccctggcagggtcactagaggagtggagggaagggcacttcgtaccgtggcacttcatatttgggagcaaagaaagcatccaccacataaggcgcttttcacaaagttgctctggttctggaaagctgtttgaccaagcgaggtgaacctagatagcctcaccctttcaccctcaagttggactcacagtggcaggctctggagccacatttcatgtgacctttttatgtaaagtccttcagcaaattgatgaggaagacatggcaaaatattccacatgaatagacatttccttgtgtgggcatttgggttctacagttttactgttataaaaagtatttgctggtttctttattttaatttctattaactaaagttatcagctcaaaagatagaaacaacagaagtataaatgaaagcatctttgattttgaggaacttttgagaggacctatctgactcattaaatcttttttgttctttagtactcccacaggattttttaaaatcccatggtataatttgtatacaataaaatgcacacagttcagccagtttgaaaatgtatacacccatgtaatcagaacatttccatgtccccaaaaggtcctttcctgtcagtccccacctgatcccctggcccagaaacctctcagctacctcccatcctcatagatctgtctttctcagggttccatgtggatggaatctcactgcccttttgtggttggttatttccccttcccccagcttggcatttgttaccccagcttggcatttcatccatattattgcatattaggagttccatccttctttattgccaagtagtactttattgtattaaaagcttcgtgtttcaagtaccatcatggtacagtctctacctaccagtaatcatctaacatggaaacttgtttcagattaaggtatccatcttgccatgttgccttgacagaatgtgtctgcagattagaaaacgcacttaggaactttgcctgtctgaccaccggggatgtgattgccatcaactataatgaaaagatctacgaactgcgtgtgatggagaccaaacccgacaaggcagtgtccatcattgagtgtgacatgaacgtggactttgatgctcccctgggctacaaagaacccgaaagacaagtccagcatgaggagtcgacagaaggtgaagccgaccacagtggctatgctggagagctgggcttccgcgctttctctggatctggcaatagactggatggaaagaagaaaggggtagagcccagcccctccccaatcaagcctggagatattaaaagaggaattcccaattatgaatttaaacttggaagctcctaggaggtgttcctcactaaaatgaaggaataaggtagaaataagaaagtcatagaatccaggaaataaggagcccccactaacatgtacggcacctagagaaaggccagtccaggatgaagctggaggcagattcgtcgctttctctggagaaggacagtcattgcgtaaaaagggaagaaagccctaagtgaggactgttggctgattggaaaataataaaagaatcatttgc

SEQ ID NO: 1387 - DNA, 3940 bp, Homo sapiens
gttcgccatggatttccctatcaaccctcagccctggcctttgatcctgtacagaagatcctggcagtgggaactcagactggtgctttaaggctctttggtcgtccaggagtagaatgttattgccagcatgacagtggagctgcagtaatccagctccagttcctgattaatgagggagcgcttgtgagtgccttggctgatgacaccttacacttatggaatttacgtcagaagaggcctgccatactacattcgcttaaattttgcagagaaagggttacattttgccatctgcctttccagagtaagtggctctatgtgggcactgaacgaggtaatatacatattgtcaatgtggagtccttcacactctcaggctacgtcattatgtggaataaagccattgaactgtcatctaaatctcacccaggacctgtggtccatataagtgataatccaatggacgagggaaagatatttgaaaagactgggaaaagagagaggaaacaaataccatttttttccaaaaggtgtatgtatctcagattgcctaggaaagaagagataagcttttgattggctttgaatctggaacagtagttttatgggacctcaaatcaaagaaagccgactacagatacacatatgatgaggctatccactctgttgcttggcatcatgaaggaaaacaatttatttgcagtcatttagatggcaccttgactatatggaatgtaaggtcccctgctaaaccagtacagacaatcactccacatggaaaacagttaaaggatgggaagaagccagaaccatgcaaacctatcctcaaggtggaattcaaaacgactagatctggggagccttttattattttatcaggaggtttgtcatatgatactgtaggaagaagaccttgcttaacagtgatgcatgggaaaagcactgctgtgctagaaatggactattcaattgttgattttctaacgctgtgtgaaacaccatacccaaatgattttcaagaaccatatgctgtggttgttcttctagaaaaggatttagtacttatagaccttgcacaaaatggatatcctatatttgaaaatccctaccctttgagtatacatgagtcccctgttacatgttgcgaatattttgcggattgtcctgtggaccttattcctgcactttattctgttggagctagacagaaacgtcaaggttacagcaaaaaggaatggcccatcaacggaggtaattggggcttgggtgctcaaagttacccagaaataattattacagggcatgctgatgggtcagttaagttctgggatgcttctgcaataactctacaagtattatataagctaaagacatctaaagtatttgaaaagtcaagaaataaagatgacaggccaaacacagacattgtagatgaagatccatatgccattcagatcatctcctggtgtccagaaagtagaatgctgtgcatcgctggagtttcagctcatgtcattatttatagattcagcaagcaggaagtaatcacagaagtcattccgatgcttgaagttcgattattatatgagataaatgatgtggaaactccggagggtgagcagccaccacctttgccaacacccgtgggagggtccaaccctcagcccatccctcctcagtctcatccatctaccagtagcagttcatctgatgggcttcgtgataatgtaccttgtttaaaagttaaaaactcaccacttaaacagtctccaggttatcaaacagaactagttattcagttggtttgggtgggtggagaaccaccacaacaaataaccagcctggcagtcaattcttcctatggactggtggtttttggcaattgcaatggcattgctatggttgactacctccagaaagcagtgctgctcaacctgggcactattgaattatatggctctaatgatccttatcggagagaaccccgatctcctcgtaaatctcgacagccttcaggagccggtctgtgtgatattagtgaagggactgttgttccagaggatcgctgcaaatctccaacctctggttcttcatcaccacacaattcagatgatgaacaaaaaatgaataattttatagaaaaggcaaagatgtcaaggaagttaagcttacctactgacctaaagcctgatttagatgtaaaggataactcctttagccgatcacggagttcaagtgtaacaagcattgacaaagaaccccgagaagcgatctccgctcttcatttctgtgaaacgtttactcgaaagacggactcgtccccttccccttgtctatgggttggaacaacgctaggaacagtgcttgtcattgcactgaaccttcccccagggggagagcaaagacttcttcagccagtaattgtgtctccaagtggtactatattgaggttaaaaggtgcaatcttgagaatggcatttctggataccacaggctgcttaataccacctgcgtatgaaccctggagagagcacaatgttcctgaagaaaaagacgaaaaggagaaattgaaaaaacggcggcctgtctcagtatccccctcctcttctcaggaaattagtgaaaaccagtatgcagtgatatgttctgaaaagcaagcaaaagtaatctcactgccaacccagaactgtgcttataagcaaaatattacagagacctcgtttgtgcttcgtggagatattgtagcattgagtaacagtatctgccttgcctgtttctgtgccaatggacatataatgacttttagtttgccaagtttaagacctctgttggatgtgtattacttgccccttaccaatatgcggatagccagaacgttctgctttaccaacaatggacaagcattataccttgtttcacctacagaaatccagagacttacttatagtcaagagacctgtgaaaatcttcaggaaatgttgggtgaactcttcactcctgtagaaacacctgaagcaccaaacaggggattctttaaaggcttatttggaggtggtgcacaatctcttgacagagaagaactatttggagaatcgtcctcaggaaaggcttcaaggagccttgcacagcatattcctggccctggtggcattgaaggcgtaaaaggggcagcatctggagttgttggtgaattagcacgagccaggctggcactagatgaaagagggcagaaacttggcgatctggaagaaagaactgcggccatgttatcaagtgcagagtcattttctaaacatgctcatgagattatgttgaaatacaaagataagaagtggtaccagttctgacaaccagaatccaataagtccaacttcagccagaaggaaaaaagttttccatttttattacattctttaggaaagttaacgttaaagggatgttcgtcactgaatactgttctttcctagcacagtcatgcactgttttacctcagtcatgtggctttaactgaggagtgttcacacgcactcgaaatggagtatatggtgtgtgccagttatgagttgaccatttgggaattaaacaggtcacacgtgacagatgaagaaaccaagggggctgctgaggagacctggtgcagggactaatcctggatcattcctgtattaaactttcatatgccaaaagggtttgtgccgttttatctgccatcagtgtttgacctgtttagggcagaggcaataagtcagaagtcttgaagttgaaatagttatatgtgtgtcattggactggattataaacagctgtcttggactttccctctcttaacactgactggtcatcagtatcattagtgaaaaagaaacaaattgtttgttatcatctctttagacagataagctgaatggtgggctttaaataataaaaacatacacat

SEQ ID NO: 1388 - DNA, 3494 bp, Homo sapiens
gtaatacggctgcctgcggaaccggctgaccggaagtgtggctgtgggtggtttaccgccagactgtgatggtggcggggcacggctgcgtgactggtgagttggtgaggacggggcagtggactgggagcaaggcaggccctgccagggggactgacaggctccaaggtgatcttcctaggaatgtccacagagtgtgggacctggccttggctgggttgggtccattgtgtggctgcaatataatcaagtggaggacagctgtgatgagactgggggatgctgctgttgggggagtgtgcccagaccccagggcagcaaggccagctctagtcacacggattaatcaggcaaggcccctcatctgctgttgaacatgggcgcgtggaagcaccggcttaggaacaggctggcgccgagacggatgcttgaacgcttctatggaggctggagggctgggctggggacggcaagggcccgggtgctgagctgagcactgacaggctttgcttccctttgtgttttctcacttctgtgcgcgttaggcgaggtccgggcatttaccttgttttggtttggtgataattccctctcacaatctgcagcgactgttttctgtttcatgggcttccgggtaagttgcttggtggatgacctggtgtatttaatttactgggctctgactctgcaaagggcgctaaatgctatgggctacggtgttcagaactgggttctggagcccccaggaatcccagcaagtgtgttgctaccagaattccttctcttcctgttctttttgtttctgattcctaagccccttcaagtcacatagaggaggctatttgccaaattgtgtgagcccattagtatgtcaatcatgataccttccaagtgcttgccgctttgtacattccaaaacactttcatgcaaagcaacccttggaatggttttagaattcctgttatatagattggaagatatttttatttccatttcatacattgggaaactgaggctcaaaggccataacacaggagaggcatagaaaaagtctcgctccaggcctcttgacatgtgagcaagtgccctgccggacatatgtgcttcctccctggattttcattaattttttggaaacttggtattgtcattgagtgagctgaggtggtgagggaggcttactcttgtcctttaacattagcttttcaataatgctgaagatgatgatgataatgacaaatcgcctataagatatgcccattcagaagtctcttgtgtagttcccagcatttcaaggaattcattaaaaactgacatgaaccccaggtgacctcaggtctcctaatgtgccaatcattcatctaaggaaacagaactaaattacttgtacctgaaagaaagccttttgcaaaacaagagtatatacgcactctcaccggagcccagcagttacattcaacggtggcagttattataaatggctatattcctacggcaaccctggagaaagaaagaaaattgtgcaaccaatttaatgaggtgtgtgtgtaagagggatggttagcaatttgtctttaacaatcttgttatacagcaagaggctctaaggggaaagagagaaagagagagaccgggagtcaatgctctattttctaacaattctcaagagagaggagataaagaccaagagaattcactgagcaaatgttttctttgtggcaacaaatgcaggcttcgtgcttgcagaaccactaggcactatgtaacgagaagggttataaatctggatgtaacgaaggtttcaccccagtggtaatagagttagagggtgaaaggttgcatcttgttcaaccttctctggaatcgttttctataatgctggcaagtaattttgtggcatttctggatgcttaactgaataaaaagaaatacttatttggtactggaaccactattagcaaggtgggcagttgagaatctacctaagtatccagtaatgttaaaatgaaatggcagaaaaccattttaattgcatcatctagtgcctctagacatgtgggcacttgtgttcccggtggtgacacacaatatggagagatatttaattgggcacttttgaaaagagagcccctctcaacagggactacatcttgggcttgtgcttagaagacattcagctcaagagctgccctggtgcacatttcctctgcccctttggttgcctttaggttcatcaagttctaattagttattctttagttaattcagaaatgaaacctttattgagcaattactatgtttctggccttattctagattcaatgatgtttagaaagatttttacaacacagtttgctgttagtctagactttttgctccccagtgaaagggaacttttggcagcatcaagaggtaattcagtaggattctatctcttcaacttcataatctccattgtttcccaaaaccaattctaatattaaaaacaatacaatgttttatcaacgttaagatgccctctattgttaaaaaaaactgttattttatgtaccacttgcataaagaaaaaatatctaagatgggaggtctaataggagacctcttcataggcaggacaccaaagagctacgcactcggtgaaaggggtaaggaaaattctccagcagggccagcaaggaaacttgcatgtctcagccttgggcctctgcagagggaagaaaatacaagtctctgtgagaatctgagccataatctaatacagatggagcatccttaatctgaaaattcaaaatcctaaattctccaaaatccaaaacttcttgagctccaacatgataccacacgaggcaaattctacaccggacgtcacacaataggctccagtcaaaatgttatcaaaactgttttgtgtacaaaactattaaaaataatgcagaaaattaccttcacactgtgtgtctaaggtgtataggaaatgaattttatgtttagatttgagtcccactcccaagagatctcattatgtatgtacaaatattccagaatctgaaaaaatctgcaaagcaaaacactcctggtcccaagcattttggaaaagggacactcaacctgccaacctgtagtcacacaggtctaaagtctgaatttacaccattggtggggtccaataattctcaagcagagaaatcaatttccagtgggcttaagtaagtttggcagaaacaaatgcagaatcctttctggaagaattcgacttcatttcaagcccacagattataaaaacgtattgattacgtgatacactctgattttagggattatgaaaatgtgagaataatgtgcatctaagaattgatgaacagtgatagtaataataatgcttttcatgactagtatattaatataattttatgtaattattattctttccatttgctatggacagtgaaatttttctgaatcttctgtaaactgtgaataaaagcattttaag

SEQ ID NO: 1389 - DNA, 3457 bp, Homo sapiens
gcttacctactgccttctccgaccgtccgtcctcggggcaggcgtgctctcttccctgagcttttaggggttggcttttccagttccagatcagctacagcaaacatcgttcgagatgtcccaccaagagggcagcacaggtggcttaccagacttagtgactgaaagcctgttcagcagcccagaggagcagtctggagtagcagcggtgacggcggcctcctcagacattgaaatggcagccacagagccatcgaccggagatggtggtgataccagggatggtggtttcctgaacgatgccagcacagaaaatcaaaacacagactcagaaagttcaagtgaagacgtcgaacttgaaagcatgggtgaaggtttatttggttacccgttagtgggagaggagacagaaagggaggaggaagaagaagagatggaggaggaaggggaggaggaagaacagcctcggatgtgtccacgatgcggtggcaccaaccatgatcagtgtttgttagacgaggatcaggcgttggaggagtggatttcctcagagacatctgccctgccccgatctcgctggcaagtccttactgctcttcgccagcggcagctgggttcaagtgcccgctttgtatatgaggcctgtggggcaagaacctttgtgcagcgtttccgcctgcagtatcttcttggaagccatgccggttctgtcagtaccatacactttaaccagcgtggcacccgactggccagtagcggtgatgacttaagggtgatagtgtgggactgggtgcggcagaagccagtactgaactttgagagtggtcacgatattaatgtcatccaggctaagttctttcctaactgtggtgattccactctggccatgtgtggccatgatggacaggtacgggtagcagaactaattaatgcatcatattgcgagaatactaagcgtgtggccaagcacaggggacctgcccacgagttggctctggagccagactctccttataagttcctcacttcaggtgaagatgccgttgtgttcaccattgacctcaggcaagaccggccagcttcaaaagttgtggtaacaagagaaaatgataagaaagtcggactgtatacaatctctatgaatcctgccaatatttaccaatttgcagtgggtggacatgatcagtttgtaaggatttatgaccagaggagaattgataagaaagaaaacaatggagtactcaagaaattcactcctcatcatctggtttattgtgatttcccaacaaacatcacctgcgttgtgtacagccacgatggcacagagctcctggccagctacaatgatgaagatatttacctcttcaactcctctctcagtgatggtgctcaatatgttaagagatataaggggcacagaaataatgacacaatcaaatgtgttaatttctatggcccccggagtgagtttgtcgtgagcggtagtgattgtgggcacgtcttcttctgggagaaatcatcctcccagatcatccagttcatggagggggacagaggagatatagtaaactgtcttgaaccccacccttacctacctgtgttggcgaccagtggcctagatcagcatgtcaggatctggacacccacagctaaaactgccactgagcttactgggttaaaagatgtgattaagaagaacaagcaggagcgagatgaagacaacttgaactatacggactcgtttgacaaccgcatgcttcggttcttcgtgcgtcacctgttacagagagctcatcaacccggctggagagatcatggagctgagttcccagatgaagaagagttggatgagtcttccagcacctcagatacatccgaggaggagggccaagatcgagtgcagtgcataccatcctgaaggcctcatatccagtccagctagatgccacctaagtacactggactttaaaattcagtttgactaatttagaattgtcaattgattaacagatttgctttttgtcttctgtttttgttaccccttatatgagtgcatacacaacttatttatgcctcttttcctttgttcccttataattgacctctaaaattgcataattttgttgaaaaaattaatggccttattagatgtatctactcatttcagacattctgaaagctattactttttagttttttcattttttaccaatttattttgaagataaagttcttcagttgagttgaaaatttcataaacgtgtttattctttagaggtaaaataaggcaaaccatagttctttgaatactgacacacacatacacacagtctcagaaaaggaaaagagaagtagtgtgtagattaattcctaacacttggccacacacacacacagcttcaaaagttgtagtaacaagagagaagaataagaaagtgggactgtatacaatctctatgaatcctgccaatatttaccaattcgcagtgggtggacatgatcggtttttaaggatttatgaccagaggagaattgatgagaaagaaaacaatggagtactcaagaaattcactcttcatcatctggttaattgtgattttccaacaaacatcacctgcattgtgtacagccacgatggcacagagctcctggccagctatgcacacacacatacacacagagccttagaaaaggaaaacaagaagtagtgtgtagatgaattcctaaccagataattcatctcctcagagcaaataacttgggattatccacattttctgaatcaatatgttaataatattgattaatttgagcacactgaagctggtaagaactaaattaaatttaatcacatgacattgtttactctatgcattaaatgttcttgaagttttatggttgggaactcccacaggattacattccaggaagtcctcctggcgcaagcatctcctataagataccagataggaatataaaaatctctcatatttgaaaacatttattttaattaacttttaagaataagttgcaataaaaattgtttatacttacacataaccatttgatacagttggtagaaaaatcctatttaacatccatgcattgcttaaaatttagctgttttatgagtttgttttgaaaattgttgcaataaaaattgtttatacttacaagtgatgtagttggtagaaaaatcctatttgacatccatgcattgcttaaaatttagctgttttatgagtttgttttaaaaattgttgcagtaaaaattgtttatacttacaagtgatgtagttggtagaaaaatcctatttgacatccatggattgcttaaagttctctcagctgtcctcgagtttaaattgttttaaaaattgtcttaagctttacttaatataaatttaagttactagatgttaaattactgttcaataaaaatattcatttttatttt

SEQ ID NO: 1390 - DNA, 3397 bp, Homo sapiens
agtcccagctggatctccggccagagcccgaggctgctgcgccgggcggctgcagcctccgctccagcgcccgcgccgtgccctgcatcccgggagcccggctggacccgcggcggctcggccggttgtctctccggtggggagtgagcgagcacacagcccccaccccaccccgggtgagagagaatgtcctgcacagggacgcccagctgtatctacctgctgtcagcactttctctgcgggacctggtgctggactgggagccccgaggtgttccccctcccctccctggggcagcagccaccatgttctcgtgtgtgaagccctatgaggaccagaactactcagccctgaggcgggactgccggcgcaggaaggtgctcttcgaggaccccctcttccccgccactgacgactcactctactataagggcacgccggggcccgccgtcaggtggaagcgacccaagggcatctgcgaggacccccgcctctttgtggatggcatcagctcccacgacctgcaccagggccaggtgggcaactgctggtttgtggcagcctgctcgtcacttgcctcccgggagtcgctgtggcaaaaggtcatcccagactggaaggagcaggaatgggaccccgaaaagcccaacgcctacgcgggcatcttccacttccacttctggcgcttcggggaatgggtggacgtggtcatcgatgaccggctgcccacagtcaacaaccagctcatctactgccactccaactcccgcaatgagttttggtgcgccctagtggagaaggcctatgccaaactggcaggctgttaccaggccctggatggaggcaacacagcagacgcactggtggacttcgcgggtggtgtttctgagcccatcgacctgaccgagggtgactttgccaacgatgagactaagaggaaccagctctttgagcgcatgttaaaggtgcacagccggggcggcctcatcagtgcctccatcaaggcagtgacagcagctgacatggaggcccgcctggcgtgcggcctggtaaagggccacgcatacgccgtcactgatgtgcgcaaggtgcgcctgggccacggcctactggccttcttcaagtcagagaagatggacatgatccgcctgcgcaacccctggggcgagcgggagtggaacgggccctggagtgacacctcggaggagtggcagaaagtgagcaagagtgagcgggagaagatgggtgtgaccgtgcaggacgacggtgagttctggatgaccttcgaggacgtgtgccggtacttcacggacatcatcaagtgccgcgtgatcaacacatcccacctgagcatccacaagacgtgggaggaggcccggctgcatggcgcctggacgctgcatgaggacccgcggcagaaccgcggtggcggctgcatcaaccacaaggacaccttcttccagaacccacagtacatcttcgaagtcaagaagccagaagatgaagtcctgatctgcatccagcagcggccaaagcggtctacgcgccgggagggcaagggtgagaacctggccattggctttgacatctacaaggtggaggagaaccgccagtaccgcatgcacagcctgcagcacaaggccgccagctccatctacatcaactcacgcagcgtcttcctgcgcaccgaccagcccgagggccgctatgtcatcatccccacaaccttcgagccaggccacactggcgagttcctgctccgagtcttcactgatgtgccctccaactgccgggagctgcgcctggatgagcccccacacacctgctggagctccctctgtggctacccccagctggtgacccaggtacatgtcctgggagctgctggcctcaaggactccccaacaggggctaactcttatgtgatcatcaagtgtgagggagacaaagtccgctcggctgtgcagaagggcacctccacaccagagtacaatgtgaaaggcatcttctaccgcaagaagctgagccagcccatcactgtacaggtctggaaccaccgagtgctgaaggatgaatttctgggccaggtgcacctaaaggctgacccggacaacctccaggccctgcataccctccacctccgggaccgaaatagccggcagcccagcaacctgccaggcactgtggccgtgcacattctcagcagcacctccctcatggctgtctgacacctgcccacctacctggctctgaccgttcccaccaccatctgcatgtccccactgggcctgagtctagcctgggagccaggatactggggtccttttcccactcttccactgacttgctgtgtgaccttaggaagtctctgcccctctctcagcctcagtgtcccgagggccccgaagcattccattctcgtggaggagtttccttgctgagatttcaaatagtcctccccacctcaactgtcaccactgctaagggactctatccattgagcacattttcctaaggccctgctgtctgccgaggagcgccaagaagatgtcacttgtttacacacgaactgccacatccccaagctccgttcttgcccctcgtgtcctaggcccaacccagcctcccagacctcactttccccatcagcaatacctggtgttctcccaccttgaaaggactcttggctcctgccgggttcctgctcaggctggaattgggaaaacatgcaggtgacatttgttcattctctaatcccatcctctcacccatccatttcctcactcagtggagatttgccaaatgaataaacgacacctttgaggccccaggtgaagcggggccctactccggcctctgccttgggcctcgcctctgtcctcaggtcctctcagaggcagatacctaggggagctgctgctgcctgctcattctagcttccgattccattcccagcccctgcgttaaggtccctggagaggtggcgtcagtgggggtgaggaagggcatcttcctgactcctctgcccagtgctggaaggagcatgcctgggttagtgggccaggggccaggcagctgggggcctttggggaccagaaggggagatgtgctcccagagcctctctgctgtaagaccccagcttttcctggaagatgggactctggggtgtgtggtgctcaccagagtcaggccacccactgggctcggcaggagataggggagagcaattactttgttcactgtatgcacccgcgggggcctgggagtccccatttgcaggtgggtagggcctccagcccacaccacccagacctaggcttccctcttctcaggatccaccacagggttaggggacaggaagcctgttctattctcaataaatcttacaaaattcc

SEQ ID NO: 1391 - DNA, 5004 bp, Homo sapiens
agagcattgttggaaggattagaggagtcaagatatggaaggcccacagaatggttggggagaaaagccagcttctggaggcaggggaaagggtggggagtggctggggaagcagggcctgtaccctgggtttctgcattggggttactcctttgctgctgggagtgatagcagggtgatgagagccaccctgggcctgcgctcctcctggtcatgctgttgtcctgggtcccagggtgcctgggaaagggcacacagctttactgatgggtggccagtggggagtgcccccatcgggcattccaccagtcggccccgatggtcctggcctcctcatgtttatctggcccagggacaccaaggctcagagaggtaaacttgcccgaggtcacacagctaggagggggagctgagtcatcacccaggtttgtctgccccagggctggagctctgttttcaggccacctgaccagctgaggagatcgtcagaaaggctgggacaccaacggatgacgcacaaatggaggaattttcaggcacggtcaaagctaatgggagggaaaatactgaagtgtaatattccagagttctctcttgtctgctctgactcctgccagctgccctgcacctagagggacaggaggctcttctccggggcattgcatggccgggagccaaatgagctggcaccagaacctggtgagttgcctggcttttcagacctcagcctcctcacctgtgaagtgggttgaacagctcttctctgcagaggagctgttgagggcggtatggaacactgccaggcacacagttggcccttgacaaaaccattgctgtgtccccagcctgtttctccccaagtcccattgatggttctctctatccctgtttcctcagaaggtcaggttttctaagcccgaaggcttggagccaggcaggagctgtctccctctccagtgctgccgactcaacccttttcccttagaagcagggagggaggctccccttggctccctccctctgcagccctggctctgcgccctgggaatgctgcctggggcagggccacgtagagagcagggccagtgcaggcctttgggtgttcccagtggccaaagtcctttagtctgctttcctttgggcccccttgcacccctgaatggatgacctgggggattccaagtcggtttgggaggggtgacagcacaaggctggaggttgggagagtctggctgtcatcccagcttggattgtagtctgccatgtgacctttgggccaaagataaatcctccctgggccacagtgtccctgctggtcagatgaaagaatcagatgagatcatttctgaggatctttccaggcttcatattcttctgtttgattatccccccaaataaattggaaattggaggcccaaggatgagccctggttgaggacgcagagcccaggggccgtcccatcctccacacttggcccagttgtgagtgggggaatgggatttagcacctgaagccccagatttaaatatatccccactccccgccggggtccccgcactcctgcacctccctcctcccaggacggccctgacctgcaggcattgttccccgcccatgcccaagccccgagggaattccatcgggttggagagtcttcccttctgtagggggctttgctcctctctaccagttatgtgaccttgggcaagtcacttcagctgcctgaccccagctccctaggactagttgaagtaatggatataaacaccctttggggaccaaaagcccctagagagatgagacctggcccaggcagtaagtcttcaacaaatgtagaataggaggatgctgtaaacaagccagccaaaacccaccaaatcccttggtggaggataagggacatttgagacagtctttatacaggagtctcgggccccaggaagccagggcagagagtctttgccaaacttccccctgcctaacaagaaggaaactgaggcaggaccctgccagacccagaggcaaacaggctgccctcctgtgaacttgttgggggtcatttccacaagggaatagttctagaagaccagggtgagtcagtaacaatggcagaattccagtcagaggaagaagactttggtgtagctggggctggagcatagaggagcgacttggctgccgccctggccctgtgtcagaggtgttagaaccagagccactccatcttgagtaggagctgggtaaaatagggctgagacctgctgggctgcattcccaggaggttaggcatttttagtcacaggatgagatgggagtcggcaggactggtatcataagatacaggtcataaataccctgctgataaacaggatgcgctaaacaagccggccaaaacacaccaaatccaagatggtgatgaaagtgatctctggtcatcctcactgctcattatacactaattataatgcattagcatgctaaaagacactcccaccagcaccatgacaatttacaaatgccatggcaatgtccagaaattaccttatacggtctaaaagcgggaggaactctcagttctggggaaatctcccctttcttggaaaactgattaataatccaccctttgtttagcatataatcaagaaataaccataaaaacagccaaccagcagcgctcaggggtggtctgtctatggagtagccattcttttgtttctttacttctctgtaaacttgctttgacttcactctgtggactcacctcaaattctttcttgtgcgagtccaggaaccctctctttgggtctggattgggacccctttccagtaccattttttctagtgaaccacgaagggacgataccagaaaacaccctcaacccaaaggaaatagactacagccccaattggctgactttggctatagaaaaaagaaaggaacgaaaagagacagttttttttggaaagctaagtcttccctttatcgagtcaagaaacccccccttcttgagctatttacagcttttaacaattgagtaaagtacgctccggcctttgaatcaagcaagaccccactggatcaccaaagagttaagcaaaggaaatccctgcctccctttatctccgcagaacccagaggctgaaagggagggagcagggaggaggggaagtgggaagcggctctgccctctccctccgccctccctccgccctctctccctccatcccctcctctctccctcctctgctgggcctgggggtctgggccagcaacaagttagtattgcagacatgggccaaggagccagaggccatgcagtggctcagggtccgtgagtcgcctggggaggccacaggacacaggaactatggtgttctcacaccaaagcatgggctcggccacccatcccctctcctgagaacaagcctccagaaccctccacgtttgtccccagtgttcactaacctcagtcctcctgcccggagggcatgtgtttgctggagatagtggagtcggtggcaagaaagtgccagagggaggtcaccatggggacagccgccctgggtcccgtctgggcagcgctcctgctctttctcctgatgtgtgagatccctatggtggagctcacctttgacagagctgtggccagcggctgccaacggtgctgtgactctgaggaccccctggatcctgcccatgtatcctcagcctcttcctccggccgcccccacgccctgcctgagatcagaccctacattaatatcaccatcctgaagggacaggggcagagccgtcacagatgagtgtgggcacctccttggagcaggctcagatgtccaccctgacttgtcccctttttatccccacagtgggccgcaagacggccctgcacagcggcgaggacttccagacgctgctcttcgaaagggtctttgtgaaccttgatgggtgctttgacatggcgaccggccagtttgctgctcccctgcgtggcatctacttcttcagcctcaatgtgcacagctggaattacaaggagacgtacgtgcacattatgcataaccagaaagaggctgtcatcctgtacgcgcagcccagcgagcgcagcatcatgcagagccagagtgtgatgctggacctggcctacggggaccgcgtctgggtgcggctcttcaagcgccagcgcgagaacgccatctacagcaacgacttcgacacctacatcaccttcagcggccacctcatcaaggccgaggacgactgagggcctctgggccaccctcccggctggagagctcagctgatacggcatcctgcgagaagacctgccctcctcactgggatccccttcctgcctcctcccagggctctgccagggccttgctcagtcccttccaccaaagtcatctgaacttccgtttccccagggcctccagctgccctcagacactgatgtctgtccccaggtgctctctgcccctcatgcccctctcaccggcccagtgccccgactctccaggctttatcaaggtgctaaggcccgggtgggcagctcctcgtctcagagccctcctccggcctggtgctgcctttacaaacacctgcaggagaagggccacggaagccccaggctttagagccctcagcaggtctggggagctagagcaaaggagggacctcaggccttccgtttcttcttccagggtggggtggcctggtgttcccctagccttccaaacccaggtggcctgcccttctccccagagggaggcggcctccgcccattggtgctcatgcagactctggggctgaggtgccccggggggtgatctctggtgctcacagccgagggagccgtggctccatggccagatgacggaaacagggtctgaccaagtgccaggaagacctgtgctataaaccaccctgcctgatcctgcccctgcctgaccccgccacgccctgccgtccagcatgattaaagaatgctgtctcctcttgg

SEQ ID NO: 1392 - DNA, 3985 bp, Homo sapiens
aagaagaaggttttgacagaagctgatactccaagcaagtttgacccaattaattatttgggggaatatttaataagaaacaatcctaattatatcaaagacccaggaatgtctggttaccagaggttgatgaaagaagtcacagaagacctgaagatatatgttcctgacactatctgcaacagagtatccaagatgaaggagaatgttaaacagaatagaaaacaaagagaaagcatagacaaaatcaaagtcaaggtggccaacacacggaaacaggctctgcaggagcaattcgatgaatggattctagaccctaaaggaatgattcctaagtcagtgattcagaatgttcttcaagaattctttcaaaatccagatttcaagcttggatcacactgcaaacaactggatattactgactcaacagaaccaagattgaacaaaatggaatttacagaatacatctcttcacatattaaagacttgaagagtgaaatgtttgaggaacttcttaagcacctttgccactctgcagatgaatttcgggaggtcataaaagctgacatgcggaggcagatgttcgctgaactcttcctacattgtgaccacgggaaggtagggtttttggatcggcagaggacattggccctgctggaattgttctatgaccatagttcacaaatgcttaggagtttacttcaaaacccacgacaatggccattcattgaatttgaagagataaacttgactgagttgtggggagacatggataatcagaaacacatttatgaaggttttgacaaagtgctcttggagatgaatacattactttctgcaaatcatgctagcaaaacccaaagtaaattattagaaagtccagatcaacctaaacttaacgaacagagaacatcaacaccatcaccaaacccgccagaacagcagagaggagtaactgcagaacaaggaccacaaagaatttcaattgaagaacaacaacaaggcaaaaagccaactgcagagcaagaactgtacatagaatcagtaatagaaccaggaacacacacagagtcaactctagaacaagggtcaagtagaaggttactgacagaacaagaaacacacagagagtcaactacagaacaaggacagcacaaagggtcaatagaaggacaaggaccacgcagagtgtcagtttcagaacaaggatcaagcagagagtcagttgcagaacaagggtcacgcagagagtctattgcagaacaagatcgacacaaagggtcagtagcagaacaaggatcacgcagaatgtcagctgcagaacagggatcactcagagagtcagtaatagaagaaccataccaaaaatcagaacaaggaccttatggagagataatttcagaagagcaagaagacataggctcaacttcacaatcaagaaaagatagtatcttaaaaagtacaaaatatggggaacctataacctctgagtacattgaagtccctctacaggaaaagaggtcttgggaacaaacatatgaagaggaaatattcctgagttctgaactgcaagaggaagttccaacgttaagcagaaaagatcactttccagaaactacaaaaaaggaagttcagaaagacaagccctgtgaacccaagtcccaaaaaatagaaggaaagtcatggtcaggtgaattttttacttgtaactggaaaatgaagtatgtcacatttgaagatgaggaacaggcaaacttaatctatggtaactccaggttcacagctaaactacacatccaatttccaaagccacaccctggtcacgaagtgagattgtcttcaaaacaatttcagaattacatagaattggttgtgtctgaactcaggggcaatgaagaccaagttctggaaagtgttgtggaatttctgattaatgctttagagaggagccacattgagagtctgaggaattctgccaggcggaaatggctgcaccaaatccaatgtgctgcagagacaagtggggtgtccctagagccggtgtatagtgagacctttaaggccctcatgcaggatgctgaagcccatggaaataaaaagatcagtgctcacatttccctcttagaagaaaacctactactgcctgagaaagggaatgttctattgaggaatgtggcttgtaccttagatgatgctcaatttgtactgaacagagtgctctacagggacatgaaaggaatcagctttacagtagtggatgaagggaagccaatccatgttccccaagttcagtaccatgggaacatcttcttctggaaccagtcccgtaataagcatgattataatgggtcattcctggctctgcctcttcaagatgcatatatgaggatctttggggtcttggctgttgatacccttagagatccccacgaaataaacatctttctacctcatgagatcagattctatcagggtgttgctaatgtctttagcactgcctatcactacgtccacagccgggagcacattctgcatattgtgatcactggcataggctggctttatgacgtcacatccagcatcacctccatcactacgtactttgtagagcctagcccagcccaggattcagactatgttttacgcaacatgatggttacagggcagctgggtctaacagaaatccacaaaaatcctcctaccatccacaggaagtcatgcatcttcagagatttcctctttaaatgtactgacagttcagaagttgttctggcttctgcctgtggagaaacgcatatagtagttccacttcgtgagagaacaggagaggctctgggagtcctcgattttaacatcggccaaaataggatgttgttgtgtcaagaatataaagatctacagaaaatgatgaaagtggtccaagtggcctgctatgaaatacttggcgagttctctggagagataaagaaaaaatatatcttagagattgaaaatgtcagggaagtccagcgggcaggaattctcttcttccgaatcatgctgctcgagctacaggaaagcatccaactactcaattccatggaatttgtgtcactgttgctctatgaccatactcttgtaacagagccaaattctcctcaagacagcaaatctatggagttggaagccaacgtgaaactagtgcgtgacatcctgaaggcggttatcttgttctttcatccagagttggaattttcaagtgactttggaagttgggataagtgtaaattttatgttaacaaatatttagtcaacaatatttgtgcctttgatccaactgccaagcatgtggaagttaatgtacagcttattgatgaatatatcagagatcattcccgaactgaagtatggaaatttggtaatgttgtcattgaacatctataccactggatacacatctgttcagctctcatgaagataaccaaacaactaaatagtggtattacacctccgttgccctccaagactgacaattatatgtatgcaaaaatgccaggggaaggtttgcaagagaagtgataatggatgataatggaattgatactgtatttaggatcctttgtttgttatcagttttgtttgttaactataaaatattttccattggaaaggggtacctataaatgtcttctgctgctaatatttatctcagcactttctaaacccaaaagtgctacctaagaagaaatttagccaaaaaatacccagctaaggtagccatagccaagtgtatttaagtatgttatagaatatatttgaaagcttcctttcagtttgagctttgtatctgctgtggaactgttatggttgattgggtagttatttttcattcttataaggttcaaagtaacagctgaggatttagaaaacaagaataccaaatagaatacgaaataataaagataaaccaaaagaataccaaataataaagatttttaagaaatgg

SEQ ID NO: 1393 - DNA, 4576 bp, Homo sapiens
aactttggctcagcctgtcttcatccactgtatcctgacacctctcctactccttctctttaatgtacagctgagactgggatacccttagactgaaaggaaggacacggctatgtagaaaagaattgactgaaggggaggagtactcgtgaaccccttgcttcagcctcccaatgttctgagagaggaggagccaggcgcagtggctcatgcctgtaatcccagcactttgggaggttgagatgggcagatcgcaaggtcaggagatcgagaccatcctggctaacaggtcacattcagacagcacacctttgcccaattttctttctggatctcaccgtcctgagtgttgtacctgcaggttgctcacagcctctggagcccaagatagtctcccctttgggaggaggctctacagtggtccctggcgaagttgtgaagaggtctgccacgtctctgtgctcagtgtcctctctacatcctgtggcttgagcctgagcttgcccatattccctggctggatggagtggctaagccctgatatcgctctgcccagaagagatgagtggactcaaacttctccagccaggaagaggatcacgcatgccaaagtccagggtgcaggtcagctgaggctgtccattgatgcccaggaccgggttctgctgcttcacattatagaaggtaaaggcctgatcagcaaacagcctggcacctgtgatccgtatgtgaagatttctttgatccctgaagatagtagactacgccaccagaagacgcagaccgttccagactgcagagacccggctttccacgagcacttcttctttcctgtccaagaggaggatgatcagaagcgtctcttggttactgtgtggaacagggccagccagtccagacagagtggactcattggctgcatgagctttggggtgaagtctctcctgactccagacaaggagatcagtggttggtactacctcctaggggagcacctgggccggaccaagcacttgaaggtggccaggcggcgactgcggccgctgagagacccgctgctgagaatgccaggaggtggggacactgagaatgggaagaaactaaagatcaccatcccgaggggaaaggacggctttggcttcaccatctgctgcgactctccagttcgagtccaggccgtggattccgggggtccggcggaacgggcagggctgcagcagctggacacggtgctgcagctgaatgagaggcctgtggagcactggaaatgtgtggagctggcccacgagatccggagctgccccagtgagatcatcctactcgtgtggcgcatggtcccccaggtcaagccaggaccagatggcggggtcctgcggcgggcctcctgcaagtcgacacatgacctccagtcaccccccaacaaacgggagaagaactgcacccatggggtccaggcacggcctgagcagcgccacagctgccacctggtatgtgacagctctgatgggctgctgctcggcggctgggagcgctacaccgaggtggccaagcgcgggggccagcacaccctgcctgcactgtcccgtgccactgcccccaccgaccccaactacatcatcctggccccgctgaatcctgggagccagctgctccggcctgtgtaccaggaggataccatccccgaagaatcagggagtcccagtaaagggaagtcctacacaggcctggggaagaagtcccggctgatgaagacagtgcagaccatgaagggccacgggaactaccaaaactgcccggttgtgaggccgcatgccacgcactcaagctatggcacctacgtcaccctggcccccaaagtcctggtgttccctgtctttgttcagcctctagatctctgtaatcctgcccggaccctcctgctgtcagaggagctgctgctgtatgaagggaggaacaaggctgccgaggtgacactgtttgcctattcggacctgctgctcttcaccaaggaggacgagcctggccgctgcgacgtcctgaggaaccccctctacctccagagtgtgaagctgcaggaaggttcttcagaagacctgaaattctgcgtgctctatctagcagagaaggcagagtgcttattcactttggaagcgcactcgcaggagcagaagaagagagtgtgctggtgcctgtcggagaacatcgccaagcagcaacagctggcagcatcacccccggacagcaagatgtttgagacggaggcagatgagaagagggagatggccttggaggaagggaaggggcctggtgccgaggattccccacccagcaaggagccctctcctggccaggagcttcctccaggacaagaccttccacccaacaaggactccccttctgggcaggaacccgctcccagccaagaaccactgtccagcaaagactcagctacctctgaaggatcccctccaggcccagatgctccgcccagcaaggatgtgccaccatgccaggaaccccctccagcccaagacctctcaccctgccaggacctacctgctggtcaagaacccctgcctcaccaggaccctctactcaccaaagacctccctgccatccaggaatcccccacccgggaccttccaccctgtcaagatctgcctcctagccaggtctccctgccagccaaggcccttactgaggacaccatgagctccggggacctactagcagctactggggacccacctgcggcccccaggccagccttcgtgatccctgaggtccggctggatagcacctacagccagaaggcaggggcagagcagggctgctcgggagatgaggaggatgcagaagaggccgaggaggtggaggagggggaggaaggggaggaggacgaggatgaggacaccagcgatgacaactacggagagcgcagtgaggccaagcgcagcagcatgatcgagacgggccagggggctgagggtggcctctcactgcgtgtgcagaactcgctgcggcgccggacgcacagcgagggcagcctgctgcaggagccccgagggccctgctttgcctccgacaccaccttgcactgctcagacggtgagggcgccgcctccacctggggcatgccttcgcccagcaccctcaagaaagagctgggccgcaatggtggctccatgcaccacctttccctcttcttcacaggacacaggaagatgagcggggctgacaccgttggggatgatgacgaagcctcccggaagagaaagagcaaaaacctagccaaggacatgaagaacaagctggggatcttcagacggcggaatgagtcccctggagcccctcccgcgggcaaggcagacaaaatgatgaagtcattcaagcccacctcagaggaagccctcaagtggggcgagtccttggagaagctgctggttcacaaatacgggttagcagtgttccaagccttccttcgcactgagttcagtgaggagaatctggagttctggttggcttgtgaggacttcaagaaggtcaagtcacagtccaagatggcatccaaggccaagaagatctttgctgaatacatcgcgatccaggcatgcaaggaggtcaacctggactcctacacgcgggagcacaccaaggacaacctgcagagcgtcacgcggggctgcttcgacctggcacagaagcgcatcttcgggctcatggaaaaggactcgtaccctcgctttctccgttctgacctctacctggaccttattaaccagaagaagatgagtcccccgctttaggggccactggagtcgagctcagcgttcacaccaggcgggctgggtcccctgcccacctgcctccctgccccctgtgacggagggggcaagcaagcccccagaggccgtgtctctggacagacggatagacatacggaagcgaggcctggaccaagagaggcccaggctactggaggagtagaaggatgggccccgtggggtccccactgccccggtacgagggggcccaagaccctggcaggtcaggggccctggccaagccagatctggagctgctgctccctgctgcggagaccgcggaggcttcgcgttgaccaagttccttaaagaactggctgatggggcaggaggtccaggcctgggctctcgggccctcctagagggccattggagcttgcagctcagacccccactttgagttttatttatttaaatagtagttggatgcttggcacgtcgtcctgtaataggaaacccttgcctcatcagttttcctgatttacaagtgcaatattttagccaatgccttgggagaagctgccatgcaaaggtggacaccattctccagcttcaggggatatgctcgtcccgggcaccggtggcaggcagctggccttctggactaaggcagcctggggggacactgcagtctggctacacacagagatctggcaccccctgggtggagtgtccctcgggggctttgggaaagcatggcaccctcagaccacacagtagccaagttctggagcaaataaaaggcctgtgtt

SEQ ID NO: 1394 - DNA, 3392 bp, Homo sapiens
cttatcctgacattgccctttcctggtcctggccccggccctgtcccagccctgttctggccctggtctgaaccctggccctgcaatggaccctccttggtcctacccagaccctggttctggtcctacctctgccctggccatacctttgccctggcctggaccccggtactggtccttgtcctgccccagccgtggccccggccccgccctgcctgtgccctgttctatcctgggctggccctgccatggcctggtcttgccattggcctgccctagcctgccctgcttgtgccctagatctgccccggcctttgcccctgtcttggttccagccttgactcagccctggaccttccctgaccttgcctcagccctggcactaccctggccttggcttggcatttgccctactctctctatggcctggctctggtcctgccctgctctgctcttgttctgtcctggcacagccctggccctgccgtatcactggctctggtcctgcccttatgcaggcctgaccgtgcccctgccttggctttggcctggaccttggccgtacagtgaccctgccatgaccctttcctggccctggcctggaacttggccctgccaaggactcgccctggctctgtcatggccccggccctttcctggatttggatgtgtcctgtcccttatttgccccggcccttccctggctctgccataccccttctctggggtagggccagggtcaggaccagggtagggccatggtaaggcctgaagatgggaagggctggggcagcggcaggaccagggaagggtcagggccagtgatgtggtaggactaggggcagagccggcactagggctgagccggagcagagcaggagagattatattaggctattacataaaatttttattttagatttttaagataactatggtagtggtaataatgtccatactatgttgtttgtaatagtaataatatttgcagtaaataatcactaaattttaactaatactatctttgcttccagtagtgttctatgagtacaattttatcaatatgtaaatatgtgaggcattgattctcacaataattctatgtgctaggtacttaaagcatccccattttccaaatgtaggaaacaggcataaagaagttaaatacttggccagattactcctgtaatcccagcactttgggaggccaaggcaggcaaatggcttgagctcaggagtttggaaccagcctgggcaacattgtgaaaccccatctctactaaaaatgcacaaaaagagctgatttaagtttcttgtaggattctggttataaaacactggtcaaacacaccgggcgtggatagggcagggccagggacaaggtcaggtcaggaaggggccagggccaaggcagggccagagctggacttggaggtgtcctggtctgatttgccctgtcccaacgttggcccagccctgctctggcacttcctgtcatgccctgtccctggtctgagcattggccctggccctgtcctgcttctggccctgccccagagttgaccaggcactgccatggcccagtcctgcattgccctgcccttttctgccctggtgctgccatggccctgcttgggccctagctctgcctcgactctggacctgccctgactctgctcagccctggatctaccctgactctgccttggtgttgccctcccatctctatggcctggctctggccctgccttgcacaggccatgctctgccctgcatgtcccagcctgggcccagcccttgccctaccatatttctgaccccacccgtacccttgttctggccttgaccctgccgtggcattctcctggcccttccttggtcctgccctgcccttccatgccctggcctttccctcaccctgcactggtcctgccctgccctggcagtgccttggccctggccctgcctctgccttctccctggccttgctctttccctgccctggcctgaccccaggcctaccgagtccatgaaatgaccctggacctgccttgccatcatctgtcctggccctgtattgtccccaccatgctctggtccagcgcttaccctggccctgttgctagtcctgccactgctatggccctgccctgtttttggccatgacctgtgctaccctagccgtgccccgccttggccttggccctaccgtggccttctcctaccctggcctggccgtacactggccatttctaccctggccttgcccttccctggtcttgccctgccctggccttgccctgccctggccttggctttgccttatcctggtcctggttctgccctggccctgccctttctctggatgctctctggttctgccttctccctggccctgcccttgctctggccctgttcctggctcagccttgaccctggccctggccctgacaatccccaggccccacactggccatgcttggccctggcccctcctttggccctgccctggccctgtgctatcttagtacagggccttggccttggccctgtgctatcttagtcctgccctggccctgaacttgccctggccctaccctcaccctacactggccctgccctaccctggccttgccctgacctggccctgcctttggcctgccctggctctggttctgccctggccttgcccttgccctggaccctccctggccatgtttttactgtggtccttctctggccttgcccttgccctttcccctttctggtcctgccatgtttctggccctgccctgtccatgtcctggacctgactctggccctggacctccctgtccctgccctgccataccctggcccgttccttgctctacactgaccctgccctgccttggccctgtgctaccctagccctgccctggccttctgctggccctgatcctgccatggccctggccctgccatgtccctgccctggccctggttctgccctacttctggccctggccttggtcctcttatgtccctggctgtgaccctgcccctggtttttctctggccatgaccctgccctggttctgtcctatccctggccctgtctcagttctgtcctagccctggcctttcacagtactttatgcttagtaagggctccatagtgtctgtgagttgaatgttgtgttcatagtatctgccaaaacagaaagaaaaaaaacaaaatctgaagatgagaagttaaagctttgtatataatatgccttgaattgtaagtgcttgttattagttgtattacatgtaggtcatggttttgtacacataactccaaaccattgatactgttaaaagactatatgaatatatgaaagaatatataaacgtaagaatgtatgagt

SEQ ID NO: 1395 - DNA, 5089 bp, Homo sapiens
gttgtcgggatgggggcgggagccaacatagagccctcagtgggatgagggtgaaactgctattgccggcggctcctgttttaccgcgtcagcatgctggtgcatttatttcgggtcgggattcggggtggcccattcccaggcaggctgctaccgcccctccgcttccagacattctcagctgtcaggaggttcctgcgtctgcagccgcgtgtcagccagaaggaggggacgctcggggtcagtgaccacgcccagtccgcactcccgaccgggggtcccctttcctggccctggaggtactctgatggctaccgcagctcctccctcctccgggccgtggcccacctgcggtcccagctctgggcccacctccctcgagcccccctagctcccagatggagcccctctgcctggtgctgggttgggggagccctgctaggccccatggtactgagtaagcatccccacctctgccttgtggccctgtgtgaggcagaagaggcccctcctgccagctccacaccccatgtcgtggggtctcgctttaactggaagctcttctggcagtttctgcacccccacctgctggtcctgggggtagccgtcgtgctggccttgggtgcggcactcgtgaatgtacagatccccctgctcctgggccagctggtagaggtcgtggccaagtacacaagggaccacgtagggagtttcatgactgagtcccagaatctcagcacccacctgcttatcctctatggtgtccagggactgctgaccttcgggtacctggtgctgctgtcccacgttggcgagcgcatggctgtggacatgcggagggccctcttcagctccctgctccgacaagacatcaccttctttgacgccaataagacagggcagctggtgagccgcttgacaactgacgtgcaggagtttaagtcatccttcaagcttgtcatctcccaggggctgcgaagctgcacccaggtggcaggctgcctggtgtccctgtccatgctgtcgacacgcctcacgctgctgctgatggtggccacaccagccctgatgggagtgggcaccctgatgggctcaggcctccgaaaattgtctcgccagtgtcaggagcagatcgccagggcaatgggcgtagcagacgaggccctgggcaatgtgcggactgtgcgtgccttcgccatggagcaacgggaagaggagcgctatggggcagagctggaagcctgccgctgccgggcagaggagctgggccgcggcatcgccttgttccaagggctttccaacatcgccttcaactgcatggtcttgggtaccctatttattgggggctcccttgtggccggacagcagctgacagggggagacctcatgtccttcctggtggcctcccagacagtgcaaagacaggtccatggccaacctctctgtcctgtttgggcaggtggtccgggggctgagtgcaggtgcccgggtctttgagtacatggccctgaacccctgcatcccactgtctgggggctgctgcgtccccaaagagcagctgcgtggctccgttacatttcagaacgtctgcttcagctacccctgccgccccggcttcgtggtgctgaaagacttcaccctgacgctgccccctggcaagatcgtggccctcgtgggccagtctggcggaggaaagaccaccgtggcttccctgctggagcgcttctacgaccccacggcaggcgtggtgatgctggatgggcgggacctgcgcacccttgacccctcctggctccggggccaggttgtcggcttcatcagccaggagcccgtcctgtttgggacgaccatcatggaaaacatccgctttgggaagctggaagcttccgatgaagaggtgtacacagccgcccgggaagcgaatgctcacgagttcatcaccagcttccccgagggctacaacacggtcgtcggtgaacggggcactaccctgtctgggggccagaagcagcgcctggccatcgcccgagcccttatcaagcagcccacggtgctgatactggatgaagctaccagcgcgctggatgcagagtccgagcgggttgtacaggaggccctggaccgggccagtgcaggccgcacggtgctggtaattgcccaccggctcagcactgtccgtggggcccactgcattgtcgtcatggccgatggccgtgtctgggaggctgggacacatgaagagctcctgaagaaaggcgggctatacgccgagctcatccggaggcaggccctggatgccccgaggacagcggccccaccgcccaaaaagccagaaggccccaggagccaccagcacaagtcctgagaagggccccctgagtgctgacgagtacagagctaaatggagcagctactgcagaatccagtacagaatcggtccaggagggtgcggctgtggacaggccagcatccccagcaggttctgggaggcgcaccttgaaaggggaaggcagacatcctgagtgatgggcgcctgtggccctgagactgtggatgagggggctaggctccagctggcttctgaggggcctggaaaggcacacaagtaggtccttggctgaactggtgccccagcaggacctcgtgtccctgcactgctgcagatgcatcagccctccccatgttggtgccgctgtcacttcctactgggatccttcccctatccagccacatccaggctgtgggactacacggtgccctgttcccctgggcaggagaagaggtggtacctgcaatgcaccttcacagccagagaagcagtgaaaccccttggctagtccagctggaagagctagaccgcaggagccgcgccgtcttcctaacctcgcctcggccttcgctccacagtggagagtgggagcctagctgtgcttgatgctgaatgcctgttttgagagtcgccggctcagcaccgccggctcagcaccgctccgcagcccctgcctgccacggtcagctacgtcccacctggtctgctgcggagtccccagcccagtgcctagcccagtggagccaccgcctgttcctcgggaaggaacagtgggacctgaccggccagatcacctcctccaatcctgccaggctagtgcctccctgccttccaaccttggctgtctcccaccctctcttctcctctccttgcctggcctcctgaatcctatcttagcctccttagccccctgactgactctctctcgcttcttccaagcctctgtagctggttccgctcctgggttctggccatgaagcccacctcaggcccagaggaggcccggcggccagcctcggacatccgcgtgttcgccagcaactgctcgatgcacgggctgggccacgtcttcgggccaggcagcctgagcctgcgccgggggatgtgggcagcggccgtggtcctgtcagtggccaccttcctctaccaggtggctgagagggtgcgctactacagggagttccaccaccagactgccctggatgagcgagaaagccaccggctcatcttcccggccgtcaccctgtgcaacatcaacccactgcgccgctcgcgcctaacgcccaacgacctgcactgggctgggtctgcgctgctgggcctggatcccgcagagcacgccgccttcctgcgcgccctgggccggccccctgcaccgcccggcttcatgcccagtcccacctttgacatggcgcaactctatgcccgtgctgggcactccctggatgacatgctgctggactgtcgcttccgtggccaaccttgtgggcctgagaacttcaccacgatcttcacccggatgggaaagtgctacacatttaactctggcgctgatggggcagagctgctcaccactactaggggtggcatgggcaatgggctggacatcatgctggacgtgcagcaggaggaatatctacctgtgtggagggacaatgaggagaccccgtttgaggtggggatccgagtgcagatccacagccaggaggagccgcccatcatcgatcagctgggcttgggggtgtccccgggctaccagacctttgtttcttgccagcagcagcaggtacccttccgtgtgcctccacacctactacttcaagcccacaccacctcggaccctaaaccctcagctcctcagacctgtctaggggcctctccccagctggcctctcacgctctccgggaagcctccttaaccctgtccccccacagctgagcttcctgccaccgccctggggcgattgcagttcagcatctctgaaccccaactatgagccagagccctctgatcccctaggctcccccagccccagccccagccctccctatacccttatggggtgtcgcctggcctgcgaaacccgctacgtggctcggaagtgcggctgccgaatggtgtacatgccaggcgacgtgccagtgtgcagcccccagcagtacaagaactgtgcccacccggccatagatgccatgcttcgcaaggactcgtgcgcctgccccaacccgtgcgccagcacgcgctacgccaaggagctctccatggtgcggatcccgagccgcgccgccgcgcgcttcctggcccggaagctcaaccgcagcgaggcctacatcgcggagaacgtgctggccctggacatcttctttgaggccctcaactatgagaccgtggagcagaagaaggcctatgagatgtcagagctgcttggtgacattgggggccagatggggctgttcatcggggccagcctgctcaccatcctcgagatcctagactacctctgtgaggtgttccgagacaaggtcctgggatatttctggaaccgacagcactcccaaaggcactccagcaccaatctgacctcccacccctccctgtgccgtcaccaagactctctccgcctcccaccgcacctgctaccttgtcacacagctctagacctgctgtctgtgtcctcggagccccgccctgacatcctggacatgcctagcctgcacgtagcttttccgtcttcaccccaaataaagtcctaatgcatc

SEQ ID NO: 1396 - DNA, 3069 bp, Homo sapiens
gagtgctggctttctattaaagggtgagtgcgtgcgcccaggtggtttggcctgtgtgcgctagttacttgcacgcgcttcttgagtctcaaaacacagagctctagtaaacttcagggggcggattcgtcaattacagttgcggaagaagactcgactcgaagagcggtccgccaccagggctctttccgcagcgcccccagcgggcgggggtcttgggcggggaagcaggagagggccgaccgagcgcaacaaagctgagcggcgcgtcgcttcaggaacgaagaagcctcgttatgcaagcgaaaaacaaagatgctttgcagcctattaaggaagataggactgggaaggcccaggatgatgctttctggcttcaatcacttattacggatgcattccatgataaaggatttcagaaaataaaagaatactttcaacagaaagagagccactttcctcaaaaatataatcgtcttctattataccgtcttgacagatcaataaataaggaactagataaaaatgaatttcagtctgtgtcactgttgctgaaatgtattcagcgattcctcgtagatggcctgaaagaagatgaacctctgctaattcggcagggactgatcccaaagctagtttcctggtttgaaagaacaacaggaattctgacctcggaaggcctagcctcagacacgtcgctgatttgtgttatagaagatttctttgacactgcattgattatttccaggagtagtagtgaagggaaaattcagatgttggattccttcctacttagcttaggattcctggtgacagaaaagactgtaaatcatttgcttcaacaggagggcttgaagacttttaactgcattttgcacgctgtccctcgagaagagagaaaaaaattccctttgtcagaaggcatgtgtcatcttatgaaagaccttgcaaggacactcttgactgtgggtgattatgaccagcaggttgctatttctgaagcgctgtgtagactgacgattaaaaaatcaagggatgaacttgtccataaatggtttgatgatgaagtcattgctgaagctttcaaagaaattaaggatcgagaatttgagacggacagtagacgttttctcaatcacctaaacaacagacttggtgaccaaagaagatgagaaaaccagcggatgaaaaattagagaaattttggatcgacttcaacctaggaagtcagagtgtcactttttatatagacaatgctgagaatactctatgggactcagtgacacttccgaaggaagcggtgatgaatttcagcataacagactttccctggagtgatgagtaaaatgtccggcaagattagtattttggggagatcatggaggcttactctagaccagcactgtcctatagaaatatgagaaacggagaagataaagatatttatcatttacctgaagaagcccatgattatcagctacaaagaagtcatgaaaatagaaatccattttgatttgcagttcaacatatcacaagtttccattcaagctttaggagaagacaaacagatgttgcctgaccagacgaaaatctcctcagaactttttagtaagtctgataaagaagacagggagagtcccagtggccttgaaagagaaacagagcaggcagaagaatccactaacatggtggagtttatgagtgctgaagatgaccgctgcctaataactctccacttaaatgaccaatctgagccacctgttattggggaacctgcctctgatagtcaccttcagccggtccctccgttcggggtccctgacttcccgcaacaacctaagtctcattacagaaaacatctcttctctgagagtaatcaagattcaagtaccagtgaactatcttggaccagtaaccagaaaaagaaatccctaaaatcatattccagtagaaagaagacaagaaccagaagtaatttgagaatcttgccagttttccctcccagtagtggcagtggccatgagaaagaccaagctaagcttctatcaccatcagagaaagaaatacccgagcaaaataacaccacatctccaaagacttctgaacaaaaattccaagatagttttgcttttttgactgctgaagattctgcccagaaaacagagcttcaagatcctcactcactgagtgagctctcttccttgaagcactcagaagatgaagaaaaacctaagattgtgaaccaagaatcactaacagaaagtactagcttgaaacataagctgagaaacttggaagacaaagacataccagaaggtagttttgctaagtcacaacaatcaagattggaagaagaggttgcttcgggatcccctttctcaataacagaagaaagagagttgccagaaggaatttccacttcatccctagaagttgtgccagagaacttgaacggttctgccattctcccaacctttgaaaacttcactaaaaaacggaaaagaaaatatgagcttaggtacagaaagcgtccgtttaattcagaaaatgcaaagaaagcaccggattgcctaataaaacttttaaaccagatgcaactgttcagactcaataaactagagcgctttcaaaatttggttcttcaagagttgagcagtcttaagcaggatattcaggccctggaacaccttgagaaggaggttctggaattctgggggaaacagtctgctgatctgcaatctttctgtgatctgcaagtgctgaggttcaattcaactcagacttcataagaaagccaaagcctggttttatgattgcagccctcagcctgggctgcctgaagacgaagagaaagagcaaggttattgttggctcaggccttgttagccagacttcgtgctctgtacgcattcaatttcctcccctccaaacatcatccctgggaactgctgagttcagatagaatatatgttggtagtttgcagttgggttattatccatttgttcataaaaattaaccttttgtattaaaatttggtcagatagtattaatagaaagttcaggatgtt

SEQ ID NO: 1397 - DNA, 3097 bp, Homo sapiens
cttacacatctcaaattctttttaaaaatttgggagtgttcccactttgcaagcatcccgagtgcgtcctgggtgtgactcttctgtgatctggcacttggcacaggaagtaaaagcggtagacatttttatagggtacaggtgatcaaccagcggggctgcaaaatctctggaaccagctgcccactctgcacccaagggccacacccaccgctgtctgggcagaagtgagaattcaggggagcatggaaatcagaacagacccatctctgaatggcctcgggctatgcggctcatgaggggcacggaacctacgccagtgaaacatcagggaatggagggaggtgggaacctttgcccacctttgcagcaagagccgtttcatctcaatctcttcatcagcctgggcacagagggctgcagtgggacggccctgggttctctgcaggttggcaccgaagccaacccatgggctctggtggcgagtgctgcgtgacttggcttcaacactacccaacactctggaattcatcagttgggggtggaggtttccattgtagaaaacaaacccaccaggtttgcccaggtgttaactatttacggtagaaacaggccagccaggcagtctcaggctgtctctgccatctggggttccagacagtgaaatggaggcagcagagacaggtggaggctcccagagaggcagaattgacaggggagggcacccaggaagccagaatcaccggtggaggcatccaggaagccagaattgacaggtgaaggtgcccagggccatctgaagcacacatgcagcctccaagtctcactcgcccagagtggacccagaagagtcactggatggagccccggggagtctgggcttggggtcagggtctccaggactctgctccatcatgggccttctagtaagaagagtcagttcttcggactggaggtcttcccagaaaacaaaacatttctttcagcctgatgcagtggctcatgcctgtaatcccagcactttgggaggctaaggtggcaggatcccttgagcccaggacttcaagaccagcctgagcaacacagggagaccctgtctctacagatagtttttaaaattagctgtgggtgtagtggcaggcacctgtggcccaagctactcgggaggctgaagtaggaggatcgcttgagcccaggaggtcgaggctgcagtgagccgtgatcgtccactgcactccagcctgggcaacagagcaagaaactgtgcccccctacccccaaaaaaagtttcttccttcctaacctgggatttatctttttggaagattccaaagtcccagcaatggcgtccagacacaaggttgtgtgatggtgggccggggatgcggggtggggtgaagacttggccagagggaggaacataccccgaccctccgtcctcactgcctccagtctgcctgccctgcagtggggttgttagaatctgggtcaggggttcacacatggcctgggcccactgccaccctctccagatgtatctccccagctggccagtgggctctcgtccctgctgttcctccccacccagtgcaaagggacaaggagccgggcccacggggcatgctgtagagataagacctgggtacactgaggaggggtaaggggctgggcctcgtcaagaagccctcctgcccaacctgtcggaatgcctggagccggagcccactgcaaggcagctggtgtcccccgcagaggcctccaggtggagcaggtctttgctctgctcctgggttcccccggggagaggaagactggcccacctgcaggaagggagaggctgggatgccgattacaggctgggatccctggccctgccactccccagctgctgacgggaggttgctgtgcctctccagggctgtttcttcatctgcaaatggggagggtgtggtggctcactgggcagggaggaccccgtgagtttcgaacagtctgtgtggctcacacacagtgttgaggaaaaccagcccatccttattatcattcccagtccaaatgccctttcctcctcgacctgctcccaggccaccctcccggacagccgctctgggggaagatgaggacgggaggaaagtgagagcaggactcagcacggggaagagggagcaggacggggactttggcaggcagtggggagagcttatgggcagagtccaagcgcctttcctgcagcctctggccacctggagctcggatggtggggctgtgctgagtctgactccagaaaccctcatcccagctgtgctcaggggggtagataacaagttccactttccctctccagttctcttctgggaggtgggtaccccaggcttcgggggatgacgcccaggggtgagggttgctcaggggcaggctgaggaggatcacaattgggaaagaatcctagcagacccccaggcagaagagtcaggaaggagtagaccctggtgttttgaactcagcacttgtccgggcagtgtgggaaaggggggcccggcgcggggaggcgccctgggaatgttcccaagggctccaccggtgtcgctggggttcccaggcatacgttttggtgggaaaagggtcggggaaggcagtgactaggtctctgtgcctttgttttaggctggaagctaaatccagtggtcggcgcagtctacgggcctgaattctatgcagtgacggggttcccctaccccaccaccggcacagccgttgcctaccggggcgcacatcttcggggccggggccgggccgtgtataatacatttcgggctgcgccacccccaccccccatcccgacttacggagcggtcgtgtatcaggatggattttatggtgctgagatttatggaggctacgcagcctacagatacgctcagcccgctgcagcggcggcagcctacagcgacagttacggcagagtctacgcagctgccgacccgtaccatcacaccatcgggcccgcggcgacctacagcattggaaccatgtgaaaccttccaccgtttccttctcggaccatgaagggcaaaaacaaaaaaacaaaaaaaatcac

SEQ ID NO: 1398 - DNA, 3933 bp, Homo sapiens
gaactcactccggcgagcgagcggcggcgctcggcattgtggcaggcggctggggccggctagggcgccggagccgcacgcagccgcggggctccgagaggcgcgcactggggctgggactgcgcggcgccgccgctgcgagcgccactgagcggtcgcgcaacttcggaggcacagcgccggagccaggcgagcgctcagagacccggagccagaggggcgcgccggagcctcgttcgagagccggcgccaggcacccaccgcgctccgagtgccaggcggccctccgcgcagcgtggcttccgctgcccccacggaaggcacgggctggcgctgccgggcgccggggaggacggcgaggaggaggcggcggcggcggagacggcggcggcgagactggggccagggagacagccctgggggagaggcgcccgaaccaggccgcgggagcatgggggcccggagcggagctcggggcgcgctgctgctggcactgctgctctgctgggacccgaggctgagccaagcaggcactgattctggcagcgaggtgctccctgactccttcccgtcagcgccagcagagccgctgccctacttcctgcaggagccacaggacgcctacattgtgaagaacaagcctgtggagctccgctgccgcgccttccccgccacacagatctacttcaagtgcaacggcgagtgggtcagccagaacgaccacgtcacacaggaaggcctggatgaggccaccggcctgcgggtgcgcgaggtgcagatcgaggtgtcgcggcagcaggtggaggagctctttgggctggaggattactggtgccagtgcgtggcctggagctccgcgggcaccaccaagagtcgccgagcctacgtccgcatcgcctacctgcgcaagaacttcgatcaggagcctctgggcaaggaggtgcccctggaccatgaggttctcctgcagtgccgcccgccggagggggtgcctgtggccgaggtggaatggctcaagaatgaggatgtcatcgaccccacccaggacaccaacttcctgctcaccatcgaccacaacctcatcatccgccaggcccgcctgtcggacactgccaactatacctgcgtggccaagaacatcgtggccaaacgccggagcaccactgccaccgtcatcgtctacgtgaatggcggctggtccagctgggcagagtggtcaccctgctccaaccgctgtggccgaggctggcagaagcgcacccggacctgcaccaaccccgctccactcaacggaggggccttctgcgagggccaggcattccagaagaccgcctgcaccaccatctgcccagtcgatggggcgtggacggagtggagcaagtggtcagcctgcagcactgagtgtgcccactggcgtagccgcgagtgcatggcgcccccaccccagaacggaggccgtgactgcagcgggacgctgctcgactctaagaactgcacagatgggctgtgcatgcaaaataagaaaactctaagcgaccccaacagccacctgctggaggcctcaggggatgcggcgctgtatgcggggctcgtggtggccatcttcgtggtcgtggcaatcctcatggcggtgggggtggtggtgtaccgccgcaactgccgtgacttcgacacagacatcactgactcatctgctgccctgactggtggtttccaccccgtcaactttaagacggcaaggcccagcaacccgcagctcctacacccctctgtgcctcctgacctgacagccagcgccggcatctaccgcggacccgtgtatgccctgcaggactccaccgacaaaatccccatgaccaactctcctctgctggaccccttacccagccttaaggtcaaggtctacagctccagcaccacgggctctgggccaggcctggcagacggggctgacctgctgggggtcttgccgcctggcacataccctagcgatttcgcccgggacacccacttcctgcacctgcgcagcgccagcctcggttcccagcagctcttgggcctgccccgagacccagggagcagcgtcagcggcacctttggctgcctgggtgggaggctcagcatccccggcacaggggtcagcttgctggtgcccaatggagccattccccagggcaagttctacgagatgtatctactcatcaacaaggcagaaagtaccctcccgctttcagaagggacccagacagtattgagcccctcggtgacctgtggacccacaggcctcctgctgtgccgccccgtcatcctcaccatgccccactgtgccgaagtcagtgcccgtgactggatctttcagctcaagacccaggcccaccagggccactgggaggaggtggtgaccctggatgaggagaccctgaacacaccctgctactgccagctggagcccagggcctgtcacatcctgctggaccagctgggcacctacgtgttcacgggcgagtcctattcccgctcagcagtcaagcggctccagctggccgtcttcgcccccgccctctgcacctccctggagtacagcctccgggtctactgcctggaggacacgcctgtagcactgaaggaggtgctggagctggagcggactctgggcggatacttggtggaggagccgaaaccgctaatgttcaaggacagttaccacaacctgcgcctctccctccatgacctcccccatgcccattggaggagcaagctgctggccaaataccaggagatccccttctatcacatttggagtggcagccagaaggccctccactgcactttcaccctggagaggcacagcttggcctccacagagctcacctgcaagatctgcgtgcggcaagtggaaggggagggccagatattccagctgcataccactctggcagagacacctgctggctccctggacactctctgctctgcccctggcagcactgtcaccacccagctgggaccttatgccttcaagatcccactgtccatccgccagaagatatgcaacagcctagatgcccccaactcacggggcaatgactggcggatgttagcacagaagctctctatggaccggtacctgaattactttgccaccaaagcgagccccacgggtgtgatcctggacctctgggaagctctgcagcaggacgatggggacctcaacagcctggcgagtgccttggaggagatgggcaagagtgagatgctggtggctgtggccaccgacggggactgctgagcctcctgggacagcgggctggcagggactggcaggaggcaggtgcagggaggcctggggcagcctcctgatggggatgtttggcctctgcttcctcccagttcacagccagagttgcctctcctcctcctcttccccaacccccagaccatgaccagccttagaaaatccatgtactctgttgttagagggcccagagttccttctccacccccgctctctctctcttggcctgagatctctgtgcaggaaccaagatggggctgaagcctctggaggcagttggttgggggcgggcaggcaggaggccctccctccacccccccaccctcagcccggcaacttctgggttccatgggttttagttccgttctcgttttcttcctccgttattgatttctcctttctccctaagcccccttctgcttccacgcccttttcctctttgaagagtcaagtacaattcagacaaactgctttctcctgtccaaaagcaaaaaggcaaaggaaagaaagaaagcttcagaccgctagtaaggctcaaagaagaagaaaaacaccaaaaccacaagggaaaagaaaaacccagtttcttaggaaacgcaaacgatttattatccagattatttggataagtccttttt

SEQ ID NO: 1399 - DNA, 3744 bp, Homo sapiens
agttacctagcaaacaatcttcatgttaagactgagctcaaataccacttcttccttaatggtccctgtgatcactccaggaaatgtaatacctgagtcagaactccatcacaggggaacacagccaactgttagacgacggacataagaaagctcgaaatgcttatctcaataattccaattatgaagaaggagatgaatattttgataaaaatttggcactctttgaggaagaaatggacaccagaccgaaggtgtcttccctcctcaaccgcatggccaattacactaatctgactcaaggagcaaaggaacatgaagaggcagaaaacatcactgaagggaaaaagaagcccaccaagacaatgttgactgctatctccatgagtgccattgccactaatggagtggtgccagctgggggctcatactttatgatttcccgggcactgggcccagagtttggtggggctgttggcctctgcttttatcttggtaccacatttgcagcagccatgtacatccttggtgccattgaaatctttctggtctatatcgtcccccgagctgccatctttcacagtgatgacgcactcaaggaatcagcagccatgctaaataacatgcgtgtctacggcacagctttcttggtccttatggtattagtggtatttatcggcgtacgctatgtgaacaagtttgcctcacttttcctggcctgtgtcattgtgtccatcttggccatctatgctggagccatcaagtcttcttttgctcctccacacttcccggtctgcatgctgggtaaccgcaccctttcatcaagacacattgacgtttgctctaagaccaaggaaattaacaacatgacagtcccatcaaagttatggggattcttctgtaactcgagtcaatttttcaatgccacctgtgatgaatactttgttcacaataacgtcacttcaatccagggcattcctggattggctagtggtataattacagagaatctttggagtaattacctacccaagggagagatcatcgaaaagccttcagccaaatcttctgatgtcttaggcagcttaaaccatgaatatgttcttgttgacatcaccacctccttcacgcttctggtgggaatcttctttccctctgttacaggtatcatggctggatcaaacagatctggagatctgaaagatgctcagaagtctattccgattggtactatccttgccatcctgaccacctcctttgtttatttaagcaatgttgtcctttttggtgcatgtattgaaggggttgttctcagagacaagttcggtgatgctgtgaaaggtaatttggtggtaggcaccttatcttggccatccccatgggtgattgttattggctccttcttttcaacatgtggggctggacttcagagcctcacaggtgcaccgaggctgctacaagctattgccaaggataacatcataccgtttctgagggtttttggccacagcaaagccaatggggaacctacctgggctttacttctaactgctgccattgcagagcttggaatactcattgcctccctggatcttgtggccccaattctttccatgttttttctcatgtgttacctctttgtaaacttggcatgtgccttgcaaacattacttcgaacacccaactggagaccccgattccgctactaccattgggccctttctttcatgggaatgagtatctgtctggctctgatgttcatttcttcctggtattatgccattgtagccatggtaatagctggtatgatctacaagtacattgaataccaaggagctgagaaagaatggggtgatggtatccgtgggctgtccctcagtgcagcccggtttgctttgcttcgattggaggaaggacctccacacactaaaaactggaggcctcagttgcttgtattactgaaactagatgaagacttacatgtcaagcatcctcgcctcctcacctttgcctcacagctcaaagcaggaaaaggtctcactattgtgggctctgtcatcgtggggaacttcctagagaactacggtgaagctttagctgctgagcagaccataaagcacctaatggaggcagagaaggtaaaaggattctgccagctggtggtggccgccaagctgagagagggcatttcccacctcatccagtcatgtggccttgggggcatgaagcacaacacggtggtgatgggctggcctaatggctggcgtcaaagcgaagatgcccgcgcttggaagacttttattggcacagttcgagtgacaactgctgcccatcttgcactgctggtggctaaaaacatctccttctttcccagcaatgtggagcaattttctgagggcaacattgatgtgtggtggattgtgcatgatggggggatgcttatgctactaccattcctactgaaacagcacaaggtgtggcgaaagtgcagcatacggatcttcacagtagcccaattagaagacaacagtatccaaatgaagaaggacctagccaccttcctatatcacttacgcattgaggcggaggtagaagtggtggagatgcatgacagtgatatatcagcatatacttacgagcgcactttgatgatggaacaaaggtcccagatgcttcggcacatgcggctatccaaaacagagcgagacagagaggcacaattggtgaaagaccgaaactcaatgctacgattgaccagcattggctctgatgaggacgaagagacagaaacctatcaggagaaggtgcacatgacttggacaaaagacaagtacatggcatcccggggacaaaaagcgaagtcaatggaaggattccaggacctgcttaacatgcgtccggaccagtccaatgtgaggcggatgcatacagcagtgaaactcaacgaggttatagttaacaagtcccatgaagcaaagctggttttattgaatatgccagggccaccccgaaaccctgagggtgatgaaaactacatggagttcctagaggtgcttaccgagggactagagcgagtcctacttgtccggggtggtggcagtgaagtgatcaccatttattcataacctactctgaatgaccgtgcttgacctgttttcttaaaaggcctacgtcctccatggaagtgccagctcattactaccactcccactcaactagaagcctgtgttctgtacacatcatactgaactcttgatgagctgagcctcaagtacctgtgtaaaagagctcccatctgatctgcagtcattacagaaaaagcaaatattccctcaacatcagaacaatgctcaagtctttcaagccacgtctgagcagtcaaaggcaaattagaattaacaagctgagccaataaatgaattggtaaaagggatgctagaaattcaactgaagaaaaaaagcaagtcaagtacgtattcagcattaaagatgaatctcagaagtcatggttcaatgttgacactgtgaggataacaactagagacagcttcatcttactaaagaatttatggtcaagtatatttggacctattatcctcggcaagccaagatgcaaacattttttagctatatttctttagtatacccactgctgtaattttatattaggatactaacttgaaacatggctgcagcctctacttcttcaaaaacatccccccaaaataccagatttaaatatcc

SEQ ID NO: 1400 - DNA, 2891 bp, Homo sapiens
gtagttgcgcagcgcgcgcgccatcttctggtaggtcatcttcttgcggttgcccttctggatgccccagcggtgcgccagcgcctccttgtgcttggacgagaactggaaggtgcccttgtccttgtccacccaccagatgctgtccttcatgtcgccgctgcggagcaggtccaacaggaactggtacaggcggatcttcttcttgctgcctgcgggggggagggcccggtgggagggggcccggggcccacatgggagccgcccccaccgccttgcgtacgcacaggggcccggggacggggtggccgggaagggcaggggaacggctgccccagcccgcgccgggcgtgcatacacaacgcacccacactcacacacacacacctgcttgcgcacacacacccgttcacacacacccactcacacccacgcactcacccccccccacgcgcacacactcgcacccacacagtgcaccaagtacacacacatgctcacatccacataacgcacccacacctccttacacatgctcacacatcacgcccacacccactcacacacgtgctcacacaacgcaccttctcacacccactcacactcatgcttaaacacaatgcaaccactcactcatgctcacacccacacacgctcacacgtacaatgtatctgatcacacacatgctgtcacacacatgcacacacaatgcacgtgctcacagactcacacccacatgctcacacacatgcttgtgcaatgcacccacacgccagattgcacccacacccacccacttgcacattcacacccacatctgccctcacacactgtcactttctcacacacccacacaatgcaccagctcacactcacacacatgctcacacactcattcactaacatgcccccacacactggcacccacacgacacacccactcacatgcttgcacccacccacatgttcaaacccacactgcatctgcttacacattcacaacccactcacacacacctggtcacacccactcatgctcacacctcattcacacccactcacatgcacactcacacccacccaatgcacccactcacacacatgcacacacactcagacccacttactgcccccacacacggtcacacccaatgcaccttctcacactcatacgcccactcacacctgctcacacacacctcacaccaggttcacacactcatgttcacacacctgctcatacacctcacaccaggtctcataatcacacctgcttatacttgcttacacatgcttgcacaaacacacctgcttacacatcttacactgctcaccctcacaccttacattgctcaccctcgcacacacatgcccctgctcacacacacatgcttacaccacaccattcactcacacatatccactcacatatgatcgcacctacccacacctcacacacacttgcacgcacacacctgcttacacacatctcacgttactcagccccacacgcacacacctgctcacacacatctcacattactcagctacacacacgcccctgctcacacacttgtgctcacacacctcacaccattcactcacgcacacacccactcacacatgctcacgtctgctcacacacatgctcacctatccatacacacacttcctcacacacctcacaccaagtctcacacacacttatgcttacaaactcatgctcacacacatgctaacacttcacacatgctaacacctcacacattcacacccactcacatgctcacacctcacacatgctcacacctcatacctcacacacatgctcacatctcacacccactcacacacacctgcccacacatctgcacacacacatgctcacacatatgctcacacatcacacatacctgctcacatacatgctcacacctcacagctgctcacttatcactcacacgctcacaccagctctttcacacctcattgacacctgctcactcatatttcaccacttacacttgcacctcacacctgctcacgcatgcacatacattctgctcatgcatatccacttgcatgcttacacgcctgttcacatacaaccactcagacacctacttgcacactcaaatgctcacacacattctgctctcacatccactcacagcagctcacactcatgcatgctcacacacacctgctctcacactcacacatcacacccattctcgtttttgagatggagttgctcttgttgcccaggctggagtgcaatggcacgatctcggctcactgcaacctccacctcccgggttcaagcaattctcctgtctcagccttccaagtagctgggattacaggcgttcaccaccacgcctgactaatttttgtatttttagtggccaacgtggtgaaatcccatctctactaaaatacaaaatattagctgggcgtggtggtaggtgccgtaatcccagctactcaggaggctgaggcaggagaatcgcttgaacccgagaggtggaggtagcagtgagccgagattgcgccactgcactccagcctggcgacagagtgagactctgcctcaaaaaaaaaaactcggccgggcgcagtggctcacgcctgtaatcccagctctttgggaggccgaggtgggtggataacgaggtcaggagatcaagaccatcctggctaacacagtgaaaccccgtctctagtaaaatacaaaaaaattagctgggcgtggtggcgggtgcctgtagtcccagctactcaggaggctgaggcaggagaatggtgtgaacccaggaggtggaggctgcagtgagccgagattgcgccactgcactccagcctgggcgacggagcgagactccgtctc

SEQ ID NO: 1401 - DNA, 3911 bp, Homo sapiens
tctccaagtctctgttgtagcacttccaccttatgttgaggttcctggtctgtattattcttgattcgtctttatatttccagtacttaccccacatcttatatatgagaggttcttataaataacctcatatgagaaaaaacttattaaaaaaaagtctaagcttcttgaagctacaaagctttaatcacaaaaaaaagttaagcaaaatctagagtaggtttgatgtggacaaagtaaaagttattagagggacttggaacagaaaatgtccagacgagaggtcaggccacggactgacacaggggcataagctggtacacgcagatagagcatgcttcctgaagctgagggaattgggagccagtgcctgacacacacgatgagattcggaaggcaggggtcaaacatgcaaagatggcagctctgcagccagcccacagagctaaggggcacctctctccaatcctggcaaacgctggcacaagacacaactggattctttctgttgctcatgaattttcatgaggcagttggtgagttgttctccaggtctgtgggggaattaacaattcaaaaggtgatctcatactactcagacccttgtgtttacccccgggaagatcttctgatcattaacaaggttcactggacatgctactctgtgttgtgtgcctgttgcttggaggtcctgatgttcagccatgtggggatgggctttgggcatcctgtaatctggcagacaatatcagcaagtacaaaaagacctgtaaggtaatgagtagtagaaatgttagttgcacttcctcatgtgtgatacagataatagaatactagaattgaaatcatataagtaaaacattttttaaaaatctaaaaatttatatgtagagaaggtacttttggaagcatggcctttggagaagatgccattgattttggagcaaagacctgggttaaagtcccaagtgtggattgactctgaggcttgtgaaggtcacttaatcctaatcaatctttgctttctaatatgatatatgggggcaatacttgtgggatagggtagtaaaaattaacagtgggataatatacatgaaagtgcattcattctttcattccattcatttgttcagcaaatactcattgcttgttttgtgttatgtgccaggcactggttggtgctaaggagatgaaattaaagaagaaagctgtgatcattgcccttccgatcttatagataactagactatacagaaagctgaaccacattatgtacttggaaagtaccatgtgactattttagctggggcagttagaaaaactttaagaaatatggcacttagatgggtaatggcactttaagggtaactctacccttaagggtagagttttgacagacaaaatggaggaaggggacctctaggcagagaaattgagtgtgagcaaagagaaagtgaagggaataattggataaaatgagtggttcaatgaggacaggaatgtcagggcaggaaaaatagattgggcttggccttggcttctccttcccattccctccacctttcagcgtgagatttttagccgctcatttgtggaatagagctgagaggagggtgatcagccacatgggatccaatcactagcttcttcatttttagttaaaattatgacaaggcaagattaaacacaaagaagggctgggtaggtatgtatgtcaatctgggaaggactaaattctaggggagctagttgggatcttttctctagccctcctagaagtcttgtagaatttgacattcatctccttttgtcttgaaaatctgtgccatttatagttttcagggggagaagctaaattctgtttttgatgagctgagtttaagatggcccgtttggaagtggcccgttgttaggcagaattaactacacatttagtaacttcaaggcagtacctaacctagtgctaggacttctttctctcctttttaccaatgttcttgatactgggaatacaaggtcccaaacctacagaagactcgttgatttggtggcaggtctgaacttcagtagagacttaaaaatcctcagagctgactgtatacacttcccggaagtactgtgatacagttcgtcttcctactgcggtataaggtgaattattcattcagttacttcttaaggaaatgcttatcaaacatcaaccatatggcagatattaagtgctgggaatgcaagaggtataagacaccactcctgatcttaaggaacctacggtcttaagctgtacacacatgtgtacaactgtggtctgataggataaggacagacagatcataagaaggaagtatgatgagagaggacagatcataagggagtatgatgagagcccaagaggaagcagggtggctgcatagctgacctcttcacccccttcaagtttttgctcaaatgttctcatttggatgaagaccaccccaactctccttttaaaaagggcagcatctgccacctcaacagttctgagctccctcaccctgttctacagttttgctttttccattgcatttattgtcctctgtcccagttggctgtcgctgaataacaaaccatctacaaacttactagcttaaaacaatgattgcctctgtctccctgttctgttggttgactgtacttggctgggtagttcttgcttgggatctctcctatagttgcagtcagacatcagccagggttgccatctttcaaaggtgtaactgggcgggatgtccaagaggttttctcacatggctggctattgaggctgctgtcagctgggagctcagctgatgctgttcaccagaacatcttcatgtggccactccgtgtggcttgggcttctttatatgacaactgggttctaagagatagtgttcaaagattgagcattccaaggggtaggaagtggaaggtgccaggccaatggcagaccacctttggaattaggacagcatcacttcttctatatctattggtcctaggacctgcccagatttactcttgctgggggagtggcaaggtcacattgcagaagaccatatgggatgaaagatacagttgcagccattgttgggaagtcattctgtcatacttcctaagttaatataaagtttatttttatgcctattttttgttgactcttgctagggtataagccccatgaaagcaggtgtacccactgatgcattccaagcacctagaaccatgcttggcacgtatgtacacaatgaatgtttgttaaatgttcaatgaatggtgtctgttcctctgcgtttaggttgttgcctgtcctcggggtgtgggtattaatctcattcctaatttacattcttttctcttttaacagaccgtaacactctataagggctgttagcatgcctttttattcaccaccatattgctcagtgcctggcaaggagctgatgttcaataactgtatgttaagtgaatgagatgagaccatatttgagctgggatctgaaggatacatagtattttgccaagaaaagaaggaggggtagagcacaaaggcagaagaaaatactgtgtggtaaaagagaaggataaatgagactgcagtgaaactatgagtcccctgaagctaggtcccacccgatttgacctctagtctatttctcataggacatgactggtgattccatttgccgtaccctctgcacatgcttgttgaatgaatgaatgtcaaaagagtgtgtaatacatgaactcatatatggctttttttgtggggaagcagttgggttagataaaatcaataataactcttgctaattgagaaaatcttatacatacaaacccagaaatatttgttaaagtattgaaaaatagtaaaatgtaatatttttgagcat

SEQ ID NO: 1402 - DNA, 4182 bp, Homo sapiens
gttggtactcctggttctcagggattcagactctgactggcgtccactccattggatcccggccctcaggtcttggaacttgcactgccagcattcctgggtgtccggcttgcggacagcagatcgtgggacttctcagcctccagaattgcacgaagtgtctccttacgaatctcttcctatgtacgtgtatcctattggctctgtttctctgcagaaccctgactaatgcaaaccctctcatctcacagcagtgcatgtacaaacccactcacatcttcccctcccctgccttccctaccgcaagttccctccgaccagaggccaatcccgctgcggtgccccggacccaccctctgcaccagccttccttcttgttttctaaaagctcgcgttttctgtgggcttccaaggctgctcttcagtatctttacgtcagagcctcccagctccttcccctctctcaaaagcgttttcacagggactgtaggctccttccctccccttgataaccaagtactatgccccaggttcttacctcacagcccaaagttgtcctaagtcaggccctgacctgagtgtctccaaatccagcaggccgtctgctctcctgtgacatgcagcatcccacggcttttcctaaaagaccccctctgtcagctttgctgtcacccaccctccagggctctctcttacaggtctgccctttgctagcatcttagcctctccacctcccggtggtcctgtctgcgatggaccccctccatgtgtcccaaggccctccaaaggaacaggtctgtatcaggtgcaattagattgaggtgcaatgcaagggcttgaattgcagagaggttcatttttctttttgtaaaaaagtctgggaccagctgtcagagactgatttggccactccatggtcaccaggaccaggctgtgtccatcttttctgttctgacctttttcacatgggccattgtccatgtcaccgctggtcaccagctgcagcagtcgcattcttgctccgggcagcaggaagaaggtgagaccagaaggcagagggggctggtcctgcctggtcagcccccagggggctttgcccagacaccccttccccacccatggctctgctgatttctctatagctgccaccctctgaaaagggagctggcagagtagttcttagacatggcacctggccacctctgtggctgaagaagggggttgaggattggggtacacacctgtcagtctccatgcaatgccccaaagtggaccactgaccccacaccacgctgttctcctctgagttttctcacctctgtccaaatggctgcagaagccaaaagccccagagcccagctccccttccctcctttctcttccatccttccatccttccatgagcctgcccctcatcctcctcagggctggaactggctgccggattcctccctggctccgtgggggctggctcagcaatctgagctgccgatggctctgtggtccagctgggaggattcatgccccattggggctgagaggaatgaggtgagggctgtggggtttgcccagaatctcctgaaatatcgggcccaggaactacagcaggactctcattccgccttctggccactgttgggggtgacactggcaggatccaggggctctggaaagctccaggggaaatttgaggcataacccagcttctctgagacggaactcagggaggatccagctcaatcctacagaggcgaccccaaggaaggacctgcccagggtcacttggagagctgggcgggaggagggagaaacctcccccgttcagagtgacaaagccccccttgcctcagggatggctgagatccaagtcctcaaaacacgccgccatctggagggtgtgagagcgaggtccgtcctcagcatggacgctgcagtgcacactgttccgtgccaggtgctggctgaccctgccctgtgggaggtgatggacaggcacacagggggagccccgcaaacaaggggccctgttacagcagagtgggagagcgcctggtaggacgccaagcaccgtggccgggctgcagagaggcctgcgggacttgtagacaagacgtcatggagaaggcggagctcccatgggccttgcaggtttcaccaagcaagagcggagaagacacaggctggacaaaggaaggtggacgggacagccagccgtgcagcagcctcacaggacacagctaccagacagagagcaccagctgacactcattcctccagcaccaggaaatgccacagcagaagagagtcttcaagatgggccagacacacttctgcagcatggttgctgggagcctgcacaggccaggcatttctctacaggtgcaattgagaactcactgaggcaaaagggcctttgtcaacccacagaagtgacaagtccaagtgcagaccaggcttcaggtccagttgctcttcagaactcaaaatcccatctctgcaggtctcagccaatcctgctcccgcctgtttttatttcctgcccagagcaagtacagaaccgagggccatcgatgggcgagaaatcactgtgcctccaagctgtatttttcaccgtaacaagtcattacttctgtgcccggagtcatttctcaggatcttaatgcattcgtttatcaatcaatacttaactgatgtctataaagcatgttcaaaatcagaggtgagagcagctcaccaggtaccgacttcgtgtctggagccaccttgttaaggagcaacccttggcacgggtcccgtgtctgcaccctcgggagctctgggtgggtgcactggggtcctcacagcccttcccaccactgcagatggaaatctctacctggcagaggggctcagtcgtccccacctgggagtctggggcctaccggcagcagaaggtgcagtggccaaacacagagacatttctatcatcagacctggtccccagcctgactctgctgcccacttacccctggccagggcgagttcatcgactgtgccgagcctggctgcttctccagcctaacaggagtccccgtctcgacaggactgagtggggtgaatgcagccaagtgctcagcagagactgtcccaccgggaagtgttcacaaatatgggctgttgaacctgctgttgttagatctagatccagttctgcgaccacgttcatgacttagatcataactgaagtgcgggccagccgaggccgggccgtttaggggtttggctgctaattcaagaaggacacctgggtttggatcccagagttccctccagacccagatgtggcctcaggcaggtgatgagcctggagatgcggtttcattttctgcagggtggtcaaaggagatctcaggcttgtaggagacaaagcacatcgccccgaactgctcaggaggcgcagattacagccaccctccttatccaccccgtctcccatcacagccctcatgagtgctcaagcaaggctcagggcctgatggacgtggctgcctcctcctagaggacaggcatgtctcggctgcctgcaccagccagcggcccttctccccggccaggagatcctccaaggaaggccaagggccaagcagctgctggagcagatgaccacaaactcagtgactgcagagtgcacgcgctcatcaccttacagttgtgtaggctgggatcccactgggctaagaccaaggtgttgggaggctgcgtttcttgctggatgctgtaagggagaagtcgtttcctcgtgtttttttaacttccttggcccacggaccttcctccaccttcaaagccagcagcctcgcgtcttctgaccttccattgtcacatcgtcatctgacccacgtaaggacccgtgtgattagggtgggcgcacccgggtaatcttcccatctcaaagtccttgactgaatcacatctgcaaagtcccctttgctacgtaaggtcacatgttcacaagatccagggattaggacttggacatttttggaagcccattgtcctgccaacagcacaagacctccaggtgatcctgatgtgtaatgcacagtgagagacaaatgctctgatggaccatcaacagcagaacagacataaatggaagaaaatgtacataaaagagagtccacttaaacatgtgatcctctc

SEQ ID NO: 1403 - DNA, 4462 bp, Homo sapiens
tattcagagtttccttaatatttcatgaagattgtagtgtcgtgactgaagttggagcactattttgtcttctattatttgatgaagtatcgagaatggatatgtggtctgttaatccttccaataaaccttctttgccatcggtcttcagtttgcctgtttccgtttttagaaggtaccatctacctgttcatgtaattggacaccatgctgtgagtccttactccatagttttgcccttatctgctgattgtttggccttgaagccggtgtcagatatgctgagaatagcttggaacctgtcatggtatcatgggagtgataatctgttgaagcaaatgaactctgaaactaaaacgcaagaaattttagatgcattgaagttatctacagaggacatcctcactctgaagataacacacatggctagtgggctgcaggactgcctccattccattgttcaggctgcaacccacagggaagttagggctgctgtcaccaggatgagtttttatcttctgaatgacagattgtctttaaagggttgccctggtccatgtggggttaccttgaagtccttggcttggcacaccgcactaaacaggtttttacaggtgcttcctgcttgcactgaagatgagaaactgctaatagatatcatacattttttaaataaattaataaaggaacaaagaaaaaattcttcactagaacttctaaactggattctcgaattacttcttagacatagtgcaaacccactgttagacctcttggttctgacagagtcacaggcacgagaagaaacagatgatatccggactgctgtcaggcaacaacttcagaaagaactgattgctctttttgataccttgctgctcaatttcatggaagttactgacaggaaatgctcggaacttctttacgtttttcaaacgcagctggctctgaaactgctccagtgtctgaaagtgacggatgcgcctcatttctatggcctgccgtcccttgagcggaccttacgagggatggctaacctcactgcgtttccgggatggagctcacactctcctctcacaaagcctctagatatctgtgtgaagtacttgtcaggtctccttgaggtcattacttctttttatgtggagcgtggaggaaatgctatgtccttcatgggaaaaggtgttacaaagagcacaattctttgcttgcttcacttatcccatgagatgatggcccaggctgggagcttggagtggatgtcactttggttcttgcctttgggtagtcatagtggagaacatattcctactcaacaaggattggcttggttgattccattatgggttgatcgggacccagaggtgagattcacttcactgggattaggatcagcactgaccacccttgaaacgggctgtgtggccttagcaaacagttgtcagaacatttccggtgggctctggggaactgtggtgaacattcttctggaccagtcagaatgtagtatggtgcgccgggaggcggcatttattcttcagaatctccttgtaattccaatgcctacagaaattataaaggattatacttggcagggtccctgtgttcatgatgaggactctggcctatcgctcattggaaaacctgcccttcaggctcttttatatcactgccatttttatgaacatttgaatcagatggtaaagcattgttacctaggacggtgtatgtttgatttgaatttttctgcttttgatagaaattcagaaagcaatgatttaaatggtttagatgactcattcaagttttggagggctccatctaggacaagtcaggatcgagatccaagttctctctccacctcagaaacaacggtggcaccttcattggggagtactgaatttcagccacttgtgcagtcaacaacacttctacctgaagcctcccatgaccagtttgtggctcaagggaatcgacactttgtaacaaatatccaattttagagcttggacgaggaaagaacaagatgaacctggaacatcttgctgtgccagaaagtcaccagcaatgtgcagcctcttggacaacctcttgacgattgctcccagagacactgcaaaggcttttcgacaagctcatctcatagaacttctctgtagcattgcagatgctaccctcatacagacatgtgtccaggaactcagagccctgctgccttcatcacctccagctgaacacactcaggctcaggtttcctttctcctggaatacctatcctctttgtccaggcttctgcagtcatgtttattggtggagcctgaccttgtgattcaggatgagcttgtgaaacctcttatcaccaatatcattggaattctcaccatatgtaccaaagatgtattaggtctggaaaatgaagtgtgttatgatacccagcaaagccagttctcagcatctcatcagtgttaaaatgatctcgatgttaaaggaatagtaattccttagaaattcaacaagtggcagtgataccctaactaagcttattaggttagactggacaagctcaacaaggtgatatcacccccagtctctaaggagtgaacattgattctggggagaagaggataaagagttaatatcagctttttatcacacatggacacatttatttaatcttctggccatgctcctgaggaaagctggtgccatcacactcccgtctgttaccgtggccctggccaagcactggacagcggcgattgatatgttctgcacatgtgcaggcttgtctgccacgtgtcctgccctgtatactgccagcttgcaattcctttctgttctcttgaccgaagaagcaaaagggcatctccaggctaagagcaaaacacatttatgctgtagtccaacagtggcttcacttcttgatgactctcaggaaaatcagaaatctctagaacaacttagtgatgtaatccttcagtgctatgaagggaaatcctccaaagatatcctgaaaagagtagctgcaaatgcattgatgtcactgctggctgtcagtagaagagcacagaaacatgctttgaaagccaatcttatagacaattgcatggagcagatgaaacacataaatgcacaactgaacctagattctctgaggcctgggaaagcagcattgaaaaaaaaggaggatggtgttattaaagagttaagcattgccatgcagctcctaagaaactgtctttatcaaaatgaggaatgtaaagaagcagctcttgaagctcaccttgtccctgtcttgcactctctctggccttggattttgatggatgattcattgatgcaaatttctctgcagctcctttgtgtctatactgcaaattttccaaatggttgcagttctctttgttggtcaagttgtggacaacaccctgttcaagctacacatagaggagccgtgagcaactctctgatgctgtgtatcctaaagttggcttcccagatgccactggagaacaccacggttcagcagatggtttttatgcttctttcaaacctggccttgtcgcatgactgtaaaggagtaattcagaagagtaacttcttacagaacttcctctctctagcattgccaaaaggaggaaataaacatctaagtaatctgactattctttggttgaagttactcctgaatatatcatctggagaagatgggcaacaaatgattctgaggcttgatggctgtctagacttactaacagagatgagcaaatacaagcacaagagcagccctttattgcctcttcttatctttcataatgtttgcttcagtcctgcaaataaacccaagatcctggctaatgaaaaagtcattactgtgcttgctgcctgtctggaaagtgagaatcaaaatgctcagaggattggagcagctgccctttgggctctgatttacaattatcagaaggcaaaaacagctttgaaaagcccatcagtaaaaagaagagtggatgaagcatactccttagcaaagaaaactttcccaaactcagaagcaaaccctctaaatgcctattatttgaaatatcttgaaaacctcgtgcagctccttaattcttcctgagtgccatgggatgctacaccttgaagctgacagtcatcaacaggggagctaaagttgaagccagctgtgtgtagcagctgttacctgaagacgtgctacctctctacaaagtgttgatccccttctttcccatgagagagagaactggtgatactccaacaccgtccagttgtggcagctctccagaagtaatagcagctgacaactttctgtgccttttcctttctgttgaaaaggcatagaaagttctgggaacataaacatttttacccttttctatgccatttattttgtaaaaatcctatttaacagttatttaataaaacaatatttttagaaact

SEQ ID NO: 1404 - DNA, 3405 bp, Homo sapiens
ataatctccgccctccccttcagaaccgcgccccacagctcggcgcaggtcccgcccctttccatctacggggcggcaggaggcccgaagcaagatggcggtgaatcagagccacaccgagaaccgccgcggagccctcatccctaacggtgaaagtctcttgaagcggtctccgaatgtggagctctccttcccacagcgatcagaaggctcaaatgtctttagtggtagaaagacaggaacattgtttctcacttcataccgggtgattttcataacttcatgctccatcagtgatcccatgttgtcttttatgatgccatttgatctgatgacgaacctcactgttgaacaaccagtatttgctgcaaacttcattaagggaactattcaggcagctccatatggtggctgggaaggacaagctacttttaaattagtcttcagaaatggagatgccattgaatttgcccagttgatggtgaaagctgcctctgctgctgcccgaggatttccacttagaaccttaaatgactggttcagctctatgggaatttatgtaattactggggaagggaatatgtgcactccacagatgccttgttcagttattgtctatggagccccacctgcaggatatggagccccacctcccggatacggagccccacctgcaggatatggagcccaacccgtaggaaatgaaggcccgcctgtgggatacagagcctcacctgtgcgatatggagccccacctcttggatacggagccccacctgcaggatatggagccccacctctaggatatggagccccacctcttggatatggaaccccacctctcggatatggagccccacctctcggatatggagccccacctgcaggaaatgaaggcccgcctgcgggatacagagcctcacctgctggatcaggagccaggcctcaggaatctacagcagcccaggctcctgaaaacgaggcttctcttccctctgcctcctcttctcaggtccattcttaaccttctaagatgtaaaccttgaagactcaccaagcaaagaggtaccctaaaattgaagtcaggataaggaggacgactcagcttagagtcattgattgatctgcattgtgaaaattaggaaaccagatgctcccatgttctcaaggacagcctttcttaaggaagtcagtacgtgggcaacagtgatgagaggaagagaggagagactcaaccaactagagcagggataaggtttcccttgttcagcttttcagtgtctgctggaatgtgatggtaagttgagaacagggtgaatgggtgaggccttttttatatcagaaagttttccgagtaactgatctctggcaaatatttggggattagaattctaaaagaatacaaactagacttctcttctgctcttcatgttagttatacttgtaccaggtagatttgaggtggggtccagttacctgaaaagcgtagcaggttcgagtttcttaaaggtggaattccaccatgttctcctgtgcaaagggtacctgtttacctggtccaccaaactgccccagtacaaccaaaggctgtgactgtgtaaggatagaaccaagtggagccacagtttggacccacgtggtgctgcgtggcacacctactgttagttagctcccactgtctggtacagttgtttcccccaaaggctcagtccaatttgttctataagaagagctttgtgtcctgtatattcaaaggaccctggtttttgctttgctgaggacaaatccagtcagaattcagctgagccttctgcatgctgagagcactcatgtgctgagttcctcagctcctcactgacgttttgagtactttctttctgactcactcactgtgctggtggattccgctcttcctgtctcttccccagctgcaatacagaaactatactctgttgtctactctttcatttcctattagaaatataaagggatagaaataagaagaccttttagtcctggactatctggtattggcccctaaaatgagcctccaaatactccttttcatgggtaagtggatgctccccagcctgctggagcagaaccttcctggctcagctaccctgagatatcaggacaaaaacatatagttggtgtgattttcctctttttgtttttttttttttttcaagatagaatctggctctgtcccccaggctggagtgcagtggcgcgatctcggctcactgcaacctttgccccacaggtttaagcgattctcctgcttcagcctcctgaatagcttggatgacaggtgcctgccaccatgctcggctaatttttgtgtttttagtggagacagggtttcaccatgttggccaggctggtttcgaactcctgacctcaagtgatccacccgcctcggcctcccaaagtgctgggattacaggcatcggcctgtgcctggccgatttttcaatccatagattaatatgttcaagaaatattgcatgtctttgttttctgtaaatttatttctgttaccaagatccccaccaccatctgctttgttggtgggcttctcacaaatcctaagattatgcaaaggtatccagattttatttggcaccaagatgctgagaagtttcttctggtcatcagactgcttctgaaacagccactatccagtcctggcagtcccgtcaagtctaaaagcttgttgccttgggaccccagaatcttaggtagggcttagaaccagggtgtcagagatccaactctgtgtaccatattgctccttagaactggggagtaggaccccaaaggcctccttatccttgagagtctgacaattccttaaacttccagattctgccctctcagctgtgctgttggtctgcatcacctctatctcttaagcatctatcctaatccaaatctcaggatttgggtttacccaaaaggtaatagaaagcctttgccttcatgttgacttggctttccttgcctagcacttggttgcttgcttgaaaatcatgtatgtatatatataaaatgtagaagcccaattcaaattaataatgtaaaaatttattctgttacacagattacctcattgtcaggtaggaagtgaaacgtatgatattcttcctggcctttgccttgagagtcttctggagcctgaagagggtggggcagacaaccatggactgctagagaataaactttctttgaagcttcctaaatggattagaaagaaggggttctgtcaaagggaaagggtctatacagatgtgaccagcagtttgattagtttagatgtatgatttagtagccaatataagaaacttgtaatttttagtaattagaatttattataaataataaaacagggtattaattatt

SEQ ID NO: 1405 - DNA, 3318 bp, Homo sapiens
agttcggagaagggggtgccgctgaccgggttgcgctgcgggagagggcgggagggcctgatgggggcgaaggggaatgggttggtaagaccgatggggaagtgaaggatggggaatggaggctggagtggccgcaggccggagctgcggcaggaggacgtatggagcgagcaggatggagtgccaacctcgcctggctatcgggaggaatcacgctctgcagcggggaaagagaagcaagggacagaggtctgggaaggtctgtgaaccagcccaaggcaggtgctctggaaaagctgcagaccagcatgaagaacatggagaaggaactgctgtgcccagtgtgtcaagagatgtacaagcagccactggtgctgccctgtacccacaacgtgtgccaggcctgtgcccgagaggtcttgggccagcagggctacataggacatggtggggaccccagctccgagcccacctctcctgcctccaccccttccacccgcagcccccgcctctcccgcagaactctccccaagccagaccgcctggaccggctgcttaagtcaggctttgggacataccctgggaggaagcgaggtgctttgcacccccaagtgatcatgttcccgtgcccagcctgccaaggtgatgtggagcttggggagcggggtctggcagggcttttccggaacctgaccctggagcgtgtggtggagcggtaccgccagagtgtgagtgtgggaggtgccatcctgtgccagttgtgcaagcccccaccactagaggccaccaagggctgcacagagtgccgcgccaccttctgcaatgagtgcttcaagctcttccacccctggggcacccagaaggctcagcatgagcccaccctgcctaccctctccttccgacccaagggccttatgtgcccagaccacaaggaagaggtgacccactactgcaagacatgccaacgcctggtatgtcaactctgccgggtgcggcgcacccacagcgggcacaagatcacaccagtgctcagtgcctaccaggccctcaaggacaagctgacaaagagcctgacatacatcctgggaaaccaggacacggtacagacccagatctgtgagctggaggaggccgtgaggcacaccgaggtgagtggtcagcaggccaaggaggaggtgtcgcagctggtgcgggggctgggggctgtgctggaggagaagcgggcatcactgcttcaggccattgaagaatgccagcaggagcggctggcccgtctcagcgcccagatccaggagcaccggagcctgctggatggctcaggtctggtgggctatgcccaggaagtacttaaggaaacagaccagccttgctttgtgcaagccgccaagcagctgcacaacaggattgcccgagccactgaagccctccagacattccggccagctgccagctcctccttccgccattgccagctcgacgtgggacgtgagatgaagctgctgacagagcttaacttcctgcgaggctgtggccaccgcggactctgctccggagcaccccagtgcctgaggcccccgtcattgacacccagcgcacctttgcctatgatcagatcttcctgtgctggcggctgcccccccattcaccacctgcctggcactataccgttgagttccggcgcacggatgtgcctgctcagccaggccccacccgctggcagcggcgggaggaggtgaggggcaccagtgccctgcttgagaaccccgacacgggctctgtgtatgtgctgcgtgtccgcggctgcaacaaggccggctacggcgaatacagtgaagatgtgcacctgcacacgcccccggcacctgtcctgcacttcttcctcgatagccgctggggcgcaagccgagagcggctggctatcagcaaggaccagcgagcagtacggagtgttccagggctgcccctgctgctggctgctgaccggctgctgaccggctgccacctgagtgtggatgtggtcctgggcgacgtggctgtgacccagggccgcagctactgggcctgcgccgtagacccagcctcctacttggtcaaggtgggcgtcgggctggagagcaagcttcaagaaagtttccagggtgcccccgatgtgatcagccccaggtacgacccggacagcgggcacgacagcggtgccgaggatgccacagtggaggcgtcgccacccttcgctttcctaaccattggcatgggcaagatcctgctggggtcgggggcaagctcaaacgcagggctgacagggagggatggccccacagccggctgcacagtgcccctgccaccccgcctgggcatctgcctggactatgagcggggccgggtttccttcctggatgctgtttccttccgtgggctcttggagtgccccctggactgctcagggcctgtgtgccctgccttttgcttcatcgggggtggcgcagtacagctccaggagccagtgggcactaagcctgagaggaaagtcaccattgggggcttcgccaagctggactgagccttccaggcccctcatgcagacctggggtcctcctgggccctggcccccaaacctcttggcacccggttgttaccccctggcagcttctcccccaaactctcctaccatgtggccctgctccttctcccgtgtctgtcttcccacagttttctcttgacccaggggctctcttctgcccacctctctggatggcccccgttctctccattgcttgttagccaggcccccacccccactgagtctgccctatgacctgcctttggcatgttacccaagccatggagagagccccttctccatccctgtcctgtgccccccaggctgattgggagggagggcacctggaacactgggcatgatctccagctctgcccttgccctgccaagctccctgccctgttgatgctgaactacagccttgggacaggcaggctttggggctggacgctgtccaggcattcctggtgaggggaaggggaccctgtcatcctgctttatttatttgggtcccaacaccccgcagccgcatgccccttatgtccctcttctccctcttgcatgctttacctgtcccacacccatgccaatgtgccaagtctcccttggggacccagctgagtctgggtgttcccattgggttgggccaggcaaggcctctggtgcccgctgccgtccccctgcagtgggctctgccaggcctgtgctgagcaacagctgttattgtcatggtttataaacaataaactgtgatgccgggc

SEQ ID NO: 1406 - DNA, 2897 bp, Homo sapiens
tacctacagggacaattctcaatgaaggccttaaatgatgctcaattaagctggttctcatgtggcctctgtgtcttcgacagctgctgaatcctctgatcacacacgatgggacttgtacacttgaaatcaaacatatttttaaaacttctgttgttgagaattcccacctcatttttccatggacaaaattattctttatgtcatagtgcacttaaaatttggtattacctagaagttaaagaaatatgataaccgtgccaaactgctatctctaggtaagattattccgtcagaaaaccctctcccagttcccctgtagctcttcaggaatccccatctccccatagctctttgtgcccatggatggcgcttccaaagtagagaagaccgtttgtcaagaagggaagcagaagggggacgagagggtcttgcaggcagagctggaatcgacttccactctgcttcttgcaagctgtgtgatgctaggtgaaatttctccttcctctggagcctctattttcttagatttggagcagggtggtcacactgaccttgtagatttctgagaatcagagacagcacatgaaaagcctggaggccattctcttaagagtagctgtgactcatgtgtggacaatgggcttttcatgcttctgtttctctctgtttatctgatgcaaggaacatgctccggtgatgatggtgagggaggaattagaatagacatagacacccctgtgtcagaaacatgcttctttattactgggttatgactctgtcttcccagggacaggccccagcctgcgtacatttgcagacagagtggcgtgtggggatagcagtttgtccccacgacttttcttcactcccctgctgttggaaggactcagttgaagggacactttatggcattgatgctgccattttgaaacctggaggagggaaaggtgcaagggactatcacctgaggcataaggtgcagcttgtgttggttttggtgtttttgtgtccatcatattcatatatttcaaaacattttctcctcctgacttgtaggtcaatgtggctacagggaagcctcatcctttctcagaatggccctacttgcccgatgtcatggctggcccttcaggaccattgatgggctgccagccgcctcctctacctgggtgttgtctgggaactcaaacactccctccatctgaaggttttctgggaccccaacaaactcctccactggagagtcctctgggaattcaaccacctccactcgactgtcctctgggaactcagccacctcctgcactagagagtcccctgaaaacttaaccacctcctccactcgattgttctctggggccttatccagctcctgcagctgtcagtcctccaggacctcatccacctactgcagctgcctgtctttccggacctcatccaccacctgcggctgtcaatcctccaggacctcaatcacctgctgcacctgttggtcctccatgacctcattgacccacggcatgcatctgacctcatccacctcctgcagctgtcagtcctccgggacctcattcacctcctgcagctgtcggtcctccgggacctcatccacctctcgaagctggtggtcctccggaacctcatccacctcctgcagctggtggtcctccgggacctcatccaccttttgcagctgttggtcttccgggacctcattcacctcctgcagctgttggtcctctgggacttcatccacaccctgcagctgtaggtcttctgggacctcatccacctcctgcagctgttggtcctctgggacctcatccacctcctggagctgtaagtcttctgggacctcatcaacatgctacatgtgtctgtcttccgggacctcatccacctcctacagctcttggtcctcccagacctcatccacgtccagcatgtgtcttccctccaggacctcatccatcttttatagctgccttcctctaggacatcatttacctttttgttctgtgaggcctctgggacctccgactacatctccacttagtaacctctggatcctcagccaccccttctacctgggtggcgtctggcccctcaataaccaccttcacatgaatctcctcggttacttcaataatctccatttgtggtccctgggacttcagccacttcctccaccagggtctcctctagtacatctgccacctcctccacttggctggcctctgctatctgaactcctccaggacctcaaccagctcccctacccattgttgcctgtaggacctcgaccacgacctccacatgtactacttggtatatttatctgaacagtatgaactgagttgcaaaatggattcatctttccctttctgaatgaatagaaatgttacagattgtactgcagggctttgcactggctgaggatgtggtcactttgctcaagtttctgagagtacaagtcagttgcattatttcctcatcatgaccttggcagaaggtatcttctgtagatgaggaaagagttttttttcattttaaggggtgggggcagagtcttgctctgtcaccaaggctggggtgcaggggtgcactcctggctcactgcaacctccgtctccagggctcaggtgatccttccacctcagcctccagagtagctgggactacaggtgtgcaacaccatgcttggctatttttattttttaactttttgtagagaccacgtttcaccatgttgctcaggctggcctcaagctcctggagccatgccatctgcccactttggcctcccaaagtgctgagattacaagtgtgagccactgtgcccagccagaggttatttatagaagctagaaatacaagttttgcaggcttgtgtg

SEQ ID NO: 1407 - DNA, 3464 bp, Homo sapiens
ccctttgtgagaagtgggagggggagccccttcctctggacagaacagcccagcccagggtgcagagcatggattccagcccagtggtccgtctgccagggccctcatgtggagaacagccggcacagctcagaggcagcccccaggaacccatgagacaccttccatggtagctcccttggcaagggagcacatgccagggaagggccacatgggcttcgggggtggagttctgcctcagggagggatccctgtcacccctgcaggaaggggcagttcccgaaggggctaagtagccctggggacagggaagcagcacagatgacaacacagagcgtggccctggtctccgagctcatgacgcagaagctgcacgtgctccagcaagggcaggccatcaccaccctgtgtggcctcacctcaggccacggaccaaggaaggctgggtttcaggcatccctcctgcagccgccagcctccccttgccccactcccagatccagcttcctcctcccagaagagcaaagaggcaaaaacacaaggcggaaatcagccagcccctggccacagaggacatcctgcctatgggcagcagcccaagccacatgcagtggcccccgccaagcttgctagccatgtcctttcccccttcctgtgccagaacaggacagagtctcccaggtaaccctttcctcttcccacagaagggaagggtctctggtgcatgaggggaagctccttttgcctcaggctccaaggacagtggggacaagctaagtcaactggcatctgctaagcccccatcacagtggtttgtttagggattggcctttctcaacaagcaagtatttagtgagcctctgtgttcaggcctccgagaacacagcacaggggaagcatctaaaagccctgccctggtggccctcacatcaggtcacagggccagtgagccgctgtggcctgaaactcaccccagctgagggccttgtggggctgtgggattcactaccctccacggagaagccatccccagggagggttctagaaaccccaccatacattgcttcattcttcccctccctcggcaaacgcctgccgggcacctgcttgtgttagtgcagggcccaacactagactcactatgaagagctgccttcactcctgggaacatcaggagggaccctcccctctgcattctactgacagagccccccagccaaacaatcctcctcagccctgggatgcagcacggcacccccatccctgcacagtgggctgcaggatccccagcgtccccagatggtaagggtggctccctgtgcctcagccacttttaacaagtgtgctttccactgaacacctgctttccctcagggagcctagaatttgggtacatgctacgccctagtaaaaaccctgggcgctgagtccctaagagtatccctgtagctgacagttcacaagtgttgtcataacctgacactggagaaaataaccttgtcctgtgtagctgcaccaggacaggctcttgggaacttgcgcccagatccccggactctgccccacgtgactttcccctgctggcttgctctgtgtcctttcgtagtaatgaaccatgctgtgaggatagcaccacgtgatgagggctgtgagtcctcctgagaaaatcaccaacactgggagtggtcttcgggaaacttgacgcaagctccaaggccaataacttcagaaaaatccacaaactgaaagccactgtaaaggagaaagcgccaggctccaggaggcttccctacacagactctggggtaattcacgctcactccccacggggctttggggcagacagaccccattctgccctctggtgtccacagagtccccgatgagctgaacaccaaatgctcggaggccctggccacagggatcagtgtccaccagcaacctggtccattcagggtggacgctttgaccaatgggtgggaagtcttaaaaggagcacacctcaggccagggcaggccacaccccccacaccctgacacagcctcaggaatgggaatctccccttttctaatacccaacatgaaggaaaagcccactctctgtctgcccgttctgtgttttcttagattctgcatgtctgtttgacattctcaaggccaactgttggccaaagagattccctccggctacgaggcagcttggtgggccccactgtattagtctttcatgttgctgcaaggaaatacctgaaactgggtaatttataaagaaaagcggtttctttggctcacagttctgcaggctgtacaggaagcatggcaccaacatttgcatctggtgaggacttgggaagcttccactcatggcaggaggcaaagggggagcaggtgcctcacctggcgagagaaggagcccgagagagggaggacgtgccaggctctttaaacaaccagaacttgcgtgaactcgtagtgagaactcattaccacgaggacagcagcaaccactgaggaggcatcagccctcatgagccaaacacctcccagcaggcccacctccagcattggtggccacatttcaacatatgtggaggggacaaaacatctcagccctatctcccacccacctccattatctgactcttgcacatccagccaacactccccgtacccaagtcattccagggccaggaagcaggcaactagagccccgctacagcctgaagcccacagaatgattggtgctggcagatgctaagctgctcacctccctgcagaggacaccccccatgcgggctgaggcctaacccctccccagcccccgcctcctgtctcctgaccaccctgacatgcctgctagagaagagggctactgtgtaaggacaaatcagagcaacttgaggatcaagttgctgcctcgttccccagcaccaatgcggaggccttgtgggaagggtagccatggagccagtccagactggaagacacaaggcaagtcccgcctgtccagacctgctggtacctcccacctgcaggacgtgaaatcacagcaaaaaggagacaaggattattttaaagagtggagagagagggcccggagtggtggatcacgcctgtaatcccagcactttgggaggccaaggtgggcagatcatgaggtcaggagttcgagatcagtctggctgacatggtgaaactttgtctaaagatacaaaaaattaaccagaagtggtggtgcacgtctgtaatcccagctactcgggaggctgaggcaggagaatcgattgaacccgggaggcagaggatgcagtgagccgagatcgtgccattgcaaactgcaatccagcctgggcgacagggcaagacttcgtctcaaaaaaaaaaaaaaaaaaaaaagagtggagagagagaaaagacagttttgtgttcttttgcactgataaaataagaaatatttattctct

SEQ ID NO: 1408 - DNA, 3978 bp, Homo sapiens
gtgaaaggctggggagggtccagagcagcagagactccccttcactgctagggtgaagggagaatgatacagcctcttcggaagacagtttgggcatttcttacaaaggtaaacatgtatttaccccatgacccagtagtcctgttcctaggtatttctccaagagaaatgaaaacttagattcatactaaatcctatatatgaatgttcacagcagcactgtcataactgccagaagctggaaacaaccttgtgcccttcagccagtgggcagaaggatgtctccgtggacagggacagcccatgcgtggatggaaggacatctccgtggacggggacagctcccgcgtgatggaaggacatctctgtggacggggacagcccatgcgtgatggaaggacatctccgtggacagggacagtccatgcgtggatggaggacaactccgtggacggggacagcccgtgtgtgatggaaggacatctccgtggacggggacagcttgtgcgtggatggaaggacatctccgtggacggggacagcctgtgtgtgatggaaggacatctccgtggacagggacagcctgtgtgtgatggaaggacatcctagtggacatggccagcctgtgtgtcatgccaccaggcagtgggattgtgcttagcagtgaggggttactgctgactcacatgacatgatggatcatacattgtgcattttgctgtgcagcagaagccagacttgaaagctggtattgattctttttaccggacacctgggaggtgcagaactgtagggaagagacccgtccgtggtcgctaaaggtttgagtgtagagggtgaccggagaggcatcccgagggggtgtgggtgtggaagctgctctgtctggcgcggtggtggcggacacctgaccgtgcctctctcagagcccgctggacggcaccagcatggagctaagggaggaggaatgcagacagcggcccatgaaccgcagaagcacactgtgggctgggaagaaaggagctcttttcagtggccttgggaaaggcgtttgactgtggttcactgtaaggctgaagacaaaaagaactgcaaaccgtgggctgcgtttggcatttgcttcttacaggaatcaataagcccatgcatggtagctaatgagaagcagatttctccctgttagcgatgaagttagaaatgaagggctggattgaagcccagatcagtttgggcttgtggtttctgtgagataaataaatagatgaagaaataaacacggacatgtgtgagcatgacttagtaaacacacacagtcctaggccatacaccaagtggctagaatcaggaaccaggcggtagtgagcaagctcagtgttgcaaattatgcggacgagaccctgtgccgtcccccaccacgcagagccctagagaaggggttaattccagggctgaggcaagggaaatacaagatgagcctgaaacttcttgtggagcaaaaaagtaaggaactgctgaacaagaatcagtgaggctggtgcgggaggcaggtctgacggcgtcagaggctgagcctcccacgggctagcactgaacaccctgcacagcaacctagacagcagcatgactagatgataaccagagagcacacagataccttcacctccaccgtgtgtacgcagagaaagtgcctcctcaaccagagagcacacatatcttcacctccaccgtgtgtacgcagagaaagtgcctcctcaaccagagagcacacatatcttcacctccaccgtgtgtacgcagagaaagcgcctcctcaaccagagagcacacagataccttcacctccaccgtccaccgtgtgtatgcagagaaagtgcctcctcaaccagagagcacacatatcttcacctccaccgtgtgtacgcagagaaagtgcctcctcaaccagagagcacacatatcttcacctccaccgtgtgtacgcagagaaagtgcctcctcaaccagagagcacacatatcttcacctgcactgtgtgtacgcagagaaagtgcctcctcaaccagagagcacacatatcttcacctccaccgtgtgtacgcagagaaagtgcctcctcaaccagagagcacacatatcttcacctgcactgtgtgtacgcagagaaagtgcctcctcaaccagagggcacacagatatcttcacctccaccatgtgtacgcagagaaagcgcctcctcaaccagaggattccagttataaatggtgaaggaaccagggcagttggaggccccgctggggcaccaaggcagcagccactgtcacgaggtcttccaagggaagtggaactccagggtcacagttcccatcaccagggatgagagaggccaccacacctcctgctgtggagccctgcaggggacacgtgtctcctcaacaaatcctccccagtagtgtcatcagtagaagacatcagacaagtcgaaatcaagggcattccaaaaagacatgtccggagctttgaggagcagccaggtcattaaggacggcgccgtggccccgggtgagctggagggcgccatggggctgtctgcgctgcttctgcagcttccctgcaagtctaaagtgatttcaaggcaaaatgattagaaaacggagtcagagccaagaaagtcttcaattttcctaggatagatgaacagaattgggcatggcgccaggtgcctgtggtcccagctgcccgggctggagaatcacttgagcctggaaggtcaaggctgcggtgagctgtgatcgcaccactgcaccccatccctcggcaacagattaggaccctgtctctacaaaaacaggactgtgtttgcaaagctgcagtcttatccttcaaagtgtggagttcaaaaccagcccatgtctgcgcctggccctggcccagttgcgagcactctgtggcagcaagtccacctttaggtgcacactctctgcttggtggctctcatttaacctgtcctgtaatatttgaactttctgtccagtaatatttgaagttcattttatattctaagagatgtatttaatgaaattgagcttatccatgtaagaatgaaggaatgagaccctgaagaaatcagtcaccgtaatttcagaccattaatagaagaaataaaagtgacagtggagtgagtgtggcaagcagaagagctgtcgggaacgtcacctgcccacccctttgctgtaggaccctaccaccagcatactccgtcgttggcaccctcgtcgttggcacgtctctaccctcagcagagcaggccaggcactgaacggcaggaagcccacacttcctccccagcttcccttcctgccaaggccagagacgcgtgcagagccccagttaattggggcttctctccccggcgccaccgtgagcaccgtccttccctctctgtttggagggtttgttcttgatatgctctgactgcactttttctcctcttgcatctgcctataggatctttctactccacactcccaaacttctctcaaataattacaattatgggaacaggcgaaatttgttgttgttgttgttctagtaagaatcagattgggaggccgaggcgggcgggtcacgaggtcaggagatcgagaccatcctggccaacaccgtaaaaccccgtctctactaaaaatacaaaaaaaatgagccgggcgtggtggctcacgcctgtaatcccagcactttgggaggccgaggcgggcgggtcacgagtcagaagatcgagaccagcctggctcacacggtgaaaccccgtctctactaaaatacaaaaaaattagctgggtgtggtggcgggcgcctgtagtcccagctactcgggaggctgaggtaggagaatggcgtgaacccgggaggcgaagcctgcagtgagccaaggtcgcaccactgcactccagcctgggcgacagagcaagagtccgtctt

SEQ ID NO: 1409 - DNA, 3998 bp, Homo sapiens
attttcgagtgaaggacccggagccgaaacaccggtaggagcggggaggtgggtactacacaaccgtctccagccttggtctgagtggactgtcctgcagcgaccatgccccgtaaaggcacccagccctccactgcccggcgcagagaggaagggccgccgccgccgtcccctgacggcgccagcagcgacgcggagcctgagccgccgtccggccgcacggagagcccagccaccgccgcagcaatgaccaatgaagctggagctcctcggcttatgataactcatattgtaaaccagaacttcaaatcctatgctggggagaaaattctgggacctttccataagcgcttttcctgtattatcgggccaaatggcagtggcaaatccaatgttattgattctatgctttttgtgtttggctatcgagcacaaaaaataagatctaaaaaactctcagtattaatacataattctgatgaacacaaggacattcagagttgtacagtagaagttcattttcaaaagataattgataaggaaggggatgattatgaagtcattcctaacagtaatttctatgtatccagaacggcctgcagagataatacttctgtctatcacataagtggaaagaaaaagacatttaaggatgttggaaatcttcttcgaagccatggaattgacttggaccataatagatttttaattttacagggtgaagttgaacaaattgctatgatgaaaccaaaaggccagactgaacacgatgagggtatgcttgaatatttagaagatataattggttgtggacggctaaatgaacctattaaagtcttgtgtcggagagttgaaatattaaatgaacacagaggagagaagttaaacagggtaaagatggtggaaaaggaaaaggatgccttagaaggagagaaaaacatagctatcgaatttcttaccttggaaaatgaaatatttagaaaaaagaatcatgtttgtcaatattatatttatgagttgcagaaacgaattgctgaaatggaaactcaaaaggaaaaaattcatgaagataccaaagaaattaatgagaagagcaatatactatcaaatgaaatgaaagctaagaataaagatgtaaaagatacagaaaagaaactgaataaaattacaaaatttattgaggagaataaagaaaaatttacacagctagatttggaagatgttcaagttagagaaaagttaaaacatgccacgagtaaagccaaaaaactggagaaacaacttcaaaaagataaagaaaaggttgaagaatttaaaagtatacctgccaagagtaacaatatcattaatgaaacaacaaccagaaacaatgccctcgagaaggaaaaagagaaagaagaaaaaaaattaaaggaagttatggatagccttaaacaggaaacacaagggcttcagaaagaaaaagaaagtcgagagaaagaacttatgggtttcagcaaatcggtaaatgaagcacgttcaaagatggatgtagcccagtcagaacttgatatctatctcagtcgtcataatactgcagtgtctcaattaactaaggctaaggaagctctaattgcagcttctgagactctcaaagaaaggaaagctgcaatcagagatatagaaggaaaactccctcaaactgaacaagaattaaaggagaaagaaaaagaacttcaaaaacttacacaagaagaaacaaactttaaaagtttggttcatgatctctttcaaaaagttgaagaagcaaagagctcattagcaatgaatcgaagtagggggaaagtccttgatgcaataattcaagaaaaaaaatctggcaggattccaggaatatatggaagattgggggacttaggagccattgatgaaaaatacgacgtggctatatcatcctgttgtcatgcactggactacattgttgttgattctattgatatagcccaagaatgtgtaaacttccttaaaagacaaaatattggagttgcaacctttataggtttagataagatggctgtatgggcgaaaaagatgaccgaaattcaaactcctgaaaatactcctcgtttatttgatttagtaaaagtaaaagatgagaaaattcgccaagctttttattttgctttacgagataccttagtagctgacaacttggatcaagccacaagagtagcatatcaaaaagatagaagatggagagtggtaactttacagggacaaatcatagaacagtcaggtacaatgactggtggtggaagcaaagtaatgaaaggaagaatgggttcctcacttgttattgaaatctctgaagaagaggtaaacaaaatggaatcacagttgcaaaacgactctaaaaaagcaatgcaaatccaagaacagaaagtacaacttgaagaaagagtagttaagttacggcatagtgaacgagaaatgaggaacacactagaaaaatttactgcaagcatccagcgtttaatagagcaagaagaatatttgaatgtccaagttaaggaacttgaagctaatgtacttgctacagcccctgacaaaaaaaagcagaaattgctagaagaaaacgttagtgctttcaaaacagaatatgatgctgtggctgagaaagctggtaaagtagaagctgaggttaaacgcttacacaataccatcgtagaaatcaataatcataaactcaaggcccaacaagacaaacttgataaaataaataagcaattagatgaatgtgcttctgctattactaaagcccaagtagcaatcaagactgctgacagagaccttcaaaaggcacaagactctgtcttgcgtacagagaaagaaataaaagatactgagaaagaggtggatgacctaacagcagagctgaaaagtcttgaggacaaagcagcagaggtcgtaaagaatacaaatgctgcagaggaatccttaccagagatccagaaagaacatcgcaatctgcttcaagaattaaaagttattcaagaaaatgaacatgctcttcaaaaagatgcacttagtattaagttgaaacttgaacaaatagatggtcacattgctgaacataattctaaaataaaatattggcacaaagagatttcaaaaatatcactgcatcctatagaagataatcctattgaagagatttcggttctaagcccagaggatcttgaagcgatcaagaatccagattctataacaaatcaaattgcacttttggaagcccggtgtcatgaaatgaaaccaaacctcggtgccatcgcagagtataaaaagaaggaagaattgtatttgcaacgggtagcagaattggacaaaattacttatgaaagagacagttttagacaggcatatgaagatcttcggaaacaaaggcttaatgaatttatggcaggtttttatataataacaaataaattaaaggaaaattaccaaatgcttactttgggaggggacgccgaactcgagcttgtagacagcttggatcctttctctgaaggaatcatgttcagtgttcgaccacctaagaaaagttggaaaaagatcttcaacctttcgggaggagagaaaacacttagttcattggctttagtatttgctcttcaccactacaagcccactcccctttacttcatggatgagattgatgcagcccttgattttaaaaatgtgtccattgttgcattttatatatatgaacaaacaaaaaatgcacagttcataataatttctcttcgaaataatatgtttgagatttcggatagacttattggaatttacaagacatacaacataacaaaaagtgttgctgtaaatccaaaagaaattgcatctaagggactttgttgaactttatgctgaagattcttcaagttgattcagtgtattactgatttttttctatttgtaaaggattatgagttgtataaaatacatactccctaaactag

SEQ ID NO: 1410 - DNA, 3273 bp, Homo sapiens
gtttttggctgcttcccgggaagccgttggtcgcgcttgcgtagtgaaccgctgaggctgtgttgagcgctccttctccgcgcaactcgcggcttcgacaccgccttccttcctatgaatccttaatttaacgtggtcacagtcagcttaagaccggcacctctcgggctccgtcttgtaggacctcggcctggcttcgagggcttccatacaggtcaccgcaggctctttcaactcccgccgcttccaggcccgcgtaaccagaccacaacactgaacttggagcaccaagaacaggagccccaccctgtttggccaggatgcctttgggacgcttggcagggagcgcccgctccgaggagggaagcgaggcatttctggagggaatggtggattgggagctgagtaggctgcagcgacaatgcaaagtgatggaaggggagaggcgggcctacagcaaggaagtccaccagcgcatcaacaagcaacttgaggagatccggcgcttggaggaggtacggggcgatctccaggtgcagatcagcgcagcccagaaccaggtcaagcggcttcgggacagtcagcggctggagaacatggaccgcctgctgaagggccgggcccaggtgcaggcggagatcgaggagctgcaggagcagaccagggccctggacaagcagatccaggagtgggagacgcggatctttacccacagtaagaatgtcaggtccccgggattcatcctggatcagaaggtcaagatcaggcgaaggatcaggatcctagaaaaccagttggacagggtcacctgtcactttgacaaccagctggtacggaatgcggccctgcgggaggagctggatctgctgcggatcgacaggaaccgctatctgaacgtggaccgcaagctgaagaaggagatccaccacctgcatcacctggtcagcacccttatcctctcctccacctctgcctacgccgtcagggaggaggcgaaggccaagatgggcttgctgcgggagcgcgcggagaaagaggaggcccagagcgagatggaggcgcaggtcctgcagcggcagatcttgcacctggagcagctgcaccacttcctcaagctcaagaacaacgaccggcagccggatcccgatgtcctggagaagcgtgaaaagcaggccggggaggtggccgagggcgtctggaagacctcccaggagaggctggtgctttgctacgaggacgccctgaataaactgtcccagctgatgggggagagtgaccctgacctgttggtgcagaagtatctggagactttccctctctgccttgctgtgtatttctgtgtcccacctgccgtatcttcccacacctctttgtctctgtgactcctctctgttcgtctctctgccttggtttctgtgtggccttcctcatcttcactttctttggccttctgtatgcctctctgtctctgttctctctgtctctgtttctctgtctccctctctctgggccccgccttgcccaactctcccagtcgaggagcgcaactttgctgagttcaacttcatcaacgagcagaacttggagctggagcatgtgcaggaagagatcaaggagatgcaggaggctttggtgagcgcacgtgccagcaaggatgaccagcatttgctgcaggagcagcagcagaaggtgttgcagcagcgcatggacaaggtgcactcggaggctgagcgccttgaggcccgcttccaggatgtgcggggacagctggagaagctcaaggctgatatccagctcctcttcaccaaggcccattgcgacagcagcatgatcgatgacctccttggggtcaagaccagcatgggagaccgggacatgggcctcttcctgagcctcattgagaagcggctggtggagctcctgacagtgcaggccttcctacatgcccagagcttcacctccctggccgacgctgccctcctagtgctgggccagagcctggaggaccttccgaagaagatggccccacttcagccccctgacactctgtgaggcgcagggcaggagagaagaccccctgggttttgaggccagcgatgactaccccatgagcagggaggagctgctgagccaagtggagaagctggtgagagtggggcctgcgggggtggggccaggcctcagtgtgtgtcggggcccagttcaccttccctgcaggtggagctccaggagcaggcggaggcgcagcgccagaaggacctggccgccgccgccgcgaagctggacggcaccctgagcgtggacctggccagcacccagagggccggctccagtaccgtcctggtgcccaccaggcacccccatgccatccccgggtccattttgagccacaagactagcagagaccgtggctctcttggccacgtcacttttggcggcctcagctccagcactgggcatttgcccagccacatcacgcacggtgaccccaacactggccacgtgaccttcggctccaccagtgcctcgagtgggggccacgtgaccttcagacccgtcagcgccagcagctacctgggctccactggatacgtggggtccagcaggggcggagaaaacacagagggtggtgtggagagcggaggcacagcgtccgattcgagcggaggcctcgggtccagcagagaccacgtctccagcaccggccctgcctccagcactggcccgggctcctccaccagcaaagactcccggggctaacacgaggggcacgcagcccccaccctgccctggctctctgtggggtctttttttgtgtctctacttcccctgtttgccttgtgggtctctgtctttttctcccagtggcaggcctctgtctttttgccccttcaactgttttcatctgcccttcatcaccgcctcacctgtgtctcccggttcctttctctctgctcctgacactgcttttccctctgactcctgatctcctgttctctgggcttcctggtcagtgtctgtccgtcttgtctccatatctgccccttccctgtctgctgagccctggccccctgtggatcccccacctcctgtttccggctctctctcctcatctccatctcccaggctctccacgcatcctgtgtccctgtctctgtagctccttactccccaagagccccccagtgctgacaggtgtgggaaaagtcagggcgaagacgccaggttcagcatgggaaaatgggactgtggaaataaagtatatgtgtggag

SEQ ID NO: 1411 - DNA, 3099 bp, Homo sapiens
atggaaacgggacccagcgaagaacctagcggccgaaaagagtcccaggaaatgtgccccccgggattactggtatttgctggctcctcggaacaagatgccaacttggctaagcagttctggatctcggcgtcgatgtatccccctagcgaatctcagctggtgctgcgcagagacagcagtcagcgtctgccggtggcgcggcccaggaggagcagagggtctgaaaacagccactcctcgcagtcttttcaccttgcgagtaacaaaaatagagacatctttgccgaagccctaaagatacaggaatctgaggagaaagtaaagtatctccaaaagacaaggtctcactctgtcacccagaatgaagtgcagtggcatgatcatggctcactgcagcctcaactttctcggattcaggctaaaacaagagaagagattctccaactcttaagaaaacaaagagaagaaaggatctcgaaagaactgatttcccttccgtataaaccaaaagccaaagaacacaaagcagagtaagtttacctatgtcaaaaatattctctcacctttcaacttactgtgtagggaagcatttcttttttcttactttgccacttacccttaaatcttctagaaacccacccgtgtattacagatttcttgccttgaataaactttcttctccgcacagctattaaagcctgtgtacgaacttgtctgtctgtggaatatgcaagcataagttagtgcaaaatggaaagcagctcagccttgaagctctgtgcacattctctgtccctctcttctcaccctgggctatataatcacccatcatcatgccctcctgactccactgtcccctatccacacctggcccacttctttagtgaatcagcacgtgtttgtggctcaccagctctgagtgggctaaggttgctaaaactaagttcatgtagcaaactctcaatgataagggagtagccttatctctggaataatgttagagcaggactaggaacagtttaacagtctagaagagtttaaaggaaataagtaagcaacagttaatcactaacgcacccctaataagaaatctgtccgtttttgtattatgactaaaaaccaatgtggccaactcaacattaatatgacaaatatttattttcataccacattctgggagaaacagaaagtgatagaattttgatttttctctcattggtattgaggctaactgcctttaatgctgtcaaagtaacacccttaaggaagaaagaatatgtctactctaattttgtaaacttctggaaaaaaaaatagaaagatcatttaatcacctagctatattatctacacaatgctcagcaacctaatttctcgctttttagccagacgatttgacttagcttccacagatgaagcaaaactagcccaatcaagagtgacttaacgataccaatagtggatgaagactgctacttaaatagcatcaatagatacgtctgggtgccttagatttccgcatgtatttttacagaacattcctgctactacccatgctgactcacctaataataaaacatttcccggcttggacagataattctcttaataatttaaatgcttacttaattccttttgtaaactaactttgtcctacatcctgaagccttgaatttcattctattctgttgtgattatcttcctactattaacttcttctagctactcttctttttttttttgagacggagtctcgctctgtcacctaggctggagtgcagtggcgcgatctcagctcactgcaacctctgccacccaggttcaagcaattctcctgcctcagccttccaagtagctgggattacaggcgcccaccaccatgcccagctaatttttgtagttttagtagatacagggtttcaccgtcttggccaagctggtcttgaactcctgctcgtgatccacccatctcagcttcccaaagtgctgggattacaggcgtgagccaccatgcctggcctctagttactctttgtacattctttgggcaactaatcatgcattactctgtgcccatattttataattatttaactcttattattgctttcattatttaacttttctcatattttttgtattgtctgtaactatactgtaagctccatgaggaattgggtcacccaaagtgccagcatactgcttacatgttggacttcagaaaatatttataacaaaaagtttagttgaaaaatatcatgtaattcagtgttagccaatttagaaagtgatgtttgcatactatacattaatttataaactttaaaaactattctattagacacaattgtaaaataactcccctacatacacagactcccccttaccattcctccttcaacaggtcttcttagtataatccaggtccccttctgttagaaagaaggaaccggaaaatgtgttcatagtaaggttttagtagcaatatatttattatccatcccagaatatttgcattttaaaagaagtctgaataaataaaataatgggtaaaccaaagaaatcaattaccaatgatgaaatctcaggagtctgactctagaataaacaaaacatatttggggtaggagggctcctgtacctccaaaccacacttcacaatatcataaccacttctctcacatacaagtttatacttggttgcaaaacccaacacatagaatctacaacagtgaatttttattgggagaattttcaaaagttgttttcatgctacatcatgttcacaatggcggagttctgtgtattggaactgactgatattactaccaacaggaaagtggtatcagagtcagataaagaggaccaagaagaagtcaaaactttggactaatttgcttgacacatggcagaggatggctcacttataccttcactttggaaacaaccttctcttagatcaggatcattgagatcactggcaacattatagtagacaaagaaatacaagttaaatacgcagacttccaggaattttaccagttagtgagtacttgtgttaaaataaagaaataaaggttaaatatgcaggcttct

SEQ ID NO: 1412 - DNA, 3807 bp, Homo sapiens
ttatcaccagggtaaatagaaaccagtattattacctaaccaaataagaaaaaaagtagcagtaaaaataaatataatgaaaagaaaacaatttaaaacttttgggctaaataatgctattattttcccagagatgctgcacctgagatctactgtctctttatcaataggggatatttgtaagtgtctgagaggtgtttttgtgttttgtctgtttgtttgtttgtttgtttgtttgtttttgagatggagtctcattctgtcacccaagctggaggacagtagcaggatctcagctcactgcaacctcagcctcctgggttcaagcgattctcctgactcagcctcccaagtagctaagattacaggcatgcaccaccacatccagctaacttttgtatttttagtagagacgaggtttctccaatgttggccaggctggtctcaaactcctgacctcaggtgatccacccgcctcagcctcccaaagtgctgggattacaggcacgaaccactgcgcctggccatctgagaggtgttaaagacacaacagcacccagctaagactttctccaaagagtcaaaagagaactgtaaaggaaattgctgtcacattatctggcaggatgctgtttgaaactatgcttgtgggtgaagtaaacacatcgccagctcgccgccccctcccccccgcccccaaccacactctgggaaactttaaggtggagacttgcagtttcttccagtccctcggtcccacccacctgcactcctcgccctccagcagcttgcggtaggtggcgatctcaatatccagggacagcttcacgctcaaaagctcttggtactcgcgcagcatccgtgccagctcctccttggcctgctgcagggcgccctccagctcatccagcttggccctggcatccttgagggcacagtccccccgctgctcggcgtcagcgatggccgtctccaggttggcacactggggtcaggaggtagcatttctccctgagttcctccctgggcctcgcttcacctctcccatgctctcaatggttgagccctcctctgtcctgccccatgtcctggagcagagacccagccacatccaggtggagtcctgtcaacctgagactgagaggcttgctacgctgggccccacagctttatgaaaataatctgcaattgttccaaacttcagatgggagctaagggtgagggatgagagcaggacctccatttgaagaaggggattctgaaatggatgctcaagagaaggagggggcagggggtgctaagcagttcacccctcccttaggagtgagtaaggaaggctccagtccccttcacctgcttcttcacactctcaatctccgagcgcagtctttggatgagacgggtcagctctgagatctcatttttggtgtgtttcaggtcatccccatgccggccggctgctagctgcagctcctggaactagaggaaaaggaaccaaagcaagaacactgactcagggcttggctgggatcagcctggtacagagactgtgcctgcacttgcagagcctggcagagtcacagagagtacatcagttctactcagaatgtggctcaaggggaaaacaaaacagggacccttcagcactctggtgtactgctctgtctctgtcactgggtgctccaccccagcatggcccaagatttaggattgttcctaaagatgtcaagttatccagaaagcagagaaggcagaagggcttctctcttcactccttgtattttatctttggtgccaaccctaaacgaggggccttctcctgcttctccgcaaggctgtgtgagcaggatgcctccccgtacactggttctgacaccaagcagcttcattctgaggcaaacagatgaacatcttcctgccactcctctgtcaagccacacaaagcccttagagtaaatgcttctttcccagagtcaccttctgattttctgcctaaatgcagtggaatttgaagtcagtcacctagattctgatccagctgcgtcacttgtcagctattgcctttgtgcccaggagagtgctgtgctcccagcaagctatgggccaccacagtgagtcatggggcagacaagacagagtctggagcagagggccctgcatacttcactatggggagttttgcggcctcaccttggtctggtacagggcctcggcctcggccttgctcttccgggcgatctcctcatactgggcacggacctcagcaatgatgctgtccaggtccaggttccggttgttgaccatggacaggatgatggacgtgtcgctgatgtgggactggatctgagcagtctcctgcaggggaaacaaggaagcatgaaatgccttctgtgaccagagaaaggtcccaaggtgatggccctgtcccagagggatggccctagaccatcccacacagatggaagctgcacttcccaaagcttgtaagaacagagctcacagcccagaggttccaataccacatctgaaaactgctgaatgggtttgaagcagcccaggaagaaaacagcccatatgtctgtcccctgagacaggacaggagtggggaaggtggaagacaacagcctggctgccacacatgggacactaaggggcacaggagcccagaaatgcttggccaataggttgaggcttgaaaccagatgtacatagagaaggcagaaggggtatgaggacttcctacctctatccctggggattcctgcccaagaccccaggaaacatccccagccacagagagaagagaagcaggaatgagaatatgcttggctgaagttcagtgggaaccctttaaggactctgttttcctggaggaagtgaaagcaggacatcctcagggcagtcagggatggatggggcaccaggatagatggccactcccacctttgatctacaaatttctcagcaccccaatgctggaggtgccctggactgcttaagttacagataagtaagaaactgttcatcacatatctgtccttccagaagacagagccagaggtggggcagggggagccttaccccctcgtacagacacttgaagaacttgatttctccatccagggcatccaccttggcctgcagctccactttgctcgtgtaagctgcgtccacgtcctatggagaatccagatacccctgacctcacctttcttcaagcccagacaggcctctccagcgaactgacacctgcaggccctgccctagctagctgcccaggacttcagatccaaggggcaggaaccggccttccagccacaacttcactgtcagactcactgcgaaacctggggcaagtttctcatgcctctggaactccttctgcctctatttctcagagaagggtgtgagactctataccccactcagccagtcattcagccaacagagggaggcaaggacagccacggcgatttgccagaaactagcagagttggaaggcaaacctgcagcccctcccaaagcctgtcctgttccccagccagaggggacatgagttgggactgactatccacatctaggttcctgtccacagacaaagtactgtgtgctaaaccaacaccaggtgtcccaaaatgtcccaagcagcaagcccttcatctcctccttcagcactttggccccaggcccttctgcggggggctcagacctcagctgctcctctctcttagcccagcacccactgctggggactgaagggaacccatgcaccctcctcaccttcttaagcaccacaaattcattctc

SEQ ID NO: 1413 - DNA, 3939 bp, Homo sapiens
accatcgagtgcccacccggtgcccagctgtgctctggtcctggcgcacgttcctctgggatgctggctgctcaccccggaccgggggctcgccagcgttccctgcccctgtgcccacacccgggctgttctcacttgcactcatgcccttcccgattctctggccaagaactcctacaaatgtgcccatagcgcgggtccagggtccagggattcctccacccgcctgcgtctcgcactgtcgtcctccctccccggactctgcccctcgcactgtcgtcctccctccccggactctgcccctctcggtgtcgtcctccctccccggactctgcccctctcggtgtcgtcctccctccccggactctgcccctctcggtgtcgtcctccctccccggactctgcccctctcggtgtcgtcctccctccccggactctgcccctctcggtgtcgtcctccctccccggactctgcccctctcggtgtcgtcctccctccccggactctgcccctctcggtgtcgtcctccctccccggactctgcccctctcggtgtcgtcctccctccccggactctgcctctctcggtgtcgtcctccctccccggactctgcctctcgtgctgtcgtcctccctccccggactctgcctctctcggtgtcgtcctccctccccggactctgcccctctcggtgtcgtcctccctccccggactctgcccctctcggtgtcgtcctccctccccggactctgcctctcgcactgtcgtcctccctccccggactcttggaactgcgtttcttccctctcacccatcctgaccctaagaagctgagagaatctgtgcccctcttggtagactgggaaggcgggggagaagcccctctgccctcgtcacccagcaagggctagtgcagcctcacgttcatgtggattcacagccagaccctgttccaaggcagaggcagtctggtcaggacctggcagaatacacatggggtccaggcagctcccgagggagatgccccaaggttacctgcgatgctgttccggtttgaaccatgtggatagtttttttttttttttttttggagactgagtctcattctgttgcccaggctggactgcaatggcacaatctcagctcactgcaatctgtgcgtcctgaattcaagtgattctcatgcctcagcctcccaaatagctgggattgcaggcgcccaccaccacgcctagctaatttttgcatttttagtagagacggggtttcaccatgttggccaggctggtctcgaactcctgacctcaaatgattcacccacctcggcctcccaaagtgctgggattacaggcgtgagccaccacgcccggccccatgtaaacactttacacgttcaaaatacaattaaaaaaagaaaggaaggaaaatcctgaaatagaactgagtcagaataagtgaccctccgtgcgtcatgttgatagcataattacagggaagcagagttactgtgattatttttaaatgtggagactgaacatacacgcactgggaagctctggaccctgggccggggagggccagggcggggtggggtggagcagcggctgccttctccctgggcgtggacgtctggtgcccacagccccagccgcacgctgccccactcttgtccctggttggagccccgacggggctttgctgctgtaagatgctccctgtggcacctgcagacgggcgggttaccacagggagaccagagcagcatccgccctgcagccagcagcacaggtggtggccgggggagctcctcgtgggaccccgccttgctccctgcgagcccctcgcctggctcccagctgaccccctgcccctctttacactccccagctccaccgggggacggctacgtgcaggcggacgcccggggccccccggaccacgaggagcacctgtatgtcaacacccagggtctggacgcccccgagccggaggacagccccaaaaaggatctgtttgacatgcgtatgtggcagcctggggggcggccgtcatcgcgtgtggccgtgttgtctgatggggggggcacaaccccacccccactccctacgggattccctggtctgatgggggaggctcccttctccccgtgagatccttcaagtcgacgggtgggacggggaagcccagtctgtctcctgtcggaggccttgtctgatgggggtgtcctggactctgccttaaaaggggccagtctgacaggggaggcccattctctctagcgaatgcggccgagcagtgtaatgggtgaggcccagcccctcctacaggaccccatctcccggggcctccctgctgaacccccagtctggttgggaatgccgctggcccccgctctgtgagaagctccactctctcgggggtaacccacctgcctctgtcggaacccccggtctgaagggaggaggttcgtcattccttgaaagaatggtcagtgtggtgggaggctgcggccccgtctgtgaggccctccagtcaacaggggaagccagaccctcgccccatgggactccttagtctgagaggggaggcctcgtcttttctctgtgggaatcccggcctgctgggacgactgcctggcccgctggtcttgcacgctgactctgggtctccctagtctgatgagttttctcttcacgtgactccggggtctgaggattcttcctacggaaatcccggcctgatgggggaggcacagcttcctgcttgaaggaacgcccagtccaatgagggaggcttagtccacctctggacaaagtggctagtctgacggtgagcccgttccttccttccccgtggatgacccagcccgagggagcccccagccgggcggaggaggcttgtccttccttggctgaggtgtccagagttctctcctgatttcctgcagcctcgactctgcccttctccagcacggagaggtgttggctctgagctgccgggtagggtccttgcctgagctcaggatgcctcccaagctaactgcaaatttctccctttcctccaccacctgacaaagcagcttctcctcagcttcacaataatgacaccatctagcacctagtgggcgcctgctgtgtaccaagcactacgtgaagagcttgctcctcttggctcctcacagcagccctcagatgggaaaggaggggcttggggctctgagcttccctctgaggcaggctgtccctcagggtgaccagactgccaggcagccccggttgaggaagggtgtcttctcgtccgtcctccacgaagagtcctggggctgcctctgattcgccacgtgctcgtccccaaaccagtcgctggctgggagggggaggtgaacatgctgactggccaggctgggagttggagctggctcagcccccagggtcagggctggaggaccccccaggaccaggagctggaggggcgggagaccagggagcgagggtcagggcgggaggaccccccaggaccaggagctggaggggcgggagaccagggagtgagggtcagggcgggaggaccccccaggaccaggagctggaggaattcaaggccgccccagccacgggtagatgcatctccgtcagggctggggctccagcactgcagggtctgaaccatgctgctttctgcctggggacacgcccacccctgtttgacaatgaggggactgacactcagaggagagccttagagtggcctgtcggatgttggcattgttggaagccgttagaaaacccagggcagaacattttaacgctaggggcaagagaggggtgccggctgtcgtcttaagtatttagggcacattggaggccccgcggccaatgcagtaagaccagacaaggaaacgagaggcgtacgctttgggaaggaagcccaccacaag

SEQ ID NO: 1414 - DNA, 3100 bp, Homo sapiens
acgcgccccagctcccaccttgggtccttcgcctgcacccagtctaacctggcacctaaagatttcactctgtccttggcccctcaccattgtctcagagtttaagccttaacggatgaaggaaaaagattatttgtgagaagaaattatctaacacttctcatctatctaactggagtttcactagctggagtttttctggttggtgtattactttattcagtgataatatgaaaattactatcttcactgaaggatctactgaataatcattttaactcaactatattgcattcttgaaagcaatcctttcaattgatctactgacttcacaatgtctgaaatcagattcaccaatctcacttgggatcaagttataacactggatcaagtgttagatgaagtaattccaattcatggaaaggggaatttccccacaatggaggtaaaaccaaaagacatcattcatgttgtgaaagatcaactcatagggcaaggaattattgttaaagatgccagattgaatggttccgtagcaagttacatacttgcaagccacaatggaatcagctataaggatctggacgttatttttggtgttgagcttccaggtaacgaagaatttcaggttgttaaagatgcagttctagactgtctacttgactttttaccaaaagatgtaaagaaggaaaagctctccccagatatcatgaaagacgcttacgtacagaaattggtcaaggtttgcaatgggcatgattgttggagtcttatctccctttcaaataacactgggaagaatttagaactaaaatttgtgagttcactcagacggcagtttgaatttagtgtagattcctttcaaattgttttggatcccatgttagagttctacagtgacaaaaatgccaagctaaccaaagaatcctatcctgttgtggtagctgaaagcatgtatggagacttccaggaagcaatgacacatttgcaacacaagctcatatgtaccaggaaacctgaagagattagaggtggtggccttctgaagtactgcagcttgctggttcatggcttcaagccagcctgtatgtcagaaatcaaaaacctagaacgttatatgtgctctagattctttattgattttcctcatatagaagaacagcaaaagaaaattgaatcatacctccacaaccatttcataggtgaaggaatgaccaagtatgactaccttatgaccttgcatggagttgtgaatgaaagcactgtttgcctcatgagttatgaaagaagacagattctccacctgatcaccatgatggctttgaaagtacttggagaactaaatattctacccaatacacaaaaggtaacttgcttttatcagcctgctccgtactttgcagctgaggcaaggtaccctatttatgtaatacctgagccaccccccgttagcttccagccataccacccactgcactttcgtggatcaaatggtatgagttaaaaaatacacatgcaaccatagaaactttgatttaattaaacaccatttaaaagcaagtttccaaatgtaaaattcaagatctgtttttattttgtacagtcaccaattattttcaattacagttgatggaatagtagttaccaactatttttgatcaattaagccatcatagtaaatacaatatctataaaccaaccactttaaatgtttttcaaacgttattgactagctataataactttcaaatgttgtgttccccttgaagtgattttcaaatcttttgactacttgtgactttcaaatttactgtgacaaatatattagagatgcctgcatctttgactataacataaaaggacagattcatgttttaaaattaagatgtacagtgaagtatcaaattttttatattcagtcagttcctttgttacatttagttctttttttctattgaacaataccatcaataaatgttcagtacttaacagaaatgcctaatttcaaaagcaacagattcagaagacattaaaaccctggacttttcaagcatttttttttgacaattaaattgggttggatacaaaaatcctactatagtttaaaggaatactggaaaaaaatggttctggaaagccctggacattagtaatttgtcatctatataataaaacatttagttaatttgtggatttgaataacaataccatacagctgtgcaactactactgagatcagatacagggttttttgcccctcaaaataagttaaaacgaatgaaaatgaccagctctgaatgtgaaagctttctatcatcatctactacaaagagactctaaatggcaaacaggaaaaaaacaggcagaggtttatagccatagcatttaccattttatggcttatttgaaaaacatctttatgttgagaaacattccatttcagtaagttaaaatattttcattgtaactaaatgaagcaggtttttcattttgcctttaccaaagatcattttctaacatgccactcaagtgcctcttcgtgtgaatttttgcgtaacactataatttattcaacaactgtatacctttacagtatatctaaatatatacttactacatcgagtatactgctagaaaaatctaccagtgggattaaaaatgtattttcttcccataatgaaaataattcatgaccaatattacctgaagtgtcagaagaggagctgtcttaaattaatatggatcaggccattggaaaacttcagtatttccacttggttatgattttttgtgagtttccatttcagtttttattgaccatcacgttttctatcacaacatgacctgacagttgtatcccgataatttgccagttatagactgtgcttatcttcactgtattacaatattggacagaagtacaccaaatacggcattttcaaataaccaatatttctgagatgttttataccacagcacaagtggccatcagtatatttttaaagaattatatatcacagaaccctgaggctttaaaacactatagacttaccactttcttgacaaagaatttgtaattacaataaaatatttagaaatg

SEQ ID NO: 1415 - DNA, 4276 bp, Homo sapiens
acgcgcgttcagacccctggcctcgggaagtccgccggctgcggggttgggggccaaccgttctgtgggcggagtcctctcgcaacatccgccaggtagcttctcagttgctgcccctagctctaggagctcctgagtgcacacgccgtacccgtcccttgtcgggaatcctgtcgcaggtttttaagcaacagtcctcaggagggccaagggagtctgacggtgatgtcttcccccaggctcattcccctgtggaaagatttaaaactcctcctaaatgacaccataaataaaagcaagcaaccttcggaagacccaaagaactgcctgattgtgctgagtgaccggtcccaggctgtagcatggatgaagagcaaaactgaggacatggttgagaaaagaacattctccatgactgaacgattgccacccatccagtccatggtccatgcaggctcctttcatatcctcgtggtctactgtggtgacctgatcctgcgactctttggggaccactttcgggcattcaaacccctgggtaaagtgccctgccgcttcaacatcagctgcctctgctatgacccggaaatgaagatgcttctgtctggcatcctgggggcagtggtgacctgggtcattgagctaggtggcacgggcctccaaatagcccacatggtctccatgccaggtgatgagcttgtccaggacatcgtgctgaatggtcccagtggctccctcctggccctgtgtgaggcggtggtgagggtccttatgcaccagggcaagggccagctgggagaggtaaagaggttcacgtccaccagcagcggctcctccatcacctgctgcttcacctgttttgatcagggctttctctatgctggaaaccaagctggggaaatccaagtttggagcctccagcagggccatccactccacagtttccaggcccatcaatcaggagtgatctgtatccgcagccgaccagaggcccacaccctgctaacagctggtagtgacagcctaatcaaggagtggaacctgacttcagggagcctgcttcggcggctagagcttggtgaggagttataccggctccagtttattgacagcattactttcttctgccaaactgcccatagtttttccttgcaccgcctgccctgcttctacagcctcttcaatgtctgtggctctgctccccagcagttgcgtcgggtctgctgtggaaataactggttccggatcctgtgtaccactgaggatggcttgttgcgctttgtgtccccagtaacaggggaccttctggttatcacctggcccttctcaatcctggaccaggctgtggattgggcctacgacccaggtaaagaggagctctttgtagcaacaggcagctcagaggttctggtatttgacacaacccgctgcccttgcccagccaagtatctcttaggcacctcaccaaattctcaggactttgtacaatgcctggcttatgggcatttcaacttggggcggggtctagagggactgatattctctgggcaccagagtggtgtgataagagtgctctcccagcacagctgtgctcgattagaaaaattcatgcactttggcgctgtactggcactctccacgctgtctggagggatttttggtggccaaggaaactctctgctctgttcctatggaatggatgactatgtgcacctgtcagaagctgtgcttgatggggtcaaagtacaactgcggcctctcgccagcattctcagcagctgtcacctaacacatctgatactcttgcccaagtctgtgggtgccatcacagagacaaactgcctgcgtctctggaagttccatgattttctgtcctctgggtcacagaatggcttgaaattcatagaaacactgcctctgcacctgtgtgccatcacatcctttgatgtctgcctctccttgagtctttttgtcacaggttctgccgatggctctgttcggatctgggacttccatggcagactcatagccattctggactcatcactgcactttggcccagtctgttttgcaaatgaccggggtgacctgcttgtgacttttaaccagagtctttacctagtgtcctgtttaaaattgcttcccccagccctgctgactcgcctttcctttatgagcatatcagatgaagtactggaagtccctaagcctttcataccaagcttcttcttctcctttgagaccatgtttgtgcccaagtacatctaccctggacaagcgcaacagaaattagtgggtctggagaaacttgtcaacaaccgggccattgcctttgaccattctgtgccacatgtgatagaagaagatgaggaagggagcccagtgttactgcgttcctccatgcattattctttgcaggacatggaagattggatgcaggtgagcaaacgttaccaatgccattatgtgcttcctccccagctacaactgactagctgggatggactcaacccctatcagatattgcgatactactttggtcatgggcgggaatggctttttgcccctgactgctatatccccaattcagtgattcgtgcccgtctttggccagagggcaccccaatatacctacagtgcaacctgcatgcaccccagcgggagctggaatgggacaggtctcaagaattctttttctggcacagcagggtaagagctataagtaatacagaatatccaaagaataaggaggaggatgaacacttcctagaaatgagactttccaaggatgtaacctacagtgtccttacagatggagcaaaccgaagttggctgggaagaaagatgagtgaaataaccattaatagcatgattgagacaatgctcaatattatggtccatgcttccttgctgaagtaccagtgctgtgttggtgcactagggcaaatctttgcctcttaccaggtgtccccagccctacgctctgagacagcccgtcggctactgaatgatacaaccaattccaacccgctgatccgagaactagcttgggaagggctgaagcgtctaggaatgattactcatctttttgccatgcctctggctcaaggattaatggacaaggatgaaagagtgaggatcaagaccctaagcctcatggctgagattggaatccactctaggacctcactcttacagctgacccaaaaacaagagacttttcgggagatgcagcagcagatgatcggggaggaacccctggaccatctactggggatgcgggccacagatctccaaatcctttccactcaagtggagcagagattgaatgaaaacctgaccctgtcacatagagatgaaaagccagctttttctttagatgtctcaatgccttctgaacttaaatcctccctgaaacctcctacagtttctgaagaatctgaagtggccatcaagcccagcaaaggccaaagacgaggccaagcaggggtcaaaaagcatagccaaaaatggttgcggggtctcaagaagacgaaagagagagactctaaacagatgagcacagagccaggcctcttagaggatgaaagtgggactgaggccgcaccaattgagatggaggaagcatccgtctattcccaatggtcttcaagcaccagtgtaataaagctctcaaaagatgttgattctcaagagaaagatatctcgaaggatcacattgcattgaccctgaagaggctgcagaaaatacgtgacaaaagagacaagaaagcaacagctcagaaactcaaaaagaagcacaaaaagaagggaaaagaagccaaagttataaatgaggaaactacacctcctgtaatggaacagccagttactaaaaaggttaaaatccaagggcggggagcctctggaatatctggccgcaggtcaaccgctggagatggctcatcatggagggacgatctatgtcgtcttatggccctgaggatatctggttcccaaacaaaaatgtcagaaaacctaaacgctgagctagtgacatttgctcaggagatgctggtagataggcaccccagctgggaactctttcaggagatctgccccctattgaagaaagaaagtaaggttctgcttgaggaccttgattgggatgtagtcccgccagagaagaaaccaatttttatccaggaaggagcaattagagaggacatgatacaaggtgtgacccaagaggtgatcagacacaaggaagtgatgccaagggaagaagaacaagcac

SEQ ID NO: 1416 - DNA, 3676 bp, Homo sapiens
gtaagttgaagcgggtcagcggcacggaagggttgctccaggtgggataggaaattaaaaagcgtcagatctggaaggggccttatatgctattggcccctttcgctttacggatcggtaaattgaggcctggagcgggaaaaagaatggaagaccctgtcgtcctcgtgccttcccaaggcttccgaagcgcgcacacacgcacacacctcgatttcggggctgcctctatagcctcagtccgtaaaatcgtatcgctaggtaggagtggtgctctaactgtccagtcccctcgctcacttcctcttctatccgtgccgctttcagccgttctttgccaagttccctccgaagtcctctgagctcctgcattgtagcgggaagcggcattgagcatcatggataccgacttatatgatgagtttgggaattatattggaccagagcttgattctgatgaagatgatgatgaattgggtagagagaccaaagatcttgatgagatggatgatgatgacgacgacgatgacgtaggagatcatgacgatgaccaccctgggatggaggtggtgctgcatgaggacaagaagtactacccaacagccgaggaggtgtatggtcctgaggtggagaccatagttcaagaggaagacactcagcctctcacagaacccattattaagccagtgaaaaccaagaaattcactctgatggagcagacattacctgttacggtgtatgagatggatttcttggcggatctgatggataactcagagctcatcagaaatgtgaccctttgtggacatctccaccatggcaagacatgttttgtggattgtttaattgaacagactcacccggaaatcagaaagcgctatgaccaagatctgtgctatactgacatcctcttcacagagcaagagagaggtgtaggcatcaaaagcactcctgtgacagtggtcttgccagacaccaaaggaaaatcttatctcttcaatatcatggacactccaggacatgtgaatttctctgatgaggtcacagctggcttgcgcatctcagatggagtggtccttttcattgatgctgctgagggggtgatgctgaacacagagcggctgatcaagcatgcggtgcaggagaggctggcagtcactgtgtgcatcaacaagattgaccggctgatcctggagctgaagctgcctccaactgatgcttattacaagctgcgccacattgtggatgaggtcaatggattaataagcatgtattccactgatgagaacctgatcctttccccactcctgggtaacgtctgcttctccagctcccagtacagcatctgcttcacgctgggctcctttgccaagatctatgccgacacctttggtgacattaattaccaagaatttgctaaaagactctggggtgacatctacttcaaccctaagacgcgaaagttcaccaaaaaggccccaactagcagctcccagagaagtttcgtggagtttatcttggagcctctttataagatcctcgcccaggttgtaggtgacgtggacaccagcctcccacggaccctagacgagcttggcatccacctgacgaaggaggagctgaagctgaacatccgccccttgctcaggctggtctgcaaaaagttctttggcgagttcacaggctttgtggacatgtgtgtgcagcatatcccttctccaaaggtgggcgccaagcccaagattgagcacacctacaccggtggtgtggactccgacctcggcgaggctatgagtgactgtgaccctgatggccccctgatgtgccacactactaagatgtacagcacagatgatggagtccagtttcacgcctttggccgggtgctgagtggcaccattcatgctgggcagcctgtgaaggtactgggggagaactacaccctggaggatgaggaagactcccagatatgcaccgtgggccgcctttggatctctgtggccaggtaccacatcgaggtgaaccgtgttcctgctggcaactgggttctgattgaaggtgttgatcaaccaattgtgaagacagcaaccataaccgaaccccgaggcaatgaggaggctcagattttccgacccttgaagttcaataccacatctgttatcaagattgctgtggagccagtcaacccctcagagctgcccaagatgcttgatggcctgcgcaaggtcaacaagagctatccatccctcaccaccaaggtggaggagtctggcgagcatgtgatcctgggcactggggagctctacctggactgtgtgatgcatgatttgcggaagatgtactcagagatagacatcaaggtggctgacccagttgtcacgttttgtgagacggtggtggaaacatcctccctcaaagtgctttgctgaaacgcctaataagaaggacaagatcaccatgattgctgagcctcttgagaagggcctggcagaggacatagagaatgaggtggtccagattacgtggaacaggaagaagctgggagagttcttccagaccaagtacgattgggatctgctggctgcccgttccatctgggcttttggccctgatgcgactggccccaacattctggtggatgatactctgccctctgaggtggacaaggctcttcttggttcagtgaaggacagcatcgttcaaggtttccagtggggaaccagggagggccccctctgtgatgaattgattcggaatgtcaagtttaagatcctggatgcggtggttgcccaggagcccctgcaccggggcgggggccagatcatccccacagccaggagagtcgtctactctgccttcctcatggctactcctcgtctgatggagccttactactttgtagaggtccaggcccctgcagattgcgtctctgcagtttataccgtcctggccaggcgcagggggcacgtgactcaggatgcacccatcccaggctcccctctgtacaccatcaaagcttttatcccggccatcgactcttttggctttgagactgatctccggactcacacccagggacaagccttttctctgtctgtcttccaccactggcagattgtgcctggtgatcccctggacaagagcattgtcatccgccccttggagccacagccagctcctcacctggcccgggaattcatgatcaaaacccgccgtaggaagggcctcagtgaagatgtgagcatcagcaaattcttcgatgatcctatgttgctggaacttgccaaacaggatgttgtgctcaattaccccatgtgagtgcgtggactcctgggagctcctgctccctacagtgggctgcaactcctgtacttgaagctgagacctcatatgacgtggccttcgtgttgtcagagagtgtctggaagctgctgttgccatcttgaacaactcaccaacctccaacccagagccccagtgagagaggagcatttggcctcctgcttccttctgtggcctctgccgggctccattcccaaggaaaagagaggagcttgggctcacagaaagagaaggggatgaaaccccaaggggccctatctttgggatttacatggaattttattttctacaagtttgaccttagccatggtttgcaagtgaacagaacattctg

SEQ ID NO: 1417 - DNA, 2884 bp, Homo sapiens
ttcctgttgcccggcacagtcgccgggaggaggctgtgaaggggtctgggctcctgaggctggcgaggtccactgtggccagggggtccctggaaaaaacctgacggtcatgaggtcggagcccggagctgagtggccagcgtgccatgccctgctgcgcccttggggcacaggccccacctgcccacaccccatccccactccccatgtcaggccaaggctgctgagctgcccttcccgtcccggcagagtgccaggtggcagtcctgctggacctggcacggtcctaccagagcttgaagaggcacatggagagcgtggagcacaggaggtgcctggctgcctggaacgggtgggcagggatgctgaggatggagaggtcagacagacgggcgtgggacccacaagggaggagggacctggggtcgggtttcaagaacggtgagagctgtcagggtgcacatgcgttccagcagttggcgaggtgtggctgtgcatggggaggggggcggctcagccgggcccctggcaccagcccacgggagccgggtccccacagcgcctcacagctgtccctggaggagcccgttgaggcggccatcctgctgagcctggtgggcgtcaagagcatcctggcaaaccagtggccgacgctgctgcaggacaacgcgctgcgggccagcgtcttatgggaaagtgcgtgggcccctggcatcccgggcctgtcccgcaacccttcagcaaggctgccagggtgtccatgccctcctgagatgttctcccctagatctgttggccgttgggaagccaattggagaaacggtgcgtctccttcagaagatgagtggcgacgaggcggtgaaccaaggtaagggaggggcggcctgcaccccgcggccttcagcaccctctgcagccactgcccatggggcacgtgcactgcacagccctgcagggacaggtgtctccgcttctccgtgggggacctgggactccagacgttaactaggagccggaaagagggagggcttgttcttgcctggaagttgcctgcgtctctgtaccaccccagccccccaccgtggcgcgaccctcggcagtgacggcccacagtgccacgtggctccagaacccagagggaaagcatcacggttcctcgttgacagctccagtcacacaatccccacgagcccaggggctgtctgggaaccagtgggaaatccaggtggcagctgtgcctggccccctccccaagcaaggactcctagggggccgacagcttgcaccacagtgcccgacggccccttgatatgaccaggagtcccagcccaggaagaggcctcccggaagaggaatgcatgggttgaggggtgtctcccattggcgtcctggagagcagcctgcctgtcacatggcatccagcgcccgtccctctcttggcctcacaggggaaaagtcgggaaggggcacgggacatggtctgttctcaaacacggacagacggaaccccacccagccgtccttcagagtcagcaaaaccctcctgccacggtgaggcgggaggagccagaaaggagcttcccgggaccccggggaggagccacagaggagcttcccgggaccctgagttgaggcgctcagcggtgcacggagggggtggtctgccctgactaagaaggcttcccccagaggccttcagtatccaccgctcaccaggagcttatcgtgtaaagagcacgtggtccacggtccggggataccggtcccaaggatccctgcttgttgggggagagagggagcgaggggcaggaggaaggcagacggaacccacactcatccctgcaaatgcagagcagggcacagacacggatgccgccgtgatgtggccagtgtggggcccacacgatgccctgctggggaatcggggaagggcagagccaggctggctgtcccgctgctgctgctcagcgatgacctgcaagttctggtccctgcaatggaggcatgagcccagtgactgtcactgttcaaaaggggcagaggctgctgcttcctgcaaggccgcagccacactctagacgggcgcccccccagcagagcagctcgcctggccaaggggtagagggggatggtgggcttcggatcgggggtccagtcctggtgccgtcacccggctgcgcgggcctggacacctcggtgcgggaggggtgcgggtggtgggggcgccctggaggcctggcgaatggcagtgtgttccccagagcgccctcagtcggagcagctgccacttcccgcccctgtgccctggtcctcaccgggctggacgtcctgcggggcctcggggttcatagctcccgcccctttctccacaggcgaggcttctcagaccttgaaggacaagctgctgctgctccaaagctccgagctccttcccaccacgctcaacttggtcctgtatgggctgccgcaccaagccatcgggtagtgcaggcctggacctgcctcccatcagctgctggggccccagcacttgcctctgcccttggctctgcccctctgccaacccatccccacctcccggctcccatccccagctcccagctcgctctccccttcctgggcctctccccagcccttggtgcagcctcagccagggaccctcccccagcgacttcccgcaaggcagccgcctggacctcgagctctgcctgcctgtgtgcgccatggggtctgcgtcggggctggagctgcgtctcttcccggggccaggacaagggcggcctccccttggcggcgctggtgctgagttgcttagaccagaagactattcagaccgtgagcctgtttttgatttgagtgttccactaaacaaacaacaaaagcc

SEQ ID NO: 1418 - DNA, 3842 bp, Homo sapiens
gtgacctctgattttccctttgattctgtaattgaagaagtatcaccagcgtctagtcctgaacctccagtaccagttaaagagacacgaccatatcaggctgtgactccatgcattttaaaacttcatggtacacagtgtgagaagagcaaccaaatctcccaatgtgagtcagaagacttaggcataacagaaaaagaaaatgtttttgttggtcctacccatccagtggggcaagataactttacccaggtacaacaaatgcaggtctctgccgaaatgcctctaatattaactgatcatccaggaagaacaggtagaccaacccttcctggtaaagtaactgaggaaattgtctcaagtgagcatgatgagggtttatctttctcaggaaaggtgcagtgctatggtagggagttaaaccagcctgcctcagctgccaaatgcacaggtgacttcagtccttctcctgaaaaactggtaaaatcaggaaatccattgcagccagttagtatagagaatagaaatttggacttaaaacatcttgtcttggagtccagtgaacctccatttggtcctagaaatgttattgaaaataagtctttgtctgacacattggtttccacaactgcaccaagtggtatagtgaatgtgtcagtaaaacagcagactagccctaaaagcagtcagaaccatctctttcccggtgatttgaaaacagatgaaggcatttatctgcaggtgaagtccttgacagctgcctcggttgatggagcttattctacacagggatgcatgtgctcagtggtccccacgctttgttcttcctcagacaatgctacattaacccattatgtaagaccaataaatgcagagccagcgtttcaagcacaggaaataccagcaggcagaatggccagtttgcttaagaatggtgagcctgaagctgagttacataaagaaaccacaggtccaggcactgctggccctcagtccaacaccacatcttctctaaaaggtgaacgcaaagccatccacacgctgcaagatgtgtcaacatgtgaaacaaaggagctattgaatgtcggggtttcctccctttgtgctggtccctaccaaaatacagcagacaccaaggaaaacctcagtaaagagcctttggcctcctttgtttcagaatcctttgatacttctgtttgtggaatagccacagagcacgtagaaattgagaacagtggggaggggctcagggctgaggctggttctgaaaccctaggcagagatggagaggtcggtgtgaattccgacatgcactatgaactctctggagattctgatctagacctgcttggtgattgtagaaatcccagactggatttggaggattcttatactttaagaggtagttacaccaggaaaaaagatgttcccacagatggctatgagtcgtcgttgaacttccacaacaacaaccaagaggactggggctgctctagctgggttccaggcatggagacgagcctccctcccgggcactggactgctgcggtaaagaaagaagagaagtgtgtgccgccttacgtccaaatccgagatctccacgggatcctcaggacttacgccaacttctctataacaaaagaactcaaagataccatgagaacttcacacggcctgaggaggcacccgagtttcagtgcaaactgtggcctgcccagctcctggacaagcacttggcaggtggcagacgacctcacccagaacactttagacctggagtatctgcgttttgcacataaactaaaacagaccataaagaatggggattctcagcattctgcctcctctgccaatgtctttccaaaggagtcaccaacccagatctccattggtgctttcccttcgacaaaaatctctgaggccccatttctgcatcctgcacctaggagcagaagcccccttctggtaacagttgtggagtcagatcccagaccacaggggcagcccaggagaggctacacagccagcagtctggacagctcttcctcttggagagagagatgtagtcataatagagatcttagaaattctcaaagaaatcacactgtttcattccacctcaacaaactgaaatacaacagtactgtgaaggaatctcggaatgatatttcacttattctcaatgagtatgctgaattcaacaaggtgatgaagaatagcaaccaattcattttccaagacaaagagctaaatgatgtttctggagaagccactgctcaagagatgtatctgcctttcccaggacggtcagcctcctatgaagacataatcatagacgtgtgcaccaatttgcacgtcaaactaagaagtgttgtgaaagaggcttgtaaaagtaccttcctgttctaccttgtcgaaacagaagacaaatcattctttgtaagaacaaagaaccttctgaggaaaggaggccatacagaaattgaacctcagcacttctgtcaagctttccacagagagaatgatacactaatcatcatcatcagaaatgaagatatatcatcacatttgcatcagattccttctttgctgaagctgaagcatttccccagtgtcatctttgctggagtagacagccctggagatgttcttgatcacacctaccaagaactgtttcgtgcaggaggctttgtgatatcagatgacaagatactagaagctgtaacattagttcaactgaaggaaattatcaaaatcctggaaaaactaaatggaaatggaagatggaagtggttgcttcactacagggaaaataaaaagctaaaagaagatgaaagagtggattcaactgcacataagaagaacataatgttgaagtcatttcagagtgcaaatatcattgaattgcttcattatcaccagtgtgactctcgatcatcaacaaaagcagaaattctgaaatgtttgctaaacctgcaaattcagcatattgatgccaggtttgctgtcctcctaacagacaagcctactatccccagagaagtctttgaaaatagtggaatccttgttacagatgtaaataactttatagaaaacatagaaaaaatagcagctccatttaggagtagctattggtgactcaactacagcctgcctggatatggatgatgccaataaaaaattagtattttccctttggaaaacttgtgaacatgtgaatacacatgtgaagtcttacatttgaaaaaccaatgttctacaacttggaaagttttcattttttatattttgctgaaatatgtcacagtggcattgcagttgtctgttagctttgggttgcagtgctagatattgttttaaattattttcattttaaacaagatgccttctaagctattgagcttattaaaaataattttacatgtttacttagttggagcaaaaataagtctattttaacaaatagctttgtttttgcatgctaatgtcagaaaggcatacgatgcacattatgctctgttttaaaggttttaccacccttgtaaaaactataatcttaaatggttttatttgctgttacacaaacaacactacataaaacattttttcctaaatggtacaaatttataaactatcatttttcacttacggtatttgtaaatactacactacaaaaatcagctttctgagaaagaaataatcatttatttatgatattgaaaatttctacagtaaacactcaaaaccaagcaaaaaacatttgtaagatacacggtatctatttggagcaacggtttttgtaactaatgtgtttcattttttaaataaagacaactaaaaat

SEQ ID NO: 1419 - DNA, 5666 bp, Homo sapiens
gtatatgaatctttgaacccagactttggacaactaaactctatctctgtttttccttacttcacagacataactaaaatgtcctttgaggagctttgctacaagaacccaaagatggccatacagaagatcagtgatgactacaaaatatactgtgagaaagcacctaaaatagattttaaaatggaaattatcaaggaaacaaagacagtttcacgctcaaataggaaaatgtccttgctcaaaagaactcttgtaaggaagccatcaatgagacccagaaacttgacagaagtcctcttaaatacacagcacttggagttcttcagggagttcctcaaggaacggaaggctaaaatcccattgcaatttctcacagctgtacagaagatcagtatagagaccaatgaaaagatttgcaagtctctcatagaaaatgtaatcaagactttcttccaaggccaactctctcctgaagaaatgctgcagtgtgatgcccctattatcaaagaaatcgcttccatgcgtcatgtcaccacaagcacactgttaacgctccagggacatgttatgaaatctatagaagaaaagtggtttaaagattatcaagacctgttcccacctcaccatcaggaggtggaagtgcaaagtgaagtacaaatttcgtctaggaagccctcaaagatagtgtcaacttacctacaggaatcccagaagaaaggctggatgagaatgatcagctttatcaggagtttttgcaagtaccgcagatttatgttgaatcctagtaagcgccaggaatttgaagactatcttcaccaggaaatgcaaaatagcaaggaaaatttcaccacagcacacaacacatcgggacgttcagctccaccctccacaaatgtccggagtgcagaccaagagaatggagaaataacccttgtaaagcgtcgtatatttggccacaggattatcactgtcaactttgcgatcaatgatctatatttcttttctgaaatggagaaatttaatgatctggtcagttcagcccacatgctgcaggtcaaccgggcatataatgagaatgatgtgatcctaatgcggtccaaaatgaacattatccaaaaactcttcctgaattctgacatccctccaaagctgagggtgaatgtccctgagttccagaaggatgccatccttgctgccatcacagagggctacctagatcggagcgtcttccatggggctatcatgtctgtcttccccgttgttatgtacttctggaaaaggtaactgtttctccttattcagtgactgttaggtcaggaaaacacacttagtttggagagagttttctgccttcctctagcactctgtttcgtagtttccagtttctagggggaactaagatggtgttttcaaaatcctattcacctcactccatccctcacacagaacaccaaacactgaatccacagatggaaggcagagtaagactgagagccaaacgcctggtttcccacccctcctctttctatgcttgcttggagcaagaatgtgaggttttcttaggcctgggtttctcacaagaaggtaagagtgaaccacagccccttggggagaaattctgtcaagactaacacaactgcttgtgcttaagaagctacatgaagaaagtaagccagaagtgttttgctctgttatgcccaaatccccagaattaccactgagggagcacagttgctagatactccaattatcaagaggagctagacattgaaatgtgtatttcatctctcccaaggttaaagtggcaaatatggcaactaacaaaactaaaacatggtgaagaaactgtgaaggccaaaaaccaaaaatgaaacaagcaaaatatatgtagatattttgtggccaaatgcaatctgtggcccacttgtttctaacctgtcctgtggagatttggcctgagccttcccagctggttatttattcctgtggtctgccagagttccagctcatatcttccacatggtgaatggcagtgccttgggtggtagtgaccagaggacacctggctgaaatgttcccagacaaagctaatcaggacacttagattatcatgtgacttggactcttagaagttcccatcttccaccaaaaaaaaaagttactttattaaaatagaagtgtgaaattgcttaccaatctctcacctttattttaaaatccttgagataataaactatttaatacagaaccaagagaagtacaaaaatctaagttcaagacaagcaatttaaccttttgaacatcaaatgttgtctagaacttaactctagttctcctagcaaggactaagtagatattcacccagagacttttggagggattgggaacctctgggaaatatatgcttctcttgaatgagccagtgtttagctgtctcccatgtgcttagaaaaatgagacatgctttagggattctttggattcctgttcctcctgcagtttctttacttactttcctacatacttacaaagaaatttatgttatgcaaactgtgtttacatatattatcttaaacgaacctctccacaaccctacacagtgggtggggaggagtattattatccctgttttacagatgaggagactgaggttcagagtggttgagggacttgcctagaatcacttggtaagtggtaaaaccagcattagaaaccaggtctcttggtctctcatcaccataaataatgcatgtgcggcatactgggaggtccactggggaaggagacccagttcagcaagtgaaatgggaaaagcctattgagatagaacagactgtccctcaaggagaggggaggagggcagcaggcaaaaccaccagatccaaagtgccatagaaaataaattcagtcttagccaagattgacctccaagggatccaatccaaggactggttgaaggtagggataacaaggggcttggggccaggaaggaagagatgatggggaatattgcacaggcttctagagaacataaaggtcataaagagtacataaatctgagttcacaagagaaaccaggtctattccagggaagggcccgctgggaatagagtgaggtggtcaaggctgtcagtaagtggcagggtggaaactaggattaggacctgagcaaaagcccttcggacactctggccataccaggtggggttagatagggatgtcagagtctgatgctggggtgcaccccaggggttaacctcaccccaggcctcaggatagcaggccctttacaggctccattcactgatggttccagaaagaagccccaacaaactgcccatgccaggcccgcgctggagccaggtctggacaaagaggaggcctcagaacaaaggccactggcaggtagaaccccaaggccaggatgctttcctcttctctgttggacacccacattctctgaggactggcccggccctgtttcccctgtgctcggtgctccagccccctccactgggggttccctcctatgaccagaagccattcttcccacaggttttgtttctggaaggcaacccgctcttacttacagtatagggggaagaagttcaaggacagaaaaagccctcctaaatctacggacaagtatcctttctcgagtggaggagacaatgccatcttaaggttcaccttgctcagaggtattgagtggttgcagcctcaacgggaagcaataagttcagttcaaaattcttcatcaagcaaacttactcagccaagactcgtggtatctgccatgcagctgcatcccgtccaggggtaggcatgagctggaaatcctcttcttcagtccagagctgctatgtccaagcatgcaataggagatggtataaactttccagagactagcctcataccctgcctctccttggcatgcagaacctagaaactgagcttgctgcctctggtgggaagttaaagaggtgtttctctgtgggggtcctttctcacctccaactaggacaggcacttttaagaagttggagtctctgacccacttttcagtagaacaatactgctgtggaagtgtcccagatgatctttgatttttatttttcatttttatagatttaaggagtacaagtgcagttttgttacatggatatattgggaggtagtgaagtctagggttttagtgtagtcatgatccaaatagtatacattgtgcccattaggtaatttctcacccttacccacctcccactctcgcactcttccaagtctccagtgtctattatttcgcggtcaatgtccaggtgtacatattatttagctctcacgtgtaactgagaacatgcaatacttgactttccatttctgagttatttcacttaagataatggtctccggttccatccatgttgctgcaaaagacatgattttatctttttatgactgtttagtattacattgtgtatatgtatcctacattctctttattcagatgatcttttattgccagcttcctaaatattccaggctgctcagggcagggtgcataaggtgggaaagaaagaagatctgttcttctgcttggcaggatattggcaataagaacagaagggacttgagtctgttaaaatctgcttcagcctaactcacttctgcacaagcttccaagtgaaactgatgctaagttagggctctgggagaatccccaggggtcatgaaaaccatagctgaggagtgccaaagagttatttgaaggccaaggtggtagacagcagcctctgaatgacaggcttggtgtccttgccagccaagtcacttctcaggcctgtttccagacttgtccttccaacagggacttgaagctgcccaggaattatttgcccgtcccagtgcccagaagacaaaccagatactttgaagctctttacactggaaaagcaatgcatggcttcagagtttataaggccttggggaagaaggtgagactaagaatgtgagaagccctattctgaagcctgaaggtttcagttttggctattgccattcctaaaggaaatgacagtgacaaaccaacagagaatgcaacctcaattactgcatcataattgtgataactggctgttttctctcccttcagacaaaaattatcctacatcaaaaaagagaagtaatcaagcgagacccccagcagagataaatcatctcttagaggcctcctaacactgacagaaacttttctggtcaaaaatgaaaggtcctggtaccatcttccccaaaaacgatcaagaagggcaatgggttgacagcccagatatggcaggaccagactgcaatgggaatctcatacagcccattcagactaaagggtgatggaaagaagcagaggaaagcagaaacagcaagagtgactgagacctgctgtcatctatatagaagcctttctgatacatgtcagagagtgacatgaagtctcccctctttatacacacgtatgaaaatacatctatccctcattttgagagcctccaactgatccaagtgtcatccggaggaggaggtggcccgtatgtgcaggacctcagggtgccagccctcacccatacacctccagggctgcaggtcattagccagaataaaggatgtccacattc

SEQ ID NO: 1420 - DNA, 2907 bp, Homo sapiens
ctcctggctcagagccttctgcagactttgccactgtgcttgtctgtggatctgtgtggcttctcagcctcaccttgatgccggctggacggcagagggctgcaccagtccacatggactccaggtggcgcaccagctccgtgtctggggatccccgctcccagctcgggaccccagacagtgccagacgcctccttggtgggcagctcctggctgctctgcccgtctgcagcctccaggccaccctgggaggcccaggttccgggaggtatgatcagtgtgtccacaccagactgcaggcagagcagagttgagggaccaagaagggttgggacaggtgggcaggaccccagaaccactcacagccccgctgggtggaagcaaatggcccctcctcacccctgcccaccttcttggcagtctgcccccaggactggtcagacaagttctcgtggctggcctgggtgtggtcaccctctggtgggggccagcaacggggcaaggcggggagcctggcacgctaagtcctggcacagggtcagggcagtgacccatctgtcccacgcctggagacctctgcatgccacgcgcctgccctgccctgctgtggagctggtcaccatgcgtcagggaagggctggcatggcgtgaggacccgtctgtcctgcgtggccagctcggctgccacctcctcgccttgtctctgccctgcccggaacaccagggcgccccaagctggcctcaatgctcactccctgcctggcatcctggcttacagtggtgaggcagtacctgcgcagagcagcctagcgcctggtgctcagccccagagaggcccccaccctgctcagcagaccaggagacggcccagcacccacggccccagcctcctcctgcctcatcctcaaggcctggtccaggccacctcctcccggaagcccaggccccgaggcaggacaggaggtgtgcaggaattagatatttcctgggaaactagaaaaacatcccagctgaggttgggaggtgaatcaccagtgggcagggcgtggtcctggctgtctgggctctcctgtcccaaccttccactccctgaaacctgcagcacctgctgcacccaccaccctcttgtcgacacgctccttctcttggaggcctttcctggggtccccccagttccatgcgctgtatcctcctgctgtccgacccatggactgaccccagctcacagtctcagtctcggccccagggagcgcaggtcagctcaaatccagacctggctcagctagggctgtggacacgctgcaagccctcgtgcagtctctgggcagacccgggacttgcaggccaggggaaagtgtggacgtcatgaggcagtggcatccctgtccttgcagtgtccacagtgactgtgtgtgtgtgttctcgggtccacataaaggggcagatgccctgtgtccagctacaaccccctcccaaaggagcctgcagcaaagaagaattgctgggaggaagatcaccctgctttattgcctgggccttaaggtaatcaggggtgtccctctccagccaggacctgggattccgtttcaggagctcgggctgaacggccaccttcctggtgggtctgagccccagtgcctggtgtgaaggggcagacgcccatgacaacagccaccccgcatgtcccggcatgtcccggcactgtgtgagccacatttgctgaagtctgggtcctggccctggcagggtgggctgggctaggagatgacacagcagcagcagctgtggcagcggcagaagggggggcagtggcagcagtggcagcaggggcagcagcagcagtggtgggcgatgtcatccccgcgccccacgggcggagggccagcgtaggtcagtccggcctggcgctgactgctgctgtaggggttgccaggctgctgccaggcctgctggttctggatgggggcagccccctggttacccttggcgcccttgggccctgggacctcggtcggctgcaagaggtgggttggctctggggcacagggccccactggcaggggctgcatctccgaggatgaggaacaggtggaagccacctctaactgctgccccaggtcaggccgcaggtgagcccgggggatgctgatgtgggcatatgggttcttgacgaccatctcttgggggtccatggtccagcctgcaggggtgggcagagaagacagacatgaactcagtggagtgggatggctgcccacgagcctgcggcccaggaaagcccccaccaggagcagcgtgcctcgtccaagctcagcatccccaaggcatcagtgccggggtgccatcacctccaaatgtgtgtgcaaggctagtgtcatgggcgtgagccaagtgtgagcaagcagcaagggccggtgtctcccagctgccacccctgccagggatcctccccctcccctggtggcattggtcctgggatggagctgggaatggggtcggggaggctgagagatgggagagaagggggctgaccctgcagtgcccctgagttcagggcagtcccggcggccaagggcttacctgtggtggcaacacggcagtctgtcctctcggtcttctgagctctaggtcccagtgcctgagttgagcgactggcagccgccttttccctccttgggaggggcggggccatggggcggggctcagagatggggttcccaagatcccaagaggccccagcaactggagcacgacagctggcccagccctcgtcctcaggctcatctcaaactcctggactgaagtgatccgcctgcctccacctcccaaagtgctggattccaggcgtgagccagcgtgcccagtggcttttctgcttttttcactgataaaaaatgtttgatttgc

SEQ ID NO: 1421 - DNA, 3403 bp, Homo sapiens
gcctactggttttcactgcaaaaaaaaaaaactagtgggttactagtgggaggcaaagatgagtttgagctgccacgtggtgacagctgacacttggactgctgtgcagtaacagccgtggagttgctgggcatctgctgctctctagggcctgggagggtggtgctgggctgacaggacacagagcccacagggccggcgcacagaagctctacctgccaccgcaccctcttcctggtttggggtgaggctgatggcagcgttcatgcccctctgctcaggcgacgtggatgtgattggtgtgggggcagatgcctggctgtgtgagggccccgggcgtgcctctcccctctggttctcccttccccttggaatccttgggtgggcgggaggctccatccatcagctcccccagtccccagcacgccccacaacagagcacagtcatgggagctcaggaggagtggttggcaccagcaggcccagctgcgatggtgcggtgtgaggcaggcctggggcctctcaggtggctccgaagggagggtccggcctccgccctcagtgattacttagatcctgctccctcaaagtgaactagaggccagtcactggatgaagaaacagggtcagaaggtgacacaggcgggcccattcattcgcacctgtcagcagaagcgtactccatgggcaaaaacacagacatcgacccagccaggagggtccccttccaccacggatgacatcgtgaaggttgaagtctgggatgtagtagacaaaggggttttgtttgttgtcccagtccgtgactccaagactgggacccccagagttcccaggatggtctggagcctttatcctcaggaaaatgcaaaaagcgaggcgacggcttaaagatggagaacgacccccaggaggcggagtctgaaatggccctggatgctgagttcctggacgtgtacaagaactgcaacggggtggtcatgatgttcgacattaccaagcagtggaccttcaattacattctccgggagcttccaaaagtgcccacccacgtgccagtgtgcgtgctggggaactaccgggacatgggcgagcaccgagtcatcctgccggacgacgtgcgtgacttcatcgacaacctggacagacctccaggttcctcctacttccgctatgctgagtcttccatgaagaacagcttcggcctaaagtaccttcataagttcttcaatatcccatttttgcagcttcagagggagacgctgttgcggcagctggagacgaaccagctggacatggacgccacgctggaggagctgtcggtgcagcaggagacggaggaccagaactacggcatcttcctggagatgatggaggctcgcagccgtggccatgcgtccccactggcggccaacgggcagagcccatccccgggctcccagtcaccagtggtgcctgcaggcgctgtgtccacggggagctccagccccggcacaccccagcccgccccacagctgcccctcaatgctgccccaccatcctctgtgccccctgtaccaccctcagaggccctgcccccacctgcgtgcccctcagcccccgccccacggcgcagcatcatctctaggctgtttgggacgtcacctgccaccgaggcagcccctccacctccagagccagtcccggccgcacagggtccagcaacggtccagagtgtggaggactttgttcctgacgaccgcctggaccgcagcttcctggaagacacaacccccgccagggacgagaagaaggtgggggccaaggctgcccagcaggacagtgacagtgatggggaggccctgggcggcaacccgatggtggcagggttccaggacgatgtggacctcgaagaccagccacgtgggagtcccccgctgcctgcaggccccgtccccagtcaagacatcactctttcgagtgaggaggaagcagaagtggcagctcccacaaaaagccctgccccagctccccagcagtgctcagagccagagaccaagtggtcctccataccagcttcgaagccacggagggggacagctcccacgaggaccgcagcacccccctggccaggcggtgtctctgttcgcacaggtccggagaagcgcagcagcaccaggccccctgctgagatggagccggggaagggtgagcaggcctcctcgtcggagagtgaccccgagggacccattgctgcacaaatgctgtccttcgtcatggatgaccccgactttgagagcgagggatcagacacacagcgcagggcggatgactttcccgtgcgagatgacccctccgatgtgactgacgaggatgagggccctgccgagccgcccccaccccccaagctccctctccccgccttcagactgaagaatgactcggacctcttcgggctggggctggaggaggccggacccaaggagagcagtgaggaaggtaaggagggcaaaaccccctctaaggagaagaagaagaagaagaaaaaaggcaaagaggaagaagaaaaagctgccaagaagaagagcaaacacaagaagagcaaggacaaggaggagggcaaggaggagcggcgacggcggcagcagcggcccccgcgcagcagggagaggacggctgccgatgagctggaggctttcctggggggcggggccccgggcggccgccaccctgggggtggcgactacgaggagctctaggccggcgtgggcagtggccgccctggggcggggggcgtgcctgtcactgcctggggaggcatttgcctctgtaccatcgcctttgccgctgccccgtggctgccgtgtgcgcttctgagctggaagaggccgggcattggtggtccccaggctgggccctgcaggtgctgggccttcaggcccagtgtgagcctgctctgcaagaagggaggggacagctggcttcagccaggctcggtggacaccctggccctctcggggcagagccgccagtgtttctcagggatgtgactgaggcccaggagggacctgtgagggtctgtttacagaggctgggcaggggccgcttggctgtggggtgtgcgctgccccggcacctgcttgccctccgcgctcatctggggccgcagcatgcctatggttccgcttccggccgggagccctgaacacgggtgtgcagactcaccctaaagggcggcccaggccccacgctagaaggctggcgagaccgaaggcagcatgtgaggcctctcctgggagtgggggttgtgtttcccacagtggcctcagctgcgcccccgctcaggtgagcccgaaggcaggagccgggaggcactcctcccaaacactccactcagaccataaagcactcctgtttcactctg

SEQ ID NO: 1422 - DNA, 3339 bp, Homo sapiens
attgtgcctcggacaacgagtgtacgcagttaccacacagttaccaagcagttacctcagagccgcggcgcagacgtaggcctcaggtctcgggcctcaggtctcgggcctcagagccagaccccgccatctcacgatgtcagagaggacccaggaacaggattttgttattataactgtcgacgacagtgatgataacaatgattgcagtattgagatggtggaagtttctgaaacagcagataattccactaatgacatagcagatgattccacttatgtcacagcagataatcccactgatgacacagccacacaaccaaattttccaggcggcaatgatggccatcaccgtccactccaaatgtcatatgggtctggctctgtcacccaggctggagtgcagtggcatgatcacagctcactgcagcctcaacctcttggactcaagcaattcttccacctcagccttcccagtagctgggatgacaggcgcacaccaccatgcccagtagcccatggtgaccaaatagtttcacagataaaccacccagtacatttaagaagatacagttacaactcagaggaagtggatttgccaaaaagaggaagattctatactccagaggtacagtctagcatatcaccaccagcggaaaggcaggaaacccatgcctgggccagccctgctgtaacatctcttgagtcagcagcatgtcatgaactgcaggaagcagacctcagtgagagtttatcatatcccagaattgtctcctcaagttcattacagcagtatgtcgcacaaggtggctcatttccttgtttcggtatgtcatggaactttatcagtggaggtgctgaaagtaccaatgctgtcatctcatttgccaatgctactacagcagtacctatggcagttctgtcacgaagagaatccagtctggcaaataaccctggtgtggtgaattactctgctctaccagaaaatgaaaatgtgggcccaggtagagccttgtcatctttctgcttccatcccaatttggaaatgccagagagaccagcaaacagcagtaaaaacagcactgagacagcgaattatccaactttaatgggaaattacaatggccaaaatactgcctctttatctgtcttcatccctccctattttgctgagaaaattatacttactgaaatgccaggaacaacagaaaccaacgtggaaaataactctcagacagtgtattacccagctttatcgggaaatacgagtgccccatatccagcctcttcatatcttcccatcacttctaattttgaatctggcccacaaatgagttatgggacaatgagttactcaactgaaatgaaaaataactgtgaccaagatgatgcttcagcatctgcctgcctcactcccgattttgcactgttacctctgaatattttggtaaaagtagacaccaacacggaaaacagcgtcaacacaatgaatcgctcaactttattggacagtgacagtggccaggattcttcctcatcatctgtctgtatccctcccaagtatggctatcttggtgatccaaaaagaaatgtcagagtacttaaaatccatttgctggccgtacaaaatatggccaaacctaagcaagcagcctgctacttggttcgtattttgttctccaaggaaatcctgattagcagctcagtggatatccatttgaaagacagccaatccctcgacccgaacaaaatggctgcattgagagaatatctggcaacaacttttcccacctgtgatttgcatgaacatggaaaagactggcaggactgtatttctggtatcaattctatgatctactgtttatgttctgaaggcaagagtactccaaaaactgttcgcaaaaataaaaaacgtaccaaccgtgttgcatcggcatctgcagatagaaatgaccaaaggggcagagatggtggtgaaggctgttcttggatgtttcagccaatgaataactccaaaatgagagaaaagaggaacttgcagccaaacagtaatgctatccctgaaggaatgcgagaaccttccactgataatccagaggaacctggtgaagcatggagctattttggaagaccatggagaaatatacggatgccatgctcagtactgactttggcaaaaactaagtcttgcgcaagcctgtcggctagataccttattcagaaactcttcacaaaagatgtcctggtccaaagtaacgtctatggcaatctgaagcatggcctgtgtgcccttgaccccaataagattagtgctctccgagagttcctccaagaaaactacccaatttgtgatctctcggaaaatggaagagactggaagtcgtgtgtgacctccatcaacagcggtatccgtagccttagacatgacgtcagaagggctgaagccaggtctcagtcgcttccagcagtgacccctccagagctggagcaggagtcaaagccaggagatcccgacgccactgacccaagcacctgaacggcagctgccaaacttttttttttttttaactgttaagactattttgtaagtttctcaagttctaattccaaaatcagcctgctgtactggcagagtagtttgcattgacacctgtagtaatcgccaaacctctttttctgctcataaaggaggtagaatcacattaggaagatacgtaatgtttcatctgtggatttgatgacaacctctgattgagggaatggtagtaaactcctcatgggcttgtgacccatggctttgacttagataattgacattaatatactttgtttttttgataaggtagagaaagaaattcaatagaaagtaaggagccactcagtcaaataatataattcgtataaaacttgacaagtctttttatttttgtgacttgtgagatagtttaagatatttttatgtgaccaatttgtagaatgaatacatattttcaaagttatcttttcaaaattcaacttttagagtattttagcaaaatatatgtatagtttataatatagaagtatagctttataaagatattaaggatttattttttaaaataattctctgaatagtttgctgtagtagttgccttcagcttaataaaaccatagtacttctacatacatctttataagttaggctatgcctacaaaggtcttaaaaagtagataatttaccgggtgtagtggctcacacctgtaatcccagcactttgggaggccgagacgggtggatcacctgaggtcaggggttcgagaccagcctggccaacatgacgaaaccccatctctact

SEQ ID NO: 1423 - DNA, 2890 bp, Homo sapiens
gcgaagaccagtagagccccccgctcggccgccagctccgcgacgaagcccgagttgttggcgaaggcccacacgtcgccctcgttcccagtgtagaagaagatgggcccctcgccccggacccagaacctgtctgtggggagggcggatgaggcgagggtgccggggggcggcgggacggcgggggcggccgggccggggccggggtctcacccgacaccaggaagcgctgagggaaggtcttgttgccgaagcgctcgaagttgaagtggtccagacgctgctggaagaagcgctcctggaagccggggtccggggccctgcgggctgtggggggacgcgaacctcagaggcggggccgggaccggggaatgggccggggggcgccgccactcaccccccgcctggaggccgcgcagcccgagcgccagcagcaggaccggggcccagggagcggagcccatgtcgccttccgcgggcgcccgtcacgtgggcggggtcacggggccgccagggcgcgctcctccctccaggccccacgtgtttcgggcgcccgcggtccccacggagaccgtcgctgcttcagcgccgcgccggggctgtgccccccaacaccccgcgccccgcggccgctgcccaggggtccttcccgggcacggcgcggggaagcagagggcccccgggccatctccgcggcctcccgccccactggctcgtcctcctaccgcggccccatccggagctgcgctagggcgagtccctgctgcgcccgccaagcctccccagcacttgctcctggcaggtgccccactccaaggcagggccgggagagtgggggccgttctgctgccctaagggcgggagggagagggtcccaaacagagtgctggccccccgaagaaagcaacccagggtttgtccaagcgataacgggctgggcttggcggggcggggcctcgcagcgggcaggagtgtggggtgcccctggagcgtctgggcagggccgggatgtggccgggtagctcccaagagctgggaatcgccacctgcccttccgactggcacccagtgtgcccacacagccctgcagggacaaggggggaccagaggcctctgctgggagctggggcctcctccctggggagcacccagaggatggaagaagtcacctttccccagcgtccagttcagggagtgggtgagggggccgtagtggtgggtgccagactagctacgtggagtcctgctggggatgtacatgggccgctagccaggcccagaacaggtgcaggggcagcaggggctcagctacagagagttaccctgtccttctcccaagactaccctcggccagcatgaccctgccctgcccatcctgtgtggggctgagcggagaagaccggccacttccacagcccctcacgccatggccctcccgtgcctcacacagaggcaccccccatggtgggtgactggtggctggggccctcagcatggtggcagtgaccatcacgtcacactgcaacacgaggtcatccagggccacacaccgtccccaccacggccctcacatctgggccctgtcccatccctacgcagttcctggggctgcctgccggggcccccgcaggacgggggtgaggacaaacagcagacctccttggatgtggaggtaccccacggcgtcccccaccccacacctctgcccctttggctccctcgggtgccttaggtggccagaactccaccagcaaccctcacccaggaccgcagctctggagatgccagctaggccgagagctggccagctccccaagcacaccagagcctggagacgctccaggcttggctgggcccacagaggggccagagcctcagggagggctccaggagcagggtttccaaggaagccactttcccgcttgtccacggcccaggcattgatgccccttctgggcagcagccagggcctcccaagccgggaagggtgggcatggggctacccagcatggctctgccaggggtgagggtggccacagtcccctgcccacatccctgtgcccacagaaacatatgctgtatggaatcaaggtttaaggcatctaggcctgtgctggtaacctgtaaccttagccccatccctgtgcccacagaaacatgtgctgtattgactcaaggtttaggggatttagggctgtgcaggatgtgctttgttaacaatgtgtttgcaggcagtatgcttggtaaaagtcatcgccatcctccattctccattaaccagggacacagtgcactgcggaaagccgcagggacctctgcccaagaaagcctgggtgttgtccaggtttccccccagtgagacggcctgagatatggcctcgtgggaagggaaagacctgatcgtcccccagcccgacacccataaagggtctgtgctgaggaggattagtgaaagagggaggcctctttgcagttgagataagaggaaggcttctgtctccgacatgcccctgggaacggaatgtctccgtgtaaaacccgatcgtacattagttctattctgagacaggagaaaaccgccctgtggctggaggcgagatatgctggcggcaatgctgctctgttactctgctacactgagatgtttgggtggagagaagcatgaatctggcctacgtgcacatccgggcacagcaccttcccttcaagctatttgtgacacagatgcctttgctcacattttcttgctgacctctgctctgctgccgcattcctcatgcaaagatagtgaaaatggtaatgaataaatactgagggaactcagagaccggggccggtgcgggtcctccgtatgctgagcgccgtctcctgggcccactgccttctctat

SEQ ID NO: 1424 - DNA, 3109 bp, Homo sapiens
agcgctctgttctgccctttcactgaaaatagctcttcctgacacaggcttgggtagtgaaagcagcttggtcacatctgtcccatggtgtaactaatctttaggatctgcagagacctgccttcctctgcaattgtaactgtacctccaatcgtgagtttcgtctggcagcttaactgggctaccagcgaggtcctcataatggcttttgctccttgcctcgcggagacccgactctggaatccttagccagtgagatgtggtctcactatgttgtctagactggcctcaaactgctgggctcctgcgatccacctaccttggccttccaaagtgctgggattacaggcgtgagccaccatgcccagccgcttcatctttctttactcatgccttagaggactcggtcaagacaatggtgccctcaggaaggttacgagagagcaagctgtgctgctttgcccatcttgggatgagcatcacccagagagagggaccagaatccctgaggccatcttggttcatctgcaccgtctctcctacacctcttcacccctcccctctccacttcactccaggctgcattggggcggggaggtgatcatccaaggccctggctctccatcgagaccccagccaggtagagcccctattgcctgagcaagcttgcgcaggatggggctggagctgcactatttggatcttcttggagtagaaaattcacaaattccaacctctgctcccaaagcaaacctccccagcccaggtggctgcatccttctcctcccctccccccagttccctgggtcgccaagccggaggctttgaaaaccagcttgtgtttggtttgtgaaagcaccaatgtttgcaatgtttgcccagcagagaaggagcatattttctcccttccaaatgcaaactcaaaagatgctccaccagtttttcttcagactttccacaggaaacataaataagaaagaaaaatgactttaggtgctgagacctgaaatggaatttcaaccctgaaggaactgcctgtaacaagcactctctgtccttcagtgaaggcttcgagagcctaggtgcatgtttctttcctctgagtagccttcacagatgaggcaaggggaggagctgaaccagttcttagacctgactcccagctagatcttcagccccacacaatgaatggccggtgactggcacagcagctgagattccctggctacagtgttcttttttatctttcttgattgtgttagggtagaacaaatgagggtgctgcaacccgagaggcccagccacactgcaagccagcacaatcagagtgtgaagtgtggacacgcccccctggaacacaaggccacagtttgccacctgctctgcccttgtctccatctcggaagaaggacgtccctgatctgtggcctctgtcctcacggatcttataattatcagacaaacacaaccacagagaggctggaaggcagtgcttcagcatcacacatatatgcatcggtgaccagagttctgattaatcttaatgcacagataattggagcatttcttgctcacagcttatagccaccaaatgactgcttccaggttaggagtttgcagaatatgtacacacacggagccctacaaaaggctccagacccaagaaatacagggttgaagtcagtgtggacagttctaatgcagctaatacattctaactgatttgttgtgagctaagggttcagtgtttacacttcaaggtcactgtttctgtctcctgacatctgagaacctttcttcttcttcttttttttttgagacagagtcttgccgtgtcatccaggctggagtgcagtggcatgatctcggctcactgtaacctctgcttcccaggttcaagcgattctcttgcctcagcctcctgagtagctgggattataggcaccccccgccagacctggcaaattttgtatttttagtttcgccgtgttggccaggctggtctcgaactcctggtctcaagtgatccacccaccttagcctcccaaagtgctgggattacaggcgtgagccaccgcgcctcatccaagaacttttcttcttaaggtgttttcctttcccatagcattctatctttggataggcccaacgaggccattgagcatctaccctttttacaaaacatattatcaatcttatagcccatatgtttagtgataagtcaactaaacaaagcaagggaccccactggaaggtgcttgtgggaagtgtacccttccatctaggacttcactttgatgtaccaaattctgagaaagaccccagaagccatttccttcttgctgaggtttatttatcttgtttatctgaagccagggccaataacccaaatggctttcaaatggctacaaaagtttctcagcattcgattaatcagtcccatcacagacaagtcaactaacctgcagacccacgtgctgtactcatagtcgttgctggttctggcaggggtgatctgggaggaggtatttcccggaggtgtttccgaagggagaggcactagctgaagttggctctgagattcgaagcggaggaggaaagggaaggtggagtgctgatgctgacaaggtgaggaagaggaggagtagaggttaccagcgctcagagcatgggttttggaggcacacagatctgtgcccaaagggctatcaatgctcttccacttcattgctgagcaacctgatgtgttcatacgttccctgatgtgtaaaagtggcacaatacttgcgtctaccttataaagtgcctgcaagcactaagacaaaatgtagacagagcttaatgcagtgccggactcagtcaacaaatagcaaatggaagtcgttctcattaaacagcgaaaaggaagtaaggaagacagaggaagacaaaggggagatggggaggggatgccgtgggaggctgtgggtggggtgcagaggctgacactgcagacagcagcccctcacccagctccatctctgggcgcctgggacaacacagctctcggtccagacaggctgctcagatgtttattaagaaaccacccataaaagttattggaaacttt

SEQ ID NO: 1425 - DNA, 6730 bp, Homo sapiens
aagagaggataagttgtgggtgcacatttactaattcattcagaatctgtatctattctttgtccagtgatgagtgaaagaaagtgtcaggcagccccatatttacttttcatagccaccttaagacctcctctgccacggccatggctagaatttcactagcctctggcacaaagcagtggtgcccaggcatatggcagggataatgctctcccagccaaagtagcaatgtcatctcttctattctttcttcttctccctctaagtcactcagccctaaaccaggtgtgttccaatttcctctactatatgtgcctcaaccttctctcagctccagagaagacaggaccaccttccaaagaaggtaagatgctacaatttgaccactcatgtggcctgtgctggtctttagagtctgggtgccttgctgattgactagatagtgagttagtacagccatgagatttctttgcctgaggctgcccagaggaatcggagtgatgcaattataggttgattcctagggatatgaagtaatagaactggaaaatgatggaacccaaggctcctggcaccttagagttgagaaggatcctaatgttcatcaagtccagttccttcttcctgacagtctcctctgcaacatccccataccataggcctcaggagtccagtgttcactatagcattaatagtgtgttctatttcttcattcattcaagtagtgtttcttttttctttttctttttctttttgtttttcttttattttaagacagtctcgctctgttgcccaggctggggtgcggtggcatgatctcggctcactgcaacctctgccttccaggttcaagtgagtctcctgcctcagcctcccaagtagctgggattgcaggctcctgccaccacgcctggctgatttttgcatttttagtagagacgggccttcaccatgttggccatgctggtttcaaactcctgacctcaggtaatctgcctcggcctcccaaagtgctgagattacagatgtgagctaccgtgcccagccaagaggtgtttcttgagcacctgttgtgtgtcagactccattccaggtgctggtgaaagagccagggatacaaagccctgctgtcataaattgaaacaggcaggcaataagcaaatgcatactatgtcagagatccataggcactatgaagaaaataaaactgggcaaaaggatagagagtgttagaaggaggagagagacatgttagatagggtggtcagggaaggcctccatgtggaagtggtatgtgagcagaggtctgagtcaagtaaaggaaagccatgcagaatctaggcaggaggaacagcagctgcagggctgagagctggaagtttttcctcttgttgaacattcattgagcttctgctacctgccaggggaggcctaggtactgctgtggatagagcgattataacagtatgttatttgccctgaggggttcctctatcttagacctgtctcctgatataatagaaaacagtttaataattgtttcatcattcattcaacaaatatacctctgtgggtaagacctagttctggctcttttcccccttattatatttgtgaagattctgtgtcctctcccccactctctacacctgctgctctcttttatctttcccagacatcatgctgagagggagcaaagcccaggtgagcatttttattgcttccaacatagcttggctactggttctctcactatgctggctactcctttctgcaatctccctgttaaggcatgatctggcctgcagagagaatagcatgatttctgccatgtagcctaagactattggcagtcacatcaccatcacctctcatgctcataagtgcctgctccactgcttctggcagttcccttgcttgtcaaaccaaggggagccccacacatctcctgccttaaacactggggcttcttaaatctcattgtgccaggaaatgcagcacatctctcataacattcagactgctttcttttatatatcaggagaaaggcaggtggatgtgtgtggctgaaggatatttgtttcattattattatattgatgagagcatgctttggtggacaagcactgaacttggaattaggagagctgacctggctctgctaccaaattgctgtgggacatgcgctatcctcaccctctgcttgcccaggacttggccctggcaggatggattctttcggttgaccttcaactgaggtcctgtctttcaatctctcatccactcactgctggaaggattatctgaaaacaaagtcttaacatcttaactcccctggctttcagctgtggtctccacacatcagtctgtggagtagtgtcaaatagtgatgaagttttctctggtccatggtgaaatgtggaacataaggataaagttgactttatttaggtttttttgtttgttttgttttttgaggcagagtctcagtctgttgcccaggctggagttgagtgatgtcagctcactgcaacctccacctcccagattcaagtgattcttgtgtctcagcctcacgagtagctgggactgcaagcatatgtcaccatgcccaggtgatttttttgtatttttagtagagatggggttttgccatgttggccaggctggtcttgaactcctggcctcaaacaatctacctgccttggactccaaagtgctaggattacaggtgtgagccactgcacctggcctttattcaaattttaaactctgaagtcagtctttttctttcctttttttttgttttgggacagcgtcttgttctgttgcccaggctggagtgcggtggcgtgatctcggctcattgcaacctccacctcccgggttcaagcaattctcctgcgtcagcttcctgagtggctgggactgcaggcacttgccaccacgcttgtctaatttttgtatttttagtagagacagggttttgccatgttggccaggctggtctcgaactcctgacctcaggtgatccacctgccttggtttcccaaagtgctggcattaccggcttgagccaccacgcctatccttctttcctgttcttttggtattaaaatattctttcttttatgaaaccgttttcgtaagaaatctagaagtctctgccctcaggatgaagtcccaattccttaagtggcatttgcttaaaggtctttcacagtccaactgcagattacatcacatagttccccagcttctgacaccccacatctattcactgactatccagtgacactgactggaaacatggcatgtcttctcatgccttcaggcctctgaacaccttgcttccttttctcttttctcctgtcgctgcctcttttctcctcaccctccacagtttgtttctttctttctttctttttttgagacggagtctcgctctgtcgcccatgctggagtgcagtgacatgatctcggctcactgcaggctccgccttctgggttcacgccattctcctgcctcagcctcccaagtagctgggactacaggggcccgccacctcgcctggctattttttgtatttttagtagagacggggtttcaccgtgttagccaggatggtcttgatctcgtgacctcgtgatccgccagcctcggcctcccaaagcttgctttcttttttctgagatggagtttcgcgcttgtcattcaggctggagtgcaatggtgccatctcagctcactgcaacctctgcctcccaggttcaagcgattctcccacctcagcctcccaagtagctgggattacaggcgcccgccatcatagccggctaatttttgtatttttgtagggacggggtttcactatgttggccaagctggtcttgaactcctgacctcaggtgatataccctcctcagcctcccaaagtgctgggattacagcctggcccacagtttcttcctctttgacctttccttccccatgccaggcagcctgagtcactccctcctcaatatagcgctgatcacatgtcctgcaattgcctgtctcattatgtgtctcttcccatcagctgccagttcctggaggtagggcctgggtctcacagcctgtcctgagtagtagccactcaatgaacatatgtcaaatgaatgaaagaatgaatgtttttgggaggccaaggtgggtgaatcacctgaggtcgggagtttgagaccagcctggccagcatggcggaaccctgcctctactaaaaatgcaaaaaattggctgggcgtggtggtgggtgcctgtggtcacagctacttgggaggctgaggcaggagaattgcttgaacccagaacggggaggttgcagtgagccgagatcatgccattgcactccagcatgggcaacagagcgagactctgtcaaaagaaaaacaaaacaaaaaaagaatgaacgttaatttttgagacatatccatgtccttctgcttgtgaagtttagtctttcccggtaggttgaaccttgctcaaaggaagaggagcctctgatttccttatttcccactatactgcatttacccttgctgccctgtgcagtactctgcatgtagtaggtactaatgtgctgattacctgttcttctatgttctctgtgtggctttcctctacttattccctccctagaactctctgcagtgtctgagctcctgcagcatgggctgccccagataagcagcaggagccctgaaagccttgccttcctgtctgatcgccagtacatggagggagctgctcgccagagacagtactgcatcctgctcctcttctacttggcctacatccatgaagacaggtttgtctcagaggcagagttatttgaggctgtgcaaagcttcctcctgtctctgcaggaccagggcgagcgccccccactggtggtcttcaaagcctccatctatctgcttgcaatctgccaggacaaagacaatacactacgtgagactatggtcagtgcaatcagaaaattcctagaaggcatcccagacctgcagctagtctatactcaccatccgctcctgctcaggttctttctgttgtatccagagctcatgagtaggtatgggcaccgtgtcctggaactttggttcttctgggaagagagcagctatgaggaactggatgatgtcacctctgctgggcagcccgcccttcctgccagcttagtagtcctgttccagttgctcagaagcatccccagcatcctgctcatcttgctggacctcatctattccagcccagtggacacagctcacaaggtactgattagcctgaggaccttcctgaggaggaatgaggatatccaagtgggcggtcttatccgaggccacttcctgctgatcctgcagcgtctgctagtggagcatggggcatccccatcaggagtcctccttgttcttcacagcctcggggaacctaccattgctgctgagcctcctctccctgatgcagctcaggaatgtgtcagagcaagaactggacagcgtggccatgaagctccttcaccaagtaagcaagctgtgtgggaagtgcagccccactgacgtggacatcctgcagccctccttcaacttcctgtattggagccttcatcagaccacacccagcagtcagaaaagagctgctgcagtgctcctgagcagcacaggcctgatggagcttctggagaagatgctggccctcaccttggcaaaggcagattctcccaggactgcactcctctgctctgcctggctgctcactgcctccttctctgcccagcagcacaagggcagtttgcaggttcaccagacactctctgtggaaatggaccaagtattgaaggctctcagctttccaaagaaaaaggctgcactactctcagctgccatcttatgcttcctgcggacagccctgcgacaaagcttttcctctgccctggtagccctggtgccctcaggggcccagccactgccagccaccaaggacactgtcctagctccactgcgaatgtcgcaagtccggtccctggtcattgggctgcagaacctcctggtgcagaaggaccctctattgtcccagacctgtgttggctgcctggaggccttgcttgactacctggatgcccggagcccagacattgctctccacgtggcctcccagccttggaatcggtttttgctgtttaccctcttggatgctggagagaattccttcctcagacctgagattttgaggctcatgaccctgtttatgcggtaccggagtagcagtgtcctctctcatgaagaggtgggtgatgttctgcaaggtgtggctttggctgacctgtctaccctctcgaacaccacactccaggccctgcatggcttcttccagcagctccagagcatgggacacctggctgaccacggcatggcccagaccctgcaggcctccttggagggccttccccctagcacctcctcaggccagccacccctgcaggacatgctctgcctgggaggggtggctgtatccctgtcccacatcagaaactgatcctcaggacttgaaggcccagaagtggagagagaatgagacctggagacaaagggcataattgttggggaaatggatgacagctgaagctattcatatggagccatatactctattgttgaaatagaataaggaaataaaatgatacactcacat

SEQ ID NO: 1426 - DNA, 3085 bp, Homo sapiens
aatctaacaattaaagaacaaaaatttcaagaacttcaagaaagactcaacatggaattggaattaaatgagaagattaatgaagagattacccatattcaagaagaaaaacaggatatcatcatttctttccaacatatgcagcagttacttcggcaacaaattcaagctaatactgaaatggaggcagaattgaaggtgctaaaagaaaataatcagacccttgaaagagataatgagctgcaaagggagaaggtaaaagaaaatgaagaaaagtttcttaatcttcaaaatgagcatgaaaaagcactaggaacttggaaaagacatgctgaagaacttaatggagaaattaataagattaaaaatgaattatcatcccttaaagaaactcatattaagttacaagaacattataacaaattatgcaatcaaaaaacgtttgaggaagacaaaaagtttcagaatgttccagaagtaaataatgaaaacagtgaaatgtcaactgaaaaatcagaaaacaccattatacagaaatataatactgagcaagaaataagggaagaaaatatggagaatttttgttcagatactgaatacagagaaaaagaagaaaaaaaagaaggctcatttatagaggaaataattatagatgatttacagctttttgaaaaaagcttcaagaatgaaattgatactgttgtttctcaggatgaaaatcaaagtgaaatctccttaagcaaaaccctctccttagataaagaagtaattagtcaaggacaaacctcgaatgttacggacaacagaaaatcagttactacagaaataaaagacaagatatgcttggaaaaagacaatggatgtacagaatttaaatcaccaaataatcattttgtagtgttagatacagcaatagaaacagaaaaaatacatctagaaagaaccagaggattagatgttcaccatacagatgtaaatctggaggttgaaaataacaaaacatcatttaacagtattttaaatgagacagcacacaatacatatcacaataataataaagatgtttctgaaaatgagccattcaaacaattcagattgcttccagggactcgagaacatgctctagagaaggaaattacaaatagtgaccaaaccaaagcagatttggactcgtctctagatataaaaaaaaatcctgttccatgtcagaaatatagtttacggaattcaagtaatgttatgttagatgataaacaatgtaaaataaaacaaatacaactgttaactaaaaaaagtgagtgcagcatattactttctaaacaaacttcagattttctgcaagtctgtaatgatactttagagaaatctgaactaactgttccctgtgatatagtaatcgaccaccatgtttcatatgctgcttttagtgctaattcaaaactacttctgaagaactcagataaaaatgtccatagtatgtctatgttggtgaaacctaactcaagccctgggggaaaaactatgtgtaaaaatatgagtgatatgcaaaacagtcaatttaataactgtttgggatacttagaaaacactaatgtgaacatttcccatcttcatcttaacaatgagaatagtcatgcttcacaagccaaagatgtgaaaactgctgttcacatgaaaacttgcacagaaacagagttttccaataaaaagaatcagattgatgagaatcaggtaactgaagccacaaaaaatgacctcttcctttttgtgagcattaatgaaagacagcatacattgttaaataatacagagaaaacagaatcattaaatgacattgtttcaggaaaaatgttcagtgaaggacagctggaggaatcacattcatttcacatagagccatctggagatttagtaaacagaagcggaaggtcaacctttgatctttcaacttcagataaaaaaactgagaaaactccagtatacatgaatttttcagaccccggtccttggtcaaaagtaaatcacattgaaagtcaaacagcgagcagttcgaccccttgcatttctttgttgctgaaggagagaccactagatccatcagaaaacaaaaagatcatttcaatggctctttgtaaaaatattggtgtggatgatgttggaaaggatattggaccagatactaccagcattaacagagttgctgacactttgaataactggagtatccatccagatcccaagggagaacccagtgaagagaagaatgcaatggcaaagactttttatgattcctcttttcccacagaacatgtgaaaacaaagcctctgatatcaactccactacaaagccatttgcaggcaatcaagacgactaaaaatacttctggtgatgatgactggcagagcctcattacgaatcaactaaataaaagtgaaaatttactaagtttagaaaatgacaaccagccaaaaaaaagaaaagcagaagagacgttggaaaaaaacaacagattaaaataatgtagataagtgctttcagtagtgaaattatgtaactgaaattctggtatagtttttactagaataaaatgactgttgtatttaaagctctacagtttgtctttgcttttccaagtttttctaatgtgaagaaattgtattactctacttctgtcttctctctgtatattatcctttctttaaagtgctcattgcttcttcaatatccttttttaaagaacagaatttatgtattgtatgacagacattgtgaccccttgtaatttattacttcatatcctctggagtttgtgattttagtataaatttgagacaataactgtccagactaggcaaatttttttagtttataatgttttactatgatttagggcttttttttcaaagaacaaaaattataagcataaaaactcaggtatcagaaagactcaaaaggctgtttttcactttgttcagattttgtttccaggcattaagtgtgtcatacagttgttgccactgctgttttccaaatgtccgatgtgtgctatgactaaaaattgaaaaattaaacacagtgttagtc

SEQ ID NO: 1427 - DNA, 4086 bp, Homo sapiens
aataccagcaacaactcctaccttccctgcatctgtcatcacttatgaaacccaaacagagagatctagagcacaaacaatacaaagagaacaggagcctcaagagaagaacaggactgacccaaacatctctccagaccagagttctggcttcactacacccactgctatgacacctcctgttctaaccacagccgaaacttcagtcaagcccagtgtctctgcattcactcattccccaccagaaaacacaactgggatttcaagcacaatcagttttcattcaagaactcttaatctgacagatgtgattgaagaactagcccaagcaagtactcagactttgaagagcacaattgcttctgaaacaactttgtccagcaaatcacaccagagtaccacaactaggaaagcaatcattagacactcaaccataccaccattcttgagcagcagtgctactctaatgccagttcccatctcccctccctttactcagagagcagttactgacaacgtggcgactcccatttccgggcttatgacaaatacagtggtcaagctgcacgaatcctcaaggcacaatgctaaaccacagcaattagtagcagaggttgcaacatcccccaaggttcacccaaatgccaagttcacaattggaaccactcacttcatctactctaatctgttacattctactcccatgccagcactaacaacagttaaatcacagaattctaaattaactccatctccctgggcagaaaaccaattttggcacaaaccatactcagaaattgctgaaaaaggcaaaaagccagaagtaagcatgttggctactacaggcctgtccgaggccaccactcttgtttcagattgggatggacagaagaacacaaagaagagtgactttgataagaaaccagttcaagaagcaacaacttccaaactccttccctttgactctttgtctaggtatatatttgaaaagcccaggatagttggaggaaaagctgcaagttttactattccagctaactcagatgcctttcttccctgtgaagctgttggaaatcccctgcccaccattcattggaccagagtcccatcaggacttgatttatctaagaggaaacagaatagcagggtccaggttctccccaatggtaccctgtccatccagagggtggaaattcaggaccgcggacagtacttgtgttccgcatccaatctgtttggcacagaccaccttcatgtcaccttgtctgtggtttcctatcctcccaggatcctggagagacgtaccaaagagatcacagttcattccggaagcactgtggaactgaagtgcagagcagaaggtaggccaagccctacagttacctggattcttgcaaaccaaacagttgtctcagaatcatcccagggaagtaggcaggctgtggtgacggttgacggaacattggtcctccacaatctcagtatttatgaccgtggcttttacaaatgtgtggccagcaacccaggtggccaggattcactgctggttaaaatacaagtcattgcagcaccacctgttattctagagcaaaggaggcaagtcattgtaggcacttggggtgaaagtttaaaactgccctgtactgcaaaaggaactcctcagcccagcgtttactgggtcctctctgatggcactgaagtgaaaccattacagtttaccaattccaagttgttcttattttcaaatgggactttgtatataagaaacctagcctcttcagacaggggcacttatgaatgcattgctaccagttccactggttcggagcgaagagtagtaatgcttacaatggaagagcgagtgaccagccccaggatagaagctgcatcccagaaaaggactgaagtgaattttggggacaaattactactgaactgctcagccactggggagcccaaaccccaaataatgtggaggttaccatccaaggctgtggtcgaccagcagcatagagtggcagctggatccacgtctaccctaatggatccctgtttattggatcagtaacagaaaaagacagtggtgtctacttgtgtgtggcaagaaacaaaatgggggatgatctgatactgatgcatgttagcctaagactgaaacctgccaaaattgaccacaagcagtattttagaaagcaagtgctccatgggaaagatttccaagtagattgcaaagcttccggctccccagtgccagagatatcttggagtttgcctgatggaaccatgatcaacaatgcaatgcaagccgatgacagtggccacaggactaggagatatacccttttcaacaatggaactttatacttcaacaaagttggggtagcggaggaaggagattatacttgctatgcccagaacaccctagggaaagatgaaatgaaggtccacttaacagttataacagctgctccccggataaggcagagtaacaaaaccaacaagagaatcaaagctggagacacagctgtccttgactgtgaggtcactggggatcccaaaccaaaaatattttggttgctgccttccaatgacatgatttccttctccattgataggtacacatttcatgccaatgggtctttgaccatcaacaaagtgaaactgctcgattctggagagtacgtatgtgtagcccgaaatcccagtggggatgacaccaaaatgtacaaactggatgtggtctctaaacctccattaatcaatggtctgtatacaaatagaactgttattaaagccacagctgtgagacattccaaaaaacactttgactgcagagctgaagggacaccatctcctgaagtcatgtggatcatgccagacaatattttcctcacagccccatactatggaagcagaatcacagtccataaaaatggaaccttggaaattaggaatgtgaggctttcagattcagccgactttatctgtgtggcccgaaatgaaggtggagagagcgtgttggtagtacagttagaagtactggaaatgctgagaagaccgacatttagaaatccatttaatgaaaaaatagttgcccagctgggaaagtccacagcattgaattgctctgttgatggtaacccaccacctgaaataatctggattttaccaaatggcacacgattttccaatggaccacaaagttatcagtatctgatagcaagcaatggttcttttatcatttctaaaacaactcgggaggatgcaggaaaatatcgctgtgcagctaggaataaagttggctatattgagaaattagtcatattagaaattggccagaagccagttattcttacctatgcaccagggacagtaaaaggcatcagtggagaatctctatcactgcattgtgtgtctgatggaatccctaagccaaatatcaaatggactatgccaagtggttatgtagtagacaggcctcaaattaatgggaaatacatattgcatgaccatggcaccttagtcattaaagaagcaacagcttatgacagaggaaactatatctgtaaggctcaaaatagtgttggtcatacactgattactgttccagtaatgattgtagcctaccctccccgaattacaaatcgtccacccaggagtattgtcaccaggacaggggcagcctttcagctccactgtgtggccttgggagttcccaagccagaaatcacgtgggagatgcctgaccactcccttctctcaacggcaagtaaagagaggacacatggaagtgagcagcttcacttacaaggtaccctagtcattcagaatccccaaacctccgattctgggatatacaaatgcacagcaaagaacccacttggtagtgattatgcagcaacgtatattcaagtaatctgacatgaaataataaagtcaacaacatctgggcagaatttattttttggaagaagtttaatcaaaggcagccataggcatgtaaatgaatttgaatacatttacagtattaaatttacaatgaacatgcaaaataaaaggacttgtaaataaatgcattatgaactg

SEQ ID NO: 1428 - DNA, 3426 bp, Homo sapiens
acatgcatttccctgctgctatgtgaaatgtgcgtcttctccttccgccatgattaagtaagcaaacattttcctctaattcagattctttaaacaaaagttgcaaatgaatgtagccttcatctattgtaaaattaaagatggagatggtcaaggggttaccgccagtctgtttcttgcgctgataatttttctagacattaaatctcaccatttgttcccaacaaagaaagaaagacaggaccaccagactctacagggaagccaagaggaagaagggaaggagcccagaaatggagagaagctggactctagggatggatctggggatgctccacaaagtgcagctgtggagaatgcagaagaagagttggctagtgggacattcccactgaggagcatggcagggggaatgtctaatattcactaagagaattcttgaaatgtaacatttagatgaaactcttcaagtttccttaaaatacaaattcatgactctctttctttctctctctctctttctctctctctttggtatgttaaagtaatcaaggaaagggattttgttttataactgggttacacaggggagagaccagaatagctgaaagctgtgagacatgaagaaaattcaagatttaggagacatgcagaacatcagtgtctaggcaaaatggcagactgaccaacccccacacactgaatccctagagatattaggacagggatattgagaaaaatttacctttaagttgtaaaggacaaggcaactcaacatattgaatgccttgttgacaaccaggggctaatatttgggatgcatattgggcatagatgcacagaaaataatttatcagtgacattaataatatgacatctcttcgttgagaatttactgctgtcttaatatcacaactctaaggggtcaacatccagaataaacttcttatcttacatatttaaaattatttgctaggctacatttttcttagaaaaatgcatatctgaaacagaatattgatttttttcctgggtcatacataaagaccatcagaaattaattattgaaaaaacactgctatactcattagagatatattttaattagattaattttgcattaacagtccatgagaagttacaactaacttgcaacgagacattaacatgcatcatgtttgatataagtaaaaatggaaatgattagaagtatacaaatataaagtatgttgctagtatatgcaagcttaaaaaacttttacctgatagaattagcaagagcagctatgttgagcttctttcagttaaaagtcattttcggctatgtctccctaaggatagaaatatcactgcttttgatctcatttagaattctgctcacttttaggaaagtagggctgtttggaaatggtcagccatatccttactgaatttcctagggcttgactgcacctactctagttaacaagtaagatatagttatatattgtattataacttctcaaagcacttatattttgattttccttcttttatgttcattatcttcatttggactactccatgtgacaaaagcagttatttttcttctaccccctaaactggaccacatcgatgctcttaggtccaaatcatattctttaagaaacaagtgttcactgaatgatttactgcattatataataggtactatacaagacacctgaggccccccacaccgtgaaaacagatgtttcttcctggagcttgcccaataggagagaaatttttaatttaccctttctcagtaaaccattatacaaaacagaagtgaaattatggacccagtgaactcaatctggctgacttgcaacccctatgtgttcataaacccactgaaatatataatttgttgtttatattaaatatgcactgaagcatgattagataaacattgaaagtaaattttaattttaaccatcagtggaagtatatggggtgatttaagtcattcatattagtttatttttatcaggtgttcctccttgtccatagtgaaatacaatacagagattatagcctgtggcttgacaggacatcttatagttggtaacaggactacattaaaaggaaaaaacaataaataaggatgtctaattatacagataaagaaagcaagttcactcactcctccaggacagcaccagagacaacgttagaaccaagagtttcaaaacctcgccttgtatggtttgcctgatgccatgattaaagaaaagggggtggggaactaagagaggaagccaaagagaaagaattcagtaccaaacagcaatattcagatgttttattaaataataggaggtgttttgaccttgctggtgaacagaggtgatctcaaaacatttgacagatataattaaggccataaggcaataattgcaaaagtcaaggagcccttgccacctccaaagcatcacgtgtggatgcaggaaccatattaacaacatgggtagtcaaggagaaagcagatagaataaagctgtacccagcaatataaagggacatgcaagtgtgtgttgtgcttaagagtaaacttagggaaaaaagctccccataacctcgagaaacgtttctggatctgagatatccattagcacatttagaaggtacctatttccattattgtgaaggagttgtaaatgaaataaacaactttaaataatacctcccttggtcaaactgcattaagtattccctgatggaattcattcatcatcattcaaacagaatggtttgcaactcaacctgcctagtgtggggtctggaattcccaccacagtcactgtgccttaagcactgttgcagcagaaggacttgaagtaacacatgaatatataatgccaatttgcgtgtcagcatggattgttgaaattgaagttagttaattgtcacattgtaacaggaaaagaatccaagttttggagctggttggaactgagttttcatcttctttctctgctacttaactgtgttatcctgaacaagatactcaacctccatgagacacaggtgaccatgtgaaatatatatgtaaaatgtctggcaaacatctgattcatgtaggtacccaaaattagatcattttcattttcttttgcttccttggaagttcaaaacaaaattctgaggtaagtttcaattaaaatgggtcaggcagacagattccagcaaggtcaaagcatccttttttctttaataaaatatctgaatatctgaacaagaaacaacttctgtttctcaaggttgaaatgatgaattattgaacttctgttgctgtttgttttctctcttatctccttactactacatataaatgagatatcttgctatcccactgatatctcaaattcagtatttcccaaataaaacgtaatcttttctacc

SEQ ID NO: 1429 - DNA, 3680 bp, Homo sapiens
tttgttgccaggtggacgcggccccggccttcgcgcgcggcagggatgctgcgagccccgggggagctcccgcgccaggccgcccgctgctccctctgccgcctggggccgggtcgcggacgcgcattttttaagtggcgctgtttgcctgcgtccgtagaccgaggaaacccgctctgggctcttgcagccaatgccggaacaggatttgctgttgctgagcctcaaatcgcaatgttttgtgggaagttaaatatgcatgtgaacattcagactgggaaatgggaacctgatccaacaggcaccaagagctgcttgaaacaaaagaagaagttcttcagtactgtcaggagatgtatccagagctacagatcacaaatgtgatggaggcaaaccagcgggttagtattgacaactggtgccggagggacaaaaagcaatgcaagagtcgctttgttacacctttcaagtgtctcgtgggtgaattcgtaagtgatgtcctgctagttccagaaaagtgccagtttttccacaaagagcggatggaggtgtgtgagaatcaccagcactggcacacggtagtcaaagaggcatgtctgactcagggaatgaccttatatagctacggcatgctgctcccatgtggggtagaccagttccatggcactgaatatgtgtgctgccctcagacaaagattattggatctgtgtcaaaagaagaggaagaggaagatgaagaggaagaggaagatgaagaggaagactatgatgtttataaaagtgaatttcctactgaagcagatctggaagacttcacagaagcagctgtggatgaggatgatgaggatgaggaagaaggggaggaagtggtggaggaccgagattactactatgacaccttcaaaggagatgactacaatgaggagaatcctactgaacccggcagcgacggcaccatgtcagacaaggaaattactcatgatgtcaaagctgtctgctcccaggaggcgatgacggggccctgccgggccgtgatgcctcgttggtacttcgacctctccaagggaaagtgcgtgcgctttatatatggtggctgcggcggcaacaggaacaattttgagtctgaggattattgtatggctgtgtgtaaagcgatgattcctccaactcctctgccaaccaatgatgttgatgtgtatttcgagacctctgcagatgataatgagcatgctcgcttccagaaggctaaggagcagctggagattcggcaccgcaaccgaatggacagggtaaagaaggaatgggaagaggcagagcttcaagctaagaacctccccaaagcagagaggcagactctgattcagcacttccaagccatggttaaagctttagagaaggaagcagccagtgagaagcagcagctggtggagacccacctggcccgagtggaagctatgctgaatgaccgccgtcggatggctctggagaactacctggctgccttgcagtctgacccgccacggcctcatcgcattctccaggccttacggcgttatgtccgtgctgagaacaaagatcgcttacataccatccgtcattaccagcatgtgttggctgttgacccagaaaaggcggcccagatgaaatcccaggtgatgacacatctccacgtgattgaagaaaggaggaaccaaagcctctctctgctctacaaagtaccttatgtagcccaagaaattcaagaggaaattgatgagctccttcaggagcagcgtgcagatatggaccagttcactgcctcaatctcagagacccctgtggacgtccgggtgagctctgaggagagtgaggagatcccaccgttccaccccttccaccccttcccagccctacctgagaacgaaggatctggagtgggagagcaggatgggggactgatcggtgccgaagagaaagtgattaacagtaagaataaagtggatgaaaacatggtcattgacgagactctggatgttaaggaaatgattttcaatgccgagagagttggaggcctcgaggaagagcgggaatccgtgggcccactgcgggaggacttcagtctgagtagcagtgctctcattggcctgctggtcatcgcagtggccattgccacggtcatcgtcatcagcctggtgatgctgaggaagaggcagtatggcaccatcagccacgggatcgtggaggttgatccaatgctcaccccagaagagcgtcacctgaacaagatgcagaaccatggctatgagaaccccacctacaaatacctggagcagatgcagatttaggtggcagggagcgcggcagccctggcggagggatgcaggtgggccggaagatcccacgattccgatcgactgccaagcagcagccgctgccaggggctgcgtctgacatcctgacctcctggactgtaggactatataaagtactactgtagaactgcaatttccattcttttaaatgggtgaaaaatggtaatataacaatatatgatatataaaccttaaatgaaaaaaatgatccattgcagatatttgatgtagttttcttttttaaattaatcagaaaccccacttccattgtattgtctgacacatgctctcaatatataataaatgggaaatgtcgattttcaataatagacttatatgcaggctgtcgttccggttatgttgtgtaagtcaactcttcagcctcattcactgtcctggcttttatttaaagaaaaaaaaggcagtattccctttttaaatgagctttcaggaagttgctgagaaatggggtggaatagggaactgtaatggccactgaagcacgtgagagaccctcgcaaaatgatgtgaaaggaccagtttcttgaagtccagtgtttccacggctggatacctgtgtgtctccataaaagtcctgtcaccaaggacgttaaaggcattttattccagcgtcttctagagagcttagtgtatacagatgagggtgtccgctgctgctttccttcggaatccagtgcttccacagagattagcctgtagcttatatttgacattcttcactgtctgttgtttacctaccgtagctttttaccgttcacttccccttccaactatgtccagatgtgcaggctcctcctctctggactttctccaaaggcactgaccctcggcctctactttgtcccctcacctccaccccctcctgtcaccggccttgtgacattcactcagagaagaccacaccaaggaggcggccgctggcccaggagagaacacggggaggtttgtttgtgtgaaaggaaagtagtccaggctgtccctgaaactgagtctgtggacactgtggaaagctttgaacaattgtgttttcgtcacaggagtctttgtaatgcttgtacagttgatgtcgatgctcactgcttctgctttttctttctttttattttaaatctgaaggttctggtaacctgtggtgtatttttattttcctgtgactgtttttgttttgtttttttcctttttcctcccctttgaccctattcatgtctctacccactatgcacagattaaacttcacctacaaactccttaatatgatctgtggagaatgtacacagtttaaacacatcaataaatactttaacttcc

SEQ ID NO: 1430 - DNA, 4472 bp, Homo sapiens
cttgatatttaaaacagttaagcagagtgtgaacagcaatcattaggaaaatgatccattgaattaattgccaagggggaaagagggaggttgaaaacgatattgatggcaaatgtctaaggcagaatgggtatttttaattctgtttttcctttcctatttcatgggtggtgaggttagtaactgtgttgtacaaaacagtgctacgaggaaataaaagcaagacagacaagttgaatgtgaaggttttataagtaggattaagaagtttggagcttgttctttcataatagagagtcatgaagggttttaataagagagatgacacaatctgaactttggaaataaagctcaggcagaagagcagagggcagaatggacacatggctggaggctttcccaataatttcaggaagagatgagttgtaccaggacaggaagaggcccggattcatgctcccaaactcttacatgttcactgtcctgggttctaatagaccaatgaccactgtgctttgtacttcacaaatatacctcactggttttcatcttctctgtgtgccacaagcccttagcacagtgatgcgacatagtaagcctttaatgagtgaacgaataagagagaacatcaaggacgatatagcagaggtgacagcaccccagagatatttgagatggaaaattggtgggtgttggtgcttgagaggcagcaaggaatgactctggattttgatctattgtacaacatgtgactatatttagtagcaatgtattgtacacttgaaaattgctgagagagcagattttaagtgttctaagcacaatgacaaaagcatgcgaggtaatacatatattaataagcctgatttagctattctgcaagatatgcatatttcaaaaaattatgctgtgtacataatatatacagttcttgtcaattaaaaagtgtttttaaagaagttactgcaaaatccaaaaaaagaaagaaaatgccatatgaattgacatgacaattggccagatcccattttatcaggcatagaatcaattttattattctagctgaataggtcctattaatcatgataggtaaaatggcagagatctgctttttactagcatgcagctgttaacatttgccacaacttttagacgttgcagttggtgggagggaacaagcaaacacttctgctaagtaatctctttctcctttttggatagagttaagacactgcatctacccaaaacaaaaaagttacaatggggtttggttagcaacattttcctttggctaggatcttgtggaataaaagtaacatttttttttaactagaacattctatcatggcctctctattgttaactttagactctgtagctgttcatttgtatcatcaagctctgaagatgacttgcagcccatctccacttccatggaggtttcctaggcccaggaaaaggaaggtaaggcccttaccccacctccccacttatggagcccctctgccctatggggaagactctacacctgtctaacgaaagctttgagcttttaagaggaaaggcttttaattgaatatccagttttgttcataactgctctgacattcccacaattccttttgaacaaagaactgaactctgtttcataaacgatgtcccacacaaaagagaaaactgttactttgcacattcttgtctaccctgtgaagaaacggaatagttttgaaataaagctagacagtgtgtcctacaagagggagtattttgctgggaacacaaatgagtcaaataggtgagtcaggaaattagccacccactctgctgctgagcttggagcttttaaaaaactcatttaattagctccctggcagggctcaatcttacacgcaatgtccaagactctctgcagcacctccacaggagagaatctttgggacagctgtggacatgcacataccagctctgcccacaccttgcaaggctggtaaagataacctaggtccaaggcaggactaaaagtcaatgcccatgtaaatgagagttcttgggaccacaagaggaaaacactctggacatcgtgtggataggaaggggaaaagatgcaatccgatttcttaaacctttgattttatcagacaatttggtcattttgtctttaacttactttagttccactcatcttttagtggcagattttcatgcttcacttgtggcttggagttccttctcctctacataccctcttcttacatgatgttgtagctagagaaaaattcactttgtctttcaaattgataataaaagatacaagcacatatgatcttatgctcaaggagatgaacatgcacatgtacacacacacacacacacacacacacacaaacacacccctacctctaggtaagcataatagaggaatgtgataactgagaaatgccactgaatccttgcagatctctgagaaaataatttcagccatcaaatggtaagggtctttgagcggaatgagtgaggagccagtggtgtggactgcactctgagaagcttttgataaaggatgaagagagaaaaagccataacttatgaggtctaagtgaggctttctcttagacatctaatttataggttgacaagaataagccagaggaaagagaggctgaagacagagagaaaggatgagaaaactgctggagcaaggtctggagaaggcagaagaaaactgaagggcagaaggggaatgtgtcttttcaggaaagtaagatcatctgctgagagtcaggagagaaacacatgagttagaggctacaggaaggttgaaaatgtgcagaatatcttggaggcaggtaatgcaagtttcatgaaaaactgttagggtcaaacataggataattctcagtctgtaagagaaaaactgtaacactaaaatgatataatattttgattttttcatcataccaagggtcttttcccctacaactctattatagcatcaaaactaatcctttttcatctcaaagatgataaccacacctagtgataaaaatacagatcatgactacatgactccatgagtatctcaatgtgtttactcttagatgtttgacaattttttttaaactgctgtcttttcagctgaccactttcttgatgccctttcagaacttccaagtctttagggtgatttagtgacagccccttccctagaatctccattagcagctctatgacccctattttctaagtgttttacaaggaatttaaatttcaaatgatattttaatgtggcagctctcagcaacctagcacaagatctgcctaggtcgaaggacaacaacatacaatagttcctacccctgtcctcctacgttgtcattcagccttgtcaaaatgctggctctcccttggagagtgctctctatggttttctgtgcaaatcactatgtatgacacttgtccatgacacacagagaatcaaaaacatctgaagattttgcagctgaatcggtgtcaggcctgacaggtgtagaaccttggtattctcataaacgaggtagcatttttccatttccaaaaaatgattattgtgaaaatgtattttctttttctaagaaggaggatggaggaggaaattctcctgtaacttttcccactttcctgaaaaattgtatacggtgagatctgaaggagaggctttcaaaaaagttgtggtatctgggtgcaggctgaaatatgggaattattttgagaattattaaattctcagtgaagacttagcagcaaaattgatgcatggattgattttgccagtcaagctctgccagtcataatcctagaatacaagtgaaaagactaacccttctgagttacatgagagaaacaatgccagatctacaaagctaatgactagtcattcaatttgtttaggtcattctaaattttaagttacacaaaacatcatgaggaatttagccctaaaactttgcaattttattttaaccatcaatatgctatatcattttggtactgaggtaatagtggagaatatatgatatgcatgcacacacttgtagccttcctcaaacagggttccttggggaaaacaagctcttatgccccagagcaatgtcttcaaagtgtggcccagggacccctggaggttcctgggaactatccaggaagatcctcaaggtcaaaactattttcacaataacatgaaatatgttacttgcattttttattctaattctttcattagtgtacagtggaattttccagaggctacatgatgcaacagattgaatgcagaagcaagatacgagaatccagctgtcttcatttgcactacatgttaaagagctttgcagaaatgtgaaacaatgccacttttctaatttttttgttttggaaaataaacttttggtaaaaatatgttatttatattaacatgtaaatgttttatgattcttatt

SEQ ID NO: 1431 - DNA, 3775 bp, Homo sapiens
atgatgcttcaggacaggacgcacggggcaaacgcctgggcaccggggacggggcagcgccctcaggcagggtgtccacggggtgccccagggctgccggaacaaagaccccagtactgcggggcttaaaacaacagaaacgtgttgtcctccattctggaggccgggagtctgacttcagggtgtgggcagggccgccttccctgcggtttccgggagaagctccttcctgcctcctcttccggcttcctgcctcttccggcttcctgcctcttccggcttcccgccccggtgtccccaggtgtcctcagcagccgctgcatcgctccggtctctgcatctgtctgcacaaggccatcttcccgggcacctgtttcctttctgtgtcccctccgcttcctatatggacacgagtcataggactgagggcctaccctgctcctgtgtgacctcatctaaacttaatcactcatatctgccaagaatctatgtccagctacagtcacagtctgaggttctggatgaacattttggaaactattcaacccactgcattacccagctgtggctatatatatatatatacatatacatatttattttttagtgacagggtctcgcggtgttgcccaggctggagggcagtggctcttcacagacacagtcaccgtgtgctacagcttccaactcctgggctcgaaccatcctcctttgtcagccccatgagtactggggagcacaggtgtggggcactgtgtccggctgtggtgacagatggagcccccgacacaggtttgtaactcaaggcactgacatccaacctgaagggcaagagcagggcagcgaaagtgctgcagactgaggccgcttcaagcctggacacctgcgggagagaaacccccaggagccaggatcaccgaacacccaaagacgtcccgctctgaaaagaggctgccgcctcaataaacaggaggagtcacagctgagaaaccagaggcctccataccgtgagttggcgccaggcgcaggcccgtcattgtgtcatcatcaccaccctccacgcaaagaacttctcatcgcacaaaagcgaaattctgccgggaaggaccttgtatgtcactgccacgcttgatgagagagaacttcttatttctgttttaatcctcgcctcctgttcacacggcagcctgtgctttggaattgctccaaccacagcgtctgcatggcagcctccctacctgctcagctgggaagtgcaggccccccaggggtccagcccaggaggtgggggctgctgggctccacccaaggagaggagcctgtgcctgggcccatcccccagccatgccagccacacccagctgggacctgcgggaccctgggcacaggcaggactcacccctggagctgtggcacgggcagaggggccgggcagcagaggccacctaagtccaattccccagaatagtcactgccacaaagggaggcagaggtggaaatccctcctggacttgggagctttgtgaaatcgacgcttagtcaaggtgattctcccaggagcctgtgtagctaccggcagatgccgggcactctcctgctggctatgcacagagctttccccactatttatccagtcagcttcttacagtcgtcactttctctaaatgtgaaaaaccacatgcgtttcatatgtctcttcctcagaaatacctgactgcgaagtggagactctttccctctcagtatgttcattctcttgacaatgcctgctccttgccttcgtgttcaagccgacaatgttaaacacacacattgaacacatttattgacatttcttcttctttttttttgaaatggagtctcgctctgtcgcccaggctggagggcagtggcgcgatatcagcttactgcaagctctgcctcctgggttcacgtcattctcctgcctcagcctcctgagtagctgggactacaggtgtccgccaccgtgcctggctaattttttgtatttttagtagagatggggtttcaccgtgttagcgaggatggtctcgatctcctgaccttgtgatctgcccgcctcggcctcccaaagtgctgggattacaggcatgagccaccgcgcccggcccaatatttattgacatttcatagaagagccctcagccacaacgctgattctgtgggttaaattagttcatacccctccaagtggcagtgatgttcagatgtgtcgctcatgttcctgtctcatgaaatgcgggtaaaagtgatgcctgcagctgccgtttgcatgtgtttggaaattaagtgtggggttactgatagcccatcgaagagaaggaattacttattccctgtaatattgagacctttccagtttatcctgtaagaaggctctggaggacgtcaccgtggagagagctgagactgctgttgacctcatgggtcttcatggggaggcgtgttcagcagatcaacttgttaaaagcatgaggccctggctttgagcaagtggaggatttagagacagaccagagtggactcactgtctgttctcccccaggcagttttgctgcttacaagtatttgccttgagatgcctttaatcagctgcttccctgcggttcctgcgggatcagccagctgtgagcatcatcacgtgtgccaggctggctgggtcgtgatgccatcttctccagtggccccagactcagacgtgtggtccggagaagagacaccaggataggcagcggggcagcaatggctgttctgcttttgaggccaggggatgcagctctggggcccactgcagccactcggctgtgggggacagaaaggtctcccaggttccacaccctctgtcctgtcaccttgcagctttgccccccaaaagacatggaggctctttcgtcactcctcgaatctgggctgggcctgaggcttactttggccaatagactgtgggggaaagaagaatgtgctgtcgtctggggcctcaaggggccttgcaagtctctgctctctcagacccctgctggacccgggggctggcctgctggagaatgagagaggagaggggagtgcccatttgttccagtcaaggacatcctaggccagctgacacccagccgattcccagacacgggagagagcccagctaagtgtggcagaaccgccttgggacccacaatggacctcagacacatgagtggacccagctgagaccacacctgcccagctgtccacaaacgtgtgagcagtactacctgtttatcacttcaggccacttaccgtgggttgcttgttatgcagcagtggctgacggatgcaactgaccactgtgagtggctgcacagataggagtccaggcctagctcatagcaaggtatttctgcagtttgccaggaaggagaaaggaagaaaaaggagaagaaagggaagtggaggggaggtgcagggctgggcttctggttcaagcccacaggtgctgtcctcacgggtgttctgtggctcccgagagggcgcagtggctctgctgggctaggaactgagcgagaactttcctggtgcctgaatattagcaacattccttcccagcactgactgcagagggtaagagccggaaactacaatttggaaatttaattatatctccggaagaaatgtatgcttcttagaatgattttattcaaaaagccttcaaaaaatagaacctactttttccctatattgtgattaattcaaaccaaataaaaggaaccgttgaactctt

SEQ ID NO: 1432 - DNA, 3008 bp, Homo sapiens
atgctcagtgcggacgccgcgccgccgtccgccaactcggaagctcgcgctcccgggccgtgggggcgagaacgccggcggcgagccggcgtcgctcgccgcccccagacagtggcaaacttcgcggcgttcccggagctcgtccgggcgaggcagataccgcacaaataaaatcaaatccaagtcccccatcccaacccgaatgatggaggctgcggcggccggagtgaccccgccgccgccagccccagcccgctagccgcggaccaacagcgccacagcgagcgagcgagcgaggagggggagagagggagtctgtctgcaaagtgctgctccctggtgctcagaggcggctgctccagctccaactctcattcatttcgccggttaacatgagagatcatggccgccttcgggcttctcagctatgagcagagaccgctgaagcgcccccggctcgggccgcccgacgtctacccacaggaccccaagcagaaggaggatgaacttactgctgtgaatgtaaagcaaggcttcaataatcagccagccttcactggagatgaacatggctcagccagaaatattgtaattaacccatcaaagattggagcttattttagcagcatattagctgagaaactgaagcttaacactttccaggacacgggaaagaagaaaccacaagttaatgctaaagataattattggctggttactgctcgatcccagagtgcaattcatagttggttttctgacttagcaggaaataagccactttctattttggcaaaaaaggttcctatccttagtaaaaaagaggatgtttttgcatatttagctaaatattctgtgccaatggttcgagcaacgtggctgatcaagatgacttgtgcctattattctgctatatctgaagctaaaattaagaaacgtcaggctcctgatccgaatttggagtggacacagatatctaccagatatcttcgagagcagttggccaagatttctgacttttaccacatggcctccagcacgggcgatggccctgtccctgtgccaccagaggtggagcaagccatgaagcaatgggaatacaacgaaaagctagcatttcacatgttccaggaaggaatgttagaaaaacacgaatatttgacatggatcctggatgttttagaaaagatcatcttgtgatagacacctcttagccgctgctcacaacagcattgaagtgggagccgtgtttgctgtcttaaaagcaattatgatgcttggagatgccaaaattggcaataacagtgtcagctctttaaagaatgatgacttcaccatgagaggtttgcaatgtgatgggaatgctgatgatatctggactgcctcacaaaatccaaaatcctgtgggaaaagcatttccatagaaactgccaatttaagagaatacgctagatatgtactgaggactatctgtcaacaggaatgggtaggagagcattgcttaaaagaacctgaaagattatgtacagacaaagaacttatattggaccctgtgctttcaaatatgcaagcacagaaattactgcagcttatctgttatcctcatggcattaaagaatgtaccgagggggacaatctgcaaagacagcacattaagcgtattcttcagaatcttgagcagtggacactgaggcaatcctggttagaactccagctaatgatcaaacagtgcttgaaggaccctggctctggttctgtggccgaaatgaacaacttactggacaatattgcaaaggcaacaatagaggtattccagcagtctgcagacctaaataattcttctaattctggcatgagcctcttcaacccaaacagtattggaagtgctgatacaagtagcacgagacagaatggaataaagacattcctaagttcctccgaacgcaggggtgtatggttggtggcccccctcatcgccaggttgccaacttctgtgcaaggaagagtgctgaaagccgctggggaagagctggagaagggacagcacttgggttcttcttccaaaaaggaaagggacagacagaaacagaaaagtatgtctcttttgagtcaacaacccttcctctcactggtacttacctgccttaagggacaagatgaacaaagggaaggcctcctaacatctctccagaatcaagttaaccagattttaagtaactggagagaagaacgataccaagatgacataaaagcgcggcagatgatgcacgaagcattgcaactccgcctaaatttggtaggaggaatgtttgacacggtgcagaggagcacccagtggactacagactgggccctgctactccttcagatcattacttcaggaactgttgacatgcacactaacaatgaattattcacaacagttcttgacatgctgggtgttttaatcaatggaacgttagcctctgacctatcaaatgcatcccctgggggatctgaagagaacaagcgtgcatacatgaatttagtaaagaaactgaaaaaagagctaggagacaagcgatcagaaagtattgacaaagttcgacagttactacctttgccgaaacagacatgtgatgtcatcacttgtgaacctatgggttccttgattgacacaaaaggaaacaaaattgctggatttgactctatagataaaaaacagggtctccaggtctctacgaagcagaaggtgtccccgtgggacttgtttgagggtcagaagaacccagctcctttgtcctgggcctggtttgggacagtccgagtggaccgaagagtgatcaagtacgaggagcagcatcacctcctgctgtatcacacacaccccatgcccaagccccgcagttactacctccagccactgcccctgcctcctgaggaggaagaggaagagcccacatctccagtttctcaggaaccagaaaggaagtccgctgagctgtcagatcagggaaaaaccacaacagatg

SEQ ID NO: 1433 - DNA, 2972 bp, Homo sapiens
aaggaggaggagtggagctgcagggaggaggctcgacaggatcgcctccagcctggggcagctgggttggcgaggcgggggctggttgctgccctggcgggcgaggtgataaaccatgttgtagaatgccattatccccacctccagctgggggcgcctgggcgtatctgaaaaccttgggggaagtgttcacgtttttggcgcttaagaaaaggaagaagcggcagctagctgcagaggctgttccaggccttccagcgacatcgcagaacctgcaccgagtgccacttggaccgcagtctggacctgaagccttgggccggggcacccgtaggagctcagccctcaccgctcccgccctctttggattctcttctccccgagcttggccagagttcaggtctcctggtttctggtctgcccggtaagagtgcaggagtgcagaggtgaggagggggagttaggagtcttgttccggttctcagcatagtgagaagtctgaaaagaggtgatgatccggttgtgcttgaaggggagaggccaaagcccaggacattctgcctttttaggggatttacctttcaagccctatttggtctccactagcctttgcttctgaggatgaaggagttgagcctctgttacatggatgtctacagagatcataccccttgccctgaacgaccgagagactgatagctctagggccagcacctgagaagcctgtagcctgcctgccagtggactcctgtatccggagtagacagccctcctgacccccctgctggctgcctgcctctagtgtctttgattcctgcagctggccaggccttccttgcaaatgacgctgagattcagcagtttgtgcacagatcagattggctgcttgagtctttggcatcctgagccatctcccttgggccttcagaagggctatgtcatcctcggtgggcatggcctggatcctgtgacctctccatgggtgtccagtctcaccctgccttcaatcactcactcagcctttccggctttttggggacaagccccgatccaccagacacgtctattacctgtgtgtttcttttagcagtgttcaaagaaagagatctatttccattttttctcccataacttgacctctaactcattcatcataatataagcttgacgggtagacatgcccgtaaatgtgtgtccaaatgcttactgtgggaaagaggtctgcctcctgctaagctgatttcctggtgagctctgggaaattcttcctgactaatgggttgtttcagcattgcagtcttgctctttctgtggatccagattcggaaaagattgtgccttttggtgaaactcctgaatctacaggagataatcgaaaaggctgaaggtctgtgcagatggctggtgctgctgctcaagcagaaagagaaacttctttgtggcttgtgtctgttcccaacacaggagagacttggggtgtccagtcagctgtggtgctcctactttggattctcattgaagctgaggcttcctctttaaggacacacctgccaggccagcatgctcatggtccttgtcctcctggcacattctttggtacagaggttaagatcctgatgatgtgagagtgtgcctcctagagttggtcctgttgacacatggcccctgagtgccacggaggtttggagatctcttttgtatgcagggcctggatgagctggtgcattgccacccttgatgcctgacttgggcagcccacagagggatcccagggaccataagatgtgtatggtagaggaagaactggtacaactgaccctttgctggtgaatggattgaaggcaggaagaagataggttcttcttggatagatgtacaggtggccttgctgcagctgaacagtcaggtgaagcctctcacttaggcctagtgctggagaatttacaggcccacttctgctctagcctgcacgactgatcctttgatctgacaccagatctgaattctggactctggaatgcctgtctgttttaccagtttctctttggtggtgatgctaggaaagcaatttttctcaaaggcttggatgtggacactagtctggtatctaataattgctgcccactttttcctgacttcttgggagaggcattcatgagtccaaagctgaggtcaaaatcacttctgtcttatctgacattatctctcaaagcaaatctggattctagcctccagaatgcccatttcttgggccagtttttcactggtaaatctgcaagggtacaggttccatttaaaccatgctggttgggtatccttttgacttggcataaaatacttctccttcattatgattcacttgggtgaaagccaacagaaagtctggaaagatccactgtgaaaagatttcatctggactccacagacaccgctggccagctctcacttgcacaggatttccgcacaccgagccagccccagcccttgcttcaatattttcccactccagctcattaaacattttagttttttgttatatatttaagacactgaagaaagcataggaaaccagcaaaaattgaattttgctggaatttaagtttgagagcagcccgcaagaggaacacattgggtgggtagacatgttgtgctttttaatttttttcctgtaagatagtcaacaataattaatttgaacaagaaaaaaatggttgtcatacatatataaaagtaaagtctagaaaaataaaaagtttttgttttgacctaattcagattatataaaaatagaaatcacagtatttgtttttacatattttgaaaattaaataaccttgaaatgataaagtgcagaaaataatgtgaataataatgttgagttttctagtccctcttctgatccttcatcctggtagcttatatcctgttttgctgcataataaataattttattctcacctttgggaaatacc

SEQ ID NO: 1434 - DNA, 2890 bp, Homo sapiens
gctggggtcgtcgtccgggccgggtgggctgcggcgcgcggcaggcgctctggcctggcctggccgccgctgagcagtcggggccggtgggtggcctcgaacgccgggacagaccgacagacggactggccggcggtcccgcgcccccgagcggagcgggcgggacggaaacgtccgggcaagttggggtcggcagggttggaagcccagcgaggctagaggccagtcccaaagtctccaggcatcagggctgcagcccaggagcctcaaggcggcccggcgggcgactggacggccggacaggtcccgagcagccccgcccaacatggacccagacccccaggcgggcgtgcaggtgggcatgcgggtggtgcgcggcgtggactggaagtggggccagcaggacggcggcgagggcggcgtgggcacggtggtggagcttggccgccacggcagcccctcgacacccgaccgcacagtggtcgtgcagtgggaccagggcacgcgcaccaactaccgcgccggctaccagggcgcgcacgacctgctgctgtacgacaacgcccagatcggcgtccggcaccccaacatcatctgtgactgctgcaagaagcacgggctgcgggggatgcgctggaagtgccgtgtgtgcctggactacgacctctgcacgcagtgctacatgcacaacaagcatgagctcgcccacgccttcgaccgctacgagaccgctcactcgcgccctgtcacactgagtccccgccagggcctcccgaggatcccactaaggggcatcttccagggagcgaaggtggtgcgaggccccgactgggagtggggctcacaggatggcaagccggcggagctgcagcgcagggtgagtgctgacagccagcccttccagcacggggacaaggtcaagtgtctgctggacactgatgtcctgcgggagatgcaggaaggccacggcggctggaaccccaggatggcggagtttatcggacagacgggcaccgtgcatcgtatcacggaccgcggggacgtgcgcgtgcagttcaaccacgagacgcgctggaccttccaccccggggcgctcaccaagcaccactccttctgggtgggcgacgtggtccgggtcatcggcgaccttgacacagtgaagcggctgcaggctgggcatggcgagtggacggacgacatggcccctgccctgggccgcgtcgggaaggtggtgaaagtgtttggagacgggaacctgcgtgtagcagtcgctggtcagcggtggaccttcagcccctcctgcctggtggcctaccggcccgaggaggatgccaacctggacgtggccgagcgcgcccgggagaacaaaagctcactgagcgtggccctggacaagcttcgggcccagaagagtgacccagagcacccgggaaggctggtggtggaggtggcgctgggtaacgcagcccgggctctggacctgctgcggaggcgcccagagcaggtggacaccaagaaccaaggcaggaccgctctgcaagtggctgcctacctgggccaggtggagttgatacggctgctgctacaagccagggcgggcgtggacctgccggacgacgagggcaacacggcactgcactacgcggccctggggaaccagcccgaggccaccagggtgctcctgagtgctgggtgccgggcggacgccatcaacagcacccagagcacagcactgcacgtggccgtgcagaggggcttcctggaggtggtgcgggccctgtgtgagcgcggctgtgacgtcaacctgcccgacgcccactcggacacgcccctgcactccgccatctcggcgggcactggagccagcggcattgtcgaggtcctcacggaggtgccaaacatcgatgttaccgccaccaacagccagggtttcaccctgctgcaccatgcctccctcaagggtcacgcgctagctgtgagaaagattctggctcgggcgcggcagctggtggacgccaagaaggaggacggcttcacggcgctgcatctggctgccctcaacaaccaccgcgaggtggcccagatcctcatccgggagggccgctgtgacgtgaacgtgcgcaaccggaagctgcagtccccgctgcatctcgccgtgcaacaggcccacgtggggctggtgccgctactggtggacgctgggtgcagtgtcaacgccgaggacgaggagggggacacagccctgcacgtggcgctgcagcgtcatcagctgctgcccctggtggctgatggggccgggggggacccagggcccttgcagctgctgtccaggctacaggcctcgggcctccccggcagcgcggagctgacggtgggcgcggcggtcgcctgcttcctggcgctggagggcgccgacgtgagctacaccaaccaccgcggtcggagcccgctggacctggccgccgagggtcgcgtgctcaaggcccttcagggctgcgcccagcgcttccgagtgcgcgcgcaggatgaagaagtgcatcaggtgccaggtggtcgtcagcaagaaactgcgcccagacggctctgaggtggcgagcgccgcccccgcccccggcccgccgcgccagctggtggaggagctgcagagccgctaccggcagatggaggaacgcatcacctgccccatctgcatcgacagccacatccgcctcgtgttccagtgcggccacggcgcatgcgccccctgcggctccgcgctcagcgcctgccccatctgccgccagcccatccgcgaccgcatccagatcttcgtgtgagccgcgccgtccgccgcgcccgagctgccttcgcgtgcccccgccctgtgttttataaaaagaaagattctcgg

SEQ ID NO: 1435 - DNA, 4007 bp, Homo sapiens
tgacaccttccctccccgtccgggctctctgcagcaattcatcccgtcactctcccaacgaccccgggcacacctccggcagatgcgaaatatgctgctcctcaggaggaaagatgacccggaggaccgcgggaggaccttcccactcgcgatcttcccagtgccccaaagccagggaccccactgccgcctaccccagcccgcggcaccgaacttgctcacaactgtgactcctcaggtcggattggacaccaccggaaacggaaattcaccgtcgcgccgactctccggagggaaacaaaaaggcagaaaaaagagaccggcgcctggacgactttcaggggagagctggaagaaagactgtcaacagctgagtgcgggcgccggcgccgtctacgcagtgcgttccaccgggtccgtatccctcccgattccgccccaccccgccctcggaactcgctgcctcaactcctgcggtgggactccggagcagcgtacaccgcccttgccttagtcctccccaaggccagggcagctgtgcggcctggcgcgggttacttggtgtggtgcaaaaagccagaaggagacacatttggtcctggccaccccggagtcacccaaaccaaaaggtaaaaggaacataaaaaagccttctggaaagtgtaaaaaaattcattgcacagtgatttttgtcttgtgaaatcatagttactgttattagcagttttttaaacgttttatattcattttttatggtgttctgacatatgagctgcttcaagtgtttttggacatagcttgggtgtaaaatgtaaaaagtggatattttcaatttgtagctttcttttttgaaacttactgaagtttgttctaaatatatccccttctttctcacctaccccaacacatttttaaaaaaaacaccaccaaatatccattacagcattgatgtgagtgtagatgaagtaaaaactttggcttccctgatgacatacaagtgtgcagtggttggtaagtgatcgcctttcttgctacctaatgagaactctggggaaatatgtttactcacatggttactgttaagatgctatagaaatataccttatcagaactgatttttttttaagttgtcctctttaagacctgcatcatttttcaattagtctaaattaatatatagcctttttttatgtgagggattttttttataggagcttattgaattttaggtctagatctttgttttcaattcctcaacatattctataaataagaccaaattatagtagaaggatagtaaataagctattatcttttagaagttgtaaagagcactgattaactctatattagagaccccgcccctgccttggctgcgcgggcccccgccaaagggcccatggtcggcgcagccgagctggcgagggcagcgcgggtcccccggaacgccccccgaggcgagcgctaacgaggtccggcaccatgtgctaggtcactcccagtgcaaggccacacttgggccatccgagcaacccctcctcacgtcaggggtcaccctccccaccacccattgcagagttcatctggctggccacacgcagccaaatggaggccactgagccacaggatatggtggtctatgaccagagcacacgggacgccagtgtgctggccgcagaccgcttcctctccatcctgctgagcaagctggacagctgcttcgacagcgtggccatcctcacggggggcttcgccaccttctcctcctgcttccccagcctctgccagggcaagcctgctgccctgctacccatgagcctctcccagccctgcctgcccgtgcctagcgtgagcctgaccctcatcctgcctcacctctacctgggctcgcagaaagacgttctgaacaaggatctgacgacacagaatggaataagctacgtcctcaatgccagcaactccacgttcgaagcttgtgaccctcagaggacaggcactgtggctgtggcccaggtgctggcctacctggaggctgtgacaggccagggcccccaggatgcacgcctccaaacattggccaacagcctggaccccaatggggagggccctaaggccactgtggacttggacactttcctggttgtcatgcgtgactggattgctgcctgtcaactacatgggggattagagctggaagaggagaccgccttccagggagccctgacctcccagcaactgccatctggatgcccagaagctgaggagccagccaacctggagagcttcggaggcgaagaccccagacccgagctacaagccacagctgacctgctgagcagcctggaggacctggagctcagcaaccgacgtctggttggggagaatgccaaactgcagcggagcatggagacagctgaggaggggtcagcacgccttggggaggagatcttggctctgcgtaagcagcttcacagcacccagcaggccctgcagtttgccaaggccatggatgaggagctggaggacctgaagactctggccaggagcctggaggaacagaatcgcagccttctggcccaagcccggcaggcggaaaaggagcagcagcatctggtggctgagatggagactctgcaggaggagaacgggaagctgcttgccgagcgggatggagtgaaaaagagaagtcaggagctggccatggagaaggacactttgaagcggcagctctttgagtgtgaacacctcatttgccaaagagacaccatcctctctgagcgcactcgcgatgtggagagcctggcccagaccctggaagaatacagagtgacgacgcaggaactgaggctggagatttcacgcctggaggagcagctgagtcagacctatgaggggcccgatgagctacctgaaggggcccagctgagaagagtgggctggaccgagctgctacccccatcgctgggcttggagatcgaggccattcgacaggaagtggcaactgctgatctctccaaccctctgtgtggggtgtggcagtgggaggaagtcatccatgagaccagtgaggaaactgagtttccatctgaagccccagctgggggacagagaaacttccagggagagccagcgcaccctgaagaaggaaggaaggagccatccatgtggttgaccagaagagaggaagaggaggatgcagagagccaggtcacggctgatctccctgtccctctaggagcccctcgccctggagacatcccagaaaaccctccagagagacctgcgcggcgggaactccagcaagccctggtgcctgtgatgaaaaagctggtcccagtcaggaggagggcctggggccagctctgcctgcccccacagcggctcagagtcactcgacatccactgatcccagctcctgtcctgggcctgctgctgctgctgctgctctctgtcctgctgcttggcccgtccccacctcccacctggccccacctccagctctgctacctccagccccctccagtgtgagaggctctacttgcccctcagagcagtgtctagctcaataaatcccctggccctctctccactgggatccccattgttagtccactgttgcgcaggcttaccctagatagagtacaggggatccacatccctgtatttttatgtgaattctcctagttttttaatgctgacatttcttaacaatagcaaaactcccccagtaatggattaagcactaaggattattccctcacaaaacaagcctggcgagggcagctgtgggcacacagctaagtctcggttgccttggggtcagggcctcagtgattctcctgtcccctccctcatgctcaggagttggcagttgtagcttcctacatcacatctgcgggaaacggaaatttcttccttcctttttataaagagaggcagtagcctcagtgtgcagtgggtagattcaaatcatattcataataaaagagaagcagttgcctgcccag

SEQ ID NO: 1436 - DNA, 3825 bp, Homo sapiens
aagttaaagcataccaccagagaaaattaccttcattaaaagaatacaggaaagaaggaaagaaggataataagactacaaagcaaccagaaaacaagtaaccaaacggcaggagtgagtccctacttatcaacaacagtgattgtaaattgaccatactctccaatcaaaagacacagagtggctgaatggttgaaaaaacaagatccaatcatctgtttcctacaagaaacacacttcatctttaaaggtacatgtagactaaaaataaaaggatggcaaaagatattccatgccaatggaaaacccaaaaaagagcaggaatagctatacttatatcagacaaagtagagttcaagacaaaaatggtaagaacagacaaagaaggtcattatgtaatgatacaggggtcaattcagcaagaggatataatgattgtaaatatagatacacccaacactggaacattcagatatataaaacaaatattattagagctaaaaagagaaatagagctcaatacaataatagctggagacttcaacatctcgctttcagcactggacagatctcccagacagaaaatcaacaaatattggacataatctgcactatagaacaaatagatatttacaggatctaatagatatttacagaacatttcacccaacagctacagaatatacatttttctcttcagcacatggattattctctaggatagaacatatgttaggtcacagaacaagtcttaaaagattcgaaaaaattgaaataacaccaagcatgttccctgaccagaatggaataaaactagtatgtcaacaacgaaaggaattttggaaaccatacaaacacatggaaattaaacaatgtgctcctgaattaccagtggctcgaggaagaaattaagaaggaaattgaaacctttcttgaaataaaagataatggaaacacaacatactaaaatctatgggcacagtgaaagcagtactaagagggaaatttatacctatgtgcctagttcaaaaagaagaaaaactttaaataaatagcataatgatgcatcttaaagaactagaaaagcaagagaaaactgaaccccaaattagtagaagaaaaaaattataaagatcagagcagaaataaatgaatttgaaaagaaaaaataaaaaatattaatggaaacaaaaagtggtttttttttgaaaagatgaacaaatttgacaaagctttagccagattaactaagaaaaaaagagagaaagctcaaataaataaaaccagagatgaaaaaggagacattacaactgatactgcagaaattcagaggctcattagaggctactatgagccactatatgaattggaaaatctagaagaaatggataaattcctaggcacataaaacctaccaagactgaaccatgaagaaatacaaaacctgaacacatcaataacaaataacaagattgaagccctaataaaaagtctcccagtaaagtcaagtccatcatctgatagcttcatggctgaattctgccaaacatttaaagaactaatacagtcctactaaaactgtttcaaaaaataaaggaagagagaatacttccaaactcattatatgaggccagtactaccctgataccaaaaccagacaaagatacattaaaaaaagaaaactacaggctaatatcactgaagaatattgatgtaaaaatcctcaaaaaaatactagcaaaccaaattcatcatgaccaaggggtatttatcccagggatggcaggatggttcaagatatgcaaatcaatcatcagattgatatatcatatcaacagaatgaggaacaaaaaacatatgatcattttaattgatgctaaaaaagcatttcataaagttcaacatcccttcctcaaaaacctgggtagagagggaacatacttgaacataataaaagccatatacaacagacccacagctagtattgcactcaatgggaaaaaccgacagcctttcctctaagatctaaaaaaagacaaggatgttcactttcatcactgttattcaacgtagtactgaaagtcctaactaaagaaattagacaagggaaagaaagaaagtgcatcgaaactggaaaggaagaagtcacattatcctggtttgcagatgatacgctcttatatttggaaaaacctgaagattccatctaaaaattattagaactgataagaaaattcaggaaagtttcaggatgtaaaatcaacacacagaaatcagtagcatgtctatatgccaacagcaaaaaaagaaaggaatcagaaaaagaaatcaagaaagtaatcccatgtacaatagctaaaattaagatacctaggaataaacttaaccaaagaaatgaaagatgtctgcaatgaaaactttaaaaagctaatgaaataaattgaggaggacaccaaaaaaaatgaaaagatattctatgttcatggattagaagaatcaatattttaaaaatgcccatactacccaaagcaacctacagatttaatgcaatccctatcaacataccaatggcattcttcatggaaacaggataactaatcataaaatttatatggaatcaaaaaagacccagaatagtcaaagttatcctaagccaaaagaacaaaacttgagaaatcacattacctgacttcagataataccacagataataactacagagctgtggtaaccaaaacagcatggtttttgccataaaagcggatacacagattgatggaacagtatagagaacacaggaagaaattcacacacctacagtgaactcattttcaacaaagttaccaagaacttatcttggggaaaggacagtatcttcaataaatggagctaggaaaactggatatccatatgcagaagaataaaaatagacccctatgtctcaccatatacaaaagtaaaatcaaaatggattaaagacttaaatctaagacctcaaactatgaaactaccacaagaaaacatgggggaaactctccaggacattggtttgagcaaaaaatttcttgagtaataccccacaggcataggcaaccaaagcaaaaatggacatatgggatcacatcaagttaaaaagcttctgcacaacaaaggatactgtcaacgaagtgaagggacaacccacagaatgagaaaaaatatttgcaagctatctatctgacaatggattcataactataggtaaaaatctagtaatctgatcaagaaatgggcaaaagatttgaacatttctcaaaagaagacatacatatggcaaagaggcatatgaaaaagtactccacatcattgatcttcagagaagtgcaaatcaaaactacaatgagatattatctcaccccagttacaatggcttctatccaaaagtcagacaataacaaatgctggagaggatgtggagaagaaggaacctttgtacactgttggcaggaatgtaaattagtacaaccagtatggaggagagttgtaggctctactgtcctaacctgcaatcccagtttcttctaattgcttttcttgtagttctaggatgctgccaagatcattcagaggtgggatgaccacacagcctggacatgagtcattgcttccccctattcgctaagttctattcttgagtcaaacctttgactttatcacttgaaagtaactttagaattacaatttcactttatgtctttgcctttaacaagaaggaagtctagcatttttaaagtaactatcattgaagagcccccatggagccctgaaagtggacctggttctggt

SEQ ID NO: 1437 - DNA, 3477 bp, Homo sapiens
attgagccaaaagtattgaaaataattgctatagttttctaatgcccaagttttttttgtttgtttgagacggagtttcgttcttgttgcccaggctgaagtgcaatggcccgatctcggctcactgcaacctccgcctcctgggttcaagcgattctcctgcctcagcctcctgagtagctgggattacaggcatgcaccactatgcccagctaatttttctatttttagtagagatggggtttctccatgttggccaggctagtctcgaactcccaacctcaggtgatcagcccgccccggccccccaaggttctgggattacaggtgtgagccaccacgcccaggtttttttttttttttttttagatggagtttccctcttgttgcccaggctggagtgcagtggcacaatcttgactcaccgcaacctccagcctctgcctcccgggttcaagcagttgtcctgcctcagcctcccaagtagctgggattataggcgtgcactgccacacctggctatttttttttttttttttaaagtagcgacggaatttctccatgttggttaggctgaactcctgacctcaggtaattcgccctcctcagcttcccaaaatactggaattacaggtgtgagccactgtacctggcctctaatacccaagtttttaaggaacaatatttccaattttgggggggcacacacatctaatttttaaaatcttcccagttagggaatggatatttaaacttttctgttgtaatttcaaaaacagtgtgtttagtagtatgtagtagaataaatacattgtactagtaatcagattctggctcatttttcttttatcagatcactgaactcttgtgctgtagttccccaactgaaaatgaaaatactggatgtgttagtttctgaggttcttgttataaaagtgtagttattctaggttttattggcatttctctaatgctgataaaagattaagataattttgcttgtaatactattcatataaaaatagaattcatttcaatataaaatgagttagacttggattctaaaggggcttagtcagtgaatgactaaaacaacctttatataagatggtctcatgtagcaatcaatttcaagatccattctctaggaggctggggaggggcgggggagggaaacaaccaccaaaaaataacattgtctgacaactttgagctaaaatccaggatcttaatttgagattaatgtaagaaatctgtcaggtatttttaaaaagtaactcatcactatttaggagttgactttttctgttgtagctttcattgaaggactattgttttagtcattctctcctaaattccttttcctgagactaaaagattgagctcatacctttgcataacgatctggagagtattttaaacttggcatgttcaaacctggcagactcgattaatatgtggacaaactagcacattagaacattttttaagttccaagccataaatgttttaaatgaacatgggcatgtataaaattaatacttaagccttcaaatagcacagactttcaaaatgcctgttgccttgggtgactgattttcagtgaggctctcgcttaccctacacatttcttcctctgcgtgaagcagtgccaggcacagagtcaggagagggtttgctcctttggcgctctactaccctctgctttcggcagagaaaaggctgctgttttacttcttaaactcctaccatatggaaagcttctaaaaataaactttggatttgtattggacttctaaatttgtaaccttctttatccatgactaaagccaatgtaaatacctttagctactctacatacaaagctgtggcaccgttttagtaagaaaggtcaccaaccataatatttaaattatcaactgaattagtttacctttcatttatgtcttagttggcatggataaggacctggttgtgttgtcaagcaaaaactagttggtggtttttagtgaatccactttaattttttgttcatgaattgttggtgtaattacgtagcagacgtattcgtgagaatgtagaagtacactagcttttgacacaacagattgtttaaatggatcgttattcactttgtaaattctggtcagttgggccttctatcagcaagtatataatgagcacctgttacttgccaggcactgctaggtcttgcgagatacaaagttgtataaaagatgattcttgttcagacaagtaagagagaaaggaagaagaaaacctggggacaaccaaatgttttaactgtgttaacagagaaatagatgctatgagagcatgagagcatggaggagagatgagtagagtaatagttggctttttttttttgagacagagtctcactctgttgcctaggctgctggagtgcagtggtgtgatctcggctcattgcaacctccacctcccaggttcaagtgattctcatgcctcagcctcccgagtagctgggattacaggtgtgtaccaccactccgagctatttttttgttgttgttgtttttgagatggagtctcgctctgttacccaggctagagtgcagcagtgtgatcttggctcactgcagcttctgcctctcgggttcaaggattcttgtgcgtcatcctccgagtacctgggactacaggtacgtgccaccacgcccagctaatttttgtattttgtatttagtacggacagggtttcaccatgttggccaggctgttcttgaactcctgacctcaagtgatccgcccgccttggcctcccaaagtgctgggattacaggcgtgagtcactgcgcccagcctaatttttgcatttttagtagagatggggccaggctggtcttgaactcctggcctcaagtgatcctcccaccctggcctcccgaagtgctggccttttcataggtgttcagtttgagggtatatgtaaccatatctgttgaggtggactgcttaaaaaccacaattcatttatttaattgggaattgtttctctcccctccttttttgataacagtcaaacctctaaatttattttcttttatctttctttcttcttccaactgagctacggcactcagcctcagttgtatcttaaataataaaaattatttacaacagaggctatttttttttgagtgccaggattaatgttacccgccagggaaaagagaacattctaggtagtaggagaaacagtagaactatcaaagacagtatgttctaggaggaagtttggtgtgggtaatggggaggaggagggacattagtggccagagagcaaaggcttgtgagactgggtgggatcagattatgaaaggcttcagggccagggagatgggagaattatgtgatcccaggaggttgaggctgcagtgagctgtgatcatgccactgcactctagcctgggcaacagagtgagaccttatctc

SEQ ID NO: 1438 - DNA, 3684 bp, Homo sapiens
tgtcttttccttcaagaagtcccacccagtgggggatagtgacctcactctttgtttacttcctgtggcaaacctggtggtaagggaggccagcttggggaggggagcccgggagcaggggtgcaaatggaggcccacacgctacatgtctatttaaaacatatacattaagctaactagtttttataaatgcataaaatatgttctgtcctcctacttggataaatatacctggaaggtcagtttctaatttagaattcccacagttcttaaccgcattccagctgacacctttggaacccccattctgtaagttcagcttctgttcatgaccctccagatgcctgtcctttggccacccctaggatccaagggtgcacagtcagtggcacagtctacccttgggaaaacagacccagggaagaggcttatgcaagcctcattaaatccagaaaatggatttggggtcatttgggcaaggattacctgggtcccagctacttggagtgtggtctggaactgggaggggcaggatgcaggctctaattaagccacttccggaacccacaggctgcttgcccggtggtaggggcagctggagggtggccagagtgcagccccccagagcaggggcccagggaagtcctgggaggaggcagccttgagttggaaggcagacagcaatcacctgtgtggaggaggaactaggacactcttctcggcagacagcagcatgtgcagagacccagagtctagaaaaaacagatctggagaacagcaaggaggtgtaaatggtataaatggccaaggtgcagtgcttcttggggactgccaggtgacaggcacagaaggaagcaagggtacattgtgaagggctttgatgccactttagagcactggttcctgtcctaaagcctgtggagcagtgctgaggattctaagcacaggagtgacagcataagatagctcatttacaaagaccaccccggcagatggattagatccagtagctcagttaggtgggtatggaagtctatgtgaggaatctaggagatctcagtaaaataattcagtgacagaggatgctcaggaaagaaaaggtgactgaggaggaacaagaagtccaggcctagaagcagcaccatccactagaatttgctgcagcgaaggagggcttctgtggctgcactgtctagcgtgggagccatgagactgtgtggctgtcgagcatttagaaggtgaccagtgagactgtgggactgaattttaaacctcatttaaatcgaaatagccacaagtggctagtggctatcacgttagtgcagctctagagcaatttccaggtttctggcttggacagcttatgcggtcatgaggacttccacaaggacagcagtcccaggtggggctggttttatatgtgttgagttggggtactttggaacagccacccagcctggcctccccttgggcatcttgctcccgtgtggcctgctgcagcgacagcccaggctgtggcactgcagggactgcctctcagacctcatcggatccacctgggcatggcagacggctgggcttcaaagcaggttcatctgactgctccttccctctagggtgaagactctacggtaaaaggaatttgatgccttggaaagggagagcggaaactgtgagccctgctttccagccatggcgaaagcgggtacttttgtgcaacccctctcctttcacgttggcctggctagggcggagctgccacgccagtgaccagcgtttctttgggaaaattggacttactccacttccaccttttccactcttcaaatgatcacatttgcatattgggaacagtgtatttgtgaagagactctcaggccttccagggaccaccccccccaccacccgctacagcccaggtcctggttctgtcctccccagatgctgctagagaaactgaacggcacagtgccctgcctgttggataccagcaccatccccgctgaggagctgaccatgagcccttcgcgctcagtggccaactctggcctgagtgacagcctgaccaccagcaccccccggccctccaacggtgactcgccctcccacccctaccaccgaaccttctccccccacttccaccactttgtggagcagtgccttcagcgcaacccggatgccaggtatccctgctggcctgggcctgggcttcgggagagcagagggtgctcaggagggtaaggccagggtgtgaagggacttacctcccaaaggttctgcaggggaatctggagctacacacaggagggatcagctcctgggtgtgtcagaggccagcctggggagctctggccactgcttcccatgagctgagggagagggagaggggacccgaggctgaggcataagtggcaggatttcgggaagctggggacacggcagtgatgctgcggtctctcctcccctttccctccaggcccagtgccagcaccctcctgaaccactctttcttcaagcaggtatcgtagccccttcgttctggttctggttctagttctggttctaacaactcacaatccctttagctttctctcccctccctttgaatgagagaaactaccccgcttccgaagcccctgaaagacactgctccttcctctcatggagttggctccgacagcccgtctgccaccaggccatggttccttgccccatggtgtcctgggacccagagcaacaggatctgtcacccacctctctcttctcccccagatcaagcgacgtgcctcagaggctttgcccgaattgcttcgtcctgtcacccccatcaccaattttgagggcagccagtctcaggaccacagtggaatctttggcctggtaacaaacctggaagagctggaggtggacgattgggagttctgagcctctgcaaactgtgcgcattctccagccagggatgcagaggccacccagaggcccttcctgagggccggccacattcccgccctcctgggcagattgggtagaaaggacattcttccaggaaagttgactgctgactgattgggaaagaaaatcctggagagatacttcactgctccaaggcttttgagacacaagggaatctcaacaaccagggatcaggagggtccaaagccgacattcccagtcctgtgagctcaggtgacctcctccgcagaagagagatgctgctctggccctgggagctgaattccaagcccagggtttggctccttaaacccgaggaccgccacctcttcccagtgcttgcgaccagcctcattctatttaactttgctctcagatgcctcagatgctataggtcagtgaaagggcaagtagtaagctgcctgcctcccttccctcagacctctccctcataattccagagaagggcatttctgtctttttaagcacagactaaggctggaacagtccatccttatccctcttctggcttgggccctgacacctaagtctttcccacggtttatgtgtgtgcctcattcctttcccaccaagaatccatcttagcgcctcctgccagctgccctggtgctttctccaagggccatcagtgtcttgcctagcttgagggcttaagtccttatgctgtgttagtttcgttgtcagaacaaattaaaattttcagagacgctg

SEQ ID NO: 1439 - DNA, 3143 bp, Homo sapiens
acttcaccctccgagtggccgctgtgcaggctgggtggtcagagaagcagagggctgaggcccagaatgggtttgcatgttctgtttctgcagaaagtgaggcagcaccccatccttcccaaccccaatacctagaatgggggccagagtagggagggaatgtgtggatctgcttctgagatgggtctcaccccagcccccaaagcctggacctgagtccccaggagacaggggctacaggggaatctcaccagggaatggccccttgtgggggccccacagcaggggctgggggcaaagtctccccttctaccagacacaagcacaggcacactcctgggggctgcctggcccaggcccaggtcatgccgagcacagggtgctgctggtggccacgcctctgcttagcttctgaggtgggggcagtgggctgtgcctcctcaaggactgaggtgagtggggacacagggccaggtcagaagcacatccagacacacagctgcttcagtaacgaaacccacagtcagccaggaagtaaacaaattacaggctgcactttgttagctctggggaacatgaacgtgagcagacactactgatttctcatcaaacaaacagaaggcggcgtcataatccagagacccactgccaggaggggctgcagcatgtgccctgggctgctgatctgctggggtgcacctgtctttgggggccttacaccattcgtccataattctagcctctgctcagtggtggatttgttttccctcttacaagctgggctgggtaaggctaaagcctcctgcaaggcagtggctcaggtgtccttaggagacataccaggtccaggcccaggctgaacttcctgacaaccttaagaaggcaaaggccaggctcagagaagtccaacagctcacccgaagctgctctggatttgctggaggcagagaagcagtgcctccctccctgcgtgagtcaaggctgacgtggacagtgagacctccgtccccactgcgagcagcggggggcatgccaaggtcctatctgcctgactagggagcctcacccagctgttgctggctgcttggtggggactcaggctgcaagctgctgagaatattatttagcagcagcaggaataataatacaataataatattaatgatagtaacaatagtaatgatgacagtgataatagcatttatagaacaccatacgtgaagagccttacatgcatattgtcatttagtccttactggaaccctatgaggctggtaccattatttatccccatttcacagaagggaaaactggagcttagagcagtcaaggttactagactagtaactttccaaggttctagttagtaagtggcagaccccaggctcatgcccttccctaggaagctgtgccgcctccttccctcaggtaggggaggtgtgcgtgtgttttgtgtgtttgtacacatcgggcttggacccctgcggggctggtgctgccctgctccctcgtgtagggggttctgagaagcactgggccctgcctatttgcgggctactgactcaaccacgagcagcaagtgtttcctgggagataatgaggggccattcatctctggttgcacccacaattacccaaattgctaaccttattgtgaaaagtagaaatgcaattgagttggtgctggaggcatgtttgagggagaggaagaccactcaaagtaatttaattaactgatggcaagtacattaagtggagttttgcctctgcttttatttctgatgtctttcagtggagcgccaagtaatgcacatgaaatgctcccacagacacaggtggagctgtcccagtactgatcaatctttcctggccaaacatgtttaaaagctggcactgcaccttgtgagcaggtacagtagaggacatcacactcacaaacatgcaccccaacacagtccagtctttacagataggacactgctctttcttgctaagttctcagacaagccctggccatcgcaggcccagaaaatgaagggttctgcccatccagcatctgtccagcaagcacccaccaggattgtgctgcattgacattcaaaattgtataggatactggctatgttcaccatggtgggaaatcacaagaaaacaatcctgtccagtgtgacaaggctaggggaagggcactccttggcagctctgcccagggtagaacctccagagtggccccctctttccatctgcttcccccatgacccccagggtgtagctgaaggggcctagagagtaggagaggactaactttggtggttcctgcagcatttcatgctgggtctctctccccacaagtctcagagttggaagggacctccaaggtcactgggtttagctgccctcttgtggctagcagcattgctgaccacagtccctgcctgagcttgcatatgccccttgggataaggagctcagcgcctcctgtggcggctctgtctccatggtggggcaggtttgatggctggaatggggttccatctaaggagcccaaattgatctccttttgaggtgcaccttgtgctagtccaactcagggggtcacacagcccaggtcagctccctttgccccagcccctaccccaccaccttcgagatgttagcaggaactgaccattcatcccatgggtctttcttttctgggcaagcatcccactgtggaccagctgtcctgtcctgagccaacaaggctaaggctgccctctcttctgcatgaaaattatattccagttactgtaacctaagacccgtcagctgtcctggcagctcactacatgggtgacatcactctgtcttctcacatgaacttctgggaagccacatcacctcttgtgccaaacctggaccaataaatatccttgaattatgccacttctttaagtctaatagaagggaagtattgctaacgtttttcttatagattaattcattgaggatcggcaggttaagaaattactcaaagtcacaaagctgacgtgggtgatgctgggaccccaacggaggctgcctggttcctcagggcacagacgtaccccctgatggccacactaggctgcatgagctcagttgctttcttcttccacacagct

SEQ ID NO: 1440 - DNA, 4121 bp, Homo sapiens
agtgtgtgtcaaaaatatatgatggaccacatggatgcctccaactgtttaggtatctattattttgcaaagcagattggagctgaagatttatctgatcgatcaaagaaatatttatatcagcactttgccgaggtatcatgatagaggaaaccagttttgggaaaagttatgcacagctgaatttcgagaactctatgctctggatggatcttcctgatgaagaacctgatcgattaagcaacaaactgttgcagtatgaccccagccaagatcaatggagtgtgcgggcacccatgaagtactctaagtaccgattcagtacagctgtagtcaacagtgagatttatgttttgggtggcattggctgtgtaggtcaagacaagggccaggttcgaaaatgccttgacgtggtggagatctacaacccagatggggacttttggcgagagggccctcccatgccaagtcccctcctctcactccgcaccaattccaccaatgcaggggcagtggatgggaaactctatgtctgcgggggattccatggagcagatcgccatgaggttatctccaaagaaatattggaactggacccatgggaaaaccagtggaatgttgtagccatcaacgtcctcatgcatgacagctatgatgtctgcctagtagccaggatgaatccccgagacctcatccccccgccttcagatttggtggaagaaggcaatgagcactaaggtgaccttgctggaggacctcctgctgttctgcaaacaaggccttcagaacggagagggcccacagcatctctgtcatgccagtcatgtgcactgcatgcgtagtggcctgtgtgtgaagaagcagtgtgtgctgggcactgggtggggagcatggggagtctcccttcagggacttcccagcctgatagggtaaataagacactacaaagaagaggtgatgacggccacaggaggggcacagggccacaggagagcagcagagggagggtctcactctgctggggacccatgaacagcactgccaaggagcagaccttttattgggtccccaaaaggatgaggaggaagtggtcccatgggtgcagtcaatgatgagttcatggaaacagccaagcatgggcccagagacagaaagctcgtgcctgtctgcagtatcctggctgggccagattgcctggggcacagggtttgtggtcaaggctggaaaagtaggttgtagctagatgaccaacgcctgaaagaatgaggagttggacctggtctgtaagccagggaattgtctcaaaatcgtgcattaagggagacttctctctgtgctctgttccagcttcagtcttataaacactgaccattctccttcagaatccccttctactgaagcaacgccacccagcagcagggctagctgtactaccagcccctaacaaccaaggcactcaagccagaccacagtggccaagaatcctgccctgggctgactctgtccgggacagggatgtggggttctgcagcctggtccactccggggctggcagggagtgtcctggagtgggctgacccaggctgcctttgcccacctctcagacacatacaaccatctgcagggtagtcctggctgaacaggactcgcccaagccacccaagccagggacagagaaggctctggctgaggacaggggaagaagcatctcctccagctgctgccaaccccatggcccggcctttgcaataaagatggagccacccacttcagcccacaattgagcataatcagaagacagtcactcccaaaatatatgttagaaataacatttaaatgacacatgggaagtccgtctatcttacttcccgtctctaattctggaagcacagtggattcaatgagggcatcttcatagctcttcttcagcaacttctccaaagagtttcacattgcacaaggctcttttggaagcaggagtggtcagtaaattcagagggagacaaaccctaagtagagacagctttctttggtgctgagctgtgtgattgtgatgaccgctagcctgtgcccctaggttccagctgcccaccaggcaggacaggcaggtcttgccaaaactggagcctgttggaaacctatttctgccaccaaggagagggaccaggagacccagcgtaggttggccccaagtaggctcaactcgggagggtgggggtcccgcctttctcttcgcacttgtgccccaagtgcactcacagtacctggcatgtgggtgacctcttgggtggccggcatggggcagtgtttctcaatcagagggcctgggccccgagcacgtccaggaatctgagttaaagtgagcttactctttccccagtggatgatcatgatctgtgcattctttttcttgctacaaagatgttcctcctagctgctgtgttggctgtcggcggccagggttgaggacggcctccacagggcctccacttccctccattcctcttcacatagtcactccacctgctccacctgcttgaaaagtccagaaagctgccgcgtctccctggctcaaggaggccttgttggcatgtcatggcacatctcctagatgttttgggttcaagatctgggttccagcccccgctctgctacttagctaaccatgtgaacttgggcaagatgacctttctaaagcctcatttccctcatatgcagagtgggaaggaaaatattaatacatactttatagggttggtatgaggattaagtgctgagcaaagtgcctgtgaaatcctgaaataataagcatgttttagctgccattattatcatcactgtcattatcattgcagtcagcacttcccaaagcaaggtgcccaaaacagactcagtgctttagggaagtggggcagatgtgcatatggcttgtgacggttctttctttttttttttttttttgagacggagtctctctctctcgccaggctggagtgcagtgcagtggcacgatctcagcccactgcaacctccgcctcccaggttcaagtgattctcctgcctcagcctcccaagtagctgggattacaggcgcccaccaccacacccagctaatttttgtatttttagtagagacggggtttcaccatgttggccaggatggtctcaatctcttgacctcgtgatctgcccgcctcggcctcccaaagtgctgggattacaggcatgagcccctgcacctggctgagatggttcttaatttcccataccctgttgcttggctcctccagttggcggctgagagttaagcaagggtttactcggatctgaggcccccgatgccctcaatggacacattcaggaccctgtggcagctcagcagaggcacctgagggtcacgctaggtgagaccatcgcccgcctgtgggaggcaagataagtgggtaaacatcattcctgtctaatgcgaggtctgggcagtgtcccagtggaactttccagagagtgccaagggaggaccgagaaggggcatgacctctgctggagccaggagggcagtgaccaggagctggcttagcactgaagggaagcaggcatcaagggcaggatttctcaaacttcttctgaggaatccccgaggtcgaaaccggtgcttcacagatttcagatgtctgatcttgatttttctttgattccatacaacagattgcttgcctgggttagtgcttattttaagttcttggtgcttcttgtctgacttctgtatttgcaattaaaaacaacatgaccctccccacctgcagccagatatcgttagaaattcaacttcgaaatatattcctatcactcctgttttcactttaatagaaggctgttgcagtactgcatgatgggctcttataaaacttctactatctgctaattcttatctttgtgacaggattgtttgacactgagcaaggaaacacaataaggaagtaatttggatgctaggctggcagaagcctgcagctgtcaaccacagcctgccccagtgtgttcaacacggtggcattgttctccctgacttcataatgagcaaatgtttcacatttgaacttaaggaataaatttttactaat

SEQ ID NO: 1441 - DNA, 3384 bp, Homo sapiens
agaagctaagagccagcacttgttcaccatgtgctcatttcctgtctctatgacaggctgccgtgctccagtttgcgaatgcccatccacctgtgaagggctgagccaagccctgggcacgtggcttcatctcctgtgtcagttcaggcaagaggaagagagaggaggaagcttctagatccaagccagaggaggtggatgcagcatctgccgcccacagctttggggcctggcccagcctccacctggccgagacacccaaccccgaccccacccacatgggcgtgcagaagagcctgagatggtgcacactgacccatggcagagttacagttatggaacaatccgaatgactgaatcacagcaccacagtaatgattctgcaacactgaacttgactgtcccaaggaaatcacaactgccatctcaagaaagcctgtctgcagcaaccattccatggtcctcaaagtcgtggccaccggagaggctggtttcaattcgcccccaactccggctggagagagttgaggaggaaggcagcggcctgggctgagtgggaaatgcctgcactggagggttggtggcccccatgctggatggaggcaggaacgggaggctcctggaattgtcctctcttctgccagagaggggaggcgggccgtcactgtgcagaagcccagccagcaccgagaaggaagtgggtgcctgtgggaccctcgcctctctgcggaggggcctgtggaaatgcagcctgtgccctgggccagccctgctcctaggagggtcctgctgcctcatttgctctctctccctccttctcctctccactcccacctttttttctaggaactttgaaccctcgttttcacccagtcccatcgagaagccaagtgctccctcctcaggccagagctcccagctgcagacacaggttcagcccccagctgagcgaggagcggcttccatgccggggcctgcctctctgccgctctccaccggtccttcgcagccgctccgatgctctccacgggtcctttgcagccgcgtcctggccctgaggcggtgacacagaagcccacgtccgtttcctttctgcttgcctgtttgtaggtgggaccaggcttcctgtctgcccatccccagaaggcaaagcctttaggtcccccctctgctgactcaggcacaaaagggttttttctttcttagttttggaatctgagtggaagggcgcatgctgtggatcatattctccttctagtctctcggttgctcacgtgggagtaagtaggagctgtgggaccttgtccttaagccattaaagatgtggtgagttttattgagcctgctgcccaccctgtggtatcttttgctggtttgcttctccacaagcagattccagacaaggatcagtgtctgtggggtggtctcaggaacaccttgttgggagtgggggtgaaacagaagaggcaagaatcccaggctgggagcaggccctgcacgggccactgagctcagcccactggggcgttggggagtgggtgtgcttctgccttcatgacacctggggcctcggggtctggagcgagctcagggaggccccacagagtgtgggggctgcaggctggtcttttcttcgctgaccgctgaggctggggcctcgtcctgcttctgtgctgtgctttgcgttgccagagagaaccccagcgggagtgattcaggaggcgggcgctgccacgtcctgactgcagagaacctcctggagaaacagaagccatgggtcctgatgcccgagccggcgacgactctgagcacactgtgagcagagaacctcctggagaaacagaggccatgggtcctgacgcctgagccagcaacttactctgagcacactgtgaagggcggctgtgaatttttcttctttctcaaacaacgatgcaatcattgggatcacttgtcctcctgggatgggtttgtgtgagactgatgtcttccgaaaaacacagccccaagggagtcgagacgatgtaccaggtagaataaggcacaggggagccgcttgacaaatcagacgacggcagccggcctgcctgcccgggtgatgccagcgagttgtgtttctgagagacgaaggaagccttccttccaggtttccacgtggagcagtgcctctctgcgtggttcctggcagcaggggatgccaggctgcagtggcagaatgttgagctgcatggccggcttccactcatgcgaagccagcagcaaccccctcctcaggggtgacaaccggagtgtcctccagacactgccagatgtcccctggggggaactgtctttggctgagaatcactgctttaggcggatgatgatcgtttaaatggacagtgctgttcctggctccaagcagtcagttccctccctccctgtttacttacaaaacagccgcatccccgggattacgagtgagccagcggaggtgtgaccaaagagatgtcacagttcgcttttctttgtgatcaatacgtggaatgatttaggggcctgtgttaaaattacaaatcttctatagaagattttggcagcaaaatattttaaaagcctacgaaataaacagagatggcacattcagaggctccaaatcacagagcaaggaactgcatccacagtagcttttgccttcctcctctgccgctgttttgactcattgatctttgggtctggtggattttttgtgttggggagagaagagggaagaggcaggagggccattctcatggcaagctgaggtctcaggggccgggctgggagttagggggcgctggggtcccacccaggtggcagggccaggcaggtcatggcacctgctatggtcgtgctgaagtcctggaggcaacaaccattgttacttctaaacgataccaagagggaaagaacacatcccttcaacttttccttaaggagatctgtaaggcaggttggaagaatttgaagtccttctgccttcgcatgaacaaaaatgtgaagggggtttttaaaactcagatttgatctttacagtaaccagatggattttatttcaacatgccagagtttccacatcacgtcaccactgcacttcaacgtgctgttcttgaggctgtttaaagttcagccttggcacctgacatgtcgcatctgttttaactccaggcgtgggggctcctggggaaacgacgacttctgatgcctgaccacccccaggctgacgccctctctcctgcccagggctgaggctggacccagggcacctccttcgaatggcctctctcttcctccctaacacagagcaatcaacagctgtataaaataattgccctaaaatcacaaattaaaagaaaatcagcagcc

SEQ ID NO: 1442 - DNA, 4936 bp, Homo sapiens
tatataaagtctttaggctggacattatgatattggggttcatctcctgattgatgactgtaaagggattcacaaccagctgttagtctttagagcattaacaagtcctccaggacttggcagtaggtcaggagatcgccttgtatctaagcaggggaaaatatttcttcggttaaatatatggattgacctgtgaccacctcaaaaggggaaaagcaattctggtggggatggacttcacaattaccaaacccagaggaagagctttgggccagggcagattgaagctgcttgtaattttagccaattgagttgaatattctcttggttcattccacaagcccaaaagattcggtgtggtaaacaccgctgaaatgtcttagaataggccaaacattagcaactcattttaatacttgtccagtaaaatgagttccctgatcactgtggaacttggtggaaactccataggtagagataattttctcatgaagtactttggctactggcatcactgtggcttgtcttcaggggaaagctttcccccagtaaaactacatatctatcatgacaagaacatatttgtatcactgagaaagggaaaattggataaaatcagtagtccagttttagaaaggcccttttcgcattgggactttgcctagggtagcccttaaggacttccctgcattgtataagggtgaattttgcctaatatattagcttaagaagcaatccccaacagcactgtttacaccattggatcctttggtcagaactctaatggtggggttatatataaaagtaaaagtgacccttggtaaattttctagaaggactgaatgtctgttaggtttagcccatagttgggatctgggattataggtacagccttgttttgtctaattttccttttcaagttctgagcaccttttttgagatgttgtttcaagagatttttagaagaaacaggatgtaaggatggagcctggattaagacaggcataacagaaggggggtattgtttaaggctgcagacttagctgcactctcagctagatgtttgtctttgctattttcggtatgtctaaaggaattgccttgaattttaatcatggccagagtcctaggaacttgaatggcatcaagaaatgacaaaatgtggtctctgtttctgatgagcagtccagaagaggttagaaatcctctgtttccggagaattccaaagtcatgagcaacccaaaaagcgtatctgctatctgtgtaaatgtttgcagttttatctttggccaacaggcaaactcgggtaagagcatggaattctgcctgttgggcagaaggcctgattcaatagtttctgtcagggaaacaactgcaaacctagcttaatagaagccagtagggtctctgaaagaaggcccatcaatctaccagacaaaatcaggattgggtaagggcatttcctttaaattcatatggggtgaaagaagagtgtaaaggtaatgcagtcatagagaatcttctggtgaagacaaaagaggggcagagttaaggagattacaatggaaaataggttgggaaagagaagtatttcataggcagtcaatcgactggctgaaagatactggatttggcgagaagtgagaagggctttaactgagtgaggagcataaacagtgagaggaaatcccattactattttctcggtggcttttataaggacagtgattgtggcaactgcctttaaacatggtggtatccccggatagacacaatccagtttggcaatctagtaaccaattgggtaaattattacccccatgtggttcagttcaaactccctcttgctcatgaacaaaaaggggaaaaagggaggtcataaatagtgtcccaaattgaggggtgtattgggcaaaggacagcttatctttcagagacttaaagtcctgttcaccatcggtagtccaggtaaggaggtcaggagaagaggccttaatcagggtatataaaggttgtgctagtaaagaaaaattagtgttctaagctctgcaatagtccatgagtcctagaaaggccctaagttttgtcttttcatagtgggaatggggaagaaaaatatgccttgaaggcagaaagggttgatgttgagtcccaaggggtcagcagatgtccaagaggtttaattgtcagcaacactgtagtttatctttagaatctttatggcccttaagacatagctggtgaagtaaatggagagtgtcagtgagacaggtatttcataagggagaacataaaagcaaatcaccaatgtattgcagtagagttgagctatgtgagaaggttatgtcttttttaaaaaaattatactttaagttctgggatacatttacagaacatgcaggtttgttacataggtatacatatgccatggtggtttgctgcacccatcaacccatcatctacattaggtatttctcctaatgctatccctaccctagtcccccatctccccaacaggccctggtgtgtaatattcccctccctgtgtccatgtgttctcattgttcaactcccacttatgagtgagaacatgcagtgtttggttttctgttcctgtgttagtttgctgagaatgatggtttccagcttcatccatttccctgcaaaggacatgaactcctcctttttttatggctgtttagtattccatggggtatatatgccacattttctttatccagtctatccagtctatctactggtgggcatttgggttggttccaagtctttgctattgtgaacaatgctgcaataaacatacatatgcatgtggctttatagtagaataatttataatcctttgggtatatacctagtaatgggatctctgggtcaaatggtatttctagttctagatccttgaggaatcgccacactgtcttccacaatggttgaactaatttacactcccaccaacagtgtaaaagcattcctatttctccacatcctctccagcatctgttgtttcctgactttctaatgatcaccattctaactggtgtgagatggtatcttaatgtggttttgatttgcatttctctaatgaccagtgatgatgagctttttttcatatgtttggtggccgcataaatgtcttcttttgagaaatgtctgttcgtatcgagaaggttatgtcttttaagtcagcctgcaagatctgggaaaagtagatagggctttcagtgcatccttcagggtgcactgttcaggtgaactgatggcccttccatgtgaaggcaaaaagaaatggactcttgaggtcaaccgggttggtgaaaaaagtactatagtgatcaacagcggaaaaatattggatgttagaatgtatattggataagagggtatgtggagcaggcacaacaggatgcaagggaataaaatgttatgaatagctctaagatcctgggcaagtctccatccctttctattagcttagaaacaggtagaaggggtatgttacagggactggtataaatggactaataagtcccttgaaaatgaaattactgacaataggttgtataccagctaaagcctcatggtggaggggatattattttatgttcagtagaggtttgttaggatctatttgtgtagaaatgggtggtgctgactggatcgggctgacattcgtattgatttattcccaaagggtttcaaacagttactttagagttggatgtccaggatcaactggatgactggagactaataaggggaatacatggctgaggtcagaggctgaagcctcaggcaaggaaacttttaaaacaatgtaaaagaaaaacaagcttggtgtttttcaagaaagtcccttcctattaggtgtattgtggcaaaatggagaagtgaaaagctgcaatgccagtaagaggccctagttggtaagaaactagttcagacttgaagatagtcttagattggttagtgactcagccatttgaatagcttggtcactctgggtggttggattttaaaaggagtcaaggttaagcacagatgcagtatctattagggcttggactattctgttgttaatttttaagataaacctctcccaatcaactgactgaaaggagaggaaaaatcccccatgtttccctgaagtacccctagttctgatcaataagtatttctcttattgtttctgcagaagggggtttctttaccttattggtgtccttctgaagccctcatttatattttttacagtctcatttcaaatgccagaaaaagcaaattatacctcttgcaactgacgaaactaatttctaactattaaatggagtttgctgatctgggagagactttatgagttgttgaatatgcaaggccatgagtttatctgtctttcttgccattctagtgccttggtggctttagcctcttttttcttttctaggattttagagaagcgattggccaaagaagctatatcatagggtctcttagaaggccaattgggatcatattgcttaagcagggtgctaagggctttaacttacttgagggaaagtgagttaaaaaagatttataatatcatcagttagatctttgataccagaattttgtagaaagccttttgaatcggccgggagcggtcactcacacctataatcccagcactttgggaggccaaggtgggtggatcacctgaggtcaggagcttgagagcagcctggccaacatggtgaaaccccttctctactaaaaaataccaaaaaagttagccaggtgtggtggtattcacctgtaatcccagctacccaggaggctgagactggagaaccacttgaacccaggaggcggaggttgcagtgagccaagattgtaccactccactccagcctgggcaacagagcgagactccgtctc

SEQ ID NO: 1443 - DNA, 3375 bp, Homo sapiens
tttccgccgcgggtggaagaagatggcgtcgggtggtggtggctgtagcgcttcggagagactgcctccgcccttccccggcctggagccggagtccgagggggcggccgggggatcagaacccgaggctggggacagcgacaccgagggggaggacattttcaccggcgccgcggtggtcagtaaacatcagtctccaaagataactacatcccttcttcccatcaacaatggctccaaagaaaatgggatccatgaagaacaagaccaagagccacaggatctctttgcagatgccacagtggagctatccttggacagcacacaaaataatcagaagaaggtgctagccaaaacactcatttctcttcctcctcaggaagccacaaattcttcgaagccccagccaacctatgaggagctagaggaagaagaacaggaggatcaatttgatttgacagtcggtataactgatcctgagaagataggggatggtatgaatgcatatgtagcctacaaagttacaacacagacaagcttaccattgttcagaagcaaacagtttgcagtaaaaagaagatttagtgactttctgggtctttatgagaagctttccgagaagcactctcagaatggcttcattgtccctccacccccggagaagagcctcatagggatgacaaaagtgaaagttgggaaggaagattcttcttctgcagaatttcttgaaaaacggagggccgctttagaaaggtaccttcagaggattgtaaatcatcctaccatgttacaggaccctgacgtcagagagttcttggaaaaagaagagctgccacgtgccgtgggtacccagacattgagtggtgctggtctcctcaagatgttcaacaaagccacagatgccgtcagcaaaatgaccatcaagatgaatgaatcagacatttggtttgaggagaagctccaggaggtagagtgtgaggagcagcgcttacggaaactgcatgctgttgtagaaactctagtcaaccataggaaagagctagcgctgaacacagcccagtttgcaaagagtctagccatgcttgggagctctgaggacaacacggcattgtcacgggcactctcccagctggctgaggtggaagaaaaaattgagcagctccaccaggaacaggccaacaatgacttcttcctccttgctgagctcctgagtgactacattcgcctcctggccatagtccgcgctgccttcgaccagcgcatgaagacatggcagcgctggcaggatgcccaagccacactgcagaagaagcgggaggccgaggctcggctgctgtgggccaacaagcctgataagctgcagcaggccaaggacgagatcctcgagtgggagtctcgggtgactcaatatgaaagggacttcgagaggatttcaacagtggtccgaaaagaagtgatacggtttgagaaagagaaatccaaggacttcaagaaccacgtgatcaagtaccttgagacactcctttgctcacagcagcaggctggggagcagttgggaatcaggtctggaatactcctaaccaagaagttgcccaggtatagtaagtttttctctaccgttcacaagttttgtgctgctgcttccctctggaaatggggtttctttctctccgcctacctcagctacctgttctgagggtctcaatctgtttcgtattcccacttctttagggaaggagttttaaaaacatctcttaaaataagaggagcaaaatctattaaaacctattctcctgcaaaggaggcagagactttctctctctctttttttttttttttttggtgtccctatcattaagcaagagcctttctcttttattcttcctgcttccctaagctgctcagggctctctgagtcttgccctctgatggcaagtcttatatataactaaacctatttttgtcacccatcaaaacacatcctcagtagactgtgtgaaggtgtgaaggtctgataatgacttgatgctttatctccatagacatgaaagccatgccctctgcctctagatagggtgatccaagagctcctgaaccttaggaggttcaaagaagctctactgtctgtgcccaggaggtagcctgccagcaagagccctcaggagttgcacacacagccaaagggtgttcacacagatctctgccggtctagccaggggaggccagagtctcgtcagtcaaggatgggcttcccccttagctgtgtccacagctgctcaagctatactggtcagagtgggctttgaagctcctttgtgagctcgagctgctgactgccactatgggagccttgccacctccagcccctccatcccaaagacgctcctgccactggggccccaggtcctgctgtatcagttctctttggtggggggctaaggtttggggcgaggcaacctgagacaagaaaacgcagtaaacattctgattccctgtacacagatgcagcaccaggggaagggccagtggtgcaagtatttctttttaacaggtgaagtttttggaaaaagtcactctccctacccctcagtatccttaccatcaactttggttttatccttccagtctttattatatgcttgcttttacatagttgtaataatatacacataaagtattttgtatcctgcttttatcattcaacattgtacatgttataagcattttactatattgttatatatcttcacaaagttgatctgtaaagctgtgtaatttgaaggcatccatagggtgactgtaccataattttgattcatcccttgttgttggattcttggtcaggggttgtttgttttgttttattggtaactttaaaattttgaatacaatttcagatttacagaaaagttgcaggaatatcacaaagaactcctatatatcttttatccagatttactgagtgtttacattttatcccatttgccttatctatatttcatgttgcattttcttaatcatttgagaataatttgcacagataccccattatgcccaaaacagtatgcatttccctaagaacaggacattctcttctaagagaagaagagaattactttaagcattattcagtatttttttaagtattattatcaaaatcaggaagtttaacagtgatttaatactgttatctaacccatgattcatatttaaattttgccatttatcccaataatgtcctttgtagccattcttttaccttgtgcaggatcatgttacatttgtaaacgtgtgtctctcaatactgcagattcctcaactttcttttgtctttcattaccatgacatttttgaagaatacaggctattttgtcg

SEQ ID NO: 1444 - DNA, 3752 bp, Homo sapiens
atgacaaggcctagcactgggagtcattaggcaccagaaccctgaatgccgagatagagggatggctgatctcatgctaatgaggtttagaccatgttgagccctacttttgttctgtgggatgttggatatcccttatacacctatggctccatcttcatcgttattgtaattatctggcaagtgaaaaggagccaccatgaattgaacttggaagttgaaaggagctgctgctggcgtcaccaaaaagtcaggcaaagagctagagatgcagcatcaacagctaggagactttctcaggaagaagatcagaagccacaagagctgttctctgtcatgaaaagccagggctggcttcccccagagggaagtgtgcggcgaatcctatgtacagatccctgttgccaaatttgcaatgctatggctctggagattcagcagttgctggcggatgagaatgactagatctccccaactttgtcgaggagtccatcacaggtctcctcttgcctagagatcttgtctctgtctactgtatcctttgagcagagtatagagctccattccagaaatatcagagagctttcactggcatctataaacccaacactgtcacaattaacagatcagaaatctttaacccagtcagctgcccagtcaacgtatgcagatggcatacaagattactgggctgatcacctccagctagggccggaatttcaagtgccagctgtgctccggggcccaaacaccatagcttcttcaaggcttgacaagccaagggctccactggaccaggaggagatgagcagagcaaccccagccttgtccagggaaaccaaggccagcatcacttgaatttccaggtctccttgctgtccctgtacccagaaaccctgaaccggatgcatccgatggccttgcatatggtcctccctgcccacctgccatttctcagtcctgaagtgctgaggcttcttgaggtacatgttaaaaaatggatgcatttccagaggtgggggctcccaagacgtgtggaggagtccctgaggcagcttatgccaaacccaccattgtattaccaacctggaaatgaccagccagtttctttcaacctgaataatacttctcaggtctctcttcacagatctgagaccatttccctccagacctggtgttcatgtgtggctggccagcccatccagaccttctgggtttctgaatggtccacaatgaacccagaacaaagacaccactgtcagcaaactccaaaccctatggctctagccttgccctctccagcccttaaagccctaagtggcccccatccacagtctgggggacaagataatgactcagggagtgatctccagcagaaatacagccagctattctgtgggctcccttctctgcacagtgagtccctggttgccactttcatgggatctcaaggcctccccaagattgaaaatgtgcccaagccccccttgaaggatccttttctcttcaatgagctctccttcccccaactgctccctaaaacttcaccccagtcagccccaccctcttccccactttcgccaaattgggtgtctccgtctgaccatcaacgagctcagatcaatgtcccatttctgactctggctgagtatgaagccttggagtggcacctgctacagaggcaactccagcttcagtggggctggccagctgccctccagaggtctcagcacacccagtgcctcatgcagcatgagccctgtggcaaagctcagtctcctgagaccacgacagcttcccagacagggaagtccatctcagtgctcaccagggaactactcttcttcccggagcatgcccggaagctgctggaattccacatccagaaacagtcgattcgccatcgctggggcctgcctcagaagatccagcagtccatccagttgctccttacctccactgaccagcagactgtgtccagcagcagcacagccctagccaacgtgagcatcccccagcctgtagccctagaggccaacggggcttgcgatgtgctgtcacccattgcggccccagtgtccatccccaggccacacttgttaactcaggtcaaggcaatactgcagagccacatcgactccaaatgtggacaaatccaccagggcaagatccccgcctgtgtacacaggtcctgggactgcagaatttctggggtcctggcagtggctccttttccctgcattccagaaagccagttcctggtactgcagacagcaagtgacccggacctgcatcacaaagttatgccctggatgccaacggcccttgatcagcagcaacaggccttaccaggtactgtcactgaacaccctaagctgctccgagtcttgtctgtggaagccattgagaaactggagacaactttacggcacaagcatctggccttcctgtcggggctgcctgctctgtattatgtggcgctccccagggccctggccccggcagtcactagccaatctgtcatcacagagatggagcctagtcccgtggaaatcccagcagagcctctgatttagatggtttcatttgaagaacagtgtataagtcttgggccatgccctcaaggcaacaatgagagttgtacagacgttgcaaaagagttccagcctgcagtgccagtaaaaggaacaatggagacgctgcctctagaaagccagacgcatcctactagcccccactcactccagacacatatcttgaccaaactaaacttccacctgagaaaaaaggtcctagagatacaatggggaattcccattagggcaaggaagtccagggaacaaactgctgcagcaccagagaacatatccacacagaagtctcttgaaagtctaaaccaccaaggggggacattgctccaggaactgcccatcccaccagacactcttcctgcccctaatccagaaggggttcaccttaaagaacagctggccaatgacttgaaggcagtgcagcagaaccaaaagcaatccaattccaaagcagtaccccagggttctgcccactcggtctccaagatctcacaacccagtggggacatgacagaggcccacatgccttgtgttcaggtagaggccagtgtgaacaaccccagcctggaggaaccctgtggccctgagcctcaaagccctagcaagagcaaggacccagcccatgtccccatgctagcaggaaacagagaggacccagaggaaaccaaagcagccagggactacagagaaggggatgcggggtttgggcgctcctcaaccagagaagagagacgccctgctgaagaccagaggccagcagggatgcttccaaacaagacaccccgagggtcctggcgatggagccgtagctttcatcttgctgatccctgtcaacacagcccccagcatcaccctcagtttaagctcccacagctacctccacgagtccctggggagaaagagtctgagaaggacctgcaagacagtcaaaccaagctaactgtcatccttgaaccagcaacaattcctgagaatacccagactgtggtgccccagcttcacagggtcagcctttcctgagccaaccaactcaggctaagcctttgcagggccaaactttgcaatgccaagttttacatgggctggtgatgccagcccatactcaaaagaagcccagccttacagagtctagcttcagaaataaaattaaatgttttctgg

SEQ ID NO: 1445 - DNA, 3243 bp, Homo sapiens
aaattcgagccctcgtgcaccaaccgaaactccacagctgagagggcttggggcccggacagcaggagatccagcccctgagcaaccttccacggcttttgtcgcccccattggcgggaggagcagggttatgctcccggctcccgtaggggagctccagcctctggctctgtcagcctccccggcagctccttgactccttcctcccggtctttcgaagaggggcccaggcagtcacagcaaactgtacaatggcagttgagtgggttttgaaaaacgtctgaattgtagtgtctacatctaccttctgccttctctctaccctttgaaaaaaaataaatggcatgtttgagaagagagctctattaaaagaggaatattgcaaatggcttcagattctatgagtagtaaacaagctaggaatcacattacaaaggggaaaaggcaacaacagcaccagcaaataaagaacagatcctcaattagtgatggtgatggagaagattcctttatttttgaagcaaatgaagcttggaaagattttcatggttctcttcttcgattttatgaaaatggagaactctgtgatgtcacactcaaggttggctcaaagctaatctcttgtcacaagctggtattggcttgtgttattccctactttagagccatgtttctttctgaaatggctgaagccaagcaaacgctgattgagattagagattttggtggtgatgcaatagaagacttggtaaagtttgtctattcttcacggctcactttgactgttgacaatgtccagcctctcttatatgcagcctgtattctgcaggttgaactggtggctagagcttgttgtgaatacatgaagttacattttcatccctccaattgcctggcagtaagagcctttgcagaaagtcacaatcgaatagacttaatggacatggcggatcagtatgcctgtgaccattttactgaagtagtggagtgtgaagactttgtaagtgtatcaccgcagcacctccataagcttttgtcctccagtgatctaaatattgaaaatgaaaagcaggtctataatgctgccatcaagtggcttcttgccaatcctcagcatcattccaaatggttggatgaaacacttgcacaggttcgcctgccattgttgccggttgattttcttatgggtgttgtggcaaaagaacagattgtcaagcaaaatctaaaatgtagagatttactggatgaagcaagaaattaccaccttcacttgagtagcagagcagtacctgactttgaatactccattcggactaccccaaggaagcatactgctggtgtgctgttttgtgtaggtggtcgaggtggatctggtgacccctttcgcagtattgaatgctattctatcaacaaaaacagttggttctttggaccagaaatgaatagtcgaaggcgacatgtgggtgtaatctctgtggaaggtaaagtgtatgcagtaggtggacatgatggaaatgaacatttagggagtatggagatgtttgatcctctcactaataaatggatgatgaaggcatcaatgaacacaaagaggcgaggaattgccttggcttccttaggaggcccaatttatgcaattggagggttagatgacaatacttgcttcaatgatgtggagagatatgacatagaatctgatcagtggagtacagtggcaccaatgaatactccccgtggaggagttggctctgttgctctagtaaaccatgtttatgcagtaggtggcaatgatggaatggcttctttatctagcgtggagagatatgatccacatctggataagtggatagaagttaaagaaatgggtcagcgaagagcaggcaatggagttagcaagcttcatggttgcttatacgtagttggtggttttgatgataattctcctctgagttcagttgagcggtatgacccccgaagcaacaagtgggattatgtggcagcacttactactcccagaggtggagtgggaatcgcaacagtgatgggcaaaatctttgcagttggtggtcataatggcaatgcatacttaaatacagtagaagcgtttgatccagtgctgaataggtgggagcttgttggatctgtgtctcactgcagagctggagcaggagtagctgtgtgttcctgtttaactagccaaattcgagatgtaggtcatggatccaataatgtggttgactgtatgtgatttgagttctggccaccaacaatttagtcatatctgataggtacaaaagaaaaccaagattttgatatgaccacctttcaacactttttactgcaactagagtcttatttaaatgttaactgttgtattgtgactaagtacaacttttggaatgatacctgaagaattattagtaatagagttaaatttgatacttcctgcttttgcaaataatggagtagggaagaagatagtcgaacttaaaatcatacctaccctgaaaaatgcttaaagtagtgccaaaaatcttgaaatctctctctctctctatttggatgaatcaaaatgtaatttgttgagttttgccttttcttttgcctaaagatgttaacgtcaggcagtgggtttttcctagaggagagattagtacctattcattaacacaaggatacataagagacttgccccttttgaagatcatttctacttggtgctgatgaatttatgcctagctttttttttctaggtggtgatttttcaatttcttttatatttacggaagtagaaaaaatgttctgtctttttgaatgccacttagctgcattttcagaagcttataggctataagaagcctttaatttcagtttgaattgctaggacaccaaaagacctagctgggctaactccatccaaatgattttacagttttattttttcatcttttgcaaaaagtatttgttacataatcaaaaggtgaaccagaggaaatattgaacaaggttttagatctgatgttattctggtgcccaattgagagaccttgagaaagaatgatgcagattacatgactctaatgtgggcagtctgaaaatatctttaactgtcttctttgatcatttgattttggatccaagatttatcatctctctattttgctatttgccaccatcctggtttttctgactgtacagaatcaatctgcatttatttattatcagaaatgaatgcatttttac

SEQ ID NO: 1446 - DNA, 2575 bp, Homo sapiens
acagcagccgagaagggtttggggagctgagaggagggggaggccaagcccaggagcaagaggataactcttttagcagagcagattcattgacaatgctgaagtcagttaaagccacagcaccatgttcctctggaggatttcccaatggcttggagtaagggaaccagggccacatgcctgaagtctctgtcttggacccactctttctaggctgtctcctccttggattcttgattctaaactctcttgagttccctcccctgcctcctctcttccaaatctcctattcaagcactcctattgcgtaccaactatgtccttggaactgcactagccaccagggatataaaggtaagataagtctctgccctcagggagctcttaacagctctagtctgctcagcctagaagactatctcctaaaacaaacttctttctggactgtggcaccttttttttttttttttttttttcacttgaactatggcagttcttcaaccaggagagctgggatcagaacccaggtccgtctgacatgcccagggttctccttccagagtgccactctctgcctcccagtcaattagaaaaacatgtctacttggctgcatggccatgtcagcctctgatggcagctactgtcctcttgttgatgagataccatgtaactttaggtggacttcaatgttctcacatttaaaatggaagacttggccaggtgcggtggctcacgcctgtaatcccagcagtttgggaggccgaggcgggtggattacctgaggtcaggagtttgagaccagcctggccaacatggtgaaaccctgtctctactaaaaatacaaaaatcagccgggtgtggtgatgcatgcctgtaatcccagctacttgggaggctgaggcaggagaatcgcttgaatccaggaggtggaacttgcagtgagctgaaatcatgccactgcactccagcctaggcaacagagtgagactccatctcaataaaataaaataaaaaatggcagactcaccaggcacagtgacacatgcctgtcatctcagcactttgggaggctgaagtaggaggatcacttgggacctggagtttgagaccagccttgtgacgcagcaaggctccatctctacaaaactgaaaaaaaaattatggccaggcgctgtggctcacagcctgtaatcccagcactttgggaagccaaggtgggaagattgcttgagcccaggagctcaagaccagcctgggtgatatagtgacatctcttctctattaaaaaaaaaaaaaaaaagcctgggcacggtggctcacgcctgtaatcccagcactttgggaggctgaggcgggcagattataaagtcaggagttcgagaccagtctggccaacatagcgaaaccccgtctctactaaaaatacaaaaaattagcaggtatggtggtgtgcgcctgtaatcccagctacttgggaggctgaggcaggggaattgtgtgaacccgggaggcggaggttgcagtgagccgaggtcccaccattgcacttcagcctgggtgacagtgcgagaccccgtctcaaaaacaaaaacaaaacaggccagggtggtggctcacacctgtaatcctagcacttttggaggctgtgttgggtggatcacctgaggtcaggagttcaagaccagcctgaccaacatggtgaaatcccctctttactaaatacaaaaaagaatcacttgaacccgggagatggaggttgcagtgaactgagatcatgccattacactctagcacgggcagcaagagcgaaactccatctcaaaaaacaaacaaacaacaacaacaaaaaaacaatgagctgggcatggtggcacatgcctccagtcccagctacttgggaggctatggcgggaggatggcttgagcccaggagtctgaggctttggtgagccatgattgcaccactgcactccagcctgggtgacagagctggaaataaagtatataaagagaagaccccttccttactcaggaggtcaaactatgtgacaggtgtaaaaatggtttaaaataaaggtgtggaagaaatgctggagatcattgtcataatcctaggaacagccagggatgggggagtcctggaggattggatttggaggtaagatgcggtgctcaccaaatgttggtccattgggaagtggtggcacctctatccttgagacctgaggctggaaaatgctgtgaggatgagaaaataccagtcattcagggttggaggagacttgaatgctccattttaaaaaatgtagccgccctgcgtggtggctcacgcctgtaaccccaacactctgggagaccgaggagggtggatcacctgagatcgggagttcgagaccagcctgaccaacatggagaaaccctgtctctactaaaaatacaaaattagccaggcgtggtggcacatgcctgtaatcccagctacttggaaggctgaagcaggagaatcgcttgaacccgggaggtggagattgcgccattgcactccagtctgggcaacaagagtgaaactgtctc

SEQ ID NO: 1447 - DNA, 3156 bp, Homo sapiens
gtttgggcagaggctctgcagcctccactgggagggtgcaggctttaacttgaggggaagctggagacccctgcgaagcatgtgggagcagaggtggccatggcgggcaggacaggagggagggtctgagagcaacagggagaggaccgaaatagcccttgtcctaggtgctcgttcccaggaagctggcttggagtgaggactgagtggacgctgcaggtgccaggaggcggttggtagcccgaaggcagaagcacagtgtagggcatgtgggcgacatggaggctgcgtctttatggggatgtagcagggacctgggccgagggggaagtcagcacggctgtcctgctgcacagcatggtgctgacgccgaggtcaaggagaaagaacaagaggcggggggtgtcagctactgggacattggcaagaacgaaattaattcccctggaaagagatggctgggtaagcgcaccactgagagatggctgggtaagcgcgtcactgagagatggctgggtaagcgcgccactgagagatggctgggtaagcgcgccactgagagatggctgggtaagcgcgccactgagagatggctgggtaagcgcgccactgagagatggctgggtaagcgcgccactgagagatggctgggtaagcgcgccactgagagatggctgggtaagtgcaccactggcctttctggttgccacctagggcgtgggaggaggcagccagccttcccatccttcgcagtgacggctgtgagcgtggccgtcagaacctagccttgagggccgaattctcagcacaggtgagcaggcggcttgaccctacagctgcccagagtgagctttcaagctgcctccagggatggcgctgagccagggaattctgcatttgtgctcgtgcgcagacagtaggaggcggccaacgtgccagtgcctttgccatagttgcttttggagcttcagttttgaaagagcttacaaagactgaagcagggacagatgaccaagaacagctcgtctgcaggaggtggcaggaaggccagcctggcttggactgagatccggagagagcactcaagatgaccaagggaacttaagaattaggagaatgtgagttctttgagggcagcagggattgttcgctgctgcgtcaccagctttccatctgtctgtgaagtgaagctcttctagaagttttctagagattgattccaggcagtctgtgatttctaaatctagcctctctctaccaccacatcggggcctttgccctcaacagccctttttgggggctggtctgctgtcccgccaatgtctttggtgtcgccagctgcgattcagtatctggctttcaggtcctttccaaaatccaggcgctgttccctgggatgtagaggggctgaactcaggtagagcagctcggagacctgcctggctcccttggtaggacgggcactccctttccaacctcagctcagacccattctagagagacacctccgtcagccagctctggttttgtcaccaggagaacctgggttggacggaggatatggctcacctccacaggtgcctgcacgtgggcgtgctcccagcactgggctcgtccttgaaaacagcagcttctgacgggcaagaggggaaggaacctggcgcagcaggtggatctgctgcagccaaggagggacctggccagtgtggaagtccctccctcccctggggctgagggtaggcaggagtgaagggatgcagagaggcaggaagcccaggggaaggggttcccgtttttaacagctcccgggaaaatggtgaggacatcccaggcccgagggcactcaacactgcctcgtcggaattaaggaaattgatggcacaagcattttgtgcgtaccctgggtggttcattttgggacacagcttcgttggcggtgctctgcctcgccccttggggaagtaaaggccacaccgaggttgtgggtcccatccttgcaggagagtgtgccgtgggcaagcacggcttcccccaggacactcaggtttgcaagttgcaagtttgcagggtgccacacccaccggccgtgagacacgcttgtcccgaggccacaccacttgcttgccaaagccttctgttatgaacacaactctggtgaaggctccagtttatgggggctctttcaccctgggtgtgtgtggagccagacatttgcacgtgtaaatgcacacaggcctatccttgatcaatgtggccatcgagaggccgaggttagagtttgtgaggcagcccgccttgcgacccagagatccagaggtaagaatccatgtgcagcgaactgtgagtgccacacgctttcattcgtcaccaggaaacggaggctgccactgacacggcaggagaatgaagacctagctgaaagttcgcagcagaacgagctcccacctgtctctcaattgcaaaacattcaaaacagaggcggtggggccttagcgtgtcagggtgtagataggccatttgaaagccacagccgcttatgtggtgggttgatctgtttcatcagattctcatttggggttcatgtcttatgttgggatgtttttcatgtaggtcacccgtgtgaacagaaagtgagaggttgtagcacattgccaccgtccagatctcgggtcatctcaaacgatggagccagccgcttctctggaggcagcctcctcacgactggaagctcaaggcgaaaacacgtggtgcaagcacagaagctggcggacgtggacagtgagctggctgccatgctactgacccatgcccggcagggcaaggggccccaggacgtcagccgcgagtcggatgccacccgcaggcgtaagctggagcggatgaggtctgtgcgcctgcaggaggccgggggagacttgggccggcgtgggacgagcgtgttggtaagggtttgttcagctgtcactgtcctgggatctccatgcagactgagtcactgtgcacgtcctttccctgcctcccacatgattctctcttaccttcctcccaaatcctggggacagaatataagaaaatcggactttttcagccaccgggggaaatctttaagtgagaattatctggagagcttttaataaaagccagttcttgggcgtc

SEQ ID NO: 1448 - DNA, 3745 bp, Homo sapiens
atttgtttgctgcctgtacagactttgagcatcgttaaggcccacgggcccacggtgagcttgctgctgcatcgggaagacttccgtggatacgccctgggccaggtgccctggctcctgaaccagtataaagacaaagagattgatttccatgtcactcagtttgcaacgttgaacaggaatctggagaaaccagtgaaaactaactttcatgagaatgaaaaggaagaggaatctgtccgagaaacaagccttgaggtcttaaaaaccctggacccactggtcattggaatgcctcaggtgctatggccaaggatcctgacttttgtggtacctgcagaatacacagaagctctggagcccctgtttagtatcatcagaattctgattatggcagaggagaagaagcagcacagtgccaaggagtcgacagcacttgtcatctctacgggagctgtgaaacttccttcaccacagcagctactggccagacttctggtaatatctatgcctgccagtttaggggagttacgtggggctggtgcaatagggcttttgaagatactgcctgagataattcacccaaaattggtagacctatggaaaacacgtttacctgagcttctgcagcctctggaaggaaagaacatcagtaccgttctatgggaaaccatgctgcttcagttgctcaaagaatccttatggaagatcagtgatgtggcctggaccattcagctgactcaggatttcaaacagcaaatgggcagttacagcaataactccactgagaagaaattcctttggaaagccttgggaacaaccttagcatgctgccaagattcagactttgtaaactcacagattaaggagtttctgactgctcccaaccaactgggggatcaaagacagggaataacatctattttaggatactgtgccgagaaccatttggatattgttttaaaagttcttaaaacattccaaaatcaggaaaagtttttcatgaatcgatgtaagagccttttttctgggaaaaagagcctgaccaagacagatgtcatggtcatctatggagcagtggccctccatgctcccaagaagcaacttctctccagacttaatcaagatatcatatcccaagtcctgtctcttcatggccagtgctctcaggttctgggcatgtctgtgatgaacaaggacatggatctgcaaatgagtttcacaagaagcatcactgagattggcattgctgtccaagatgctgaggatcaggggttccagttttcctacaaggagatgctgattggttacatgctggacttcattagagacgagcccctggattccttagctagccctattcggtggaaagccttaatcgccattaggtatctcagtaaactgaaacctcagctctcactacaagaccaccttaacattcttgaggagaatattcggaggctgctgccccttccacctctggaaaatctgaaaagtgaaggccagacagacaaggacaaggagcacattcaatttctctatgaacgatccatggacgccctaggaaaacttctgaagaccatgatgtgggataatgtgaatgcagaggactgtcaagaaatgtttaatcttctccaaatgtggcttgtttcacaaaaagagtgggaaagagaaagagccttccagatcactgcgaaagtgctgacaaaagatattgaggcaccagagaactttaaaattggttcactgcttggacttctggctcctcactcctgtgataccctgcccaccatccgtcaggcggctgctagctcaactattggtctgttctatataaaaggcattcacttggaagtggaaagactgcagggtttgcaggaagggctggaaagtgatgacgtgcaggttcagatcaagatttcttctaaaatagctaagattgtcagtaagttcatcccaaatgaagaaattctgatgttcctagaggaaatgctggacggtctggagagcctcaaccccacttgtacaaaggcctgtggcatatggatgatcactgtcctgaagcagcagggagctgctctggaagatcagctattggagatcttaggcacaatctaccatcacatgccagtcctcagacaaaaagaagaaagttttcagttcattctagaagccatctcccagatagccagctttcacatggatacagttgttgtcaaccttttacagaagcctctgccttttgacagggacacaaagacattgtggaaggcgctggctgaaaagccagcctccagtgggaaactcttgcaagccttaatagacaaactggagactgagttagaagatgacatcgccagggttgaggcaatttcagtggcctgtgctatgtatgaagtgatctcaatgggcacctctgtcaccggcttgtatccagagctgttcactctcctcctgaagctggttagctgcacactgggccagaagatgcccacttgtccctggagccataggcggcatgtgatgcagcagggagaacagcagcagatcccagacccctgcaggctttcaactgctactttaaaatgtttgcaagcccaagccatgagagaaggccttgcaaaggaatctgatgagggggacaacttatggactctactcagcagtcctagtacccaccacataggcgtatgttcactggccaggagcatggcagtgtggcaacacggagtcatactggacatcatggaacagctgctctcatctcttacctcctcctcggagaactaccggataaccggcgcagctttcttctctgagctcatgaaggaaccaatcctttggaagcatgggaatctgcgaaatgtgctgatcttgatggatcaaagtgcctgggactccaacgccactctgaggcagatggccatccgagggctcggcaacacagcatccggggctcctcacaaggtgaagaaacataagcagttaatgctagaatctatcatcagaggcctgtatcacctagctcgcactgaagtcgtctgtgaaagcttgaaggctctaaaaaaaatcctggagctgctgacagaccgagacgtgagcttctacttcaaggaaatagtgctgcaaacaaggaccttctttgaagatgagcaggatgatgtgagattgactgccatcttcttatttgaggacctggcacccctaacaggaagaaggtggaagattttttttgctgaagaaataaaaaagagcctgatttcattccttctgcacctttgggatcccaaccccaagattggagttgcttgccgtgatgtcttgatggtctgcattccctttttgggcctccaggagctctatggggtattagaccgtctccttgatcaggatctaccaagggccagggatttctacaggcaattctgtgtgaaactggccaagaaaaaccaggaaattctgtggatcctccacacacactccttcaccttcttcaccagcacctgggaggtgatcaggagtgcagctgtcaaactcacagatgccgttgttctcaatttgaccagccaatatgtggagttactagacagagaacaactgaccacacgactccaagcacttcgtcaagatccgtgtattagtgtccagagagcagctgaggctgctttgcaaaccctcctgagaaggtgtaaagagacaagcattcctctgtaagccatcaagaaataaactgctggcttttcct

SEQ ID NO: 1449 - DNA, 3558 bp, Homo sapiens
gcggccccgagcccgcggggctgtgcggatggtagggatgccgaccctactgaggagcagatggcagaaacagagagaaacgacgaggagcagttcgaatgccaggaactgctcgagtgccaggtgcaggtggaggccgaggccgtggctgccggctggatgctcgatttcctctgcctctctctttgccgagctttccgcgacggccgctccgaggacttccgcaggacccgcaacagcgcagagggtgagtgcagaccgcgtccgggccgggactacgcggggggcggatgcgggctccgtggtgcgcggcagagggctggttccctacgtcgccgagggaggtcgggagagaggggctgctgcggccgattagctgggagtccgaggctccgggctgaactttgttcgaatcccggttcgcccgttgtcagcacctgagtttttctcagattgatttcctcttcgataaaatgaaaataagaccctgtttaggtttgatgcaagcattaaatgagttaaaatgtatacagttccactcaacccagtacctttgtctcttttggcgctttctactcaggtattcctgtagtaatattcagcagtccctgtggcctccagtaacccccgaggcatcagtgttttatgttaatttgtgagctattaaatctcatttggcctgctggctctacagcagttacttttattctgtgtagtctcagaataaaagtaaatgttggccacatgcctgcaagtcccagctacttgggagcctgaggtgggaggatcgcttgaacccaagaggcagaggttgcagtgagtcgagatcgtgccactacagtcctgcctgggtaacagagtgataccctgtatgaataaataaatgaatgaatgaaactgttcatgaaatctgctgcaccccgcccccgtcccaagatggggtctcactgtcacccaggctggagagtgtagtggcgccatcacagctcactgcaggctcgacctcctcaggctcaggtatcctcccgcttcagcttctggagtagctgggtctgcaggcgtgcaccaccacccgcagctgtaagattacaggtatgagccaccgcgcctggcctagtgtagctttttgaaaaacaacagaaagatgttctggtacttcattcatagttggcgctaaaattactgtgcaagtatatatttataatactataattatgctatttaatagaattcttagacattttgacacatttcatcttcaccataatcctgtgagttaggcaaataatcttagttttaaggtactgataggttaaaagggagtgtttcagccccatcctttatcttccagttcaaggatctttcctctgtattgcggttaacactggagccagggataattaacattaagtagaaaattaaatcctggaatgaagctagttcctcagaattctcttagagttctcttagagttggagacatcagtatgaactgtttagctcatgtaggtatagatgacttagaaatatttgcatatgcatgtgtagacataggttactatacaaatatgtatttccttactctgtcagataaaagggcacagaagcaacctaactctagtaacaatgagtacacctagcaccccgatcttgtttacaactaagtttagtttaaagacctcacttggctttattgtgattctggattcaggtaatactttattccataaaataagtgctcaatgaattgagcagttgggggttggctttatagacagtaaggacttaaggaagctgaaacagaacaaaaagaagattggttatttcacagttacttgtaaggctgggacagggagacagaacaatagatacatgggatgcagaatggatgttgtgttatcaggcatgaaagcaacagtaatttccttgtatgtacgtctccctcagagctcttgagtggttaggcgcattatcaatgagcaatggtattttgaaaggaatcttttttccaagcagtagatctcaataatgggcttaaaatattcagtaaaccatggtgtaaacagaggcactgtcatcttgttccatttctagagcacaggcaaagttgatatatcatttgaagggccttaagattttcagaatgagaaatgggcaatgggtttaacttaaagtcaccagcagcattagtccctaaggagagtcagcctgtcctttgaaatattaaagttaggcattgacttctctctggctatgaaagttctctatgacatcttcttctaatatgaggctgtttcatctacaatgaaaatctgttgttggctggatacagtggctcacacctgtaatcccagccctttggaaggccaaggcagttggatcacttgaggtcaggagtttgagacaccagcctggccaacatggcgaaaccccatctctactaaaaatacaaaaattagctgggcattgtggcacacatctgtaatcccagctactcaggaggctgaggcacgaggatcaatcacttgagcctgggaggtggaggctgcagtgagctgaggtcacaccactgcccttcaacctgggtgacacggcgagactctgtctcacaaaaaaacaaaatcagttgtttagtgtaaccaccttcatttgtgattgtagctagatcttctcaataacttgtagcttttacttcagcacttgctgcttcaccttgcacttctatgtcacagagatggcttcttttcttaaacctcatgaaccaacaacctctgctagcttccaacttttcttttgcaattttcttacctctgtcagccttcttagacttgctctggattaggctgtggcttaaaggaatgttgtggctggtttgattttttttttctatccaagtcaaactttctccatatgagcaataggctcttttactttcttatcatttatgtgttcagtggattagaacttttaatttcctttgagaacttttcctttgtattaacaacttggctgttagacacaagaggcctatgtttcagcctatcatggcatttgacatcctttcctcactaagcttaatcatttctagcttttgatttaaagtgaatgacttgcaactcttcctttcactgaaacacttggagggcatgtagagttactcattggcctaatttcaatcttgttgtgtttcaggagataaggaggcctgaagagagggagtaaggggaagggctggtcagtggagcagttagaacacacacaatatttatggaataagtttgtgtcttatgggcatgatttgtggtactccagaacctttacaatagtaacatcagagattattgatcacagaccaccatacagatataataataatgaaaaagtttgaaatattgcaagaattatcaaaatgtgacaggtacaggtactgttagaaaaatgagccagacgcggtggctcatgcctgtaatcccagcactttgggaggctgaggcgggcagatcacgaggtcaggagatcgagaccatcctggctaacatggtgaaaccccgtctctact

SEQ ID NO: 1450 - DNA, 3015 bp, Homo sapiens
agtaacaatctgatctctctttcttttccccacatttcccccttttcttttcgacaaaaccgccatcgtcatcatggcccgttcttgatggtcgctgtctcttcagagctgttgggtacacttcccagatggggcggcctggcagaggcgctcctcacttcccagatggggcggccgggcagaggcgctcctcacctcccagacggggcggcctggcagaggcgctcctcacctcccagacggggtggccgggcagaggcgctccccacctcccagatggggcggccgggcagaggtgctcctcacctcccagacgatgggcggtcgggcagaggcgctccccacctcccagacgaagggcggccgggcagaggagcccctcacctcccaggcggggcggccgggcagaggcgcccctcacctcccaggcggggcggccgggcagaggcgcccctcacctcccaggcggggcggccgggcagaggcgctcctcacctcccagacggggcggccgggcagaggctcccccaacctcccagaggaagggcggccgggcagaggagcccctcacctcccaggcagggcggccgggcagaggcgctcctcacctcccagacggggcggccgggcagaggctcccccaacctcccagatgaagggcggccaggcagaggcgcccctcacctcccaggcagggcggctgggcagaggcgctcctcacctcccagacggggcggccgggcagaggcactcctcacatcccagacgatgggcggccgggcagaggcgctcctcacttcccagacggggcagctgggcagaggcgctcctcacttcccagacggggcagccgggcagaggcgctcctcacatcccagacgatgggcggccaggcagaggcgctcctcacatcccagacgatgggcggccgggcagaggcgctcctcgcctcccagacggggcggccgggcagaggcgctccttgcctcccagacggggtggtggccgggcagagacgctcctcgcctccaagacggggtggcggcagggcataggtgctcctcaccacccagacggggcggcggggcagaggcgctcctcacctcccagacggagcagccaggcagaggcgctcctcacttcccggacgtgtcggtcaggcagaggcgctcctcacatcccagacgatgggcggccgagcagaggcactcctcacatcccagacgatgggcagccaggcagtgacactcctcacttcgcagacagggtggcggccaggcagaggcgcccctcacttcccagacagggcggccgggcagaggcgctcctcacttcccagacggggcggctgggcagagggcctccccacatcccagacgatgggcggccaggcagagacgctgcccacttcccagacggggtggtggccgggcagaggctgtaatcttagcactttgggaggccaaggcaggcggctggaaggtggaggttgtggcgagccgagatcaagccactgcactccagcctgggcaacactgagcattgagtgagcgagactccgtctgcagtcccagcaccccgggaggccgaggcgggcagatcactcgaggtcgggagtgggagaccagcccggtcaacagggcgaaaccccgtctcctccaaacatacaaaaaccagtcaggcgtggcggcgcacgcctgcaatcccaggcactcggcaggctgaggcaggagaaccacgggagcccggggcagggaggctgcggggagccaagaccaccgcagtacagtccagcctcgacaacagagggagactgaagaaagaaagaaagaaaggggagagagggagacgaaagaaagaaagaaagaaaggaaggaaggaaggaaggagaaagaaagagaaagaagcgggggggggagagagagagagagagaggagaaagaaagaaagaaaagaaagaaaggggagagggagagagcacaaaattttaaaaatgtttctttacctttgagtcctatgttcttacattgttttataatcttttttcttggtcttcaaaacaataaaatattttttcctcccaagaataatgagatattcattcgtatgggggttcccttcctcccacctcaaacatattgagtattcttagatgatctcactttctgtttcctattagaagcctcctcttagattttatttatttacttttcctaaggtacttttgttatagcaagaaggctcctcttggattttaacaaaaagggctcagattgccagttaagtgcctcaggacagtgaggaggaagtcctggctacaaatcacccttttagagaaacttctctttgtggaggatattatttgtagttggctaagatgctatgtcaagttaagatctggtgtggccacattgttgccttgcactagaatagtcctgcttcctcctagagtatatgtcagctctgtgtagcttcctttggtacactagaaaatggtctgccactagtacaaccaactactatgtcctatgtcttgcaggacagttctcaaattctgccaagttgttctctgggtgctgcacctcattgcatccaaagagaatccccctgatttatttagcaagaatgttcttccaaccccgagcttcactttgggctcttgctacagcttttctcaaatcccgctagtttgcagctgttaaaagaactctctataatccgaaaataaaattctaggctgggcatgctggctcatgcctgtaatcccagcactttgggaggccgaggtgggcggatcacttgaggccaggagttcgagaccagtctggcctaacatgatgaaaccccatctctattaaaatacaaaaaaaaaaaaaatggtggcacatgtctgtattcccagatacttgggaggctgaggagggaggatttcttgagctctagatgtagagactgcagtgagccgagatcatgccactgcagtccagcctgggcgacagagcgagactctacctc

SEQ ID NO: 1451 - DNA, 3832 bp, Homo sapiens
actcagacacgcagctggacccgacagggcggcttccgggtttggcgcggcctttgtctcttgctgcagccggagctccggtctcgtcttcactgctgtttgtcctctgctcctagaggcccagactctgtggctctgtgacctgcaggtattgggagatccacagctaagactccaggaccctctggaagcctagaaatgggaccattgacatttatggatgtggccatagaattctctctggaggagtggcagtgcctggacacagcacagcagaatttatataggtattgctgtgtctaatttagacctgatcacctgtctggagcaaggaaaagagccctggaatatgaagagacacgagatggtagccaaacccccagctatgtgttctcattttgccaaagaccttaggccagagcaatatataaaaaattctttccaacaagtgatactgagaagatatggaaaatgtggatatcagaaaggctgtaaaagtgtggatgagcataagttgcacacaggaggtcacaagggacttaaccggtgtgtgacaactacccagagcaaaatagttcagtgtgacaaatacgtgaaagtctttcataaatattcaaatgcaaagagacataagataagacatactggaaaaaatcctttcaaatgtaaagaatgtggcaaatcattttgcatgctttcacaactaactcaacatgagataattcatactggagaaaaaccctacaaatgtgaagaatgtggcaaagcttttaaaaagtcctcaaaccttacgaatcataagataattcatactggagagaaaccctacaaatgtgaagaatgtggaaaagcttttaaccagtcctcaactcttactagacataagataattcatactggagagaaactctacaaatgtgaagaatgtggcaaagcttttaaccggtcctcaaaccttactaaacataagatagttcatactggagagaaaccctacaaatgtgaagaatgtggcaaagcttttaaacagtcctcaaaccttactaatcacaagaaaattcatactggagagaaaccctacaaatgtggagaatgtggcaaagcctttaccctatcttcacaccttactacacataagaggattcatactggtgagaaaccctacaaatgtgaagaatgtggcaaagcttttagtgtattttcaacccttactaaacataagataattcatactgaagagaaaccctacaaatgtgaagaatgtggcaaagcttttaaccggtcctcacaccttactaatcataaggtaattcatactggagagaaaccctacaaatgtgaagaatgtggtaaagcctttaccaagtcctcaactcttacttatcataaggtaattcatactggaaagaaaccctacaaatgtgaagaatgtggtaaagcctttagtatattctcaatccttactaaacataaagtaattcatactgaagacaaaccctacaaatgtgaagaatgtggcaaaacttttaactactcctcaaattttactaatcataaaaaaaattcatactggagagaaaccctataagtgtgaggaatgtggcaaaagctttattctgtcctctcatcttactacacataagataattcatactggagagaaaccctacaaatgtaaagaatgtggcaaagcttttaaccagtcctcaacccttatgaaacataagataattcatactggagagaaaccctacaaatgtgaagaatgtggcaaagcctttaaccagtccccaaaccttactaaacataagagaattcataccaaagagaaaccctacaaatgtaaataatgtgtcaaatcctttagtgtattttcaacttttattaaaacacaagataattcatactggagagaaatcctacaaatgtgataaatgtggcaaagcctttaactggctcttaatccttatgaaacaaaagataattcatactagagagaaaccctacaaatgtaaagaatgtggcaaagcatttaactggtccctaaatcttactaaacataaaaaaacttaaactggagagaaactacaaagctggaagacatcacagtaattctgacaacacctcaaacttttctaaacataaaataaatcatactggtgaggaactttaaaaatgcgaaaaatgtgacaaaatctttaaatgattgtcacacttgattgtaggtaagataattcttactagaaaaactcttacaagtgtgaagaatgtggcaaaatttttaatgaatactcacaccttattgccaggaaagcatttatacttgagaaaaattgtaccaatataaagactgtgaaaaagccattaatgtctgctcacatcttactcaacatcagagagtacttaaaaaaagtattataaatttaattactgtcaaaaagtatttcagaaaatataagcttttaaagtatttattttgaagacaaacattacaaataaaagagggttgtaatacctttatttgtatcacagatcttattgtacacattttgtactagagaaaaccctgaagcagttacttaaactttgttcaacatcagggaattcagattggagaaaaaccctgcagatgtaataaatttgaaaaaaaagttttccaaaactacaacttagacaacaccagagggttcatactgagatatatttttgcagatgcagtatatatttaaaacatttaatccaaaataagtctatgtaaatatcagagaattcacagtggaaatatctaaggtagggccgggcatggtggctcacgcctgtaatgccagcacttgggacgctgaggcaggaaaatccgttgaacccaggaggcagaggttgtagtgagccgagattgcaccactgcactccagccgggtgacagagtgagactccatctcaaaaacaaacaaactaaggtatggatgcttcagacattacactatatcaaagtgctgactgttaaaaatgatcccaaactaacggtagataaatttatttgtacataactttaaaaggagtagaagattttttggaagtttgtaattacattcaaagtatactttttttgtttgtttgttttccttgagacagagtctctctctgtcgtccaggctggagtgcagtggcacaatctcagctcgctgcaacctctgcctcctgggttcaagcaattctcctgcctcagcctactgagtagctgagattacaggtgcacaccaccacgtccggctgacttttgtatttttagtagggacggggtttcaccatattggtcagggtagtcttgaactcctgacctcatgctctgcccagcttggcttcccaaagtgctgtgattacaggcttaagccacagcgcccgacccaaagtgttcttttttccttgaaaagaagtacagattttttaaaaagctaatattgctgtgattcaactctcaagttacttgatgctatttcttcatttctattgtattcacatgtgaaagcatgtgatcagttgtcacggcatcaaagataggagagtttctttttttttaggtgggcattatttatgaccttttctttggaagagtaaggacattaaaatgtaacatgcatgatgaaaatctaagtggagatgatatttgtggttaattatgatattgagtggtgcatgaggtaggtgtttagagtaatattcttttgcattatagtaagaacatttaagttttgttaaaattaaaaaattagtagtacgttattttactatttgtacttttatgtaataaaatgcagtacatttttaaattttc

SEQ ID NO: 1452 - DNA, 3080 bp, Homo sapiens
gattgtaagtttcctgaggcctccctagaagctgagcagatgccagcaccacactttctgtacagcctaaggaactatgagccaatgaaacctcttttcttcataaattacccagtctcagatatggagttaccagtaaggagctccaccgtgactctcctccctgctccgttgccccgacgaggaagtgtgaaaacgtttctggctccatccaagagttacttccctgaagaagagagggctttgttgaagtcttcccatgctttctgcacagggctctggccttggagaagggatttccagttaccgcagtgtcacttggccctgggtctcctcccgggagagagaagtgtacggctcccaaggttcctggcagttttgaaagagctctcagccacagccagctttactttggcaagtgaggccatcccctttctttcctcctttcctttcccatggaacctactccttccatctgtctttcaagctctgcctcagaaatggcaattcaaggctgattttctccttgaatgcactctctctgtgaaagaggcttttcaccaagaatgtggtgctggtgtttctcttgccaatgggctaaacaaaggcctccgcaccgggtaacatttgggcaggcctcttcacacatgcctgtccttctccgtcgcacttggctaaagccaacaacctatgtgtgaaaagtataaagagatggaaaaattcccatgaaaaatccttccgcaaagcaattgcgagacaactatggcgtcatctgataacatgatttctattttgcatctgttccattgttggagggcactcatagttgcaagccttgcatgtacatatgtaaaaattataagtgaatgcatctgctcaggttattagccactgattgtgaaataatctgaagtttgagagtctcagttaataacctataggtgctgagagcattcaaagacccaatagcataagtattaatcacctcttttctccagagtagcaaataagaaaccaggaagagctcagtttcacttccaacttgttctttaagggcctcagagttgatagttgtcctcatctgggctccctaatgccacgacaaatcaactagaaaagaaatatgccccaaatcagcacccaaacacgctggtgccagcctgtgtccatgttcctgcaacagctgctgcccacggggtaggactgagccaggtctaagattagcagtgtcccagctcctcaggttcctgcacattgactcacaacggaatcaaaactcgggagctcaactctctggtttcttctgctttctcttctgcaattttctttctttttttttttttaactttattttactggcaaccatgaaagagatatttacagcaagactcagagcaaggtcagagacccctaaacaggtggttttcccttaacttatcaggctggagcagagtttaaaccaaactagaggaatccctctagctctgggcacaatgtaatctctacatcctggccttcatcgcattggctggaagctggttggcttcatccaagggcctacttcgaggggattcatgcctctgcaagtttgagcatccctcactcctggcgctggcggtgccactcagccacggactggagcatccacttggtctggagcttgtacaaatagtagccataaaccacgactttggtgaggtctgaagactccagaggcttcagctcgagcatggccttgctcaccagctcaatgtaagggattcctccctcgccaacctccagagagttaaagacatctctaccacccggtggagaagaaagctgaccactgctgtgcttccagaatgcgagaagctcttgaagcccaacattccctttcagtgatattactgacattttcccaaagctgtgttcttccgagctgcacatggcattgttaacaactatttcttaaaaacatttcttttagagacgggattttgccatgttggcaggttggtctcaaacttttgggctcaagagatccaccctcctcagcttcccaaagtgctgggattaacaggcctgagcactgcgcaacaactattgaaacccttgtcaggcgcctgttggacccctggagcctggttaatgggaacgaccacagtgggcatcaaatgggtaacttcagtacgccagcacggttgagaactattgttcaacgcgaacttcacatatgaagcccctctcatgtgtcaggcacggcgtcagatgctggacggcaagaaggtggccttctgcaaatggggatgagtcctcaccaggtgtgggatctgccagcacctcgatcttgggcttcccagcctcagtactgtaagaaagtttcgctctttcacccaggctggagtgcagtggcacgatcttggctcacttcaacctctgccttccggtttcaagtgattctactgcctcagccttccaagtagctgggattacaggcacccaccactatgctcggctaatttttttgtattttcaatagtgacagagtttcaccatattggccaggctggtgtcgaactcctgacctcatgatctgcccacctctgcctcccaaagtgctgggattacaggcgtgagccatcgcgcccagcccataagttttagtgcctttttttcatagatgctgaaactgaaaaagggtgtggttaaataatttgcccaagccagtctctggcaaagatgggattcatatccagctactgatgaccaaacatggtgagcaggtatcctatgtcccgaggaagcccattccacctgagcactggatggaagggatatcgcaatcacccccatgcatgatggacaggtctaggagcattggacactcaatggaaactcatgcccctgtcagaaattggcaactgccacttccacggcacttgcaaactttgcacactgtccagatgtggcctggcttgttgctgtcatggtagcaatagtaattacttaggggatttctgcagatcttgctcatattgtgcataatagggtataaaatatggaaaatttgcctctaaaataaagtgttgctggcaaag

SEQ ID NO: 1453 - DNA, 3279 bp, Homo sapiens
agtagactctattatttcaagaaagatggcgtggataaactgttagatgctgctcagaaacacaatagaacatggacagagaagtgacttgggataaatcgtgttcctgtctatctcttactctgggaccaccactgagctcgagactgccagacacttctttctaaactcagcacccagcaaaggacctggcacataataagtgctctggttgtacatggaggatgaccgaaaaaaccaatggtgtgaagagctccccagccaataatcacaaccatcatgcacctcctgccatcaaggccaatggcaaagatgaccacaggacaagcagcaggccacactctgcagctgacgatgacacctcctcagaactgcagaggctggcagacgtggatgccccacagcagggaaggagtggcttccgcaggatagttcgcctggtggggatcatcagagaatggtccaacaagaatttccgagaggaggaacctaggcctgactcattcctcgagcgttttcgtgggcctgaactccagactgtgaccacacaggagggggatggcaaaggcgacaaggatggcgaggacaaaggcaccaagaagaaatttgaactatttgtcttggacccagctggggattggtactactgctggctatttgtcattgccatgcccgtcctttacaactggtgcctgctggtggccagagcctgcttcagtgacctacagaaaggctactacctggtgtggctggtgctggattatgtctcagatgtggtctacattgcggacctcttcatccgattacgcacaggtttcctggagcaggggctgctggtcaaagataccaagaaactgcgagacaactacatccacaccctgcagttcaagctggatgtggcttccatcatccccactgacctgatctattttgctgtggacatccacagccctgaggtgcgcttcaaccgcttgctgcactttgcccgcatgtttgagttctttgaccggacagagacacgcaccaactaccctaacatcttccgcatcagcaaccttgtcctctacatcttggtcatcatccactggaatgcctgcatctattatgccatctccaaatccataggctttggggtcgacacctgggtttacccaaacatcactgaccctgagtatggctacctggctagggaatacatctattgcctttactggtccacactgactctcactaccattggggagacaccaccccctgtaaaggatgaggagtacctatttgtcatctttgacttcctgattggcgtcctcatctttgccaccatcgtgggaaatgtgggctccatgatctccaacatgaatgccacccgggcagagttccaggctaagatcgatgccgtgaaacactacatgcagttccgaaaggtcagcaaggggatggaagccaaggtcattaggtggtttgactacttgtggaccaataagaagacagtggatgagcgagaaattctcaagaatctgccagccaagctcagggctgagatagccatcaatgtccacttgtccacactcaagaaagtgcgcatcttccatgattgtgaggctggcctgctggtagagctggtactgaaactccgtcctcaggtcttcagtcctggggattacatttgccgcaaaggggacatcggcaaggagatgtacatcattaaggagggcaaactggcagtggtggctgatgatggtgtgactcagtatgctctgctgtcggctggaagctgctttggcgagatcagtatccttaacattaagggcagtaaaatgggcaatcgacgcacagctaatatccgcagcctgggctactcagatctcttctgcttgtccaaggatgatcttatggaagctgtgactgagtaccctgatgccaagaaagtcctagaagagaggggtcgggagatcctcatgaaggagggactgctggatgagaacgaagtggcaaccagcatggaggtcgacgtgcaggagaagctagggcagctggagaccaacatggaaaccttgtacactcgctttggccgcctgctggctgagtacacgggggcccagcagaagctcaagcagcgcatcacagttctggaaaccaagatgaaacagaacaatgaagatgactacctgtctgatgggatgaacagccctgagctggctgctgctgacgagccataagacctggggcccaactgcctctccagccttggccttgatcccagaagctagaggagctatttagatctccggatttacatgcattaccctcatgttccctgaattctcccaaaagcctctctgaccctgggtttttggcctaaacatccaagattccgcctccaagtttagcccaagtttgtggagagtacacactgcgttggctgggcttccgagagcttcggcctgcctaagtctgaggaagggagaagggggcagctgtctgccaggagtctggctcttttgctcatagcgactcctcccttggttctggcccccgctttttctaacatgtcttctgaatgcttcctttttccctgcacacgcatgtacttcgagcaccgactatagacatttagatcaggtacccagtgtctgtctcccacgacaggccaagggatgtgatagtgttgttgggagggggtagaagggtgcccactcagggttattcctcccccaacagatgctccagctcctgctctgtagattgatctgtctgtctgctagccaggatgggatctctgcagtcttctgtggaccaaggagatagacccggcttctggtccattccagggcagggagtgaggagcaaggcaactggcatttgtccacctggagacagaggtagctggcagctctggccatccctcccctatgaagagcattcctaaagaggccctgaaaactgctggtggtggggagactcttcaagttaatatctgcattagaggcacctatgagttaaaaaattcctttgaactatctgtggttattgctcaactctgctgttcacattctctccctcccttcattaatccctctcttttcaccatatggttgtccctcagtattcatcagggattgctttcaggagtccccatggataccaaaatttgtggatgttcaagtccctgatacaaaatgacgtcatatttgaatataacctatgcacatcctcccatactttaagtcatctctcgattatttgtaacacctaatacaatgtcagtgctatgtaaat

SEQ ID NO: 1454 - DNA, 3448 bp, Homo sapiens
ttttccaggtaggtggaagtggaagtcagggcgcccgaagcccagagctgaatccaagacccaggggcccctctcctctgtggcctcagctgctgcttccgccggaggatgaagtgaacctgaccagaggactctgagcagagccccttcacctgctctggaggcatgggtcccacgtatccttccacttggcggatttgtggcacatgcctgcctgtgccaagcgttgttctaggccttcctgggcgcagcgtctagcagggaagacggtggcccatgggcaggtgccggcaggacaatggtgggagctcaggccccacggagcaggcggcctggaggtactcacagactcatcaggccatcctggggccctttggggagctgctgacagaggatgacctggtctacctggagaagcagattgcagacctgcagctccggcgccgctgtcaggagtatgagagtgagctgggccggttggcggctgagctgcaggccctgctgcccgagcccctggtcagcatcacggtcaacagccacttcctgccccgggcgcccggactggaggttgaggaggcctcaatcccagcggctgagcccgcagggtctgcggaggcctcagaggtggcccccggggtgcagcccctgcccttctggtgcagccacatctcccgcctggtacgcagcctgtccctgctgctgaagggcgtgcatgggctagtacagggggatgagaagccatccacccggcccctgcaggacacctgcagggaggcctcggccagcccccctcggagcgaggcccagcgccagatccaggagtggggggtgtctgtgcggacgctgcggggcaacttcgagtcggcctctggcccactctgtggcttcaaccctggcccctgcgagccgggggcccagcacaggcagtgcctgagtggctgctggccagccctgcctaagccccgcagtggcctggcttcaggggagcccaggcctggcgacacagaggaggccagcgactctggcatcagctgcgaggaggtgccatcagaggcgggtgccgcagccggcccagacctggccagcctgcgcaaggagcgcatcatcatgctcttcctcagccactggaggagatcggcctacacgccggccctcaagacagtggcctgcaggaccctaggagcccgccacgcggggttgcggggccaggaggccgccaggagccctgggccaccctccccgcccagcgagggcccccggctgggccacctgtggcagcagcgcagcaccatcacccacctgctgggcaactggaaggccatcatggctcacgtgcccgcccggcagctgcggcggctgagccggcagccccgcggggctttgtcccccgagcagttcctgccccacgtggacggggctccggtgccctacagcagcctctcactggatctcttcatgctgggttacttccagctgctggagtgcgacctgccggcggaggagcggaagctgcgccacctgctgtgcttcgaggtcttcgagcacctgggcacccacggctgggaggctgtgcgcgccttccacaaggccgtgaccgacgaggtggccgccggccgccgggcctggaccgacggcttcgaggacatcaaagcccgcttctttggctccagccagcgtcccgcctgggatacggagcctggccgcaagtcaggtctgaccctgctcgggcccctgcctcacgccgccgtcccctgcagcggccctgagcccacagcacagcggctggggtcccgctcccagcagggcagcttcaacggtgaggacatctgcggctacatcaaccgcagctttgccttctggaaggagaaggaagctgagatgttcaactttggagaatgaccctactggcagcctgctttccagaatgtggtttgggggtgacttggagtttctcttttcttttccttgctcacacccttggtgttcaggtgagccgggcaaggctgcctccagtcctaccagttatcggaggctgcgggactgttctgttgtggcatggttctcctccgagctgggactcagactccttctcaccactgcacccaggaagccccttggcaggtcctgaagtgaggcaatgggccaccccagtccagggcacctctgcccagccggcccccgagacctgggatgctgcctgtttctcacttgtccttccccagtgtcaccagttcccttggcgtcctgtccctcagtttctgtggtgctggtggcctcggccacatccatctttcatgtgagtctgaggtggccccaggccctggtcctgcccctgtttctcctgctgaccttgggtcacaccccttcacctcccatctgtgaatttgggggagctggagtgattccgaggacagattccatgggcaggaggccttcctgccaggccatccctgctggtcacacaccgatgcccgccaggccagtgccccagcccagggtgctccggaggccctgcttcctcaaaggaggctccccatggggcccctgtcctccagcctgaccagccctggcctagtcgtgggccccagcaaggctggagagcagggacgtgggagtagcagtggctgagagagtcctccaggcagggtggctggtgcccactctcaaaggctgctgcacacagaggagaatgccggcaggggtgggcagcagccagacctcagtggggcgtggatactccgtgagggcacctgggtgtcacccacagtgcacctcttcacaggggcctgggtactggagggagggatacaggaagggagatggattccgtcctcgggggctctgggtgctgcggagtattcctgggcatggtgctgggcatggctggcatagggtgtggcttgtccccagcttctgatggcagccaggagaatgggtcatcacccaggctctggggctgaggagggctgggcccaagcccacagggactttggaggtggggctctgcagctgtgagatggcccagcagggagtggcagggacgggaggcttcaggaatattcctcctggcatccaggccccctgggacagaggagggtgcagtcaggcgacaggcttatcaggactccctgcctcaatccctggggattgtccaggcaaaacctggagggcagcgggcaagctgttggatggaacagagagaccctcgcagctgactagggcccaaggggacggacactcaagaagatgtaaaattgggaggggtggtattggccattggggcaggcagggccgggaagggaagtagcaccggccgcagccccaagccagtggcttttccacaagggcctatcctgcagccggcccgctccggcttcctccactgctgaagaccctgctgtagagctgaagctgaacatgtgtttgctaaataaagattcccattcct

SEQ ID NO: 1455 - DNA, 4292 bp, Homo sapiens
atttgcaatgaaggtgccaagaatatacactggggaaaggacaagtttcttcaacaaatgatgctgggaaaactgaatttgcagaagcgtgaaagtaaacccctatctctcacatatacaaacaataaatcaaaatggattaaaggcttaaatataagacctcaaactataaaactgctataagaaaatattgaaaaaactctccaggacattggtctgggcaaagatttcttaagtaatactctcaatcacatacaaccaaagcaaaaatgggcaaatgggacaacatgaagttaaaaagcttctgcgcagcaaaggaaacagtccacaaagtgaagagagaacccacagaatgggagaagatatttgccaactacccctctgacaaaggattaatcaccagaatatataatgaattcaaacaacacaatagcaaaaaatccaatagtctgagtgaaaaaaggcaaactataatttggagatcatggcagatgggaggcaagactagatttcagctcccactcagacagacaggacagcgtgtggagtctcgcattgtgaactttttctccagaacgtctgcaggaatacactaggaaagccaagagaacccacagatcctctgaaggaagtggattgctcctgcaggacctgggagacaccccaaatactgtgagtgcccaaactgtggaagtgggaaagggagatcatctgcccctgaacacacacaccccactggggaatctgaggtctagattatgtgagaagattctgaccttactgggaacggagtcaatttagagagccaagcaaaatacaggggtagaggaagcagcaggaaaatccctgtgagcttgctgggtcccctagcaagccatttctgcctcacctctcaggggtctttgaggagggctgccagaggcactgggaagtgtcctagggaggaagaaacctccagctgaactttgtaacaatttgaacccatagagaagtctcctggccagaactttggggagggcgtgaatccagcatgcagactccataggccagaaaagaaggaaagccatatttgctttcacagctgggaggtgggtggcctggggcaagttatcagccctgctcacccactgcctggaaacagactcagtgctgttggcaggggcacagtgggagtgacacaggccgtttggggtgcatgggagctgggtgaagcctgtgactgctggctttcccccacttccctgacaacctgcaggacacagtagaggcagccataatcctcctaggaacacaactccattgacctgggaagctttcccctatctcccacagcagccacagcaagacccatccaactagagtctgagctcagacatgactaaccctgcccccacctaatggtccttctctacccaccctggtaactgaagaaaaaggttatataatctagggagttttagggccctgtccaccgcctgttcctccccatactactacagctgatgctctcttgaaagtgccacctcctggcaggaagccaaccagcacaaaatgtgcactcatcaaccaaagcttagaaccctcacagagtccacttcacacccttgctacctccactgaagcaagtgttgagagacccgcaggtggttcacatcacaggactctaaagacaacccacagtaccagcccagagcctggtagacttgctgggtggctagatccacaagagagataacaatcactacagctcagctctcaggaagtcacatacctaggaaaaggaggagagtactacatcaaggaaacgccccgtgggacaaaagtatctgaacaacagcgttgagcactagaccttccctctgacagaacctacccaaatgagaaggaaccagaaagccaactctggaaatatgacaaaacaaggttctttaacaccctcaaaacaccacactagctcactagcaatggatccgaacaaagaagaaatccctgatttacctgaaaaagaattcaggttagttattaagctaatgagggaggcaacagagaaaggcaaagcacaatgtaagggaataaaaaaaaatgatataagaagtgaagggaaaaacattcagcgaaatagcataaataaaaaatcaaaacttcagaaaacaatgggcacacttacagaaatgcaaaatgctctggaaaatctgagcaagatttcaggtccaggaagactggtgagcaggtgtcagagagacttggtgggttgtcatcaagtaggactacccttgaacctgtgcaaaagagacactaacttggtgagctccttctcaaaggaacatatagggccacagctggctcttactcataagcaccatctactggtctttaggccagactgcacagcccaatataaaacctgcctaggaaagtgcatagcctaagaccctatccagcatattctacagtcacacaccctaggaaggggaggaaatgtcaagaaaaaaatatataaagaaacaaacaaaaaatcctatctgcatgaaaataattacgaatattagaagtgtcagtctttccagatgagagggaagaagtgtaagaattctgagctgtgaaaaatccaaatgtgacgacactatcaaaggatcacactagctctccagcaatggtccctacccaaaatggaaagtcagtaatgacagataaagaatgcaaacaatgagatatcatcttacaccaggcagaatggctattattaaaaagtcaattttggtgaggatgcagagaaaaagaatgcttatacactgttggtgggaatgtaaattagtacaacctctatggaaaacagtatggagatttctcaaagaattaaaaatagaactactattagatccaacaaccccactactggatatctacccaaaagaaaagaaatcatcatatgaaaaagatacctgcactcatatatttatcacagcactattatcaatagcaaagatttggaatcaacctaagtgtccatccacaggtcaatggataaagaaaatgtggtatatatacacaatggaataatattcagccataagaaaggatgaagtcatgtcttttgcagaacatagatggaactggaggctattaccttaagtgaaacaaattagacccagaaagataaataccacacgttctcacttataagtgggagagaaataatgtgtacagtgggcatacagtgttcaatagcagacactggagacttggaaggatgggaggctggaaagggggtgagggataggaaactacgtaatggataaaatattatttggatgatggttacactgactgctcagactttaccactgcacaacctacccatgtaagaaaactgcacttctacctgttgtatttatacaaataaaaaaggagaaaaagattatttcttagtcaaattacttgtttaggggcctttaaggaaaacaactttgcatccaacagttgggctgcactgtgaaaaaaaaattattcttcaaggacacagtttatagaaggctacaacaaaagacatttaaaggctattctgctatctatattatgatggaggtctttgcaatctgtgtcataatgattaactttgagaattttactgtagtcagtgatacggtttggatctgtgtctcatcgaaactcatgtcaacttctaattcccagtgttggaaatggggcctggtgggaggtggtttgatgatggagggtggatttttcatgaacgtttagcaacatccccttggtgctgttcttgtgaaagtgagtgagttcccatgagacctggttgtttaaaacagtgcagcatctccagtcaatggaatattggagtatacatgtcaaaataaagaccagtattaccctttaggaatattcttggtgctcaaaataattttccaacaaatacaaagttccctaaacaccgtcctctgagcctcctgtttcaagtttattcccattatgtctgtcatagcaaggttcagcccaagtcccaaattcttactgccctggaaaactgagactatatttatattttatatgcaaaaaaggaggctctgataccttggcttggataaaggaacaatggaagacatttaattttcttttgttactttcctctgttactttaaaaataactcccttattatggttttccagaatttgaagaaagcatacatattcactcaacatgccacaaaaatttcataggttttgagcatgtacctgcccagatattatcttgccatattaaagtctgctaattt

SEQ ID NO: 1456 - DNA, 4748 bp, Homo sapiens
gtgtttgtgtatgtgtgtgttgtgtctgtgcatgtgtctgtgtgtctgtgcatgtgtgtctatgtgcatgtgtatgtgtgtctgtgtctgttcgtgtgttgtgtttatgtctgtgttatttatgtcgtgtgtgtgcgtgtgtatgtttgtgtgtctgtgtttgtgtgtgtgttgtgtttatgtctgtgttatgtcgtgtgtgtctgtgcatgtgtatgtgtgtttgtgtctgtgtgtgtctttgtgtgtgtgtttgtgtttatgtctgttgtgtgtgtttaggtctgtgttgtgtgtgttgtatgtgttgtgtgtgtttgggtgtgtgttgtgtgggttgtgtgtatgtgttgtgtatgtttatgtgtgtgttgtgcatgttgtttgtgtctgtgtgtatgtatgttgtttgcgtgtgtgtgggttttgtgtgtgtgtgtgtgtgtgtgtgtgtgtgtgtgtgatgtgtgtatgattcctgtgttgggatcaggtagatgcgggtgatgtgactaagatctggggccatctcttagggatttaatggcttcttgaggagagacagtcatagggaagttccgtcagggggttccccagacgggggctagagggaggtggcactggactctgcgtgggggtcctggggaagacttcaccggaggcgcaggcgcagtgggagccgaacattgaaggagaattccccagccttctgcatccaggcagaggacccagcatgtgcaaagcatggggttaggaaggtgagccaggcatggcaggaaggcctgtgccatgctcaagtgtgaacttggttttgaagaacaaggagggagtgaggtggtcatccactttccctgtctccctactccctgaccctttctgcacctgccctcttccttcccagtcaaaaggggtaggaagggctctctctgggccataaaaagaaatccaagcaagatgtcctggggacagaggcaagagcaatgagttccatccaatctgggatgtctggaacgatccaccgaggaggtggtgatgcttgagctgaaccttgaaagatgcatggatggggaaaatggagttctcccagctgagcaaacagcacctgggaaggctcagaagctgagggcccggaggggtgggcagtgaggtgggaaacgcgggtggagccaggttgtggaagccttcctcatgctgggttagggagctgtgggttttattctgtgcttagggccgccatgaatccagactgtgccttttttttttttttttttgagacagagtctcgctctgtcacccaggctggagtgcagtggcgcaatctcggctcactgcaagctccgcctcccaggttcacgccattctcctgcctcagcctcccaagtagctgggaccacaggcgtccgccaccacacccggctaattttttgtatttttagtaaagacaggttttcaccatgttagccagggtggtctcaatctcttgaccttgtgatccacccgccttggcctcccaaattgctgggattacaggcgtgagccaccgtgccggtcccagactgtgcctttttaagatgagcaaaaggcacctttccctgtgggcaggcagcatttcatgcagggtgcagtgctgggcccgtgctggggaaaggggactcccgggcggccacaatccgctcaacatctgcagccctggttgcatgtcacaggaggtgtttgaacagggtttgtgccttgtgctgatcatttgaaaatggagggtgggttcgagtgtggagtgggcaggcgaggagatgaggaggacagacagggctgggcgggacctgacgtccggatgggccttcccggggaagctgagctgacgtccagatgggccctctcagggaggctcgcttagaccgtggaccagaatcatgtggagagaggagcagggaggtttctcccggggaatgacttgagccacccaggggagaggctgtgctgggcccagggtgactggccagctggagccaagggtgagggagtgagcacgaggccacagccctgagcatgttcctgacttttcccttgcccacctgttccagagctgggggacctccctctggtccgcctggatttctcctgtaaccgcgtctcccgaatcccagtctccttctgccgcctgaggcacctgcaggtcattctgctggacagcaaccctctgcagagtccacctgcccaggtgaggcgggtgcctggggggccacgaggacaggggtgtggctaggcaggagtggggttggtccccttggatagctgagcaggatccggggagctgccctccctgccaactccctggcgtgtgctgccccgcacacaggtctgcctgaaggggaaacttcacatcttcaagtatttgtccacagaggccgggcagcgtgggtcggccctgggggacctggccccttctcggcccccgagtttcagtccctggtaagtcctaggtggggaggaaggaagccctgggatactgaatgccccttcccggccccaggcaccccctgctttctggcaggaggatggggggctgttgtccagcatcaggctgaccagatccgcctggctggccccagccctgcagaggatctatttccgggacatcggtacgatggtgggctggactcaggcttccacagcgttgatagtggcagcaagaggtggtctggaaatgaggtaagggcgtcctgtccatgggtgattgagggtgtcagccctgggagagcacctctgaactggggacctccaaattgcagggtgccaggcagaggctggagctgtcctcttccttccctctgcccagcatcccagggaagggctggctcagcagagaccctgagcttagtcccacacaggaccccccaggtcctgagcccccatgtacagagaggccatctcccatctctgcctctgcctttacagtcaacagatgaattttcagagctgtcattccggatctcagagctggcccgggagccccgggggcccagagaacgcaaggaggatggctcagcggacggagaccctgtgcagattgacttcatcgacagccatgtccccggggaggatgaagagcgaggcactgtggaggagcagcgaccacccgaattaagccctggggcaggggacagggagagggcaccaagcagcaggcgggaggagccggcaggggaggagcggcggcgcccggacaccttgcagctgtggcaggagcgggaacggcggcagcagcagcagagcggggcgtggggggccccgaggaaggataggtgggacccagggccgcccggggctgttgctggacactgagccctggaaatggggccaccgagccccgctgagccgttctgccttggggctagctgaccccacctctccttgttccagcctcttgaagccagggctcagggctgttgtgggaggggccgccgccgtgtccactcaagccatgcacaacggctcgcctaagtccagtgcctcccaagcaggggctgcagcggggcagggggcccccgcccctgcccctgcctcccaagagccccttcccatagctggaccaggtgggacagggattttgggaggaggatggggcctgtgttggtgagggctggttgggagagagggacacagaggggatgcctgtctcacctgcccctgtcgctgtgtccctggttccggccccagcgacagcacctgctccacggccacttggctccattcagagaccaaacagcttcctcttccgttcctcctctcagagtggctcaggcccttcctcaccagactctgtcctgagacctcggcggtacccccaggttccagatgagaaggacttaatgactcagctgcgccaggtccttgagtcccggctgcagcggcccctgcctgaggacctggccgaggctctggccagtggggtcatcctgtgccagctggccaaccagctacggccgcgctccgtgcccttcatccatgtgccctcccctgctgtgccaaaactcagtgccctcaaggctcggaagaatgtggagagttttctagaagcctgtcgaaaaatgggggtgcctgaggctgacctgtgctcgccctcggatctcctccagggcactgcccgggggctgcggaccgcgctggaggccatgaagcgggtggggggcaaggccctaccgcccctctggcccccctctggtctgggcggcttcgtcgtcttctacgtggtcctcatgctgctgctctatgtcacctacactcggctcctgggttcctaggccccaaaatcggccctccctcacccctttcccttcctctctatttataaggtccctgctccacccgaccccacctgcggtgccttcagccccaaccaaagacactagtgcacccccttcacagacactgacctcagaggccccactctggtgcccccagaccctgggcccccagcctctggcctccctccagtagccccacgagtccccacctctcagtgctgacggtgccttcatgtccccgccggccctgcccctgccctctgtaccccgtgaggggtggcaggagctggagtctcccccttcctcctgtgccctccccttccccccccaacagctgctatgggggggctaaattatctctattttgtagagaggatctatatttgtaggggttcggggcccaggccgggtccctatctctgtgtataaactgtacagaccgtg

SEQ ID NO: 1457 - DNA, 3678 bp, Homo sapiens
gcaaaagcatttcagaaagaggggagagcaggagcataaaccctgaggtggagcatgcctggtaaagtgtgaggaacactgaggtcagtgcaactgaagtggaatgaaacacagctggaaaattaggggcctgtcgagcgatgttggaagaagaaacagatcaaacctatgagaatgtcctggctgagattcagtctttcgaactgcctattgaagctactttaaggtctgtgtatgatgaccaaccaaatgcgcacaagaagtttatggaaaagttagatgcttgtatccgtaatcatgacaaggaaattgaaaagatgtgtaattttcatcatcagggttttgtagatgctattacagaactccttaaagtaaggactgatgcagaaaaactgaaggtgcaagttactgataccaaccgaaggtttcaagatgctggaaaagaggtgatagtccacacagaagatatcattcgatgtagaattcagcagagaaatattacaactgtagtagaaaaattgcagttatgccttcctgtgctagaaatgtacagtaagctgaaagaacagatgagtgccaaaaggtactattctgccctaaaaactatggaacaattagagaatgtgtactttccctgggttagtcaataccggttttgtcagctcatgatagaaaatcttcccaaactccgtgaggatattaaagaaatctccatgtctgatctcaaagactttttggaaagtattcgaaaacattctgacaaaataggtgaaacagcaatgaaacaggcacagcatcagaaaaccttcagtgtttctctgcagaaacaaaataaaatgaaatttgggaaaaatatgtatataaatcgtgatagaattccagaggaaaggaatgaaactgtattgaaacattcacttgaagaagaggatgagaatgaagaagagatcttaactgttcaggatcttgttgatttttcccctgtttatcgatgtttgcacatttattctgttttgggtgacgaggaaacatttgaaaactattatcgaaaacaaagaaagaaacaagcaagactggtattgcaaccccagtcgaatatgcatgaaacagttgatggctatagaagatatttcactcaaattgtagggttctttgtggtagaagatcacattttacatgtgacccaaggattagtaaccagggcatacactgatgaactttggaacatggccctctcaaagataattgctgtccttagagctcattcatcctattgcactgatcctgatcttgttctggagctgaagaatcttattgtaatatttgcagatactttacagggttatggttttccagtgaaccgactttttgaccttttatttgaaataagagaccaatacaatgaaacactgcttaagaaatgggctggagttttcagggacatttttgaagaagataattacagccccatccctgttgtcaatgaagaagaatataaaattgtcatcagcaaatttccctttcaagatccagaccttgaaaagcagtctttcccaaagaaattccccatgtctcagtcagtgcctcatatttacattcaagttaaagaatttatttatgccagccttaaattttcagagtcactacaccggagctcaacagaaatagacgatatgcttagaaaatcaacaaatctgctgctgaccagaactttgagtagctgtttactgaaccttattagaaaacctcatataggtttgacagagctggtacaaatcatcataaacacaacacacctggagcaagcttgtaaatatcttgaggactttataactaacattacaaatatttcccaagaaactgttcatactacaagactttatggactttctactttcaaggatgctcgacatgcagcagaaggagaaatatataccaaactgaatcaaaaaattgatgaatttgttcagcttgctgattatgactggacaatgtctgagccagatggaagagctagtggttatttaatggaccttataaattttttgagaagcatctttcaagtgtttactcatttgcctgggaaagttgctcagacagcttgcatgtcagcctgccagcatctgtcaacatccttaatgcagatgctactggacagtgagttaaaacaaataagcatgggagctgttcagcagtttaacttagatgtcatacagtgtgaattgtttgccagctctgagcctgtgccaggattccagggggataccctgcagctagcattcattgacctcagacaactccttgacctgtttatggtttgggattggtctacttacctagctgattatgggcagccagcttctaagtaccttcgggtgaatccaaacacagcccttactcttttggagaagatgaaggatactagcaaaaagaacaatatatttgctcagttcaggaagaatgatcgagacaaacagaagttgatagagacagtcgtgaaacagctgagaagtttggtgaatggtatgtcccagcacatgtagacctcacatggcttgcactcagtgacaccaaatccatgattcaatgttgatcttgagcaagtattggtcatgatacagtaatttgtttacagaatccaaaaatacaatagagaagatacatgagggcttaaacaagaaatagtaataaatatcatttgtatggatttttaaataatcgaatactattttatatatggaaaaaaatgaccattttttcacttttaggggaaaatgcaaaagtgtaatacataaattgtcacaaattatacctgaaattgattacaaatacatttgaaaaacatatgcctctactcataagtatttttttctatttagacttgaatgataatctgttttttgatcagtatatggctttggaattcaatcatgtccgatatggtagtatttcactaccattttctgacttttagcttttattttcacctcaatgtgatttaagcagaccaaaatttctaattctgctaattctgaaggggaaatagacaaatcttaaaagctgcctgaaatcaaacttgatttaactcagtaagaatgtgaattatttgttctacttgggtggtttaatttaatcgttctgaatatgaacaaaaggttttggattttctaaagatgcagtgttgtttctgttcatcagggttaatatttctaactatattgcttgtaggtgaccccattctggatttgtttggtttggtttggttccagttaaaagagaggacaggaactaaatggggctaaccacttcaggtgcagcttgtgcgagggtagatggttcctgcacacagaagttaccacaggggtcaggttactttcttcaaatagcagatttcagtactttatcctcattgtggaaacaagccaaaccaaatgaactctggaaaacctaaaacaaatgtacattttcctttgtgtatgtttctgtggtccaaatggcaatataaatccagtctttattctccctttgttgtatttatgctgaatcttccctttgccttttcaggatttaggcctgtaagaaactatgcctgattctgtaaaataagtgtaaagaattatatgtacatctctggattttgtgatgaaatattaaaaatattgagcaagttgttgaaaatgc

SEQ ID NO: 1458 - DNA, 3597 bp, Homo sapiens
gagacacagtgggtgtccgagggggggctctgcgtccggaggcgagacgtccgaggtcagaggggaggagacggacccgaccttccttggctgtgctctccagccctgtcctgtgctggacccaacctaacctctgcagcctccctgccctggacacaaatctggctgagaccccagaccctgatggggcagagcctggcactggaggagccaccaggatgggcccctgtgggtgtgggcagagggtgatcctcagttcaggtttttgccagaagatgggttcctgcaggagggggtctcagcagctcagacttcagatgcgctcactgctgctcactgtgggacagccagacacggagccctctgttctccagcagttgtggacaatgagggatccctggagggatgcctggtgggcagcaggagtccctcttgtgggtcagggtgcggggatgggctctccctgcagggacttcccagtcttgtcctctgggattggcagtttgcaggggtatcctcggcatcagaccaggggggccacacagggacccagatctatggggcccagccccgggaagaccagatgggctcagtggagaagctgaccacatctgctttcctttcagccaaaccggggagcgtcccggcacccaggcctctgcgggtaaccccaggcatcaagaccctccctcaaggggaggagctggctctcccctgcccatcagcacagctccagaatcccaaggggtcagctcccacatgggggcctggtcctgccacacactggcctagctgggctgtccccgaggccaaggcctagcggcatgagggggcttccgtggagcccagggcagtgggctgctctctggagtccctaggactcggggtgtggctggcctgtccccagatcaggacacaccccaggttgtccagtggttcccgtgctggaactcctgttgaagccacccagggacctggatgcttcccacagttcagcatggagcaggggtgctgggccctgacccctccacgtctgtcctggacaccccaggaccacagcacaggcccagccctgcaaccccagcggggccctgataccaggccctgcccagccccgtaatgaccaagaggcaggtccagagatacctcctgcacagggtcacctgcatctgacgcccccagcaggcagtgaccagcacggtgtggaaggagccagggtggcacccggcagccctagagggctcctggcctcgggaagtctatcgatggggaagctggtcactcggaggctgctggggagaagggggagtgtggcattccctggacagaagggcaagtgtggcgtcccctggagagaagggcgagtgtggcgtcccctggagagaagggcgagtgtggcgtcccctggacagaagggggagtgtggcgtcccctggagagaagggccagtgtggcgtcccctggagagaagggggagtgtggcgtcccctggagagaagggcgagtgtggcgtcccctggagagaagggggagtgtggcgtcccctggagagaagggggagtgtggcgtcccctggagagaagggggagtgtggcgtcccctggagagaagggggagtgtggcgtcccctggagagaagggggagtgtggcgtcccctggagagaagggcgagtgtggcgtcccctggagagaagggggagtgtggcgtcccctggagagaagggcgagtgtggcgtcccctggacagaagggggagtgtggcgtcccctggagagaagggccagtgtggcgtcccctggagagaagggccagtgtggcgtcccctggagagaagggggagtgtggcgtcccctggagagaagggggagtgtggcgtcccctggagagaagggggagtgtggcgtcccctggagagaagggcgagtgtggcgtcccctggacagaagggggagtgtggcgtcccctggagagaagggccagtgtggcgtcccctggagagaagggcgagtgtggcgtcccctggacagaagggggagtgtggcgtcccctggagagaagggggagtgtggcgtcccctggagagaagggccagtgtggcgtcccctggacagaagggggagtgtggcgtcccctggagagaagggccagtgtggcgtcccctggacagaagggggagtgtggcgtcccctggagagaagggcgagtgtggcgtcccctggagagaagggccagtgtggcgtcccctggacagaagggggagtgtggcgtcccctggagagaagggccagtgtggcgtcccctggagagaagggggagtgtggcgtcccctggagagaagggggagtgtggcgtcccctggagagaagggggagtgtggcgtcccctggagagaagggggagtgtggcgtcccctggagagaagggcgagtgtggcgtcccctggagagaagggggagtgtggcgtcccctggacagaagggggagtgtggcgtcccctggcgagaagggcgagtgtggtgttcgctggagagaagggcgagtgtggtattccctggacagaagggggagtgtccctgcagccctggccagccagcggcatgccctgctagctctcccccaacctcagggatagggaaccctgacagggcacaagtccccgtcccagaggggcctggcccagcctcaacccgggccctgggaggggaggggcaccaggggcgctgtgggcccccagcagaagccaggatgaccacacaggggactgagctgtctgtggctgtggccagacctagaacttggcccaaggcagggcaagccccttggagcagagtgggtggcagagcctgtgtatacccagcaaggctgagccagtgacactaccaggctccaagagcaaccagccatgaagcaggcgtggggcaagggtagggtgagggcaggggcgggggagagtggggcaggagcagacggaccagctgccaacctcgtccactccaggaggcagggatggccaggctcccacgccctactggccgctacccgaccaccaatgaggcagaggcctgaggccagtcggtgctggagccctacttccaaggtccacagaccgcttcaggccacagagccgaagaaaactgggcatgtgaaggcccaggaggcggggtccctatgtctgccattcttggcaggtgcatttcacgctgggagcaagtcaggaaaggtgatgcctctcaccgccaagaaggctcccagcagagaccagagccaccggcacagatccccaacccctgaaaccacctccctctggaggaccaggacgccctcctagttggtagaagcacagtaagctctctgtccttatgatctgcctgcttgtccagagctctctgccagaagccgtggacactggggcaggcgggaggagagagcaccacagcccagacccctgaccggcctctcccaacctccccctcccaaaggctatggagagcccagggctggacaggcctgaggttccgacatacctcatgccaggccacacgcgcaccgtgtcccaccctcagccgaaaaccaagatcaagaccatccaataattt

SEQ ID NO: 1459 - DNA, 3140 bp, Homo sapiens
atgtggacgaatgtcgccgcgtgcccccgccctgtgctcccgggcgctgcgagaactcaccaggcagcttccgctgcgtgtgcggcccgggcttccgagccggcccacgggctgcggaatgcctggatgtggacgagtgccaccgcgtgccgccgccgtgtgacctcgggcgctgcgagaacacgccaggcagcttcctgtgcgtgtgccccgccgggtaccaggctgcaccgcacggagccagctgccaggatgtggatgagtgtgcccgaagccccccaccctgcacctacggccggtgtgagaacacagaaggcagcttccagtgtgtctgccccatgggcttccaacccaacactgctggctccgagtgcgaggatgtggatgagtgtgagaaccacctcgcatgccctgggcaggagtgtgtgaactcgcccggctccttccagtgcaggacctgtccttctggccaccacctgcaccgtggcagatgcactgatgtggacgaatgcagttcgggtgcccctccctgtggtccccacggccactgcactaacaccgaaggctccttccgctgcagctgcgcgccaggctaccgggcgccgtcgggtcggcccgggccctgcgcagacgtgaacgagtgcctggagggcgatttctgcttccctcacggcgagtgcctcaacactgacggctcctttgcctgtacttgtgcccctggctaccgacccggaccccgcggagcctcttgcctcgacgttgacgagtgcagcgaggaggacctttgccagagcggcatctgtaccaacaccgacggctccttcgagtgcatctgtcctccgggacaccgcgctggcccggacctcgcctcctgcctcgacgtggacgaatgtcgcgagcgaggcccagccctgtgcgggtcgcagcgctgtgagaactctcccggctcctaccgctgtgtccgggactgcgatcctgggtaccacgcgggccccgagggcacctgtgacgatgtggatgagtgccaagaatatggtcccgagatttgtggagcccagcgttgtgagaacacccctggctcctaccgctgcacaccagcctgtgaccctggctatcagcccacgccagggggcggatgccaggatgtggacgaatgccggaaccggtccttctgcggtgcccacgccgtgtgccagaacctgcccggctccttccagtgcctctgtgaccagggttacgagggggcacgggatgggcgtcactgcgtggatgtgaacgagtgtgaaacactacagggtgtatgtggagctgccctgtgtgaaaatgtcgaaggctccttcctctgtgtctgccccaacagcccggaagagtttgaccccatgactggacgctgtgttcccccacgaacttctgctggcacgttcccaggctcgcagccccaggcacctgctagccccgttctgcccgccaggccacctccgccacccctgccccgccgacccagcacacctaggcagggccctgtggggagtgggcgccgggagtgctactttgacacagcggccccggatgcatgtgacaacatcctggctcggaatgtgacatggcaggagtgctgctgtactgtgggtgagggctggggcagcggctgccgcatccagcagtgcccgggcaccgagacagctgagtaccagtcattgtgccctcacggccggggctacctggcgcccagtggagacctgagcctccggagagacgtggacgaatgtcagctcttccgagaccaggtgtgcaagagtggcgtgtgtgtgaacacggccccgggctactcatgctattgcagcaacggctactactaccacacacagcggctggagtgcatcgacaatgacgagtgcgccgatgaggaaccggcctgtgagggcggccgctgtgtcaacactgtgggctcttatcactgtacctgcgagcccccactggtgctggatggctcgcagcgccgctgcgtctccaacgagagccagagcctcgatgacaatctgggagtgtgctggcaggaagtgggggctgacctcgtgtgcagccaccctcggctggaccgtcaggccacctacacagagtgctgctgcctgtatggagaggcctggggcatggactgcgccctctgccctgcgcaggactcagatgacttcgaggccctgtgcaatgtgctacgcccccccgcatatagccccccgcgaccaggtggctttggactcccctacgagtacggcccagacttaggtccaccttaccagggcctcccatatgggcctgagttgtacccaccacctgcgctaccctacgacccctacccaccgccacctgggcccttcgcccgccgggaggctccttatggggcaccccgcttcgacatgccagactttgaggacgatggtggcccctatggcgaatctgaggctcctgcgccacctggcccgggcacccgctggccctatcggtcccgggacacccgccgctccttcccagagcccgaggagcctcctgaaggtggaagctatgctggttccctggctgagccctacgaggagctggaggcggaggagtgcgggatcctggacggctgcaccaacggccgctgcgtgcgcgtccccgaaggcttcacctgccgttgcttcgacggctaccgcctggacatgacccgcatggcctgcgttgacatcaacgagtgtgatgaggccgaggctgcctccccgctgtgcgtcaacgcgcgttgcctcaacacggatggctccttccgctgcatctgccgcccgggattcgcacccacgcaccagccgcaccactgtgcgcccgcacggccccgggcctgagccctggcacccgctggccgcccacccgcgcccgccactcggggcccctgccgcgcatcctgcagcccgcttatgcgtatgtgcacggggccgcccgcctggacctggagaagggacctacggacgcctggaagctgcgacgccctgcactgctcccgcctccaccagcgcctcccactgatgtcgtggtcccgggcctggcccaggggcccctttacatgccctctcccttttataaaattttccattaaaaaccacctattttct

SEQ ID NO: 1460 - DNA, 2975 bp, Homo sapiens
agatcgaccggccgcgtcgaggtgtttccgggttcagactgacaggccgcgccgaggtgtttccaggtttggattgacctgccgagccgcagtgttttccgcggaggcgtggactttcttctttgcacgtcgtggtgtttggagacgatcctccctggccggcgggattcatgacccttcgcgcagttgccccgtccagatccacgtgcaggactggtctcgcgtgacacacgcggccggcacctttcagacggaagtggaggggctgacgtgccgtgggcagagctctagccaggctgcccagagcgcgtgtcatgtccgtgtccatgaagatggtgtctctgtgtataggtcactgcaggggggagaggaaagagctccgtggaccttgcaggacgcagcctgtggggaaggggctcccgttctcgcctgcatcccgcagccctggggtgtggtttcctgtcttaaaccacctccatcagcctggattatgttcaaattgtggagcgcagcgccggagggggcctgcatccccaccgtcccttcatgtccaggtgcggtgtctccgtcccagagaaactgcatggagtccccccacggttcccactggagccagacctcagactcggagctcctcagtctctgctgggtcagaggcagtgcgttcattttaggagcaaagttgaattcaaatttggatgagcacacgaggcccctggtggagctattccttctgcctttgaaagttctgttgagaagttgcacataatgacgttagcagtcttcgctaggcataggatgttttaatgaatagtcttccgtttccagtcatctcttactttaaaacatgtctctattatagaactaaaaaatgcccatcatagagggaaatattggaatacaatgaaataaaaaagaaaattcaaataaataatccataacttggttatccagaggcaactcctgttaatttttttggatatatttcattcctaaagttctatctttttaagattgtcatgtagggaacacaggaatcacatcccgtgcccccttcctttcttaaaatagcatagttgatgccttattaaaatctttttttattatagtaagtaataaatttcagccagatttgcatgtgtggattgcatattctcttattttctctcttttcatgttaaattattgatgccgtgaatacaaacaactccctcccacgcttgctttgctttccaattaacgcaaaatgcgaagccagtctcgtgtgccgtgtgccgcaggtcgttggggctaacttttgaagagcaagagagaggagccctttgggaggtgaggcggctccagggaggggcttggtaaggagctgccgggtctgagtcacagtttctgcagtttcgtggggatccaggtgtgctggctgagaagcctctaggaaaagatgggtgaattatttcaggcagggcccagcttgctgtgtgacaggggcagcagctgggaatgagagaggcctggctaaagtcattccaagacccctcccgggtccttccttcactcggggccacccaccaggagccagcccgccacatgttcttgggggcatcccagcacgggtctgggtgtgccgtgcaggagctgtgagtctaatttcagggtcagctgctggactcagctaggttttcccagcgtatggggtgagaacgctcccacctgggctgggggctcagacactcgagctggcttgacagaggcagccccaacccatattctccttggctttttttttttttttttgttacctcccatccatcatccaaaaaaacacatgcccagcagagaatcgctgcttctgctgcctgctcctggctgatttccaggcgacccatgcctgtgtggctatgcttcttgttaagatattgaaaaactccagtgccagttggcaaatagcgcagtagtagctggaatgagtagtggcgttaattagtaacgaaaatcctaacgtaactgcactcgtttgagccagttgtcctaagtgccacaattacccttggtaaatgggtctctaatggtgtggttttagtcaatagtagaattattaaatacgtagaattctttagtagcattataaggtccagacaaattggggatataactgctgttagttcaggggaagctgaaagaggatttgcactgcaaacagtatttttgatgcaaacatacattctcccctgtaagttacctaaggacgtggtccacaggagatgggcttggagccctgatggctgatgcggtggtcaccgagtggacagaggtggagcaggtggaggtgggtgtgtctgcacttgaggaggggtgagcaaaggctggggtgggagagcagggagcaggcagtacccagtgggtgttgaggggtcaggaggagtgcaggcacccaggtccatgtcatgtgggtgtgtacctggccattatgattcaaagcatgtccagctgtgctcccgctggcaccaggacttacgactgcccattccatgggaaagtcattggaaaagtccagtgccgttccctgtgtcaaaatgtgacccagacagggtcatcatgtagctagcaatggccacatcaaagatactatgaacaattttaaacaacaccaccaacaaaatcatttataatagcatccgagacaagaaatacttaagaataaacaaatgtgcaacacacacacactgacaaatatagtgcattcatgagagaaatttaacaaagaactaaatagatggaaggatatacaatgttcatggatcataagactcaacactgttgatttcaattctacccaactggtctgtagattcaatgtaatccccaaagatgttttgtagaaatggcaaactgattttaaaatttatgtataaatgcaaaaaattgaaaataagaaaaataattttggaaacaaaaaataaagttggaagacttatcct

SEQ ID NO: 1461 - DNA, 4084 bp, Homo sapiens
atttcctctctccttggggacaccgaaaagcagaccacccgggcatactaaggtcaagatgtcgttgatcggtttctttgttttattgtattacttgttttatttacctatttactttcttggtaaaaccagcctgccggcttgctcaggacatgaactatgacgtccctggagatggtctcttgggagaggagccccccaggccagcgaatcccgctcacctgggggttaacgagcaggcccggccatttcccagggccaccggtgctccctgatctcagtgtctccgtctgtaaaatgggtataaccagagccagcctgtgtggccctggggaaagcggcactgagggcagaccaggtgtccagcagggtcctgccccgactcccgcgcccccctcgccggccccctcgccgcggtcttgcaccctccactccccgtgcctgcaaagcctctgccccgtccctacaccaggctaatcctttgcacctcagctcagaggccccgtctccaaagccttccctgaaacttcctccttgagacacccaccatccccaccaagcctgccacacccaggcctgctatcgcccgtgcggtgtcgtccttctgataagctgtggaggggtaagggtcgccctggtctcttgttcatagccttaaacctagagccactcaagtgccgggcacatagcaggtgctcaataaatactccttgctgattgaacggcaaccagctgcaagagtgaatgcatggatgccgctcgtgggcctgggtttggagatcttagaaacaaagcttccttttgccacactcatgccttcttctatcacactcatgccttcttctaccacaatgtcacacccttacatcttgtatccgtagggaaatgtggccaggggcgttttaccaagttggtctgggatgacgtgagttaaccctcacactccacagtcagagagatgggtaacccaggtgacccagcgctaagtgacaaatacgctctcggatagaacagcccagaaagggcaagagggagagttggaacactcagataattacccttcagcgacgcagtgcacttaagtggtgaaaggagattcactggttggaaaaacgctccagggcgaagggccagcgtgtgcaaaagcaccgaagcatgaccgagcgcgggcattcccgccagccaccagtgggccacgcatcccaacatgtgagtgccgcaaggatacaagtgcctaatgtgaacctccaagtggacgatcattcagtactgactttgggcctggccccctttcctcatgcaagccttccaggcaggaactaagagtgagccatcctctacagaagagaaaagcaagacacagcaagctgagaaacttaccagggtcacccagttggttggagtcagagatgtgttacgggcagcagctcctctgcccgcttacgtctgggctttgggggctggcccagagatagtcataatgcagccctttattcagcacttgctatgggccaagtccttcattcacaagctcaagtcttcccaacccagaaagaaagatggttagttccatttcatgtaggaggaaactgtcgaggctcagaaaatttaaggaatttaccggtcatcagtaaacgagagtaaaggcctgtgtgaacccaaatctgccctcctctgaaactctcgctgcagacatcgcaccccactgtttttcaatttcatcttcttatttattcactcaaccaatatttatttaccaaagcactatgaggcccagttaagaatgtgtggtcctcgatctgacagcctggattcaaatccctgttgccccacaactctccacactagctgtgtggccttgcaaatttcactcaacctctcagggactcagtttccttgattgtcaaatgggagtaatgacatttcctacctcattgacttgttgggaggtagcattgagttatcccatgccgcacccgctcccttgtaaactctggataattaccgagctttcttataagtgcagctcatggatcactcaaggcactgggaatatagcaatcacaacaaagattctagtcatgggagatggtcacctaacaaattaaaaactaaggcatttgttaaaggactgaatgaccaagattagcgttccaaggaaaagtatggcgctctggagtggtcaggagagcctctgtcactgagtagcagtgtggccctgtccaagctcctggcctggctaggcctcatgcccatgtctgcatggcaagtgcctggaaccggatggccatggcagcttttgctctgtgaaagcccaactgctcccctggactgctcccatgttttctgtctccaccgagcaagcctctttcaaagccctagagagagacctgggtccccagcaccctctcctggaggagatctggactgaaatgtttgggacgcctcccattcaaatgctcaagtctccaaaccgctggggaggcgttgcacaagagacaggcaggggtttcagtttctggcacttgtttgctcaaaggatctcagccttcttcttcctgacatgcagcttaaacatgtgagctgacccttaaatgaaacccccacagttttccatctccttccaagagaatttcacggggtgcagggagaatggggaggacgtgaaacgtggtgtatcctgcaggattcactcccccactgacgggactaaaggtttctgaagcctgaaatattttcaactaaatgagaaaatctttgctgttgaatggcctattagagctgtcacaaatgtgatttctggaaataaacaagattataagaaggctggctggcgcagaaacagcccgatggatacaccctgggagaggcgacggggtggcccctgtgacttcgggctgcgacgcggtgtcgtccccacccccacccccctcactctagaagtcacagcgccatctactggacagcggacaaacctccccacccagggacgggcttctctgtttaaggccatccaaactagaaagcttaaaaatgcgtttaagaggtagaataccatagttgacggaacagaagaacaagaacaaaactctctaatcaaaatcacagggacctggaaatattggtctatagcaatttggtttttgggggttttgttgttgttgttgttgtttcgggggcggggagggagttggttttggttttttggttggtttttgtttttgtttttgttttgagacggtctcactctgtcattcaggctggagtgcagtagtgcgatctccactcaatgcagtctggaccttctgggctcaagcgaccctcctgcctcagcctcccgagcagctgggaacacaggcgcacaccaccacgcccggctaatttttaaattttttgtagagacagggcattgctatgtttcccaggctggtctcaaactcctgagctcaagcgatcctcccgcctcggcctctcaaagtgctgggattacaggcaggagccaccacgcctggcctatagcaattttgaaaactggctcaagcccattcctctatcccctgacataaccccccaaagagaagactttttaaaaaggtaagaaaactgttttttttttcatttttaagagttttatattagctataaatttctggagtaaagatttggttccacctagtcagctcccacatttttctccccatcatccttggggctaaggtgtaggagagctgggtagagacacacacactcacacacacgcgcacacacacgcacacacagacacacacgtgcgcacacacacgcacccagacacacgcgcgcgcacatacacgcacacacatgcacccagacacgcacacacgcgcacacagacacgcacacgcatgcacacacacaaaaacactccttgtgatggagctctttaatcctcctggaccctgaacgctttggtgaacacaagcgtacaaaactaggataacccaaatattattctgaattctttttttcagtcgtttaagcaaaacaactttcatttttaaagtttatgtgatttttccttataaatatcatcacattccacgat

SEQ ID NO: 1462 - DNA, 4828 bp, Homo sapiens
ggcaccctcagtgctcagttgcttcaggcagctgagctattcagaccatggagaatatcctctgttttctgaacagctatactgagacagggctgagccctgactcacattggttggatatcgaccccaacttcatctgcttgagtgggttggggttgtttatactgtacttgttctacgtggtattgaccctgtattcgtcacccaccgaaaaaaataatgacatccaaaagcatcagggcagagccaagaggagaaggaaaggtgggacattcaaaggtttcccagactggaaaagtttccagagagaagaggaagaggaaaggaagctgctttctcttctgaaaagctttggacctcctgtttcctgcagtcctcggggccagcatcatgataccaaccactttcgtcgactgttatgcccagaccccgtctgtcgggtgtgtaagagagcaactgctgatatccagcaactgctgtcttgggagtccctgaaagatgctgctccctctgtgtcccctttggcttcttcggcttctgcgactgagtcatcgttcactctggcttccaccccctcagcaacccctccagaagacctaatactgtcccctcggcctaaggcctctccaccaccccccttaattctctcacctgacctgatcaccaccttagctgacttattttcaccctcaccactgagggaccctctgccaccacagcctgtttctcccttggattccaagttccccatagaccattccccaccccaacagcttccctttccccttctcccaccacatcacattgagagagtggagtccagcctccaacctgaagccagtttgtctctgaacaccatcttttcatttggctccaccctatgccaagatatttcgcaggccatgaatcccattgattcttgtgctcgtcatcacggaccaccaatcccatctgctttaccaccggaagattgcactgtgactcagtctaaatcaagtctcaccatcttgaagacttttccggaaatgttatctctaggtggctctggtgggtcatccacctctgccccaacaatcaaaggcattgaccattcacaccttgcatcttcagaattcacctggtggcagcctcatgccaaggactctttttcctctaattttgtgccatctgatttcatggaggagcttcttacccttcattcttctgaggcctttttaggggggcactctgtggccaacctcatagagcctgttaacatctcatttctcagccatgacattctggcactcctggagagacaagtcaaaaaaaggggtgatttcctgatgtggaaagaaaatggaaagaaaccaggatcattcccaaaacaacttaggccaaactaccaactaaattcctcacggaatatgttaacctcaattgctgttaagcatgacttggcagaatcctttcctttttgggccagtaaaggcaaactagaatggcagcacatccatcagcagcctccacactctaaatgctttgaagaccatttagagcaaaaatatgtccagctcttctggggtctcccatctttgcacagcgagtctctgcatcctactgttcttgtccaacgtggccattcctccatgtttgtattcttcaatggcattacaaatacgtctatatcccatgaatccccagtacttccccctccccaacctctgtccttgcctagtacccaaccactacccttgcctcaaaccctgccccaaggtcagtccccacatctcactcaggtgaagtccctggctcaacctcaatctccattccgagccctactacctagtcctctattcctgattaggatctgtggagtgtgttttcatagaccccagaacgaggcacggtctcttttgccatctgaaattaaccatctggagtggaacgtgttgcagaaagtgcaggaaagtttgtggggcttaccctctgtggttcaaaaatcccaggaagacttttgtcctccagctcccaatcctgaattggtcagaaagtccttcaaggtccatgttccgatctccatcattcctggagattttccactcagctctgaggtaaggaagaaactagagcaacacattcgaaggaggctcatccagcgcagatggggcctgccccgcagaatccatgagtctctgtcattgctacgtcctcagagcaaaatttcagagctatctgtgtcagagagaattcatggaccgttaaatatctctttggttgagggtcagaggtgcaatgttctaaagaagtccgcatcaagcttccctagaagcttccacgagaggagctcaaatatgctttccatggagaatgtggggaattatcagggatacagccaggagactgtcccaaaagatcacctgttgcatggtccggagacatcttcagacaaggatctgaggtctaactctgagagagacctagaaactcatatgatgcatctgtcagggaatgactcaggggtgagactaggtcagaaacaacttgaaaatgccctgacagtacgtttgagcaagaaatttgaggaaatcaatgagggtcgaatgcctgggactgtgcatagttcatggcactcagtcaagcagacaatgtctcttcctgagaaatcccacagccaaattaaacatcgaaatctggtaacattggtgagtgaggaccactgcgttgatacttcccaggaaatttccttccttagttccaacaaacaaaagatgttggaagcccatattaaaactttccgtatgaggatgctgtggggccttcccctcaaggtccttgaatccatagaaatcttcaaatcgaaagcggacctttccacttccttttcccatttcgaccttccctcctcagccaccttcatctctcagggagattccaaagatggggtctctaagtcccgtagtcgaagcacttttcaaggagaaaagttgggaacaacaagctcagtccccatccttgatcgtcctcaccctgtctcctcacctgtcgtccaagaagggcaggggaccctgagaagacaattttctgatactgaccatgaccttatagagacagattccaaagacggggcctccacatcccttagaagaggtactacagattttcaaagcgaaaaattagattcaacaagctcattccccatcctcggtcattcttaccttgtcacttcacctgtcaaccaagaaaagcaggggaccctgagaagagaattctctgatactgacaatgatcttacagaaagtgtccggacaacagaggatggcagacagacttttctgcccccgccacacagcatcgtagacgaagtcagtcagaaacagactgtactggccagtagatgcagcgcagagctgcccataatgcaagctggagctggctgtgagtcatgggataagagaaagagttcctttcataatgtagacaggcttcagggcagtagaaagacctttcctgtcaccaatgctcttcaatcacaaactaggaacaacttgacaaccagcaagtcaggaagctgctcactgacaaatgtgaaagcaagcacttccaatgaaactgaaattttcccaccaagaatatcagttcctcaagatcctaaatcatcataccttaaaaatcagatgttgagccagttaaagttggtccagaggaagcatagccaacctcagagccatttcactgacatgtcttttgccttagataacttgagttccaaggacttactgactaattcccagggcatctcgagtggggacatgggaacttcccaggtggtgcatgtccacttggaggacagcggaatccgtgtggcacagaagcaggagcccagggtccctacctgtgtcttacagaagtgtcaagttacgaatttcccaccagctgtaaacagagtgagtcctgtgagacccaaaggaggagagcttgatggaggggatgcagggctggggacatcccaacgcaggagaaagagcctccctgttcataacaagacatcaggggaggtgcttgggagcaaatcttccccaaccttgaaaacacagcctcctcctgaaaaccttttcagaaaatggatgaagacctctttgcagtggtttaataaacccagcatatcatatgaagaacaagaaagttcctgggaaaagggtagctccctgtcatcatgtgtgcagaatattggtcgagttataagagctgcctttactgggactactgaagctcagaaaattaggaaagacactagggagttcctagaagagaagctggggcataggcatgggatagatatcacctgtccccaagagcccctttccttcccagtggggcttgggaaagctcagcacaacccagaagtgcatgtcagagcagagcctgtccagggctgtccctgcaactacagggctccctcctgcaaagtgacacgtaccaaatcttgcagccaacaagctatctttgttggccagaattatcctacaaggattagacagatcatagacaaggacagacagccccagaaagttgaggcatttaaggggaagatactgtgtcaaagccatccccaatccatgccccacaggaagcctgtgccacatccaaaccccacttgccggcgtcaggtcagcctggtgtgtccagccgtcccaaccagtgctaaaagccctgtgtttagtgatgtgcctttcctaactggacagaaaatgcttccaaagcatttacagggaggaaaatttccccccacaaaataattcactccttgttgagaatcttgattctccccaataaatgttccaataag

SEQ ID NO: 1463 - DNA, 4007 bp, Homo sapiens
gcttgcttcggtgcggctgtccgctacgctgcctccgccctcgccgcgcgcccccgccagcgggactccagggaacccccggcgccctcgacggggccgaggagtcgggactcggggagccggcgctgagggaggagcctggtcggagccgcggagccgaaagctccggagcgtggaggtggggggccgaggcccctgagggggccccgccgcgatgggcaacctggagagcgccgagggggtcccgggagagcccccctctgtcccgttgttgctgccgcccggcaagatgccgatgcctgagccctgtgagctggaggaaaggttcgccctggtgctgagctccatgaacctgcctccagacaaggcccggctcctgcggcagtatgacaatgagaagaaatgggatctgatctgtgaccaggaacgattccaggtgaagaatcctccccacacttacattcagaaactccagagcttcttggaccccagtgtaactcggaagaagttcaggaggagggtgcaggagtcaaccaaagtactaagggagctggagatctctcttcgcaccaaccacattgggtgggtgcgggaatttctgaatgatgaaaacaaaggcctggatgtactggtggattacctgtcctttgcccagtgttctgtcatgtatagcactctccctgggcgcagggccctgaagaactcccgcctagtgagccagaaggatgacgtccacgtctgtatcctttgtctcagagccatcatgaactatcagtacggattcaacctggtcatgtcccacccccatgctgtcaatgagattgcacttagcctcaataacaagaatccaaggaccaaagcccttgtcttagagcttctggcagctgtgtgtttggtgcgaggaggtcacgaaatcatccttgctgcctttgacaatttcaaagaggtatgcaaggagctgcaccgctttgagaagctgatggagtatttccggaatgaggacagcaatattgacttcatggtggcctgcatgcagttcatcaacatcgtggtgcactcggtggaggacatgaacttccgggtccacctgcagtatgagtttaccaagctggggctagaggagttcctgcagaagtcaaggcacacagagagcgagaagctgcaggtgcagattcaggcatatctggacaacgtgtttgatgtcgggggtttgttggaggatgctgagaccaagaatgtagccctggagaaggtggaggagttggaggagcatgtgtcccatctcacagagaagcttctggacctagagaatgaaaacatgatgcgggtggcagaactagagaagcagctgctacagcgggagaaggaactagagagcatcaaggagacatatgagaacacaagccaccaggtgcacaccctgcggaggctcattaaagagaaggaggaggcctttcagcgtcgatgtcatttggagccaaatgtccggggcctggagtctgtggacagtgaggccctggccagagtaggccctgcagagctgagtgagggcatgccaccctccgacctggaccttctggctccagccccaccccctgaggaggtcctgcctcttcctccaccaccagctccgcccttgccccctccacctcccccattaccagacaagtgtcccccagccccacctctccctggtgctgcaccctctgtggtgttgacagtgggcctgtcagccattcgaattaagaaacctatcaagaccaagttccggctgcctgtcttcaactggacagcactgaaacccaaccagatcagtggcactgtcttcagcgaacttgatgatgagaagatcttggaggacctggatcttgataagtttgaagaattattcaagacaaaagcgcagggccctgcccttgacctcatctgctccaaaaacaagacagcgcaaaaagctgccagcaaggtgactctgttggaagccaatcgtgccaagaacctggccatcaccctacgcaaggctggccgctcggctgaggagatctgcagggccattcatacgtttgacttgcagacactacctgtggacttcgtggagtgcctgatgcgcttcctgcccacagaggctgaggtaaagctgctgcggcaatatgagcgggagcggcagcccctggaggagttggcagctgaggaccgcttcatgctgctcttcagcaaggtggaacggttgacccagcgaatggctggcatggccttcctggggaacttccaggataacctgcagatgctcacaccgcaactcaatgccatcattgcggcgtccgcttccgtcaagtcttcacagaagctgaagcagatgttggagatcatacttgcactggggaactacatgaacagcagcaagcggggagctgtgtatggcttcaagctccagagcctggatctgctgctggataccaagtccactgaccggaagatgacactgcttcatttcatcgccttgacagtgaaggagaaatacccagacctggctaacttctggcatgagctgcactttgttgagaaggctgcagcagtgtccctggagaacgtgctgctggacgtgaaggagctgggccggggcatggagctgattcggcgtgagtgcagcatccatgacaacagcgtcctccggaacttcctcagtaccaatgaaggcaaactagacaagctccagcgggacgccaagacggctgaggaggcctacaatgcagttgtgcgctactttggcgagagtcccaagactacacctccttctgtattcttcccagtatttgtccgattcattcgttcttacaaggaagcagaacaagagaatgaagcccgcaagaagcaggaggaggtaatgcgggagaagcagctggctcaggaagccaagaaactggatgccaagaccccatcccagcggaacaagtggcaacagcaggagttaatagcagagttgaggcggcgccaggccaaggaacaccggcctgtttatgaggggaaggatggtaccatcgaggacatcatcacaggcctccactgccagcctatggttgttcgccaccaagccaggagtgctgcaccgcccagtggtccccctcgggctccaggcccccactgagaccctctcggaggcagaagcacttcacccctcagagtcctacaagtccaaccagtggacctggaattggccaagggctcaggagagggctgtgttgctctctcaaccatgtccgccccagctcttgaggctggatctttctacttgtgccactatgggcactaggtctgtaggtccctggtgcttccagtactgcactttgcccccaaggtctttgacttcatttcctgaagggtcaccaagggtcagctcagggctaggaaaaaccatttccagccttagcctaaacagggcacatagatctctcccactagagcccagagggatgagaggagagagcaactgttctttctttttttttcccttcctttttgcaggcccatggtcagctctggtctagatgtatctaggcttagggagccctgggaccctgccagtctcagttcatctcttaccaggagcaaggccctctgaagcatgggccgtgccagctgtgccctagtgataagggtaagaggagagatgtcaggctcactgcccttatttctctgcccatttcattctaggctcacactgtccttgtcaaggtgggcagaagagcagaggtcttctctgcaccaaccactctctgcagatggctggagaaagggtgtgccaactcttcaccttctttcctcagctacggtttttttttttttttttttttttttggcaggggacaaggagcatggtggtcttggctatttgcttaccttcccgtttctcctctgcccctggaagggaatgtgggggcccacttttttgtacatgtaccacctccctttcctcttactgtacataaacctcagactctccccctctc

SEQ ID NO: 1464 - DNA, 3329 bp, Homo sapiens
ggagccgcggtcacgcgcccgcccgaaggctcctgtcgggacagggcgccgccccgtgtcggcccccgcagagctcgcggcccccgcctgtccgggcgccgccatggagcgcatcgagggggcgtccgtgggccgctgcgccgcctcaccctacctgcggccgctcacgctgcattaccgccagaatggtgcccagaagtcctgggacttcatgaagacgcatgacagcgtgaccgttctcttattcaactcttctcggaggagcctggtgttggtgaagcagttccggccagctgtgtatgcgggtgaggtggagcgccgcttcccagggtccctagcagctgtagaccaggacgggcctcgggagctacagccagccctgcccggctcagcgggggtgacagttgagctgtgtgccggcctcgtggaccagcctgggctctcgctggaggaagtggcttgcaaggaggcttgggaggagtgtggctaccacttggccccctctgatctgcgccgggtcgccacatactgggacgctacgatgggctcctgaccccagctgaggtcttggggaaggaggagggtgtcacagacccccacccccaccagctgagcaccagcctccacagcctcctccagaggccagggcccgctccactgggagaagcaccggaagtctctgcacctgtcagcctggcacatgggccactcagggttaggcctggggccctcccacctcagcagcctcaaggacttcacctgggcacgttcctggctggatgggtggactcccaagttaaaggcagcatttccacgctgggccaggcacggtggctcacacctgtaatcccagcactttgggaggccgaggcaggcggatcacctgaggtcaggagttcgagaccagcctgaccacatggagaaaccccgcctctgctaaaagtacaaaattagccaggcgtggtggcaggagcctgtaattccagctactcaggagactgaggcaggagaatcgcttgaacccaggaggcggaggttgcggtgagccgagatcgcgccattgcactctagcctgggcaacaagagcgaaactctgtctcaacaaaacagaatttccatgccgaagggtggacttgggtgtgaaggatgggccttggttttctgcaggtgtctaccccgtggtgggccacgcccactgtgcccccagctccccagcccatagtactgagcacagccgggaggcatgggaggggctggagtccccttggtccccctggaggaggtgggcctgggcaggttcctggcagagggaccgcacaggctctcagggcaagtggtcgagcagccctggccgcggtggttctactggtacagcctctgggccacagcctgattgtgagggtgctggggagccaaggagggctctgggaagtaggcatcctgcttagactcgcatcgggaagagcaggccgtggcttcagggatgcaggactggagatgctgctgactaggggtcagggtgtccgtctctgagggcctgatggggggctggactgacagcaaagttcacccaccctgtggcagggcccgtggctccctgtctctgattctggaggtgagccaggcctcttacctgccgctgcaaaggacaaggcccagggaggcagtcagcttggggcgtgatggagtgaagttggaacgtgccctggggtgggggaggcgttgcccagcctggctggcagattcctctcagcccgggccaagggccgggcctgtctccttcacaagccggcggaaaccggggctggaaaccccagacccgccacttccctcagaggcgcagccgcggccgccgccggaaatgggccatcaggaaggggtctgcgggaggtgaggggctagagggcaaggaagcagctgggtaaggtcggtctggggtgagtccccccggaggtggggaggccttgggggtggggcatggaagcccccagttctgtccctgcccctgtatgttgggtacatctcagagggcggcctctaccctgcaggcctccggctggccttggttcatggcacccgacagcccctcctgcggcgagccagggctcccccaccccctggtcatcttcccagatgcccctcagtcccgtttctccccagatccacacctggccctccccctcctgttccagaatgcagcccagcccctctgccatcctgtcctcctagcccgtggtctccctccacacacgccagtccaggctccttcccttggtgcctgacccctcctggctgccagcagcccccttctggccactgcccactgagggagggggctccctcttacccctccccagcctgggctactgggcctggtactgaggacctcgctgccaccccaccccactctgccatgctacggggggtgggggggcggtcagtgcatgctgttcctagtctgaaacttgtgtcctgtgggtgcctggtggggaacccttgcgggaaggcctggtgggtttgtccctgcttcccagccagcctgtgtccccgggtatgggctggggtctggcatgggcctctgcagctggccacagactgaggggctccaaacagcactgggaacagcctcagggtatctggttgggggctgcagacaggggtggggtcttctgcttggccttgacaggttgcaggcaggttgtcagccggatctgcaatctcatgggggcttggggtcttcccggctcacgaggttatggcagaattcagctcctggtggctggggactgggtcccacctccctgctggctgttggcccttcccagcatggcggttgcttccccttcagggccagcaggactggcctgaatttctccctttctggcgttgaaacaccctctggagggcttcgtgatcgggccatgcccgcctaggatgctctcccttctgatgagctcaagtcaccggttagggtccttaatcacatcgacaacacccaccccacctggtctggagtgggactgactggctccagacagaccatgttctacacagaggtgacagatgcccagcgtagcggtccaggtgggggcctggtggaggagggtgagctcattgaggtggtgcacctgcccctggaaggcgcccaggcctttgcagacgacccggacatccccaagaccctcggcgtcatctttggtgtctcatggttcctcagccaggtggcccccaacctggatctccagtgagactccagggttctagacagaggccagtcttggccactcaccccacaccccgcggaccccaataaaggcttgcatagctcc

SEQ ID NO: 1465 - DNA, 4250 bp, Homo sapiens
ttttagtcctatatatgttttagctcccagaagacataataattactgttttttacaatcaataaccatttatattcacccacatttttattctttctgtcatatttcattcctttctgaatttctatgtatccatttggaatcttctttttttcttttttttttttgtccagcagaactcatgttagtatatattttagtgagaatatgctggtgaaaattttacatgcttttgttagtctggaaatgtctttattttgccttcttgtttggagagtatctttctttctttctttctttccttctttttctctctctctttcttcctccctccctcctctttctttctttctttttctttccttttctttctttttctttccttttctttctttctttctctctttctttttctttccttctttctttcttttttccttccttctttctctctttccttctttctttctctctctctctctttctttctttctttttttcagagtctctctctgtcacccaggctggagtggtgcagtggcacaatctcagaacactgcaacctccgccttccaggctcaagcaatcctcctgtctcagcctcccaagtagctgggactacaggcacatgccaccacgcctggctaattttttgtattttttgtagagatagggtttcaccatgttgcccaggcttgtctcaaactccttggctcaagcaatctgcctgcctcagccttacaaacagctgggattacagggttgagccattgtgcccagccctagagagttttttgctgggtataaaattctagaaagacagttctcttttggcatcttgaagatatatttccattgtctgtcttttattatttccattaagaagtcaaccataattcttactgctatacctttgaagataatgtatagttttgccatttatctgttttctggtttttttctttgtcctttgtctttggttttcatcagttttactgtgctatacctaggtgctgttttctttgcccgcatgtctttcacttcagaaattctttgcctttattacttacattgttctgtcttatttttttctcttctgctccctctgggactctaattagatacacctttttaccaggcctatatagctataatcttttcagtatttccattctttttactcaccaagtttcagcttaaatactttctggcatttcttctaaatcgctaagcctctcttcagcttccagtattctatttaacctatttattaagtccttagtttcagtgattacatttttttaagtttcaggttgcttttcagttcttttttatacattccagccagctctctggaatctataaattattcatcctatcatctatttttgacatattaatcacatgttttttttaaaacaattttttcttgatgcataacagatgtccatagttttggggtacatgtaaataatttaatacattcatataatttgtagagatcaaatcagtatacttggaatatctatcaccttaactttttttaagattctagaaacacttgaattattctctactaactattttgaaatgtacaataaattattgtaaactgtagccaccctaatgatttatcaaatactaggtcttatttcttctattaaaccatgtatttgtacctattaatcaatttatcttcatagttcccttccccctacccttcctggcatctagtaaccaccaatctactctatatcttctcaagatcaacttttttagttcctacattgagtatgaacatgcattacttgtctttctgggcttggcttatttcacttaatgtagtgacttccagttccatccatgttgctgcaaatgacaggatttgggccttttttgcagctgaataatatttcattgtgtatctataccacattttctttatccgttcatctgttcatacacacttaggttgattccatattttgactattgtgaataatgctgcaataaacatgggagtgcagatagctctttaacatattgatttcctttcttttggatatatacccagtagtggaattactggatcatatggtagttctatttttagttttttgagaaacctctatactgttctccatagtcactctgctaatttacattcccaccaacagtgtatgagggttccccttttccacatcctcaccagcatctgctactgcctgtctttttgacataaaccatttggaccggggagagataatatgtcactgttgcaaagtaactgcagttgcggactatgaattttaaccattataactatgctcaaacacatctttattaattaaaataggaaccattacaatcaacacatttttgccaataagaaataagtttgtttattcctatggtgtaaaagtttgtgctttaggattcaacaaactcttggaaagcattttctgcattctgctggttgtggaagcattttccctgcaaaaggttgtcaagatgtttaaagaagtgggagctggttggtgagaggtcaggtgaatacggcggttgaggcaaaactttgtagcccaattcattcaacttttgaagtgttggttgtgcgacatgaggtcaggtgttgtcgtgaagaactgggccctttctgttgaccaatgccagcttcaggcattgcagtttttggttcatctcatcaagttgctgagcatacgtctcagatgtaatcatttcgccaggattcagaaagctgtagtggatcagaccagcagcagaccaccaaacaatgaccgtgacctttttttggtgcaagtttggctgtgggaagtggctttggagctacttctcggttcagacactgagctgatcatcaccagttgtggtataaaatccacttttcatcgcatgtcacaatcccatcaagaaatggttcattgttgcacagaaaaagagaagacgacacttcaatacaatgattttttttatttttgctaagctcttaaggcacccacttatctagctttttcacctttccaatttgcttcaaataccaaatgaccatagaatggttgacactgagttctttggcaacttctcgtgtagttgttagaagatcagcttcaatgattgctctctgttgttgtcaacttccgacggctggccactgtgctcctcatcttcaaggctcttgtctcctttgtgaaacttctcgaaccaccactgcactggacatttgttagcagttcccagaccaaatgcgttgttgatgttgcaagttgtctccgctgctttatgaccgattttgaagtcaaataagaaaatcactcgaatttgctttttgtttaacatcatttccatagcctaaaataaacataaaatatatatcaagtaataagtcattagcaaaaaaaatgagaaatatgcattaaaatgatgtatgacataaccacatgtatttaaaaacgtattccaatatcaaatggcaaatttcaacaatgctaaaaccacaattacttttgcaccaacttacatttctctgattactgatattgagtattttttcatatttgttgaccatttgtatgtcctcttttgagaaatgtctattcagagctcttgaccatttttttaattttcttttttttttttttgctattgagttgtttgagctccttatatattctggctattaatcccttgtatgatggataggttgcaatattttctcccattctgtgggatgtctcttcactctattgattgttgtctttgctgtgcagaagctttttagcttgacatgatcccattggtccatttttgctttggttgcctgtgcttttggtgtcttacacaaaataaatacttgcccagacaaatgccctggagtcattctccaatgttttcttctagtagtttcatagtttcaggtcttagatttaagtcttaagtcaatttcgattcaatttttgtgtatgaatagccctgtgcacacacaacatgatcttttttagaaaaacctaaagatgccaccaaaataatgttagaactgataaatgaattcaataattgcaggatacaaaaatcagtagtgtttatatacaccaacaacaaacaatctgagaagaaaatcaaggaaacagtctcatttgcaatagatacgaataatatataatacctaggaatcaatttaaccaaagaactgaaagatctgtacaataaaaagtataaaacactgataaaag

SEQ ID NO: 1466 - DNA, 4056 bp, Homo sapiens
caggatcaaatccacacatgtcaatactaaccttgaatataaacttaaatgccccacttaaaaatgcacagagtggcaagctggataagaaagcaaaacccaatggtctgctgtcttcaagagatccatctcatatgtaatgacactcatgggctcataataaacggatggagaaaaatctaccaaacaaatggaaaacagaaatcagcaggggttgtaatcctaatttcagacaaaacaaatttcaaaccaacagagatttaaaaagacaaggaagagcattccatgatggtaaagggttcaattcaacaagaaaacctaactatcctaaatatatatgcacccaacacaggagcacccagattcataaagcaagctcgtaaagacctacaaagagatacactgtcacacagtaatagtgggagacttcaacaccccactgacagtattagatcattgaggcagaaaattaacaaagatattcaggacctaaactcagcattggaccaaatggatctgatagatctttacagaagtctccaccccaaaacaacagaacatacattcttctcattgccacatggcacatactctcaaattgaccacataattggacataaaacatcctcaacatatgtaaaagaactgaaatcatatcaaacatactctaggttcacagcacaataaaagtagaagtcggtcgggtgtggtgattcatgcctgtaatcccagcacttcgggaggccaaggcaggcagatcatgaggtcaggagattgagaccagcctgaccaacatagtgaaacctcgtctctactaaaaatacaaaaattagccaggcgtggtagcacaaccctgtaatcccagctactcaggaggctgaggcaggaaaattgcttgaacccaggaggcagagattgcagtgagccgagattgcaccactgcactccagcctgggcaacagagcaagactccatctcaaagaaaaataaaatagaagtcaacacaatgaaaactgctaaaaaccatacaatcccataaaaattaaactacatgctcctgaatgacttttgaataaataattaaattaaggcagaaatcaggaagttttttgaaaataatgaaaacaaagatacaatataccagaacctctgggacacagctaaggcagtattaagagggaaattcatagcacccacatcaaaaagttagaaagatatctaaattaacaacttaaattcatgacagaattagagaagcaagaacaaatcagccccaaatctagcagaaaacaagaaataacaaaagtcaggcagagcttgatggctcatgcctgtaatcccagcactttaggaagccgggaaaggtggatcatttgaggtaaagagtttgaaaccattcctacagaaactattccaaaaaagtgaggaggaggggcttctccccaactcattctatgaggctggcatcatcttgctaccaaaatctgtcagagatacaacaaaaaaagaaaacctgaggccaatatccctgatgaacattaatgcaaaaatcctcaatacaatactggcaaactgaatccagcagcacatcaaaaagctaatccaccatgaccaaatatgcttcatccccagcatgcgacattggttcaacacaagaaaatccataaatgtgattcatctcataaacagaactaaagacaaaaacctcatgatcatctcaatagatgcagaaaaagctttcaaaaaaattcaacatccctttgtgttaaaaactctcaacaaattaggtactgagggaacatacctcaaaatgcagccatcagtgacaaacccacagccaacatcatactgaagggcaaaagctggaagcatttcctttgaaaagtggcataaaacaaggatgccctctctcaccactcctgttcaacataatattggaagtcctagccaagggcaatcaggcaagaaaaagaaataaagggcatccaaataggaagagagaaagtcaaactatctgcagatgacatgattctatatctagaaaaccccatagtcttggcccaaaagctccttcagctgataaacagcttcagaaaagttgcaggatgtaaaatcaatgtacaaaaattactggcactcctatacaccatcaacaaccaaactgagaaccaaatcagaaaggcagttccattcacaattgccacacacacaaaaataaaatacctaggaatatggctaaccagagaggtgaaagatctctacaatgagaattataaaacactgctgaaagaaatcagagatgacatgaacaaatagaaaaacattccatgctcaggcatagggagaatcagtatcattaaaatggctataatgcccaaagcaacttatagattcaatgctatccctattaaactaccaatgacattcttcatataactagaaaaatttattttaaaattaatatggaaccaaaacagagcccaaatagccaaggcaatcctaagcaaaaagagcaaagctggaggaatcatactacccaacttcaaactatactgcaaggctacagtgaccaaaacagcatggtactggtacaaaaacggccacatagaccaatggacagaaaagagaacccagaaataaagctgaccatctgatcttttacaaagctgacaaaaaccacaatggggaaaagactccctatttaataaatggtgctgggataactgactagccataagtagaagactgaagctggaccccttccttaaaccatatacaaaaatcaactcaagatggattaaatgacgagttaatgggtgcatcaaaccaacatggcacatgtatacatatgtaacaaacctgcatgttatgcacatgtaccctagaacttaaagtataataataattttaaaaagatggattaaatacttaaatgtaaagcccaaaactataaaagtcctggaagaaaacctagggatcatcctggacctagggatggataaagataccataacaaagacaccaaagcaactgcaacaaaagcaaaaattgacgtgggatctaattaaacttaagagcttctgcacagtaaaagaaactataatcagagtgaacaacctacagactgggagaacatttttgcaatctatccatctgacaaaggtctaatatccagcatctccatggaacttaaacttacaagaaaaatacaagcaactccattaaaaagtgggcaaaggacatgaacagacacttctcaaaagaagacatttatgcggccaaaaaacgtgaaaaaaagatcaacatcactgatcattagagaaatgcaaatcaaaactgcaatgaaacaccatctcacacgattattaaaaagtcaagaaaaagatgctggtgaggctgtggagaaataggaacactttacactattggtgggaatgtaaattagttcaatcattgtggaaaggagtatggagattcctcaaagagctaaaagcaggactaccattcaacccagcaatcccattactgggtatatacccagaggaatataaagcattctaccgtaaagacacatgtatgcgaatgttcattgcagcactattcacaatagcaaagacatagaatgaacctaagtgtccgtcaatgacagactggataaagaaaatgtagtacatatacactatggaatcttatgcagccataagaaagaaggagatcatgtcttttgcaggaacgtgatggagctggggtctatcatccttagcaaactaacacaggaacagaaaaccaaatagcacatgttctcatttataagtgggggctaaatgataagaatttatgaacacaaagaagaaaacaacaaacactggagtttacttcaacagggcggatgggaggagggagaggagcagaaatgataactattgggtactgagcttaatacctgggtgatgtacaacagatccccatgacaagtttatctatgtaacaaaccttcacatgtacccccaaaactaaaataaaaattcaaaaaataacttaaaattttaaaaaaag

SEQ ID NO: 1467 - DNA, 3517 bp, Homo sapiens
aaggtttggtgggcctggtgttaggtagggcatccacctctgctaaaggtatcatagttcatactggtctcattaattctgattcctctgatgagattaaaataatcgtgtctgccaaggttcctgtttccattccggccagtgagtcaattgctcaactacttttactacctaatattgttttaaacaaaggagataagacagggggccctgggatgggctctggcggtgaaaaagccgcttattggattaaagtaatttctaaacaacagcccacctgcaccatacatattaaaggaaaaaagtttgagggcctagtagatactggggctgatgtttctattatttcctctaatttatggccttcttcctggcttaaacatcccactaacatgggactagtaagggttggaaaagctgatgaagttcaccaaagcacatttatcttgccttgcactgggcctgatggtcaaaagggaacaattcagccttatatcatgccaatccccattaatctttggggtagatatttgctggaacaatggggggctgaaattaatattccacataactcttctcgtgctcccagtcaacatataatggaaaacgtggggactgttcctggactcagtctcggtccaaaacatgaaggaattactaaattcctttatggtttaaaagcataatttaaccactccccactcccaattccatttagcattgtttactttaaactttctaaatgttcctaaagacaatactctgactgcagccgaacaccattatacaggcaaaaaattctccctaaatgaaagcaagccagtgttatggaaaaactcccagacaaatacctgggaacctggaacaattataatgtggggaagagggtatgcttgtgtttcaccaggagatcatcaatcccctgtctgggtgcccactagaagactttaacttcgtgtgaatactgacaatgaaaaacacagggaagagatgtccacgtcagagactgccctcatacctggtgagatctgtgccaactcctcaaaaactggcacaccaaatcaaaatggatctcattcaatcctccctaatggcaacagagacccctctaactaatcccacttctcctaattacctttctttttctccttacaaacctgaaaatctcaccatttctattagcctgaaaataacatccctctgttcttctcttcctccttcagcactggatctcgcttacaataggttttatttaataattctactccttatactttctgtctcaccagtttcccctcacactgatttgcctgctacacaaaattattcttattgggcttatgtgccttttcctccacttattcgacctctcacctggatgaatgctcctgcggaaatctacactaacgatagtgtgtagatgcctggagctatagatgaccattgccctgctcaaccaggagaagaaggcactgcatttaatgttactatgggttataaataccctcctctgtgcctcggacatgcaactcgttgtatccatctagaaactcaagtctgggctgcttatcttctggagagattagctacaggaaaatggggacatttggtctccggcctctccctttgtcctttaagacaaatgaaaaggggagtaataggagataccccatactttcaatataaacctgtaggaaaactatgtcctaaaaattttgagggcccatctaaaactttaatttggggagattgtgttaactcacatgcagtagtattaaaaaatgactcatatgctttagtaatagactgggcaccaaagggctatttaaaaaacacttgctcctctgggggaggggaattcctggaggctacttattttatttcttattgggaggacgaggatcatcatcctactttgcataggtggttcggctcattctttaccttaaaatgggaagataaggacattaccctccacccccaaggccttgtatgatattccccattctgagcccagaacacccagaactttcgaaattggctattgtcatgtctggactgccagtatctgtgattctgaaccccatgataaatcccctttgaacctttttcctctttttgatgccgatcctcctttacgggactccaattggcattacgataattcttatcgacccaggtatgcccctctacttcttcagcatccccaggcacctcggtttgcttctttatggtggagaacatcgggcattgccaccgccgctcctctccctcagtatcaacatagattcaagcattctgctttgtttacctccaacctgactattcctatacagagttgtgttaagcttccttacatgctgttagtggcaaatatcaaaatttggacaaacaatcaaactgtccaatgcattgtcatttatacacttgtgttgactcccgttttgactccaggaaaagtgtaatgttggttggagctcgagaaggaatctggatactgtgtgccggaccagccaaagaatcctgtgtcaaaaccgagagaacgaataagccttcatcaccatggcacatttatataaaaagaaagggagagatgttgcgggaagtcagggaccccgaatggagggactgactggagccgcggcagaggaacataaattgcaaatatttcattttaatatggacatttatcagttcccaaattattactttttacatttcttacgcctgtcttactttaatctcttaatcctgttatcttcataagctgaggatatatgtcacctcaggaccactgtgataattgtgttaactgtacaaattgattgtaaaacatgtgtgtttgcacaatatgaaatcagtgcaccttgaagaagaacagaataacagtgatttttaggcaacaagagaagacaaccataaggtctgactgcgtgcagggtcaggcaaaatagagccatatttttcttcttgcagggagcctataaatggacatggaagtagggaagatattgctaaattcttttcctagcaaggaatattactattaatactctgggaaaggaatgcattcctggggggaggtctataaacggccgctctgggaatgtctgtcctatgcagttgagacaaggactgaagtacaccctggtctcctgcagtaccctcaggcttactagggtggggaaaaacctggccctggcaaatctgtggtcagactggttctctgctcttgaaccctgtgttctgttgtttaagatgtttatcaagacaatacgtgcactgctgaacatagacccttatcaggagttctacttttgcccttgtcctgtttcctcagaagcatgtgatctctgttctgctttttgccccttaaagcatgtgatctttgtacctaccccccgttcgtacaccccctccccttttgcaatccttaataaaagcttgctggttttgaggctcgggccggcatcacggtcctactgatatgtgatgtcacccctggcggcccagctgt

SEQ ID NO: 1468 - DNA, 3532 bp, Homo sapiens
agccaggcggaaccctgggccgcggagcgcgacagctcccctctgtgcctgcagagcccggcgcccacagctggcccctctctcggagcagcggggcatggccatgtgtggatcctgcccctgccccatgaggccgactgacttccttgggtatggggcacccgtcccagggaggccttggccttggagagcctctccagctgtacagcgtcagcctctctccagctgcacagcgtcagcctctctccacctgcacagtgtcagcctctctccacctgcacagcggctgggagcagcagcctctccacctgcacagcgtcagcctctctccacctgcacagcgtcagcctctctccacctgcacagcggctgggagcaacagcctctccaccggcacagcggcagcctctctccacctgcacagcgtcagcctctctccacctgcacagcgtcagcctctctccacctgcacagcggctgggagcagcagtctctccacctgcacagcggcagcctctctccacctgcacagcgtcagcctctccacctgcacagcgtcagcctctctccacctgcacagtggctgggagcagcagcctctccacctgcacagcgtcagcctctttccacctgcacagcgtcagcctctctccacctgcacagcggctgggagcagcagcctctccaccggcacagcggcagcctctctccacctgcacggcagcagcctctccaccggcacagcggcagcctctctccacctgcacggtggcagcctctctccacctgcacagcggctgggagcagcagcctctccacctgcacaacagcagcctctctccacctgcacagcagctgggagcagcagcctcgcagggttgctgcaaagatggagtttccacatgtaatgtcaggacagcacccgccacacactgcgcagtctgcagggctgtggtgatggtgactgtgggggtgacgggaggcagagagctcagggacagctcaggataggcgggaacacaagcacatgtgaaaagcaaggcgatcgccaactctgaggaaaacaaatgggcaccacccggggaggccgggcagctctgccccaaacatcattcgtgccgggatgatatggacagggcagcgtgtggaagacaagcccctttcaccgtccacggggaatttctgcactggaagctccagaagcagcagcatcaggtgctttttggaaacaggcagttagaaagcggaagcacagcacccacccccccacccaggaaactgcctccgtctcttctgctgcagaagaagcagcagctggaagaggcagccaggtgctgatttcatcgtaagcctgaggcctcctttgggcttttctaactttgtgtccttatgatgttcacaaataactaagtaagttgtgagctgttatttcttgtcattgaaattaaaggtgtttttttttttaatttttttagacgaagtctcactctgtcgcccaggctggagtgcaatggcgcaatcgcggctcactgtaacctccgcctcccaggttcaaacaattctcccgcctcagcctcctgagtagctgggattacaggcgcctgctgccatgcccggctaatttttgtatttttagtagagacagggtttctccatgttgaccaggctggtctcaaactcctgacctcgtgatccgcccacctcggcctcccaaagtgctgggattacaggcgtgagccaccgccccggactgaaatcaaaggtttcttaagcagctgcccgctgtgtgtgtggtgaacccggggcctgaatgcaggtgggacgcagcctcccaagcgccgggagccgctggctcctcacgcctgtcgatctagcaaatgtgctttggagtctctgacggacgcgattctgaatccagaaggaaagcgtctcactccgagatgctgactgacgtgtcctttatagcggtgggacttgggaagccggtgacgcccggtgtggaggacggttgtgacgcccctcggtggggacacggtgtaaaggcggcgtggaaacttggtgcacgaccttacaataaattgtaaaataagcgttttacctggtgagatgaaaagaccggcaggagacggcaccccggtaggatgaacagaagagacttttaaacctgaagaaatcatccaaaaagtgaccacatgttagtgtcctgctgcgagttctccccccagaatccaagcttggccacgtggggccctaggaaggtactgacattgttcgaagagctggtgcctcccggccggaggccgctgtcaaaggacgcacgacctgtgggctcaagcagccgtccgtccaggacttgctctgcggaggcagacctggtcccaggccacggagctcgtcccagggctgcccagccctcccaccccaccgggtacacacaccgttccccggcctggcctggacccgagcctctcgcacggtggcgctggggtcctggacccgcagagcaggctcagcctggccccaccctacccgatccctgtccagtcccctccccagcctcctcctctcctgagcagcctcccgaggggacccgcaggcagggcgtaggagggcggggccgagcccactggaccccagctggtggccgccggcgcttcttacctgcccagcccacaaggtcctgggagcctgggccaggaaacaacagtggtgacccggcaaccgtctcctggcaacccccacccagccggaacccagaggtgagcttgggttttcggaggatggggaggggctgctgagtggcggggccagcctgggaagccgggctgagggctgaggctggggaagggcacagcttcatgggcacagctgcctcccagtcactgctgggactgcctgagcctgagccccagttgctgcccctccgcccggccctcccaggatggtccctgagccgtctctcaggccccacccatgctcagcaccccaggacctggcccgggccaggctctgcgtgcaccctggtgatgttggctggatacacggctgccgatccctgagcattctctgtgcttcacgtggtcgggtccctgttctcactccacagcggacgaggtgccactgtgcccccctctgcaaacaggaaccgggggctccacaaagtgagtgccccccagagggggactcacatctatcggtccaaactgcacctttctgtaagcccctcgctgtgtcacagacctcggccaaagtgaagcattccgcaggggtttgggccgtgaggaacagcctgcccgacacctgacttgaacactctgcggggaaaaacaccgaggaacatcacgattaccttctgcgggaacaagggccaaacaaacggcctcatcctgaagccgtgtggcccgggccgctcccacccatacctataggcaccccagcccgtaggcggcagtgggctctggcatccagctggtcccccacctctgcaggtgtttgcaatgtacccgtgttgatgtaaggctgccctttctcc

SEQ ID NO: 1469 - DNA, 3093 bp, Homo sapiens
gcactccagcctgagcgacagagcgaaacaccgtctcaaaaaaaaaaaaaaaaaaaaaaaatcagctcctcagtcacgctagccacatttcaagcgcacaattgccacataaggccggtgactaccatgctggacagtgcagctacggtacatttccaataccgaaggaaagtcccatggcccgcgctgctgtggggaatcggaagaggcacgccattcccgggaagaacaaaaacctcctagagaggcttaaaaaatttgccattaacacggggaaaaaaatctatttccattcctccatcttattttctcacctcctagacaatgtttcttttttttattctttctctccctattttctcacatttttcctgcccttttttcttatttttctctcactgctttttctaacaacaaacatgcagtccatctttaatgatttgatgcatttctttagggttttcaaaatttctcaatgttaaaatgtaaggagctgaatgaacattatttctaatgtgtttttttttttaaaaaaaagccatatttagaggagactgttttttaaggtatgtgaccttaggtgtgtttcccccacctgagaacattattcttccatagaaagggtttctcaccgttggaatccggggtgaataaaaatttgcaattctagttccggcctctggggtttccttgcaccggaggccgggctcagtcctctgggccgcgaagtgggcgcggaacctctcggtccgccgaactcctaccgccacctagcggaaggaaggcgcaagggcttcttcgtcactgacggttgccaggcaacggaggcacggcccggcccgcgttaaggaggagggcgcagaccgaaggacactgaaagagctgtaacaaccccactttcgattggttgaagagctctcagccttctcatgagccaatgagaagaggcacgcggatggcgtcagacgctatgcgactcctcccacccacgctctggcaatgcgattggagaccgcggaggcctacgtcggacccggaggccctgaatgccccatgcgcaccccacagctcgcgctcctgcaagtgttctttctggtgttccccgatggcgtccggcctcagccctcctcctccccatcaggggcagtgcccacgtctttggagctgcagcgagggacggatggcggaaccctccagtccccttcagaggcgactgcaactcgcccggccgtgcctggactccctacagtggtccctactctcgtgactccctcggcccctgggaataggactgtggacctcttcccagtcttaccgatctgtgtctgtgacttgactcctggagcctgcgatataaattgctgctgcgacagggactgctatcttctccatccgaggacagttttctccttctgccttccaggcagcgtaaggtcttcaagctgggtttgtgtagacaactctgttatcttcaggagtaattccccgtttccttcaagagttttcatggattctaatggaatcaggcagttttgtgtccatgtgaacaactcaaacttaaactatttccagaagcttcaaaaggtcaatgcaaccaacttccaggccctggctgcagagtttggaggcgaatcattcacttcaacattccaaacacaatcaccaccatctttttacagggtttcctagagagtaaaagtacaacttgcactcgttttttcaagaacctggctagtagctgtaccttggattcagccctcaatgctgcctcttactataacttcacagtcttaaaggttccaagaagcatgactgatccacagaatatggaggtatgatgctgttgtaccaggaaaaaagaaaaagaatatttggcttctctgcatctgaggcaattttagtctaagttgtactgttgaaagataaatttccaggttcctgtaatacttacctcacaggctaatgctcctctgttggctggaaacacttgtcagaatgtagtttctcaggtcacctatgagatagagaccaatgggacttttggaatccagaaagtttctgtcagtttgggacaaaccaacctgactgttgagccaggcgcttccttacagcaacacttcatccttcgcttcagggcttttcaacagagcacagctgcttctctcaccagtcctagaagtgggaatcctggctatatagttgggaagccactcttggctctgactgatgatataagttactcagatgaccctcttacagagccagggtaatggaagttgctctgttaaaagacatgaagtgcagtttggagtgaatgcaatatctggatgcaagctcaggttgaagaaggcagactgcagccacttgcagcaggagatttatcagactcttcatggaaggcccagaccagagtatgttgccatctttggtaatgctgacccagcccagaaaggagggtggaccaggatcctcaacaggcactgcagcatttcagctataaactgtacttcctgctgtctcataccagtttccctggagatccaggtattgtgggcatatgtaggtctcctgtccaacccgcaagctcatgtatcaggagttcgattcctataccagtgccagtctatacaggattctcagcaagttacagaagtatctttgacaactcttgtgaactttgtggacattacccagaagccacagcctccaaggggccaacccaaaatggactggaaatggccattcgacttctttcccttcaaagtggcattcagcagaggagtattctctcaaaaatgctcagtctctcccatccttatcctgtgcctcttactacttggagttctcaacctagagactatgtgaagaaaagaaaataatcagatttcagttttccctatgagaaactctgaggcagccacttatcttggctaaatagaacctcacctgctcatgaccagagagcatttaggataatagaggacctaactgaaggaatccttgtatatgaaaggagttattttagaaaagcaaaaaaaaaaaaaaaaaaaaaaaaaaaaaaaaaaaaaaaaaaaaaaaaaaaaaaaaaaaagg

SEQ ID NO: 1470 - DNA, 2898 bp, Homo sapiens
attttcctgcctcagcctcctgagtagctgggactacaggcgcccgccaccacgcccggctaattttttgtatttttagtagagacagggttttaccgtgttcgccaagatggtctcgatctcctgacctcttcgtccgcccgccttggcctcccaaagtgctgggattagaggcgtgagccaccgcgcccggccggtccactaattcttttaaactctgtaaggcattttttttcctgtttaaatatatatcgacattagatagctttggctgtggcaaagaggacctgctattgtaggtctgtgggctggcagtgactgggcggggctcatctgagattggcggggctcggctctgtgccatgtactgtctcattccggaacatggacggaaggcggggtcgctgttgggcatgctgttctcaggagggcaagcaaagctctggggcactgcttctgaaagcctctgctcacaatcggcagctgacacctgcagacaatctccactgttgcaagatgtccctcttcatggagagctgcctgaagctgagaagggtgcgacggacctgaaggctgcacagcgccgggtcttacccaaggctcaaggtgaccgctgcctggtttctgctggtgtttattcaaagcccaagggctctccagtcagcaagtggtgaatctagtcagacatgtgtcctacgcttcagggcaatgagcttcccctcagcctaagattccattatgacattagtctctggtcacaattatctgaagccttgcaggatgcaccattccacttcatcctgtcttcatcacaagaagaaaagtccaacatctggaaatcaccttactacacaagattctcaaatagtacttccttcctaggtaatgctgtttttaaagaaagagcattctttgaaccgtggcttcccgtgacattaatgttgtaggatgaaccacagttaaaggggctatgaagaattcccatagagtgatcatacaattttctttttgtaatctattctgcttttgtagcaactgtcaaaacagcttcactatctatgtttacattaaaatttggaatcagtatctcaaatcctgattacccaaataagtaccaaacttcatcatttaagcctactgaaatattccctcgcgtctcctagagacacctttatctaaacaatatcagagctgaacatgccattcttccccaccctgcttctcttccagttttgtgtaactcggttattgatgtcaccatcaccagttgttcaaaccaggaacttgaaacgcatcttggcccctttcctctcacgcatctccaatattcaagccaccgccaagttttatgcattcttctctcaaatttggaactgtctcgctatttcttcttctatttcattaaaaacccctattcatcaagggccctcttaaaataaaagaaacttatatttaaaagcaatttagaggcaagaagtgtaaatttttctatcaacttcagtttttactctattgaatttattaaggttgattaactcatgaatattttcttaaatgttttacagcatgggacactcactatataaccaaatactgcattttcactaagaaaaattacctcaaacataactcatatacctctatttagtttttttatgtcgttttcattcttctttctgaagaaaccaaacatttcttctatcaaattactaatttttagttttctccaatatatccattccaattagttcttccccaagtcaacacaattcatgctgcctttatttatctaactaattgtataacagtttctcaaacttgttttcaaaattaaatattatttccttgacataatagtttctaaaagatactccacaaatctagaaaactaatttctatcttgaaacaaagattacattaagttttttaacaactatatcacattgtcggatggtgttgtactggtgatgaaataaaagctgcaaggattttttcacataaactctgtgaaaacatttcctcatatgtctgtgcagtcaatgttaagtgctataaatccatctagtgtgcacttagattttagcatttatcattctagttcatatatttaataatctccttcttccatatgtatacatagtaggaagagatcctgaaggacaggccaaagttcattaaaaaagtattcctagtgcttactaccatgtctattcagtaaataaataaagagataaacatatttcttaaagatttttggtagattttgttaagacctcctcccattaaattttattctatggttcaaatcttttgaaataaatttatgttctattttatctcacacattggattgttttctgagcattttttcatgcatggccttgaaaagcttcctttctacatttttatctaaaatacttgtaaaaatactgatcctgaaatatgaaaggagatccctgtattgcacacctggaaatctctggctggaaatgtactccattagcagtgaaattattcagcggtgaaagatcaggattgtcttcctaagaatgcatttccacttttgtggcttcatccttaggtgaggctgtaagaaacacaaagcggaacaaagagggatgccaatattcatgatattctttgactcttgcgtctcctcaggctgtggcagtgtgggacagccctgctatgcctacatcctcaggctcaggaggaagcatcaagctttgctccctagacgaagctaaaaggatatggaaagaaaagttgacagaggtgccatgctcagaacacaaggttagagtggggtgaaagatacatttgaggcaattctgaaatgcagtggctttttcttagagctgttctcaacggagaatcttacttctgcttcctttacct

SEQ ID NO: 1471 - DNA, 2913 bp, Homo sapiens
aataactttgaaatgagtttgttgcctacaacatgcctttctccaactggaagaaggtgtgggtcctgtcagaaaactccagagcccgtaatcaaagcgaaggatctatcagcccagcaagtgccagcttcactaaacaaaacctccctgaaagaaatctcaggggaaaggctgagctcgatccccgaagcatctgaatatgactggcgaaactatcagccaagccagatgagtgaatccgagttacagatgctagcaagcctacggtggcaacaaaatgaagaactggaggatgctgggacctcccatggcctgagtgcctcccaggtggacaactgtaatgtcagcataagtaccagcagtgacgacacaaccacctggaactcctgcctgccaccccctgtcaaccagggtcgccactatcagaaagaaatgaacccaccttctccttctaatccccgggactggttaaatatgttgagcccaccaatcgttcctcccagtcaacagccggctgagcagcgtccagattcctgtgaaagtttgagtgttcaaggatgatttaatcccagaaagctggagagcttggagacatccaagatgctgacaaatggaccaccgaagaaaaagcacttagcacatgcacatgctcaccaaaatgcaataccatgctatggtcgctcattctgtccacaaagattgcagccttctatgcactctaactgcattctgccacctgcaccctgtggcccacttgaaatgaagtttgactacatgacctgcttctttagccaataaaatgtgagcagaagtgatgcacttccaggtgacagatttaagaactggcatactttgccacttgatttttttccactctacatagcaactgtaatgttcaagatgctggcttctccatcagcctgcatcccagaacggggaaaacaaagtggccctgggaaaaagatgaaaacacaacttttctatcaagcccaatagattgaagtcaagagagagcaacgcacgtcttgaaaagaactgagtgggctgggcgcggtggctcacgcttgtaatctcagcactttgggaggccgaggcgggtggatcacctgaggtccggagtttgagaccagcctgaccaacatggtgaaaccccgtctctactgaaaaaatacaaaaattagcttggcatggtggcgtgcgcctgtagtcgcagctactcgggaggctgaggcaggagaatggcgtgaacccaggaggcggagcttccagtgagccgagattgcgccactgcactccagcctgggcaacacagcgaaactccgtctcaaaaaaaaagaaaagaaaagaactgagtgtaactgtgggcacatgaagctgatcggaattaaatagataagaagccaattaagtttttgagagagttgtatagccagagaaatcaggagcctgaactagaaatatttacaactgttcaaaatttaaagctaccctgggccctccccctttccccaggcaggaggcaggctgagaaagctgttctgcccccaaggaggacatattcttcaatgctcactttagatgtgggcaaggaaaggtaaaggaaaatttgcagaagaaagaaccaaatggactgaggagcaacagaatgagaacactgtaggatagcacttcctggccccctatgggaggtggagccaagtcatctcttctaatggtgtgagtggaagtgatgggtccttctcatcttttctgatggtgtgagtggaagtgatgggtcattctcatctgttctgatggtgtgagtggaagggatgggtcgctctcatctcttctgatggcgtgagtggaagggatgggtcgctctcatctcttctgatggcgcgagtggaagtaatgggtcattcttgtctcttctgatggtgtgagtggaagtgatgggtccttctcatctcttctgatggcgtgagtggaagtgatgggtcattcttgtctcttctgatggtgtcagtggaagtattgggttgttctcatctcttctgatggtgtgaagggaagtgatgggtccttctcatctcttctgatggtgtgagtgcaagtgatgggtccttctcatctcttctgatggtgtgagtggaagtaataggtcattctcatctcttctgatggtgtgagtggaagggatgggtcactttcatttattctgatggtgtgagtggaagagatgggtcactttcatctattctgatggtgtgagtggaagggatgggttgctttcctgctgagtgtgtttcttactttccagtgagaggtcctgcagaacactttattccttctggcttaaagactttatcattctgccagactggatccttgagagcctatgataagtagagtgcccctgccagcccatgacagcatgctgtgtggacaagaaacaaactttcattgtattcagcttagatttgagggtcgtatgcttctgcattacctacttatcactgatacaccattggagcaaaaaatcccatctatgaagaaactccaatgatttaccctatatagttctttctctgaatatgtcgtatgccttacctagtgaatcctggggctaaaatggtattgaaatggtcagatccaatcctgagcccctagtcttatgaactaggcctcctctaacaggcagtgctaagcttccatcattcccagacagtggcccaagatgaaagaagacttctctttcccagcttagcttgaatcacaaagcaatccatttgttttggccaaggggatgtgctactcttttaactcagggtcccaggctttagggtgcacgcgatggaaaagaactcacttgtaactgttgcaccttgagttcttcttgttccaaaaagctccagaaagaagctcagcccc

SEQ ID NO: 1472 - DNA, 2913 bp, Homo sapiens
aataagcacatggacaagtgggcacagactcacaggccagatggacctccagccacggccgggccagactcgtggacacaggcgcagtgtcacatacagaccacggggagacatggcactaggggacaaacggacgtgacaccacaatgcacagggcaggccacagagctcgagggacgtgggcaggggccttttggcatttctgcgctggaatcatgtgagacaagggtggtggccgctctggaggtgcctggggggttccctcatgacccctctgggcttagtccatcctccacactgttgtgcagcttctccacctcctggtagaggataaatactgttacccttatccctggtcacatccagggagacgcggtccagcggcccaggcgggggacagtgccgttctagaggtccttgagcccctccttcctcaggatctgcagccataggccggtgtgttccgcatttgtgctgctccaggccccgcatccggtctcgatcccatccagaggagcgtttcccaagacactggctgcacccacaatggctccgaagaccccagcgaccagcgggtccatgggcttgctggggttgtcccctcggtaccagctgtgcagggaggtcaggaggagaagcagacggcctggttccagccctgctttagcgtgggtgccatgaggccccggtgagtccccttgttctcgcacaatctctctaacctggtgggagactcctctgcactggaggtctgggaaggtctggccgtggatgaacttcaccttgatggtggccatggaacatacgaccaccatggcctcggccacgccagcgccctggccgcaccgcagccagcgctgccgtcaggccgtccctgggcatcccgcgtctggctgctgtggaactggaacattcagaacccaacgccgccctggagacaagagccgcagagcagggagccgaggccgcggtgccggcccgggacgccatgaccgcgacagtgcgcacgcgggatccatgcgcggtgcccggctggtgccagcgctcgtccggctgcagctacgacctcccgcgctccgtggggagcggacgcccatttcaatgccgccggccaggccgcctgctggtgtcgccttccccggagcctccgctgggccttcccggacgcggcgcggcgtggccacggcgggcgggaggcgggcgcccgctgtgatctgaagtcccagcctcctaaactccgcactggcaccttaatttggttttaacacaaatgaagatctcactaaagataaaaagggatgtcttggcttctaatttttgttaaaagcaatagcatatgttgtataggatagtgcattggggtaaatcttttttttattatttttattttttcatcagcccactgacattgaaaggggatagtttttaggttattgacgagcagttttctctcagataactgccttagtataggggtttgtggtcatgttgatgagagggtaggctggggttaaaagtcgttatggcagtaacaaccttctgaggaccaggaaattcaaatccctctcatgatactttgctaatatctcccgagtttgctgtgccttccctttgtgcctcttcccacacgtggtttcttgcacttggcccagctatattccactgttttgactccatgcttcttagcctggtggcagtggtgagggagtgaggagatctctaatgttctgaggaagcctcagacttagcactgtgaactggggtgtggggttactgaccgttgaagagtttcctgcccatcctgtacatgcaatgccaggacaagagcacattcctgtccctccttgtccatggtaggggaaacgtgctccttctccatgctcttaactcccagttgaagtgggccttgaacagtgccctgtaaattaatggtttcttttctttatgggagatgcatctgtgcagaaatgcgggtgttggccttgttccttcaccctcagttccatgagcttttccccagtgccctttggctcaggtttggatgctctttctctgcagattaggcctcatgttatataggagagatgtgagggctgtgtctccagagttgcagtagtggatgggatagtggtccctccccatcagcactgtggggtaagcatcctcaggattctaaccccatcttccctgacaggccttgtagggttcctagaaaaattatacacaacggtataaaccctacgtctgtagactccagggtttctcattctcctcacccacccacacacagccaccaggaactagttcaaaagttctggcttaattttaccagtttacatggtcttcagggtacacataaaagcctggagcctgtgtgacctgcaggctttctgcatcccctgatgttgggtttgtagtctgccctgtgacctcagttctttaaagggctcaggagaaaccatccattcatttgaagtttctccagcatttttgtttgtttgtttaatgtgtaggagcaactctttgtcaggtctctatatctacaaacttaactcagaaactaatatttttaaatatatttcttttctatcatacttttagtgctcctctacctatgctaattgttcttcagtattttttatatttgtatgtctttatctattttaaaatcaggtttaattccttcttaatcgaattaataacttttcatttatttccctacgtaactttcttttcagacgtttaaagtattgctgtgtgtttcaagtggaggaggtcatattacaactgacatttgtccttgactactggacatatcacaccagccctgattgcagttatacttgaagccagatctacccttaatgtatattcattttactattcaataaatattaacttatcatgaatggt

SEQ ID NO: 1473 - DNA, 3082 bp, Homo sapiens
atgctcgaggtgtccggtgaccgaaacactcttagctgggtgcagggtgcggctcagggcgtggtcaccgggggctacttagggccgccggtgcgggggacgacgcaaaggttaactgcgagctgccgggcactcagcgcgggtcatggcgtggatactggactgccttttcgcctcggcctttgagccccgcccccgccgtgcaaaaacaaccagaggctgctctgcttgagggtgaagccgcctcccagttttccctccccctctacccccacccccatagttctctccaccaggtccagtgacaattggatgatgcagccttgataatcatccgattccagaatgggtggctgcattccttttctgaaggcagcaagggcactgtgccccagaatcatgccccctttgctgttgttgtccgccttcatttttttagtgagtgtcttgggaggagccccaggacacaaccccgaccgcaggacgaagatggtatcgatacacagcctctctgagctggagcgtctgaagctgcaagagactgcttaccacgaactcgtggccagacatttcctgtccgaattcaaacctgacagagctctgcctattgaccgtccgaacaccttggataagtggtttctgattttgagaggacagcagagggctgtatcacacaagacatttggcattagcctggaagaggtcctggtgaacgagtttacccgccgcaagcatcttgaactgacagccacgatgcaggttgaagaagccaccggtcaggctgcgggccgtcgtcggggaaacgtggtgcgaagggtgtttggccgcatccggcgctttttcagtcgcaggcggaatgagcccaccttgccccgggagttcactcgccgtgggcgtcgaggtgcagtgtctgtggatagtctggctgagctggaagacggagccctgctgctgcagaccctgcagctttcaaaaatttcctttccaattggccaacgacttctgggatccaaaaggaagatgagtctcaatccgattgcgaaacaaatcccccaggttgttgaggcttgctgccaattcattgaaaaacatggcttaagcgcagtggggatttttacccttgaatactccgtgcagcgagtgcgtcagctccgtgaagaatttgatcaaggtctggatgtagtgctggatgacaatcagaatgtgcatgatgtggctgcactcctcaaggagtttttccgtgacatgaaggattctctgctgccagatgatctgtacatgtcattcctcctgacagcaactttaaagccccaggatcagctttctgccctgcagttgctggtctacctgatgccaccctgccacagtgataccctggagcgtctgctgaaggccctgcataaaatcactgagaactgcgaggactcaattggcattgatggacagttggtcccaggcaaccgtatgacttccactaacttggccttggtgtttggatctgctctcctgaaaaaaggaaagtttggcaagagagagtccaggaaaacaaagctggggattgatcactatgttgcttctgtcaatgtggtccgtgccatgatagataactgggatgtcctcttccaggtgcctccccatattcagaggcaggttgctaagcgcgtgtggaagtccagcccggaagcacttgattttatcagacgcaggaacttgaggaagatccagagtgcacgcataaagatggaagaggatgcactactttctgatccagtggaaacctctgctgaagcccgggctgctgtccttgctcaaagcaagccttctgatgaaggttcctctgaggagccagctgtgccttccggcactgcccgttcccatgacgatgaggaaggagcgggtaaccctcccattccggagcaagaccgcccattgctccgtgtgccccgggagaaggaggccaaaactggcgtcagctacttctttccttagatgtttttccttctataaggtgccagacaggggaaaagggtgggggtacatctgggatgtcacaggaaacattaaggagagagttgaaggtaaagatctgaaggtaagaaggagttccacctgatgctcgggtcaggatgagaattccaaacacactgccagccccttcactggggatgcttggtctcttctgctggtaaaagcagagatgtttctgtgtcatgcccaagctccccggtgctaccttgcctttctcttttacccctgatcttggctttctctctctctctgcagactttcctttaattgatgtgacatttgtggtaaacacctttcccagggaacctcacaaatcttgagatgctttcccttccccagatgggattgcatgattccctgactttcctaccctcctccagagagctcagttggaaaggccctcaagaggcatgctagaacgttaggtcagcctactgacagctgacaaacaattaatgcgaaatcatgtcacaccaacccatagccgtgtccacgcagcaactccaccaccttaggatttccccctccaaattattcagaccaatggcttgccaaatggcctctcccaaaattctgtacagttttgctcaggtcacgccaacagggaaacctcaagtgtaggtctaattagtgtttctgggatccaaagttagaggaaaatttagattttattgcctggatctgctttaaagacaattggtgtttacaccctcttgtcagcaaaacagctagttaggtaaggacatatagttccaagtaggtaaagtcacttgattacaaatgttcttaactatcgtctctgtaattcctttatacaggacagtacaaaattgtgggacatgctctggtaacacacagatatgggttgcatatgatccagaattacagctgatattatggatgacaactgctaaggtccataaaatgaagactgtattgtattgagggatagaaattgatcatttaatgggtaacaactgctgagctcaaagatttgtgattgttaaaacttctctggcatttaatcattaataaacatctgtattgtgacagc

SEQ ID NO: 1474 - DNA, 3578 bp, Homo sapiens
agaaaccatcgactctgagaaaaaagagaggttcggccaccgagaaactccgtacgacaagtgctgtggcagaaaaaccgcctactccgcgccacaggcaaaacagccaatggaaaccccaggtgctgcgaccgtgacaccggcactagagggtctcggatggagaaagcggcgcacggagaccaggaaactatgtgtagcacaactagcagaaaaccgtctggtcggccatccgggagaaagcgcggatcagaaacaagcgacttcgatgcagggaaccgcgcagccactgaagaaagtgacccacgtggcagtggtgccagcgaaacactgcagtttggacggcagctgtggggatgccacagagaaacatgcactgccactgaagtacatccagctccgcggaactagtgttcatatgatcaagaaaccgccagttgggctctgctagaaacttttagtcctcccttaacggctatcctacccacaacagacaaatgcctttacccagcacctagcggtgctgagacccgcctgggccagcacagagcgcagagcagtacgggtacggagaaacgccggactcagtgaaaccagccttgcctccagcggattccccggcttcgccggacgccacaggcagagtgccgcggggaaacctctggctccctaaaccgattagattgtgggagtgggggggacactcacaagttgtgtggaagggaaccagcggcaatgggacccggcgagcacttgcccgcagcaaatgcctgcgctgctgcaaaaaaacaacttttggcgcaaagaatgttgcggccagagagcatccgctgtcgctgacaaaggagtagcaatggcaatgagaaaccgccggcgccacggccgaccgcggcggctcacgcctatgatccttgcagtttgggaggccgaggtgggcgcattacttgagatcaggagactagcctggccaacaaggtgaaaccccatctctactaaaatacaaaagattagccggttgtggtggcaggcacctgtaatcccagctactccggaggctgaggcagaagaatcgattgaactcaggaggcagaggttgcagtgagccaagatcgcgccactgcactccagcctgggagacagagtgagctccgtctcaaaaaaagaaagaaaccgctggcgccgggaaaggagccgtgcagcgatggacccatggtgcgctccgtgctaccaaagtgctgtggcctctacccactctcgattcccaaggctgtttttcgggcttagggaagtctgttatatttttatttctgcttctttcttttctttcttttatttctttctttctttttctttctttcattctttctttttctttttctttcttctttcctttctttctctctttcctttttttctttttctctttatttcttttttctttattttttttttaacagtatcttgctctgttgcccaggctggtgcagtggcgtgatcactgctcagtgcagcctcgccttcttgggctccagctatcctcccgcctcagcctgtggagcagctgggaccacaggtgcgcgacaccacacccgactaattttttgtagtttttgtagggtctcgttttgttgcctaggctgttctcgaactcctgagctcaagcagtccgtccgcctgggcggactaaaatcacaaagcgctagaatcacaggcatgagccaccgtgctgggagggaagtctgtattgttcctgcgttcaacccagtgcatagtgcatgagaagaggaggcagtttaggggcccagaaccaagcggatggggctggttgcaggaacaaagtaaaaaccattctgattgccaacagctgcctacgcaggaaacacccttccaacctccgtggcggggctctcccaggccacccctcggtcccagagtctcctccccgtccagagctctcaggatcctacagaaggggcggacaactcttcccttccaaactggaaagtcggcctaggtttccgaggataatgaaaggcacagcgttttttgacctcgacttcaggcctgaccccccactctctcggtcccctaccttttctgcgggatgtaactctgtgggaaccgctcctttattctgatgattaactgtctgatatccttgatatttggggatagtagatgaaagagagcaggagagaaaaatggacggcaagactccagctcagaaggtgggaatgatggcaaaagtccgctacctctccaagcccaataaacatctcaaactgctctacacttttctgtacccttgatctgtgaaatggatcactgacgttttctgtctttcgggaaatgcaaagcaggcgaattttcaagcgcttgaattccctctttttcctacttttcagtcagagtggagctaaaaactccttccccataggaaatatggaactgcctctgcccggaagaaaaacgtcccttttccctaagctttcacatttcccgaaaaatgtacacatccgcatgaaatcctcacaagagacctacagaccctaccgggagcgttcctgtcactacaaaaaatttaaaaattagccggatgcggtcgcgggtgcctgtagtcccaggtaccagggaggctgaggtgggaggatctcttgagcccaggaggtccaggatgcagttaacgatgatcctaagaccacgaggcaattggaggatcctcaaataccagggagaaactagctagcagacatagtatggtgggaggggaagatcaaggcaaatgccttgggagtgggtgagaattgcgacttcatattggatctcctgacctgtgaaggcccttttctaggctcctctggacctgtcctctgcccaggttcaaccagaaaaggatggaatttgttgcatggtatcttcagggtgaggttgggagatgatgcgggaacgctcatccctggtcttaggaacgggagaacaaaggaaaaatggcatcatttccacctaaaaagttacaagcacttcaccagaaggaacagcccaggcggagcctttgtaaaagaaaagccccacccactgcttcgcactcctcatttccacgcagcagagcattttagtggcaaagctgagcgggagccatagttcactcctgtaatcccagcactttgggaggcccaggcgggaggatcactttaacccacgcgttcaggaccatccgaagcacatagcaagaccgtgccactacaaaaaatttaaaaaattagcgggatgcagtcgcgggtgcctgtagtcccagctaccaaggaggctggcgtgggaggatctcttgagcccaggaggtccaggctgcagtgaacgatgatccttcacggcaccactgcactccagcctgggtgacagactgagactttgtctcaaaaaataaaatgaaataaaaatacagccgagattaggaactctttaagaaggggtcacctgagacattattagtataccattaacaggagaaaatgctgcaaattaaagtatcataatggtaggaggctacccatttaaaaatatatacctgtttcagagac

SEQ ID NO: 1475 - DNA, 4515 bp, Homo sapiens
actcagcaactgccatacagcaaaaggagggattgcaactaccatgcagcaactgccaccttgaaagagaaggggttgaagagtagtctctaatatccagcaccagttggccttaggttccctgcctccagaccttattctcctgcaacatcaccactggttgaaaccttactacaaatcaagctgtgaagtcactggagccctgtagcaagtcatgtccctgtaacgatgagtgagctgacagctaaggggcttgcctaaaccacacaggtcagaagttgagtagcaggggcctaggagggctcgaagccttcacagcgatggcagagaagcgacccctgagaaccctggggcctgtgatgtatggcaagctgccccgcttagagacagactccgggctcgagcacagcctgccccactctgttggtaaccaggatccctgcacctacaaggggtcctacttctcctgccccatggcgggtactcctaaggccgagtctgagcagttggcgtcctggaccccatacccacccttgtactctaccggtatggcaggacccccacttcaggcagacaacctgctgaccaactgcctgttctaccgctcgccagcagaaggccctgagaagatgcaggactccagccctgttgagctcctgcccttcagtccccagcctcactcctacccaggcccaccactggcagcacccaaacctgtctaccgcaaccctctgtgctatgggctctcaacttgtctgggggaaggagcagtgaagaggccactggatgttgactggactctggcgactgggcccctgttgccctcagctgacccaccctgctctctggccccagctcctagcaagggccagactctggatggcaccttcttgcggggggtgccagctgaggggtccagtaaagactcctcagggagcttctccccatgccagcccttcctggagaaatatcagaccatccacagcacgggcttcctggcctccaggtacacaggtccttaccctaggaactccaagcaagcaatgtctgaggggccctcaagtccttggacccagctggcccagcccctggggccaccctgtcaggacaccgggcccacccactacccaccaccccaccacccaccaccccaccctccacaggccctgccttgccctccagcctgtcgccacccagagaagcagggcagctacagcccagcactcccactgcagcctctggggggccacaaggggaccgggtaccaggctggtgggctgggcagcccctacctgaggcagcaggcagcccaggcaccttacattcccccactggggctggacgcttacccctacccctctgcccctctcccagcaccctctccaggcctcaagctggagccgcctctcactccacggtgcccattggactttgccccccagacactgagttttccttatgcccgggatgacctctctctctatggagcatcccctgggcttggagggacaccaccttcccagaacaatgtgagggctgtgccacagcccggtgccttccagagggcatgccagcctttgccagcgagccagccctgctcagagcctgtgaggcctgcacaggaagccgaagagaagacctggctgcccagctgcaggaaagagaagctccagccccggctcagtgagcactctgggccgcccatcgtcatccgagacagtccagttccctgtacccccccagcactgcccccctgtgcccgggagtgccagtctcttccacagaaggaggacgcaaggccacccagctctccaccaatgcctgtcattgacaatgtcttcagcctggccccctaccgtgactatctggatgtgccggcacccgaggccacaactgagcctgactctgccacagctgagcctgactcagccccagccaccagtgaaggtcaggacaaaggctgcagggggaccctgcctgcccaggagggcccctcagggagtaaacccctaaggggctcacttaaggaggaggtagccctggatttgagtgtgaggaagcccacagcagaggcctcccctgtcaaggcttcccgttctgtggagcatgccaagcctactgcagccatggatgtgccagatgtgggcaacatggtgtcagatctgccaggcctgaaaaagatagacacagaagcaccaggcttgcctggggtgccagtgaccacagatgccatgccaaggaccaacttccacagctctgtggccttcatgttccgaaagttcaagatcctccgtccggcacctttgcctgcagccgtggtcccgtccacgcccacctcagctcctgctcccacacagcctgcacccacccccacatctgggcccattggactgcggattctcgctcaacagcccttgtctgtgacctgcttcagcctggcactgcccagccctccagccgtagctgtggcctcccctgcccctgctccagctccatcccctgctccggctcgagctcaggctccagcttcagcccgggatccagctccagctccagctccagttgcaggccctgctccagcatctacttcagccccaggggactccctggagcagcattttacaggactacatgcgtccctgtgtgatgctatttctggctccgtcgcccactctcctccagagaagcttcgcgagtggctagagacggctgggccctggggccaggctgcgtggcaggactgccagggtgtgcaggggctgctggccaagctgctgtctcagctgcagcgcttcgatcgcacccaccggtgccccttcccccatgtggtgcgagctggcgccatcttcgtgcccattcacctggtgaaggagcggctcttccctcggctgccacccgcttctgtggaccatgtgctgcaggagcatcgtgtggagctgcggcccaccacgctgtcggaggagcgggcactgcgggagctcgccctgccaggctgcacctcacgcatgctgaagttactggcgctgcgccagctgccggacatttaccccgaccttcccggcctgcagtggcgcgactgtgtacgccgccagctgggtgactttgacactgaggctggagctgtgtcctcctcagagcccactgtggccagagatgagccagagagcctagccctggctcagaagtcaccggcccccaaggtcaggaagccaggcaggaagccaccaacccctggcccggagaaagcagaggcagctgctggggaagagtcctgtggtgcctcccctacccctgctaccagtgccagcccacctggccccacactgaaggcccgcttccgcagtctgctggagaccgcctggctcaatggcctggctctgcccacctggggccacaagtcctcaagaccagaccagccctcaccctgcccacagctgctggacagccagagccatcacctgtagcactggttgccagtgctgtgtgtatagcagtcactctccacccttcccttctgcctgcccagctgccccggggccacgagtggatgctggggctgtggctgctcccctggaggggttccatctctgaccctgtggcccattcagggtgggctgaagagcccctgagcttttaacgtgagggtctttattggataggactactccctatttcttgcctagagaacacacatgggctttggagcccgacagacctgggcttgaatcccggctcgtgttcttgctgcaggacctgggcaagaaacttcacctctgctgagccctcattccccatgtgtaaaatgggacaacgcaacctacctcacagggttgttgtggggatgctgcctgatacataccctgtcaccatttggtctctgcttcctctctgggacagggcctagaattggaggcagagaaccttcctatagaaagtcttcgtgtgtcctaggacttggctatcgtagagtggtaccttaggcagtggatgtgactcacactttcaggagtcaccccccagcatttggggttgggttggccctactccagcctggagctccctgagggagcctgcactccctgctcccaatccccgctactggtgcagggatgcagcctggagctggcgtccttgttctgggcctgctgctgccgccaccccaggaggccccaggcctgtcctgaattgacatcagtgcttccctgaactgcctcccccacccctggcattatcccaggaaacttatgttttctagaagctaagcagctgctgggactcagggactggtgcaggtaggctgagtggcagctcagtcctagaaggtctctgaagatctggactgaggaccctgctactccccaagccagagcccatcagccaggcctgctgtgagccacctgcctgtggagtgctgagctcaaccaaaggctggcaagctctgggcctcatttaagggattctgatgagccgatgggccctggaggcagcccattaaagcatctggctcgtttttgg

SEQ ID NO: 1476 - DNA, 3028 bp, Homo sapiens
ctgcgatctgtgctgggaaagatggggaagacgcctgagagggaaacttgactgcgcctggacagagaaatgggtagactggaatctgtgcctgcggcgggcacctggcaggggccggtgtgagcagaagtgtgggtgttggaatgacggtgccgaccccaggttggacagggggctgcgaaatggaccagggagccctgggtcaggccacgatccacgcctggcctctccctccctccggctccccaagttcctcaccacggccactgggcccagggaccctgggaaccagccgtgtggggcacccagcaggacccctgtgccactgggtggctgctggcaggtcccgggccgtctgttctggaacagtggaggatctgggatcagcaccttcctgtgtggctgtggctgtgagcccctcgcccagggtgaccactagagcccaggactcagagggtccagcccagactccacagttcccttcctttcaggagtggagggaggcccaggagtatgtctgagccaggccaggcagggtcccagcccctcccagtggttcccggcagtcccgggctgccttctccaggcggggacggggcggggccgggggatgccatagtgacaagctcacttgctgcttcagtctcaaaacaagtgcttctgggtttcattttcagctctggctggggatggaccctgaccttcaaacaggccagacggtggcagccacaggctgagtgtgggcacctggggcctgagcgccctcggcagcaggagtgcaggtctccccatgaggtgtctcccccattcaccccgggaagcccagacagtggcccgaggtcatgtggcaggtagggtgcagggcaggagctgcttggggggcctgggcctcccccagctcccttcctcagagcaacccagacccctgacccaattaggcccaggcccagccagcggttggggtcattccaggtgcttctgaagagaagggtatggctgaagcctcctctggggacagcagcccctctgtcctgggaagtggcctgtaggaagctgagcatgggcaggcagaactggacgtcccagttctttccaaaccccctcactgggccaggcccaaaaggacaccccatggcgggccctgctgggctcacgggggactcagggttggaccccagtaggcctccgccagggtgtggtgggcaccctctctgtggaagttaggaagggctgttgagggaaggtggcatggcgggctgggtcttgagcggtggggaggagttgggcccatccacttgtagcggggcacagggctctggctgaccaccagcagggcaggcggagggaagggtccggcgccctcttttcccactggtgtcctcctgctgtgaagccaggcctgtaggagcctgcaagcctcggggggcacaggggacaggcctgacacacagagggctcctcgggcactcatcctatagtagggagacgggccctgggaggggagggagccaggaggcagccatgcgccctccctaagatggaaaacgcaggggcctggtgagggcggtgctgaccacagtgctctgcacaccaggctactgctggcgccccagctccggggaacatagagtccttggggacacagggcccaggggcctccagagctgggatacggtggaggggctgctggatcccaaacaccctttaggcctccttcatccctagtcagcattccagccaggaccccgggggccccatccagagtcctgtcagcgggggccatagcctgtggctgcaggcctgggcaggtgggtgacacgaggcaggaccgaccccagggttctaacgcctgctccccactggccttggacaaatcgctgcccttttctgagcttgattcctcacctgtgaagtgggcatcaaggtaatgcctgaggccgggtgcggtggctcacgcctgtaatcccagcactttgggaggccgaggtgggcagatcagctgaagtcaggagttcgagaccagcctggccaacatggcaaaaccccgtctctactaaaaatgcactgggcatggtggtgcgcgcctgtaatcccagctactcggatgctgaggtgggagaatcacttgaacccgagaggcggaggctgcagtgagccgagatcactgagatagcaccactgcgcttcagcctgggtgagagcaagacttcatctcagaaaataaaaacaaggctgggtgcggtggctcacacctgtaatcccagcactttgggagaccgaggcgggtggatcagctgagttcaggagtttgagaccagcctggccaacatagtgaaaccccgtctctactaaaaatacaaaaatcagctgggtgtggtggtgcatgcctataatcccagctacttgggaggctgaggcaggagaatcctttgaaacccgggaggcagaggttgcgatgagccaagatcacgccactgcactccagcctcagcgacagagtgagactccgtctcaaaaaaataaaaaacaaaaaactgcctgagacttgggggcagtgaacaacctgtgtgacacacagtaggtgctgagggccaggcatctgcactgttctctttctcctctgaacagagaggtgccatgatctggccaaggacacacagcaatcagaggcaggctggcttctctgccccggtcccgccacccggcgacacctgtcagcccccttgcaaactctgtgctccttgaaggtgggggggggggggagggcggggtgggtctggaccccgttacaagggattcctataaatggcgtggagaggattaataatgtatttataacacattttggtggtagtcgaaaatgatctataaatgtgcagtaaatgttttataatgtttttgtaacccgttataaatgataaatggcagaccatagatgccggatcaaatatttataacgcactgtgcgcggcgttgggctgctacagttcagcaaagccattaataataaagtggatggaaatgcacg

SEQ ID NO: 1477 - DNA, 1039 bp, Homo sapiens
ggaaggcggcacccattacttagcagaccaggaaagggagtttccctttccttgggggagttagagaacactctgctccaccagttcttgtgggaggtcgaacagtagccaggcctgcccgtagtcatctggaggcttaaacgtctccctgtgatgctgtgcttcagtggtcatgctccttgttcactttcacattccgcctgtacacctggctcctccttttaagttcttagaagatagcagtagcagaattagtaaaagtactaacgtctttgatctttctgataagtgcatagaaaaaatgctgacgtatgctgtcctccctctctgctttggctaccacaaagggaaaggctgcctgtcacgtggacaagtgacttgcttgaccttatcaatcacttgggatgactcactctccttaccctgcccctttgccttgtatacaataaatagcaatgcatccaggcattctgggcccagctgtctttcttactgtctttgtcttgtgtcttattttcctatgatctcttgtctccacacatgaagagaaaacccacaggccctgtagggctggaccttacgtctggcacccaatgaggtcttctctctcactgtgtgaaggtgcgccttgagcgtggaactcagcggaggactaccaatgacagattcctgaggattgcagtcaataagcttggtggtaagcttggacactcagagaatcccggggacaccatgggacaggccagtaccaagtgcttggcttatttgaactttataaaaactctccttaaagaaagaggtaggccgaggcgggcggatcacgaggtcaggagatcgagaccatcttggctaacacggtgaaaccccgtttctactaaaaatacaaaaaattagccgggcgtgttggcgggcgcctgtagccccagctacttgggaggctgaggcaggagaatggcgtgaacccgggaggcggagcttgcagtgagccgagattgcgccaccgcactccaacctgggagacacagcgagactctgtctc

SEQ ID NO: 1478 - DNA, 3405 bp, Homo sapiens
ctgggaggagcatcaggccgtgggatccagacagtccagcagctctgaggactccagcctggaggaggagctcctctcggccacctcagacagctatcgcctgccggagcctgatgaccttgatgacccggaactgctcacggacctaagcactggtcaggaggaggaggctgagaacttcgcccccatattggcttttctggatcatgagggttatgctgaccactttaagagtctctatgacttctccttctctttcctcacttcttccttttatagcttctctgaggaggatgagtttgtggcctacctggaggcatcaagaaagtgggccaagaagagccacatgacctgggcccatgcccggctctgcttcctcctgggccggctgagcatcaggaaggtcaaactctctcaggccagggtgtacttcgaggaggccatccacattctcaatggagcatttgaggacctatccttggtggccactctgtacatcaatttggctgccatctacctgaaacagaggctgagacataaaggctccgccctgttggaaaaggcaggtgccctgctggcctgcctgcctgaccgtgagtctagtgccaagcatgaactcgacgtggtggcctacgtgctgcgccaggggattgtggtgggcagcagcccgctggaggccagggcctgctttctggccatccgcttgctcctgagcctaggccggcacgaggaggtcctgccctttgccgagcgcctgcagctcctctctggacaccctcctgcctctgaggctgtggccagtgttttgagttttctgtatgacaagaaatatcttccacaccttgcagtggcctctgtccagcaacatggtatccagagtgcccaagggatgtctcttcctatttggcaggtccaccttgtcctccagaacacaaccaagctccttggctttccttccccaggctggggtgaagtttctgccttggcctgcccaatgctcagacaggccctggctgcctgtgaggaactagcagaccggagcacccagagggccctgtgtctcatcctttccaaagtgtacctcgagcacaggtctcctgacggtgccatccactacctgagccaggccttggtgctagggcagctgctgggtgagcaggaatcctttgagtcttctctctgcctggcatgggcctatctcttagccagccaggccaagaaggctttggatgtgcttgagccactgctatgctccctgaaggagacagagagtctcactcaaaggggagtcatctataacctcctgggacttgcactccaaggtgaaggccgggtgaacagggcagccaagagctatcttcgggccttgaacagagcccaggaggtgggagatgtgcataaccaggcagtggctatggccaatcttggccacctgagccttaagtcctgggctcagcatccagccagaaactatctcctgcaggctgtacgactctattgtgaacttcaggccagtaaggagacagacatggaattagtacaggtgtttctctggttggcccaagttctggtgtctggacaccagctgacccatggccttctttgttatgaaatggcattgctgtttggcttaaggcatcgacatctaaagagtcagcttcaggccaccaaatccctctgccatttctacagctctgtgtccccaaaccctgaggcatgcatcacctaccatgagcactggctggccctggctcagcaactcagggaccgggagatggaagggaggctgctggagtccctggggcagctttatcggaacctaaataccgccaggtccctcaggaggtcactcacatgcatcaaggagagcctgcgtatcttcattgacctgggggagacagacaaggctgctgaggcctggcttggggcggggcgactccactacctcatgcaggaagacgagctggtggagctgtgcctgcaggcagccatccagacagccctgaagtcagaggagcctttgctggctctcaaactttgtgaagaagcaggtgatgtgttcttcaatgggacccgccacaggcatcatgcagtggagtactaccgagctggagctgttcctttagcaaggaggttgaaggcggtgagaactgagctccggattttcaataagctgacagagctgcagattagcctcgaaggctatgagaaggctttggaatttgccaccctggccgccaggctcagcacagtcacaggagatcagaggcaagagctggtggcctttcaccgcctggctacagtgtactactccctgcacatgtatgagatggctgaggactgctacctgaagaccctgtccctctgtccaccatggctgcagagtcccaaggaggccctgtactatgccaaggtgtattatcgcctgggcagactcaccttctgccagctgaaggatgcccatgatgccactgagtacttccttctggccctggcagcagcggtcctgctgggtgatgaggagcttcaggacaccattaggagcaggctggacaacatctgccagagccccctgtggcacagcaggccctccgggtgctcctcagagagggcgcggtggctgagtggtggtggcctggccctctgaggaaagctgtcctgtctctggacatttggcatggccagactctgaccccactgccctaggctcttaaatactcattgggagggtccgagtccttacctggcctagccccctcatttcacaagaagaagaatgaagtccaggaggagaagggctcattgcaggccacagaaagatttgatggtgcagcgatgagaattcctggttccaggctttgcatctggagcctttaccggttgactgttgccttccacacaaacagcctctgaaaagcactttctccatacataattctggagaagatgagggatcttgccctccaggagccttccttcctcccccaatgaggaaatcagtcactgcactggtgcaaaggcaagcagattggaatttgtgctcttcaccgattttctcagggaaagaccccttccccttgccagcagaggaacctgtagttttttccatttctttcttcagaaccaaagtatgtatcactcctcatgctcacagggattgacaggagagaattcaccaggatcttagctcaaaagacacagcctcagaatggccagatggattgcacgaaacctgacttagattcaccatcttcctcctgccataaggctgtgctcccacataacctcccagaagctccagggaagctttccaagagcaaaggcttggaaattgaatgttaagaaaattatgacataaattacatgtaaatagtgtatatgattaaatattgtccagttacattt

SEQ ID NO: 1479 - DNA, 3706 bp, Homo sapiens
taaaaaataaacttcagatgtttaatacgtgtgtatatattctaggggtgaaagatttgaaagttgaagatgacatctcaatgaaggtgatacctattttatctacccttaattgtgccctgctagaaacaaagaaatcacttcctgaagaaagaatccatccaaacacattagtaaagcgtcatttccaagaattgtacaaggcggacagaagcccttcattgagtgttgctcctcaggatagaatgaaagaccctacattcttggggaaactgcccagtggttttgacttgattcctccagctgaaaagtgcccttcagagtctttaactcagttgaactcttatttttcagaccctagtgcttacattttggaagtgtctactgctttggacttgctagcagagcatcctcagtctccttgtgtttcagacggaatttgtgatgctggattttccttagttatgactccagatcctgaatttcttgtctcagaggcagaagtgagaaaagaaactgaaacaaaaaaggattctgaagaaatgttgaaagcaaagaagagagtttttccattgagtccagcgtcaaatctgagagtgcagcctaagaggaaggccagcatgccccacatggtgcagagtaaaaaggtgaacttgtgccgcccctttcccaaaagaactgcttccagagcagacaacagctcggactctccaacaactcttaagttagttaaaggacagtttcctcagaaaagaaaaagaggtaagcacgatttatttatgtgggttattataataatagttgtggccaggcgttggtggctcatgcctgtaatcccagcactttgggaaaccaagtgggtggatcacctaaggtcaggagtttgagaccagtctgaccaatacggtgacaccctgtctctactaaaaatacaaaattggttgggtgtggcggtgcgtgcctgtagtcctagctactcggaaggttgaggcacaagaatcatttgaacccaggagacagaggttgcagtgagccgagatcacgccattgcgctcccgcctgggtgacgagcaaatctccatctcaataataataatagttgttgtattcgatccctctgctgtcttggtccctgtggactgcagctttgcagcatcagttagaagattgttagaatcaccatcatttctctccaggcaatttgtgtgcctcctaatgcctgacaagctctgattgagatagcaactgaaaaccaagaaataggaaagaccaagatacctcaaaagcctacccaccaccaacatgttatgttccacatgtaaaaccacccacacgtgtatgttccattctaagaaagacaaccatctagtttctgtgccatcctcctcacaaatggaggtagaaaaggttcttctaaaatcaggcacatcagtaccagcaaaccgtgatagctgacagcctcaacacctatcgagaggagggaactgcctgggacctccaaaagtaaaatagtctggggcagagtttctaatcctttatgtgtatcacagagtttttacgtgagcacctggattattcgtgtggttttgatgctccctgaaaaattgagtgagaattagagtcttgagctacttagtgtattggcagatgtatttgtgaacatagcacagcaaaccatatgactttggcctagccacttaatgtattggcaaatgtatttcagtgaacataggacagcaaatcatatgactttggtttagagtcatctcaaattgtgttttactctattttctctaaaagagtagggaagtatatgggtgactcctttggagaagaaggcagcacattatggccaaggggccactcggttgtgcctgtgtcgtctctggctgctctcatgccgtgttggcagagctgagcagctgtgacagaagccacatgaccttcaaagctgaaagtatgtactctatggcccctcacagaaaagtttgccaagccaatctgtaatattttgaatttggaaatgttggtgcctaaagaagaaacgtctagggtatggtaatcccaggattctaaataattcagagtttaccctatggagttttttttgtttggagttttctgtttttgtttagaaacaggatctctctgtcagccaggctggagttgagtgacatgatcatagctcgctgcagtctcaaactcctgggctcaagtgatcttcctgcctcagcctctggagtagctggaactacaggggtgccccactaatttttaaaatttttttgtagagatgacgtcttgctatgtttcccaagctagactttgaactgatgctcctgcctcagcctcccaaagtgttgggattacaggcgtcagccactgtacccaaccttggttttatcctgtggcttcataaatagtggtttctggcttattgtggcttgaggaacggggtggagatgtgcgtacttaggagggtaagtggaaagtatggtagtataaagcagtgcaccagactatacaactatctgtaaaacagattccaggccaaccatactgttctgcatgaaccaatttaaggtattgaatcagttatctataactcaacataaattgtcactgtttctcagatgtttttaattatatccactgtaagaaatatgtttgatattatattccggtacctacaagttcatacatgactggaacaaaaatttcaaaaaaaaattatgtgtaatacagtctgataccttctattctgtttcatttaagagttctgggctgggtgtggtggctcatgcctataatcctaacactttgggaggctgaggcgggtggatcacttgaggccaggagttcgagacctgcctggccaacatggtgaaaccccgtctctactaaaaacacaaaaaatagccaggtatgggggcacttgcctgtaatcccagcaacttgggaggctgagacacgagaatctcttgaacctgggagggagaggttgcagtgagctgcactgcactccagcctgggtgacagagcaagactgcatctcaaaaaaaaagaaagaattctagttgtgacacattgaatttattttacaacccaccagtggattaattgcattcagtttgagaagcatggtattgaatgttacatgtaaacaaaacaatctatgcaggatcactttgtttcatttttcttttttctcccaacacctgggagtacctgggaatatcttccttttctgtttgtacaaatattagaaagtttccccctgggtcttggttgtctaatctttttctttttaatttagtcttaactgttttcctgatttatttttattttgctcttccctatgctgaagattttagaaaatgtaattagagtgtaataagaagtcttattgttaaaaaaaaatacgctgctttagtacttattaatataataatttggtagggaggaagataatcagacttgaaatgtacagcattaagatattctgaaaacatttttaaaactattcctttcgctaacccccaaaagaatgaaatgaaatgggtctccttttttctcctacatttcactaacactgatcagtttcttaaactgtttaatatcatttttagtgtccttagtgagaagtagcgtcttctgtataatgtaatttaaaaatatttgccaacattaaatgtgtgattatttc

SEQ ID NO: 1480 - DNA, 3376 bp, Homo sapiens
tgatagggcagagaggagcccatgctccagctgcggggagtgcctgcccgaggagctggccagtgaagacaggtgcctgccagtgaagacaggtgcccacaagctggacacagggtcggccctgagacaggacagcagctgcggaatgttcccgctggctttctggagcgccagcgtcctgcttgggtctggccaggggcctctagccaggctgttgaggcgcccctccttgttgaagaggagaaacagtggccccctgggagttgctgggaggtgcctggcacagggcggcagggacagcatcatctatggggaaagcaagcccagcctcagggctgtcccgtccaaagacccttgtgagtccactgaggtcaaatcaatggagtcttcagaaaggccttccggagcagtactacagcctcacctggttcctgagccccatccttggcctcatcttcacacctctcattgggtctgcgagtgaccggtgcaccctgagctggggccgccggcggcccttcatcctcgccctctgcgttggcgtcctctttggcgttgcacttttccttaacggctctgccatcggtctggccctcggcgatgtccccaaccggcagcccattggcatcgtgctcacggtgctgggagtggtggtcctggacttcagcgccgatgccaccgaggggcccatccgtgcctatctgctggacgtggtggacagcgaggagcaggacatggccctcaacatccacgccttctctgccggcctcggcggagccatcggctacgtgctgggtgggctggactggacccagaccttcctgggcagctggttccggacccagaaccaggtgctcttcttctttgccgccatcatcttcacggtgtccgtggccctgcacctgttcagcatcgacgaggagcagtacagcccgcagcaggagcgcagcgctgaggagcccggcgccctggatgggggcgagccgcacggcgtccctgccttcccagacgaggtacagtcggagcacgagctggccctggactacccggacgtggacatcatgcgcagcaaaagcgactcggcattgcacgtgccggacaccgcgctggacctggagcccgagctgctgttcctgcacgacatcgagccctccatcttccacgacgcctcctaccccgccaccccccgcagcaccagccaggagctcgccaagaccaagctgccccgcctggccaccttcctcaaggaagccgccaaggaggacgagaccttgctggataatcacttgaatgaagctaaagtcccaaacggaagtggctcccccacaaaagacgccctcggcggctacaccagggtggacacgaagccctcggccacgtcgagctccatgcggcggcggcggcacgcgttccgcaggcaggcctccagcaccttctcctactacggcaagcttgggtcccactgctaccgctaccggcgcgccaacgccgtggtgctgatcaagccgtcgcgcagcatgagcgacctgtacgacatgcagaagcggcagcggcagcaccggcaccggaaccagagcggggccaccacctccagcggggacaccgagagtgaggagggggagggcgagaccacggtgcgcctgctgtggctctccatgctgaagatgcccagggagctgatgcggctgtgcctctgccacctcctcacctggttctctgtcatcgccgaggccgtgttctacaccgacttcatgggccaggtcatcttcgaaggcgaccccaaggccccctcgaactcgaccgcctggcaagcctacaacgccggggtcaagatgggctgctggggcctggtcatttatgccgccactggtgctatttgttcagccctgttacagaagtacttggacaactacgacctgagcgtcagggtgatctacgtgctggggacgctgggcttctctgtcggcacagccgtgatggccatgtttcccaacgtctacgtcgccatggtcaccatcagcaccatgggcatcgtctccatgagcatctcctactgcccgtacgccctgctgggccagtaccatgacatcaagcagtacatccaccacagccccgggaactccaagcgagggtttggcatagattgtgccatcctgtcctgccaagtgtacatctcgcagatcctggtggcctctgcccttgggggcgtggtcgacgccgtggggactgtccgcgtcatccccatggtggcctctgtgggctctttcctgggcttcctgacggccacattcctggtgatctatcccaacgtgtcagaggaggccaaggaggagcagaaaggcctgtcttccccgttggccggcgaaggcagggccggtgggaacagcgaaaagcccaccgtgctgaagctcacgcggaaggagggcctgcagggaccggtggagacagaacgcctgcaggtattgacgtctgtcagatctcgtcacattggctggtgccgcagctgttggagagtatttttctttatgattattttagaaaaaaaattttcttttccacaatgtggttctcttagaagaatgacgtatcttcttttcctcagcgagttggacacattgtgcccagggcagccctgtccttgggcagcgaccgcacaccaaagctggaaggaggctggtccggggggcctgggcagaagacagtgatttgcaggggtggctcccagacaccctgcccagggatgggctgggcaccacctgggggcggagcgtgagctccagacgagctcctgcgtgcgcgtgtgagtgtgtctgcgcccagccatgtgaccccgctcgtcccgtctgaaggactctcctaggaggccaggttgcccctccagaccgctcccaacgtcagggggaaggaaacgttgactttcactgcactttgattcgtctctaaaccatttgctggggattcctgagagcagagctcccagcgggccctgcctcccaagtcccgccgcaaggctacctcgggtgtgtggatgtgcgagggcctcccccgcttgcgaaggggacatgcgtgctggaacctgtcggaactccatgccttcctcgcctgctcacctgctcgacgctggaatcgggacaggtgcaaagggacgcagacgtctgggacagctaaggcccgtgtcaccggagggctccgcacagtcgttctggtttcaacgaataagcaaaactcgggcaagtactgcagctatttggtaatgttttccaaaccacagtctctttagaactaagcctatttgaaacggtcggtgtaggcttactgagatcaggagacagggaggccccgcacatcacacagataaagtcagacaattgtaatt

SEQ ID NO: 1481 - DNA, 3925 bp, Homo sapiens
accagtgcctatggggtcgggaaggtccccccgcgaggtggacttccggttctggaggtagttttgcagcagcatcttgcgcagctggttgccctgggggaggatgggagtgaggccccattgtgggtacagcccaccactgaccactggcctgacgggcttgaccctgagcccctgggtactcctgactggcccacccagcacttgccccaccagggcactcacccggtccccgtacttggtcttcttgagcagcatctgctgcagggtccgcagcaccttgatgcacagcttctcctccgactccatgaggtccttggtgtgctggatcagcctgagccggccaaggaggcagctcagggcagccccacactgcctccctccagctacttccccaccccatcccaggcaggaacacccccaggccctctgacccagtgagcctgtctagtccccaccgggcccttctctgtcccctgccgctgcacccctgctgcccccatgccccagtgtctcgctcacttggacaggaagcccccactctcgcagcgctggtaggcctcactgccctccaggaagagcagctcaggccagtgcaggacatccaccagcacggacagctcagcctgtaccaggggcttcagccgctcctccagggctgtgatgatgtcctggggtgggcagggcagagtcattgccaggcccaagaaatgacccgggtgtgactgccattcctccgacccaaacgccaaacagccccacagattgccctgcctctgtctgaggggcccacacccacagagacaccctgaacacagcgtgatgtctgtctgctcagagccctggctgggagctgccaagcctggcttctctcccagctctgtgtgaccttgggcaaaccccttagcctctctgagcctcagtctcctgccacgtggggaaaataatccaccacaccccctctacaggccaacgagacagcgcacagaaatgtgctgcatagacaggagggcgctgcaggagtgaggggtggtcccgaccccctcatgagctccaaccccactagcaggcctctgggttctccaggcttcctctggaaggaggttccccagtcccttgctgctgggtcggcccttagcagccccggagtgtagagaagccaaccagccccttcctggaagtgtgggcaggacaggaagaaacactccccgagaacttgcccctccaaagtaggggagctgctgactcaaccaagcagcccccgaggcagatgccaggcagccccacacccacctgcagcttctcaatgatgttcttgtagtcccactggttggcggtgggggtgacgcgggggaaggcccgcgtggttgccttgtagctggaggcgttccgctgggcggcagctgcacagctggctccactgctgagcatcgagctgatgtgggcatccaggtccatgggcagcaagatggcccggcccttggctgggtgggaagggagggagtgctggagtgctggtgcgggggcagttcagccagccagaggccaggctcagggctgccacaccaggagacagagtgaactagaccaagggtctgggagacagagaccccccccaccccggcctatgcttgagggactgagaggctttcttccccttgttgggtaaaaggagtttctgcctctttgattccccccggctctaccctgacttccccttcctctctctcacctgtcctctcttcttccccaactgtccctaacaatccacaggcctgctcctgcctgagcccatctgcaaatacccataaaaaactagctggagaatgtcggcgagcatccttctctggggaactgacccagaggagaaaacagcttctctcaattgccaggatgaggcagacgccaagaagagcttactgacaaccacctgggagcaggagatgggcgagcttagggataaagtgtttattaggagggcaggcgtccccactgtgagcggcaggaggagtggtttggggctggccagtgccccggcacactcacccaccatggcgagggtccggatgcaggcctccacggagcccttgtgctgctgctgtagccacggacactcgaggaggcgtgtggtagactgcagcagctgcaccacaatcgtctggtgtgtctgcaagaagtcacagagcccgctgctgcagcccaggcccccaccctgggcaaccccaggtccaggaaccagggcccaatcagaatgggcatgggtggagagacggagccttcactagccaccatgtgcctctgtgccagttggaaaaagctaggcaagtcggccctggggtggtgggagaggagaagctcacctgcagggaagtgctgttctcagagaatggggagctgaagaaggcgttgatggtgtccagcacaacgctcagcacgtacttctccaaggtggggtcagccacgcgcttctcacgcttgctgcagacctgaggcaggagagagggatggctgggggctcctcacatggggcccctccactcccacacctcctggggggcttcacccacacccctcacagggacagacccgagccatgtccagggtgaagttctcaaagagcgtccagatgtggttgctggtgtagatctccttcatctccacctccgtgtccacgtagcagtggttcacgaagttcacataggccattttcacctgggcagtgggcgggaggtcaggggcgcaagcagggccgcctggccaggctctccctgccacaatgctcctgtcccctggcctccggttcctgcccacttccctggctttgcttcacccactcttcctgtcccgtggctttacccaccccttcgccccatctccagccgtcttgcccagtctcccgatccccacctcagtgatgcagtcctcatgcgtcaccacagacaccacgtcctccagcggcagcagggaggtgcacttgatctcagtgtagacgtttttgccctcggcacaggcggccagcaggtccaccagggaaatgtggtacatgagggggctgtggtcctccacgccgtcgcgggcggccttcatcatgtccagcaggtgggccagcgatgccttatcattgtagaacacgaccacatcgtcacctgcattggtcagctgcgggcgggagggggcacgtgtcacactctctcggtccagcaagccctgggctctcctctcctttgcttaccagggagaaactgggactctgaccacagcccttacctgaaatcaggaaaaccctcccctggctgggatttgggggttccccagctgatgtctcaggccctctgccagcagagatattgaccccatgacccagaaagtccccgcttctccccactggaaagaagtcccataggggtcatctcagaggcagcttcctccaggaagcctcgctaatcccgccttgctcaccccctccctcccctgtgctcccgcagcagttacttaaaccctcctcactgagcacacacctctcgtgccagcgactgcattattcgcagtaatataataatagaaattaataaaactaacactgtacagcagttccagcacatcatgtcttgtttatgatgtcctaatctcccttcagtgtttgcttctttctccccctgccgcctacactgtcagatgctcaggggcagggaccacgtctgttccagatttagactcagccctgtatccttcgtgccttcactcaacaggtgtctgttgggaacctactatgcgccacacactggggccctggcgatgcacacaaaggatggggtccctgcccgtgccccccaggagctgacactcagctgatgtcccccatgcatgtacagtccgtggcacgtagcaggtgcttcctgattttaaataaacgacgacaagtgac

SEQ ID NO: 1482 - DNA, 4992 bp, Homo sapiens
aggagacttccgagcccgtctctccctccatcctccagctgctgcccctgtagcccaggagcccatactgaggccccagggcctccgctcccatcttcttctcttccagctgctgcctgcccagcaggccaggtcttcgtgaactgcagcgacctgcacacggacctggagctgagcagggagaggacgtgtgagcagcaactgctgaacctgagcgtgtcagcccgtggcccctgcctctcgggctgcgcctgtccccagggtctgctcagacacggggatgcatgtttcctgccagaggagtgcccctgcacttggaaggggaaggagtatttccctggggaccaggtgatgtctccttgccatacctgagcacatcagatgtcagcttctctgtgattgtagagaatgtgaactgctacagctctggcatgatctgcaggaaatttatttccatcaacgttgggaactcactcattgtctttgatgatgactccggaaatcctagtccagagagcttcctggatgacaagcaggaggtccacacatggcgagtgggatttttcacactggtgcatttcccacaggagcacatcaccctcttgtgggaccagagaaccacagtgcacgtccaggctgggcctcagtggcagggccagctggcgggcctctgtgggaactttgacttaaaaaccatcaatgagatgaggaccccggagaacctagagctaactaacccccaggagtttggcagcagttgggctgcagttgagtgcccagacaccctcgatcctcgggatatgtgtgtcctgaatcctctccgagaaccatttgccaagaaggagtgcagcatcctgctcagtgaggtgtttgagatctgccaccctgtggttgatgtcacttggttttactcaaactgcctgacagacacatgtggctgcagccagggtggtgactgtgagtgcttctgtgccagcgtctccgcttatgcccaccagtgttgccagcatggggtggctgttgactggcgaaccccccgcctctgcctgctaggtaagggcccctatcagctatccagcttggcagccggtggtgctctggtgggcatgaaggcggtgggcgatgacatagtcctagtgaggacagaggatgtggcgccagcagacattgtgagcttcctgctgacagctgctctgtacaaggccaaggcccatgacccagatgtggtgtccctggaggcagcagacagacccaacttcttccttcacgtcacagccaacgggtctctggagctggctaagtggcagggccgtgacaccttccaacagcatgcctccttcttgctgcaccgggggacacggcaggcaggcctggtggccctggagtccctggccaagcccagctccttcctctatgtgtcgggcccggtgctggccctgcggctgtacgaacacacagaggtgttccgccggggcacactcttccgccttctggatgccaagccctcgggggctgcctaccccatctgcgagtggcgctacgatgcctgtgccagcccctgcttccaaacctgccgggacccacgggcagccagctgccgggacgtacccagggtagaaggctgtgtccctgtgtgccccaccccccaggtcctggatgaagtcacacagagatgtgtctacttggaggactgtgtggagccagcagtttgggttcccacagaggcccttggcaatgagaccctccctcccagtcaagggttgcccactcccagtgatgaggagccacagctgtcacaggaaagccccaggacccccacccacaggccagccctcaccccagctgccccactcaccacagccctgaacccaccagtgacagccactgaggagccagtggtgtctccaggccccacccagaccaccctgcagcagccactggagctcactgcatctcaactccccgccggccccacggagtccccagccagcaagggagtgactgccagcctcctggccatcccccatacaccagagtcctcatccctccctgttgcactgcagacacccacacctggcatggtgtcaggtgccatggagacaacaagggtgactgtgatctttgcaggaagccctaacatcacagtctcctcccggtcgccccctgcccctcgcttcccgctcatgaccaaggctgtgacagtccgaggccatggctccttgcctgttaggacgacacccccacagccctccttgacagcaagtccctcctccagacctgtggcttcccctggagccatctccaggtcccccacctcctcgggatcccacaaggctgtgctgacacctgcagtaactaaggtcataagcaggacaggggtcccccagcccacccaggcccagagtgcttcaagtcccagcacccctctaactgtggctggaacagcagcagaacaggttcctgtcagtccccttgcaaccaggagcttggagatagtgctatccacagagaagggcgaagccgggcacagccagcccatgggctcgcctgcctccccacagccacacccactcccctctgcaccaccccgcccagcccagcataccaccatggccaccaggtctccagctctgcccccagagaccccagctgccgccagcctgtcaacagccactgatgggctggcagccacacccttcatgtcccttgagtcaactcgtccctcccagctcctctctggcctgcctcccgacaccagcctgcccctggccaaggtgggcacatctgccccagtggccacacccggccccaaagcctctgtcatcaccactccactccagccacaggccacgactctgcctgctcagacacttagcccagtactgcctttcactccagcagcaatgacccaggcgcacccacccactcacatagcacccccagcagcaggcacagctccaggcctgctgctgggagccacattgccaacctctggagtcctgcctgtggctgagggcacggcctccatggtatctgttgtcccacgaaagagcaccacagggaaggtggccatcctatccaagcaagtgtctctgcccacttccatgtatggttctgcagagggtgggcccacagagctcacgcctgctacgagccaccctctcacgcccttggtggctgagcccgagggagcccaggcaggcacagctctgccagtgcccacatcctatgccctgagccgtgtctcagccaggacggccccccaagacagcatgctggttctgttgcctcagctggctgaggcccatggaacctcggcagggcctcacctggcagcagagccggtggacgaggccaccacagaaccatctgggcgctcagccccagccctgagcatcgtagagggtttggcggaggctttggcaactaccactgaggccaatacatccaccacctgtgttccaatcgccgagcaggactgcgtccgccacatctgcctggagggccagctgattcgcgtgaatcagtcccagcactgtccccagggtgctgctccccctcgctgtgggatcctgggcctcgccgtgcgggtgggtggggaccgctgctgcccactctgggagtgtgcctgccggtgctcaatcttccctgacctgagcttcgcgaccttcgatgggagccacgtagctctgttcaaggaggccatctacatcctcagccagagcccagatgaaatgctcaccgtccatgtactggactgcaaaagtgccaacctggggcacctgaactggcccccgttctgtctggtgatgttgaacatgactcacttggcccatcaggtcactattgatcgcttcaaccgaaaggtgactgtggacttgcagcctgtgtggccaccggtgagcaggtatggattcagaattgaggacacaggccacatgtacatgatcctgactccctcagacatccagatccagtggctccacagctcaggactcatgatcgtggaggccagcaaaaccagcaaggcccagggccatggcctgtgcggtatctgtgatggagatgcagccaatgaccttaccctgaaggatggctcagtggtgggtggggctgaggaccctgctccctttctggacagctggcaggtgcccagctccctgacctcagtgggccagacccgcttccgcccagacagctgcgccacaactgactgctcgccctgccttcgcatggtgtccaaccgcaccttcagtgcctgccaccgctttgtgcctccggagtcattctgtgagctgtggatccgggacaccaagtacgtgcagcagccctgcgtggccctgactgtgtacgtggccatgtgccacaaatttcatgtgtgcatcgagtggcggcgctctgactactgccccttcctgtgctccagcgactccacataccaggcatgtgtgacagcctgtgagccacccaagacatgccaggatgggatactagggcctctggacccagagcactgccaggtgctgggcgagggctgcgtctgctccgagggcaccatcttacaccggcgccactctgcactctgcatcccggaggccaagtgcgcctgtggtgactgtccagactccatccccgaatgtcaagaaggggaggcgctcactgtgcacaggaataccacggaactctgctgccctctgtaccagtgtgtgtgtgagaacttccgctgtccccaagtgcagtgtggcctgggcactgccctggtggaggtgtggagccccgaccgctgctgcccctacaaatcctgtggataaaagaaggaaaaagcaagtttcccattccaaagagggtttccgtcttaaaaagtccttactgcggccgggcacggtggctcacacctgtaatcccagcactttgagaggccaaggcgggtggatcatgaggtcaggagttcaagaccagcctggccaagacggtgaaaccctgtgtctactg

SEQ ID NO: 1483 - DNA, 3128 bp, Homo sapiens
gtgtgctcgcgcctctcgcccggcctctaagagtcgttggggccagacgctgcttccttgcctcccgcggaggccgccgccgccgccgccgccgctgccgccgccgccgctgccgccgcccgggcggcactgacgccggagtcatgcaggatgaggtcgggggattcggaacggggcgtctccaggttgctggcgtccgtgtcactgtcgctgccctttttgcccccgccgcccccgttgtgcgtcttaatgtgtttgctcaggtggtcgctgcgcatgaagcgcttgttgcacaccggacaggcgaagcgcttctcgcccgtgtgagtccgcagatgccgctgcagctcgtccgagcgcgtgaagcgcttgccgcagaagagccagttgcacacgaagggccgctcgcccgtgtgccagcgcaggtgcgccttcaggtgcgacgtcttcccgtacaccttgccgcagcccggaatgtggcagctgtgcaggcccttgcgccgcaggctcgccccggccgggcccagccgctccgcctcctggcagttggggcagtcgcaggtggcgcggcccgagtagcggcgggcagagcgtgccgagctccccccggcggcggcagccgcggcgcccgatatcatggcgctggcggcggcggctgccacggcggcgctggagtccgaataggagggcaacaccggcttgaagccgtcctgggccagcaggtgctggctggtggagagcaggtgggaggcggcggcggcggaggagccgaggcccgtggagctgaaggcggagtgcgtgagcgagctgaagtcggggttgtaggtgcccagctgcgagtgcagcgaggcctggggggcgcccgagtgcagcgagctctggagccccccagcggggttctgcacttccagccacgagcccgggctgctgtgcacgtcccaccacgacgacgccgcgccgttggtcacctcgccggccgccagcgtcgaatggaagcccgacttgtaccaggactcgtacgggtgcgccatgcccacgcgcgggtacagcccgtcggctgccgtcgtgtgcaccttggaaatgaaggccgactggccacccgcctcctgcggggacaccccggccgctgccgccgcggcagccgccgagttggagaagaggccgccgtagtcgctgctgaaggcggacgacgtgggcgacgtggaggccaggcagaaggcgctgttggcggcgcccgagccgcccgccaggccgcccgagccacggcccccggtggccaccgcgaagcccgagaggctggagccgaggttgcagctggacgaggagcgcttccaggggtgaaagccgcctttggcgaaggcgctcgactctggcagcgtcgtcagcgggctcgtgttgccgatcttgttgcaggtcgccgccagcatggccaacggggtcgttccgaagcgcggctcttcctagagtgggtgggatgggggagggagcaagaaggaggagggcaagaggaagtgggggaagaaacaaagtgcacccgtgagcagcctcgtcccctgcggctgctcccggggggtcctggctccccgcctcgcgcctcctccccacgcgcccgcggaggagtcgccgcaccgggcgcggagcaggggcgatcacccgggcgaaggtccaggcgccggaaagttgcacttcgctgaggctataaatcaaagatgcctccgtgttccccgctgcaaccctgcctacaaccggacttgggttgtcgccgtaaaccggctcatctcccagaagaccccaagtcgcccttcggggtgaagcgcgaaggtaaacacagagaccagagacaacaaacaccgggtgagggcggaggcggccgaaacagcagccagggacgggcgaaacttgcagctctcccagggtggctacgacttgacttttcttttttaatagaaaacgtttggttttaaagtttacatacacacaaaaacagcgattatgaaaacaataatccgaggataagcggccagagacagatttcaaagtcatgggcgaattggggagccgcggaaatgtaaatgtttattagcgtgactagatggactgcaaaacgattaagactgttttctggaaacaccattgtcgcataattgcaacaaaatccccaaagcaaggcgggggatggggtataaatcacgaggggaagaaaagaaacctctagcttttttttgaaaccaaatgaaaaaggacttgattaagaaggccttttcttgcaaaggcatctttctgggttccaaaaacttggggaaaaatcagtcccagaaatgtggaaagtgctaatagaagctgaagctgcagtctagcagcaacagtttctccggagccgcagaccccagaagccataacgaaaaattactccggttaaaacaagcaaatgcgttgccgcgcttgcgacttaccccgagtatagacgtggccatagcaggtctctggctgcgcagcgaggctgggagcggggctgagcctggcggctgctcggaaaaactgcttgggtcccgcgcggctcccgcgtccccgcgctcgtgccgagcggactccaggctcccgccggctaaactcagcctaagtgcgaggagcacccgctttgaagtgccgctggctgcgcctctcgcccaatgagggcgcaggcagagcagaccggagctgccccgcagccaatcagacgctccgaggggcccgagcccgggctcccggcgcgtgccagtcaagtcagctagctagggccgcgggggtgggggggagtagtgggggatacttgcggtgggggacgagggcgggctggggactgaagaaattacagtgcaattaaaaatttacactcacgcaccaagccaggtttaagtaccaatgaaaccgagccacaagcacccccccacacacaaaccaccccgagatgttgcaagttagggctgacagtcctactcgactccccacttgtaggaaaggaggcaggaggggaggagacacccagacacagcccgcaccagcagggcccaagtggagacggaaatgtgagccctcactttgtgtgtccaggcttttgcctacagaacacaacttcagcttgtatctat

SEQ ID NO: 1484 - DNA, 4028 bp, Homo sapiens
ctcgccgtggcctcctcgggccaggctcccgccttggggcggtccccgcaggcccagctcctgcctcacggcgctccggaggccaagctcatgcgtcagggcggcctctcccggcctggcgtttgctcctttgcatgggctccaaatcctgcacttcctccagtcgttctctccaggcccagctcttcctcccagcagcctctgcaggaccagactgtcgtcaagtaggcctgtccagggacagctcctgcctcccggcagactctgcaggcccaagtcgtcctcaagtcagcctccccaggcccagctccggcctctcggcggcctctccaggtgcaaaagttcctcgagtccgtctccaggtccagctcctcctgtctcccagtggcctctttcagcccagcccagctcatgcctcccggcggccttcccaggccccgcttctgactttccgcggcctctgcaggccccgaatttgacctccagtcggcctctgcaggcctggcctcctgcctcccgaaagcttgcacaggctcagcctctgcctcacagtggactctccacgcccagctcgctctcgcctgcagcctcccgagtccaaagctccggcctctccgccgcttcggcaggcccagctcccgcctgccagtggcctcctcaggcccatggggctcattcctcacaacggcctttcccggcccagtttttcccttccggcggcctctctgggcccagaagctcctcaagtcggcctctccagacccacttgcagcctcccggcgtcctctccgggcccagctcttcctcccggctgcgtctgcaggcccggctcctgcctcccaacaacctctttggactcagtgcctgcccagctcgtggtggccttggtcggcccacagcttcctcaagccaagctccccaggcccagctcaggcctcacggtggcctctccaggctcagctcctgccctccgacggcgtctccaggccccaaacggcctccggtcggtgggcttctccaggcccagcttgggcctcccggcggcctctgcaggcccaagtggtcctgaaggcagcctctccaggcccagctccggcctcccagcaagcaagctcttttggctcagctcctgcccagctgccgccggcttttgtagaccctgaactttctccagcgaagctcctcagtcccacctcctgcctcccggtggcctgtacaggcccaggtctggctggagaacagcctctgcaggccccgctcttgcctcccaggggcgtctccaggcccagctctcgcctcacggcggcctcccgggaccaagtccctgcctgcctcccagcagcctgtgtgcggcccagctcctccgtcacggtggcctgttgaggcccaactcatgcctctggcaccctttccagaggcgtgagcccctgcctcacactggcctctctcacgctgagggaggtcagcgtgagcccctgcctcacactggcctctctcacgctgagggaggtcagcgtgaggccctgcctcacactggcatctgtcacgctgcgggaggtcagcgtgggcccctgcctcacactggcctctctcacgctgagggaggtcagcgtgaggccctgcctcacactggcctctctcacgctgagggaggtcagcgtgaggccctgcctcacactggcctctctcacgctgagggaggtcagcgtgaggccctgcctcacactggcctctctcacgctgagagaagtcctccctcacgctggcctgttggggcccagttcatgcctctgttggcttctccaggcccagcccctgcctgttggcggcctctagaggcccagcctcttcctcaacagtgggccctccacgcccacctcttgcctcgccgtggcctcctcgggccaggctcccgccttggggcggcccccgcaggcccagctcctgcctcacggccctccggaggccaagctcatgcgtcagggcggcctctcccggcctggcgtttgctcctttgcatgggctccaggtcctgtacttcctccagtcgttctctccaggcccagctcttcctcccagcagcctctgcaggaccagactgtcgtcaagtaggcctgtccagggacagctcctgcctcccggcagcctctgtaggcccagactgtcatcaagtaggcctgtccaaggacagctcctgcctcccggtgacctctgtaggcccaagtcgtcctcaagtcggcctccccaggcccagctccggcctctcggcggcctctccaagtgcaaaagttcctcgagtcagtctctccaggcccaggtcctcctgtctcccagtggcctctttcggcccagcccagttcatgcctcctggtggccttcccaggccccacttttgactttccgcagcctctgcagattccgaacttgacctccagtcggcctctccaggcccggccccctgcctcccgaaggcctgcacagggccagtctctgcctcacagtgggctctccacccccagctagctctcgcctcactgcagcctcccgagtccaaatctcctgcctcttggccgcttcggcaggcccagctcccacctgccagtggcctcttcaggcccatggggctcattcctcacaacggcttttccaggcccattttttcccgtccgactgcctctcaggacccagaacctctgggcccacttgaggagatgcagccaggaggaacagctgggcttgcagaggctgccatgagggaggcagaggctgggcctcctgaagtcggcctctccagacccacttgcagcctcccggcatcctctccgggctcagctcttcctcccggctgcgtctccaggcccgactccggcctcccaacaacctctttggactcagctcccgcccaactcccggtggccctggttggcccacaacttcctgaagccaagctccccaggcccagctcaggcctcacggtggcctctctaggctcagctcctgccctccgacggtgtctccaggccccgaacggcctccagtcggtggattcctctatgcccagcttgggcctcccggcggcctctgctggcccaaatcgtcctgaagtcgccctctccaggcccagctccggcctcccggcggcctctccaggcgcaacgcatcgtcaacgagggcccctccggggccagctcctgcctctcgtcatcctctagagacccagcctctgcctcccgcatggcggcctctgcaggcccagactgcctttgagtcaggctctccagggccagctccagcctcccggcagactctgcaggcccaagtcgtcctcaagtcggcctggaagtgggcctggaagagctgcacgttggcctccccgggcccagctccgtcctctcggcggcctctccaggtgcaaaacttcctcgagtcagcctctccaggtccagctcctcctgcctcccagtggcctctttcagtccagcccagctcgtggctgtaggcagccttcccaggccctgcttttgacttttggcggcctcttcaggcccagaacttgatctccagtcagcttttgcaggcctggcatcctgcctcccgaaggcctctttcagcccagcccagctcgtggctgtaggcagccttcccaggccctgcttttgacttttggtggcctcttcaggcccagaacttgatctccagtcagcttttgcaggcccggcatcctgcctcccgaaggcctgcacgggcccggcctcggaatcacagcagactctccacgcccagctagctctcacctcactgtggcctccccagtccaaagctcctgcctttcggccgcttcagcaggcccagctcccgcctgccagtggcctctttaggcccagctcattcctcacaatggcctttccaggccccatttttcccttccggcagcctcttggcctctaattttttttatcttttgtgtataaatcccaaaatatggaattttggaatatttccaccattatataaatattttggtaggt

SEQ ID NO: 1485 - DNA, 3260 bp, Homo sapiens
accactgagagtacagaaaacacctgtgagagaggctggcatccagggcgggaaacctcttttgagggcgtgaaccaggatgtgaagcagcatttgaattcttgctgctctcttctggagcagtgggatattgggcagttcacttaacctctctgagctccttcctcaagcctttttttcctgactacagcgagcaacagctgtttgagatggtggagcacattcttgctggtgaaaggaagcaaggtcaacagagactcatagaggaaacattcaacaacttgaacagtaagcaagttgcagtttccgtctcagtggactgaggtgatacagcagattttgctgtggaccaagatccagttttcctcataacactcacagctttggacccctgcacctgctgctatgctacactggaggaaacagagctccgcaagaccctcagcaactgcttcccaagtacataagaggaaaacaaaacaaaacaaaccaccaacacacacacatgtttacacagacacatacatgtgtgggataagaggcagagctagagtccattttccaggtcagacttgggactccaagcctgactttggagtgattcaaatcaccttccacctattttgctgcttgttcagttcagtacacgttaagaatggcccccaaccaacagggaactggtttggttatcttcctttgcctttcaaactcacccaagcaaagataaaagtattaaatgactaatccagatccccagcaccacatcaagctcctcagggttcctcttcaaagcactgggcactttgaaagataactgtaaaggtcacatttgtaatataagcaagaacttcttaaacagacatgtaagtaactgcacatagacgtgacatgtcataactcgagaaatcttttaaagtaaagtttacgccaaattaacttccaacagctccgactctccagaccattcttggtactcttaatgacagactgtgcagcccaaagcctgcagctgcagtgtcaggacaaattagcctaaagtggaacaaaagtcaatgtgaagaaatgtggtatccggcaaggtctgacttttgaaattctgagattgatgacattttaaaggtgtaggtacaacagaatgtgttttccatatttgtaagcaattctaggttcctgagcactgagagaaaagcaaagttaatttctcaccgtaggagaaggccttattatttttgtgcacatacacgactgtcctgtgatcaagaaaaggcatcttttaaaagaatcgttttgaaatgtttatctcttatttgaaatccaagaaagagtagacattcatttccaaacaggaccataaatcatataacgctgggagaaaggtcaacaccaccagcacagcacagttttctcacgtatgcttaaggattttcagaatctccaaataatagcatgatgtaaactttgaataaaaaagaacaccatcaagactccactgaacaaagaacgtctgactggaaatgcttacggcacccttcacatggttgggcaactttcctctactgttccaccccttctgcctgtgcagctgccagagttaacttatctttatcagaatcacaaaggaacactctcctgcttatttacaaggctaaaatgacatctggtggcgctcttctctgagaactcagtcactgttcctggaaaatgatgcaaaagcacaaacttttgcagggcaactgtaggagtattcttgtgcgtgtgtgttaagtactaactgctgatgttgctcaaatgttccgctagtccctgtagcctcacaatgttttattcattgtcctgtgatcaattcaaaaagccatcttttataagaatggttttgaagtgtttatcttttatttgaacatccaagaaagagtagacattgacttccacaggggaccatacctcctataatgcctgaaggtgcttaaaatatagtgaactgtgttaaagttaataggatacatcattagtgtgttaaaaaatgtaaaatggtgacatactatcagctcacctgggtaaggaaaatatggctaaagtacctctaaaggtatctacttattaagtatactgaccaaactttagacattttacttcgaccacagaaagtattatttgaaaaaaaaatcttcattacaaaattacatatttaattaggaagtaaaacctaaatctgtatttactagcaatgccaactttaaatattctagttgcagctgacaacagaaattctaacatgcatatgttgttgcataatagcctctttttcctagttgggtatgtttgtagagacagaaaggtcccctgaccaattgtgcaatagagccccaagatacttaagcctggaactactctctcagacttaacaaaatgttcatcttaatttctatcagattgggacaaaacattcactctttagataatagaggagagactaaagaacatgtcataatagtcaaatttgtgccaatgttaaatctatccctttaaaaacatgtattattgtgaggccgcagggattagtgcaacatttgaacagaatcagcagttagtacttaacacacatgcacaagaatactcctacagttgccctgcaaccaagaagctaataaaagagccaggcttttcaaatgaacacctcgatgatgacaccattagttattcagcaaaaataaatgcttcattaacttgtcttcccactgttaaaggataggatgaatttacctcaaggcagcaactcagatattaacgttcccttacattttagagctcactatgcagaaataccagaaataaggtgacttaaaactcaatttgtctgtaaaatacactggcctttggaatccagaaacccacttggtcctgactgccaattacttgaccttccttttgttacttgacctctctggatcttgactaaactcatttgtgagacaagaggagatgtccaaagttttttcatctcaaatatgttacgatttagattcaacaattatttttccaattcctaccacacaccccgaatactgaggtcacgctgaggtattatttgcctaagactctcgtaaatgactcaataagggatcaactccattagtgcagtggccagcattgagtgatcagcaaaaatatctcattgagtatttctatgatgtcacggctgtgccttttaacataatgtaacttgaatgtatgcctcttatctattaaaaaaattacaaatt

SEQ ID NO: 1486 - DNA, 3552 bp, Homo sapiens
cacatgcaggccatcatccagggcttctcttacgacctcctgaagaagatagactccccgcagcggcttgtctacagcccgtcctggtgtgggggcctcgtgcagggaaaccctaatggctctcctaaccgactgcttaaagctggagtcatttctgctcaaaatatctacagctttggttttgggaagttttatcttactggggcgacacagatggcctatctaggatctcttccggtcattggagaaaaggaagtgattcaagctgatgatgagcccaccttctctttcttcagcggcccctacatggtcatgaccaacctagtgtggaatgggagcagggtcacagtgaaagagctgaatctccccacccacccacactgcagcaggctgcggctggccgacttgttaattgccgagcaggaacacagcagcaagctgcggcacccctacttgctacagttgatggctgtgtgtctctcccaggacctagagaaaacccgccttgtgtacgagcgcatcactatcggcacattgttcagtgtccttcatgaacgacggtcccagttcccagtgctgcacatggaggtgattgtgcacctgctgctccagatatctgatgccctgagatacctgcatttccaggggtttatccaccgctccctcagctcctatgctgtccatatcatctccccaggtgaagcgaggctgaccaacctggagtacatgttggaaagcgaggacagaggtgtacagagggacctgactcgagtgccccttcctacgcagctatacaactgggccgcaccagaagtgatcttacagaaggcagccacagtgaaatcagacatctacagcttttctatgatcatgcaggagattttaacagatgacataccctggaagggcttagatggctcagttgttaaaaaagccgtagtctcggggaattatttagaagctgatgtcaggcttccgaaaccttactatgatattgttaagtcaggcatccacgtcaagcagaaagaccgaactatgaaccttcaagatatccggtatattctgaagaatgacttaaaggattttactggagcccagagaactcaaccaaccgagagccccagagtgcagagatacggactccatcccgatgtcaatgtctatctaggactgacttcagaacaccccagagagacacctgacatggaaatcatagaactaaaggaaatgggcagtcaacctcattcaccaagggttcactctttattcactgaggggacactagatcctcaggccccagatccatgtctgatggccagggagactcagaatcaagatgctccttgccctgctccatttatggcagaagaggccagcagccccagcacaggtcagccaagcctctgcaatttcgaaatcaacgagatctactcaggctgcttgattttggaagatgacatagaagagcctccaggagctgcttcatctttggaggcagacggacctaaccaggtagatgaactgaaatccatggaagaagagctggataagatggagagagaggcgtgttgttttggcagtgaggatgagagctcttcaaaagctgagacagagtactcttttgatgactgggactggcaaaacggttcactcagttcactcagccttcctgagtcaaccagagaagccaagagcaatttgaacaacatgtccacgactgaggagtatctcatcagtaagtgtgtgctggatctaaagattatgcagacaataatgcacgagaatgatgataggctgaggaatatcgagcagatattagatgaagtcgagatgaaacagaaggaacaggaagagcgcatgtctttatgggccacttcaagagagtttacaaatgcctacaagttacctctggccgtgggccctccatctttaaactatattcctcctgtcctacagctttcagggggtcagaagccagacaccagtggcaactacccaaccctaccaagatttccaagaatgctgccgactctttgtgaccctggaaaacagaacacagatgaacaatttcagtgcactcaaggagccaaggacagtttggaaacaagcaggatccaaaataccagtagccagggaagacctagagagtccactgcccaagccaaagccacacagtttaatagtgcactcttcactctgtcaagccaccggcagggaccttctgcatcacccagctgtcactgggactctaccaggatgagtgtggaacctgtttcttctgaaatctataatgcagagtccagaaataaagatgatggaaaggtacacttaaaatggaaaatggaggtgaaagaaatggcaaagaaagcagctactggacagctcacagtacctccttggcatcctcagagtagtctgactttagagagcgaggctgaaaatgagcccgacgccctgctgcagccccccattaggagcccagaaaacacggattggcagcgagttattgagtatcatagggaaaatgatgagcccagaggaaatggcaagtttgacaagacgggcaacaatgactgtgacagtgaccagcatggcagacagcccaggcttggaagcttcaccagtatcaggcacccatctcccagacaaaaggagcaaccagagcatagtgaagccttccaagcaagttctgacacattggtggctgtagagaaatcttacagtacctcgagtcccatagaagaggactttgaaggaatacaaggtgcatttgcccaacctcaagtctctggtgaggaaaagttccaaatgagaaaaattcttggaaagaatgctgagattttgcccaggtctcaatttcaacctgtacgaagtactgaagatgaacaagaagagacatcaaaggagtcaccaaaggaactgaaagagaaagacatatcattgacggatattcaagacctgtctagtatctcctatgaaccagacagctcttttaaggaagcttcatgcaaaacacccaaaataaaccatgcacctaccagtgtcagcactccactcagcccagggtccgtttcttcagctgccagtcagtataaagactgccttgaaagtatcacatttcaggttaagacagagtttgcctcttgctggaacagtcaagaatttattcaaactttgtctgatgactttataagtgtccgagagagagcaaagaaactggattctctccttacttcctctgaaactcccccttcaagactgactggtcttaaaagattgtcttcatttattggggctggatcccccagccttgttaaggcatgtgactcatcaccaccccatgccacccagagaaggagcctgcctaaagtagaagccttctcacagcatcacattgatgagctgccaccaccatctcaggagctacttgatgacattgagctcttgaaacagcagcagggctcatccacggtgttgcatgagaacacagcaagtgatggaggaggcactgcaaatgatcaaaggcacttagaagaacaagaaactgacagt

SEQ ID NO: 1487 - DNA, 4023 bp, Homo sapiens
aaagaactgtggaactatgtaaaagaccaaacctatgactgattggactacctgaaagagacaaggagaatggagccacgttgggaaaacacacttcaagatatcatccagaagaacttccccaacctagcaagacaggccaacattcaaattcaggaaatccagagaaccccagtaagatactccacaagaagatcaaccctcaagacacatagtcatcagactctccaagatcaaaatgaaggaaaaaatgttaaaggcagacagagacaaagggcaggtcacctacaacgggaagcccatctgactaagagtgggcctctcagcagaaaccccacaagccaggagacagttgggtccaatggtcaacattcttagagaaaagaatttctaacctagaatttcatatctggccaaactaaccttcataagtgaaggagaaatccttttcagacaagcaaatgctgagggaatttatcaccaccaggcctgccttgcaagacctcctgaaggaagtgctaaagatggaaaggaaaaactggtaccagccactgcaaaaatgtactgaagtacaaagaccaatgacactatgaagaaactgcatcaactagtgagcaaaataaccagcaagcatcatggtgacaggatcaaattcacacataaccatattaaccttaagtgtcaatgggctaaatgtaccaattaaaagacacagaccagcaaattggatataaagagtcaagattcaggtgtgctgtactcagggttcctatctcatgtgcaaagacacacataggctcaaagcgatggaggaaaatttaccaagcaaatggaaagcagaaaaaagcaggggttgcaatcttagtttctgacaaaacagactttgaatcaacaaagataaaaaaagacaaagaagaacatcacaatgataaaggaatcaattcaacaagaagagctaactatcctaaatatgtatgcacccaatacaggagaacccagattcacaaaacaagttcttagagacctacaaagagactcaggctaccacacaacaatagtgggagacattaacaccccattgtcaatattggatcatctaggcagaaaattgacaagaaaggacttgaacacagctctggatcaagtgaatctcatagatatctacagaactctccaacacgaaacaacagactatatattattcttagtggcatatgacactctaaaattgatcacaaaattagaattaaaacactcctcagcaaatgcaaaataactgaaatcataacaatctctcagaccacagtgcaatcaaattagaactcaagattaagaaactcactcaaaaccacacaactacatggatattgaacaacgtgctcctgagtgacttctgggtaaataataaaattaaggcagaaatcaagaagctctttgaaaccaatgagaacaaagagacaatgtaccagaatctctgggaggcaactaaagcagtgttaagaggtaaatttatagcactaaatgcccacatcataaagctagacatatctcaaattgacaccctaacatcacaactaaaagaactagagaagcaagagcaaacaaatccaaaagttagcagaagagaaaaaaaaaatgactaagatcaaagtggaactgaaggagacagagacatgaaaaacccttcaaaaaaaaaaagaaagaaataaaacatgttcaaatagcaagagataaaatcaaattgtctgtgtttgcagaaaatgtgattctatatctagaaaaccacatcgtcacagcccaaaaactccttaagctgataagcaagttcagcaaagtctgaagatacaaaatcaatgtgcaaaaatcacaagcattcttatacaccagcaatagacaatattcttcaattcctatacaccaacaataggcaagagagccaaatcatgaatgaactcccattcacaattgttacaaagagaataaaatacctaggaatacagctaacgatggatgtgaagaacctcttcaaggagaactacaagccactgctcaaggaaataagagaggacacaaacaaatggaaaaatattccatgctcatgggtgggaagaatcaatctcatgaaaatggccatactgcccaaggtaatttatagattcagtgctattcacatcaaactaccattgacattcttcacataattaaaaaaaaactactttaagtttcatatgcaaccaaaaaagagactgaatagtcgagacaatcctaagccaaaagaacaaagctggaggcatcatgctatatgacttcaaactatactacaaggccacactaatcaaaacagcatggtactgttaccaaagcagacacacagaccaatggagcagaatagagatctcagaaataagaccacacatctacaaccatctgatctttgacaaacctgacaaaaacaagcaatgggggaaggaatacctatttatttatttatttatttattttgagacaaagtctcactctgtcaccaggctggagtgcagcggcatgatctcagctcactgcaacctctgcctcccggattcaagtgattctcctgcctcagcctcctgagtagctgggactacaggttcgagccaccacgcccagctagtttttgtatttttagaagagacggggtttcaccatgttggccaggatggtcttgatctcttgacctcaagatccacctgcatcagcctcccaaagtgctgagattatagacatgagccactgcacttggccaggattccctatttaaatggtgctgggaaaactgactagccatatgcagaaaactgaaactggacctcatccttacatcttatgcaaaaattaactcaagatggattaaaaacttaaatgtgaaaccccgaactgtaaaaaaccctagaagaaaatctaggaagttccattcaggacataggcatgagcaaagattttatgatgaaatcatcaatagcaattgcaacaaaagcaaaaattgataaatgggatctaattaaacgtaagcacttctgcacagggaaagaaactatcatcagagtgaacaagcaacctacagaatgggagaatatttttgcaatctaccaatctgacaaaggtctaatatccagaatctacaaggaacttaaacaaatttacaagaaaataacaaccccatcaaaacatgggcaaaggccacgaacagacattctgaaaagaagacatttatgcgtccacaaacatatgaaaaaaaaagctcaacactagtgtttattagagaaatgcaaatcaaaaccacaatgagataccatctcatgccagtcagaatggcaattattaaaaagtcaagaaacaacagatgctagagaggctgtggagaaacaggaacacttttacactgttggtgggaatgtaaactagttcaaccattgtggaagacagtgtggcaattcctggaggatctagaagcagaaataccatttgacccagcaatcccattactaggtttatatccaaagaaatataaatcattctgttttaaagatacatgcacacttatgtttattgcagcactattcacaatagcaaagacatggaatcagcccaaatgtccatcaatgatagactggataaagaaaatgtgatacatatacaccatggaatactatgcagccataaaaaggaatgagatcatgtcttttgcagggacatggatgaagctggaagccataaacttcagctaattaacacaggaacaggaaaccaaacaccacatgttctcataagtgggaaccgaacaatgagaacacatggacacagggaggggcagaacacacaccggagcctgttgggaaggtagggggaaggagagcatcacgataaatagctaatgcacgtggggcttaatacctaggtgataggttgataggtgcagcaaaccaccatggcacatgtttaactatgtaacaaacctgcacatcctgtacatgtatcctggaactt

SEQ ID NO: 1488 - DNA, 3325 bp, Homo sapiens
acttggtcaaaaattgattgaccatattggagcaggtctatttctggaggctctattctgtttcatttatttatatgtctatattttcactaggttagatattgtagcattagagtaaatcttgtaattgggtagaatgactaccccaattttatttttcttttccaaaattgttttggctattctaatccttgtgcctttccacataaaatttagaatcagcttgtctatatctacaaaaagaccttctgacactttgcttgaaatagttttaaaacaattgacaagtttgagaggaattgacatcttcactatactgggtctttcaatacatgaacgtatatgtcttctaattatatgggtcttctttaattttttcatcagtattttgcatttctcagcatgtagattttatacatattttgtgagatttatagctaagtttttgggaggagctattgcaaatagcattgaatttttaatgttgaattccaattattattaatgctagtagaaatatgattgatgtttatgggttttccttgtactctatgatcctatttgaccaccatattcattcaaggaactggattttttcttgtagatatttaaagatttttcatgtagataatcatgccttctgcaaatagagatacttttatttctttattttcaatatgtgggacttttttgttttaattctggctttgttacactggctaagacttccattcctattttaaatagtagtggtgggaatatgcatccttgtcttgcttccagttttagtgaggaaagcttttagcccttcattttatgtgagctttgttgctagcacacttttcgctgttagaagcaagagttgatgtaagatttttaagtaataaccaggatttgtatttcttccacaagttgtctttaaatggtttgttgactgaaacaatgagaaatggcattgtccaatcattccaccaaaaatagcaaccaagctcaaacatgtgccagtaaaaacaacgatgccaccactgctacctggcctacaacaattgtacaccatggatttcaagatgcattcagattctagaaatgttaagaggtgaaaatgtgcatcttggaactgatagcatgtaatatgtttcttataataaggttttaaaaaataactccatttcaaagatcagatggttgtagatgtgtggtgttatttctgaggcccgtcttctcttccattggtctatacatctgttttggtgccagtaccatgctgttttggttactgtagccttgtagtatagtttgaagtcaggtagtgtgatgcctccaactttgttctttttgcttaggattgtcttggctatgtaggctcctttttggttccatatgaaatttaatgtagttttttctaattctgtgaagaaagtcaatggtagcttgatggaaatagcattaaatctataaattactttgggcagcgtggccattttcatgatattgattcttcctatccatgagtatggaatgttttcccatttgtttgtgtcctctcttatttccttgagcaatggtttctagtttttcttgaagaggtcctttacatcccttctaagttgtattcctaggtattttattctctttgtaacaattgtgaatgagaatttgctcatgatttggctctctgtttgtctattattggtgtataggaatgcttgtgatttttgcacattgattttgtatcctgagactttgctgaagttgcttatcagcttaaggagattttgggctgagacaatgcggttttctaaatatacaatcatgtcatctgcagacagagataatttgacttactctcttcctatttgaataacacttatttctttctcttgcctgattgccctagccagaacttccaatactatgttgaataggagtgttgagagagggcattcttgtcttgtgccggttttcaaagggaatgcttccagcttttgcccatttagtacgatattggctgagggtttgtcataaatagctcttattattttgagttatgtttcatcaatctgaccggaaaagcaatggggaggggattccctatttgatgaatgctgttgggaagactggctatccatgtgcggatagctgaaactggaccctttccttacaccttatacagaaattgacttaagatgaattaaagatgtaaacgttaagacctaggaccataaaaaccctggaggaaaacctaggcagtaccattcgggacataggcatgggcaaggacttcaggaggaaagcaccaaaagcaatggcaacagaggccaaggttgacaaatgggatctggttaagctgaggagcttcagcacagcaagggaggctaccgttagagtgaacgggcaacctacagaatgtaagaaagcttttgccatctatccatctgacaaagggctgatattcagaatctacaaaaaacctaaacaaatttacaagaaaaaaataaacaaccccatcaaaaagtgggcaaaggatatgaacagactcttcttagaagaagacatttatgcagccaacaaacatatgaaaaaaaagctcatcatcactggtcattagagaaatgcaaatcaaaaccacgatgagataccatctcacagcaattagaatggcaatcattaaaaagtcaggaaacagcagatgctggagaggatgtggagaaacaggaatgcttttacactgttggtaggagtataaattagttcaaccattgtggaagacagtgtggtgattcttcaaggatctagaactagaaataccatttgacctagcaatcccattactggatatataaccaaaggatgataaatcattctgctataaagacacatgcacacatatgtttattgcagcactattcacaatagcaaagacttggaaccaacccaaatatccatcaatgatagactggataaagaaaatgtggcttatatataccagggaatactatgcagccataaaaaaaggatgagttcatgtcctttgcaaggacatggatgaaactggaaaccatcattctcagcaaactaacacagaaacagaaaaccaaacaccacatgttctcactcataagtgggatttgaacagtgagaacacatggacacagggaggggaatatcacacactggggcctgtcaggggtgccaggggagggacagcattaggagaaatgtagatgacggtttgatgggtgcagcaaaccaccatggcacaggtgtacctatgtaacaaacctgcatgttctgcacatgtatcccagaaatggaagtataattt

SEQ ID NO: 1489 - DNA, 3500 bp, Homo sapiens
aagaggggcgggactggtgcggccgagtgacagttgaccggttttaaccaagtgactggttctagccacgttatgtgcggcccagccatgttccctgccggtcctccgtggcccagagtccgagtcgtgcaggtgctgtgggccctgctggcagtgctcctggcgtcgtggaggctgtgggcgatcaaggatttccaggaatgcacctggcaggttgtcctgaacgagtttaagagggtaggcgagagtggtgtgagcgacagcttctttgagcaagagcccgtggacacagtgagcagcttgtttcacatgctggtggactcacccatcgacccgagcgagaaatacctgggcttcccttactacctgaagatcaactactcctgcgaggaaaagtccccagtcaacttctaccgctggaagatagagcagctgcagatccagatggaggctgcccccttccgcagcaaagagccatgcatggcagaagaagtgtgtagcatgagctggtacacgcccatgcccatcaagaaaggcagtgtggtcatgcgtgtggacatcagcagcaatggcctggggaccttcattccagataaaaggttccagatgaatatcaacggcttcctgaagagagaccgggacaataacatccaattcactgtgggagaggagctcttcaacctgatgccccagtactttgtgggtgtctcatcgaggcccttgtggcacactgtggaccagtcacctgtgcttatcctgggaggcattcccaatgagaagtacgtcctgatgactgacaccagcttcaaggacttctctctcgtggaggcacctataccacactctatgagagaaaccgcggcagtggcagttggattcgtgtcctggccagcgagtgcatcaagaagctgtgccctgtgtatttccatagcaatggctctgagtacataatggccctcaccacgggcaagcatgagggttatgtacacttcgggaccatcagagatggccaggtgtcctttgagatgctgcccaggcagtggtctgtgtgcgagcagataggagttaccacctgctccataatttggtctgaatacatcgcgggtgagtatactctactgctgctggtggagagtggatatggtaatgcaagtaaacgtttccaggtggtcagctacaacacagctagtgatgacctggaacttctctaccacatcccagaattcatccctgaagctcgaggattggagttcctgatgatcctagggacagagtcctacaccagcactgcaatggcccccaagggcatcttctgtaacccgtacaacaatctgatcttcatctggggcaacttcctcctgcagagctctaacaaggaaaacttcatctacctggcagacttccccaaggaactgtccatcaaatacatggccagatcgttccgtggggctgtggctattgtcacagagacggaggagatctggtacctcctggagggcagctaccgggtctaccagctgttcccttccaagggctggcaggtgcacatcagcttaaagctgatgcaacagtcctctctctacgcatccaatgagaccatgctgaccctcttctacgaagacagcaaactgtaccagctggtgtaccttatgaacaaccagaagggccagctggtcaagaggctcgtgcccgtggagcagcttctgatgtatcaacagcacaccagccactatgacttggagcggaaagggggctacttgatgctctccttcatcgacttctgccccttctcggtgatgcgcctgcggagcctgcccagtccgcagagatacacgcgccaggagcgctaccgggcgcggccgccgcgcgtcctggagcgctcgggcttccacaacgagaactcgctcgccatctaccagggcctggtctactacctgctgtggctgcactccgtgtacgacaagccgtacgcggacccggtgcacgaccccacctggcgctggtgggcgaacaacaaacaagaccaggattactacttcttcttggcgagcaattggcgaagcgcgggcggcgtgtccatagaaatggacagctacgaaaagatctacaacctcgagtccgcgtacgagctgccggagcgcattttcctggacaagggcactgagtacagcttcgccatcttcctgtcggcgcagggccactcgttccggacgcagtcagaactcggcaccgccttccagctgcatagccaggtggacgtgggcgtggtgctggccgaccccggctgcatcgaggcctcggtgaagcaggaggtcctgattaatcgcaactcggtgctattttcgattacgctcaaggataaaaagctttgctatgaccaaggcattagtggacatcaccttatggagacttccatgacggtcaatgtggtgggttcatccgggctctgcttccaggaaacacacctggggccccatatgcaaggcaacctgatggtgccagtgttcattggctgccccccaggcaagcgcctggccttcgacatcacctacacgctggaatacagccgcctgaagaacaaacactactttgactgcgttaacgtgaacccggagatgccctgctttctcttccgggacattttctaccccttcttcttgattcaagatttggtgacaggagactccggcagtttccggggcagctatgttctgctggtggtgggtggcgggcccacactggacagcctcaaggactacagtgaggacgaaatctaccgcttcaacagccccctggacaagaccaacagccttatctggaccacgaggaccacaaggaccaccaaagactcagcctttcacatcatgtcccacgagagcccaggcatcgagtggctctgtctggagaatgccccatgctatgacaatgttccccaaggcatctttgcccctgaattcttcttcaaggtgttggtgagcaatagaggagtggacacgagcacctactgcaactaccagctcaccttcctgctgcacatccacgggctgccactcagtcccaagcgggcccttttcatcatcatggtgtcagctagcgtgtttgtgggcctggtgatcttctacatcgccttctgcctcctgtggcccctcgtggtgaagggctgcacgatgatccggtggaagataaacaacctcattgcctcagaatcctactacacctacgcctccatttccggaatctcgagcatgccgtctctgagacattccaggatgggctccatgttcagctccaggatgacagaggacagggctgaacccaaggaagccgtggagagacagttgatgacctgagtgtcccacctgccccagcccccagttactgtcacgcctctcttatgaggcccatcttgaagatgcaacctgtcacccagcccaggcctctctttctgttttgcttgatgtttacttctcgttcagactcaaataaagccttttttcagg

SEQ ID NO: 1490 - DNA, 4221 bp, Homo sapiens
agtgtgaaggttaaggaaggcttcctggaggagatgacatttaaactgaaccttaaagtttgccaaatgaacaagaggcagcatgggcatcctaggtacttttgtcatcttttctgccactgcaggtgggctatgagttgggagaagggaccatgtcacattggtattgcacccccaggtccagctttaggagggccccaagaagtggggatgggatggatgaaggagtgcctgaacaaatactgcaggtcaccagcagaatgtgtcacctccagggagagcaaacctggccttggggtcgggagtcctgggttccagccccagctccatccagttctaactccaatttccctgaccatggtgagggaaagagaaagggaaactaccattacttacaggcctactatgtgccaaacacttgtattgacctctttcaaatgttatttcactaatctgcacagcaaccctgcgaagaaggaattgtgatactcatgcttaggtgagttaaggggaattttttaaggtcacagagctcagagagtccagagagattcagaacaggcctgcctgacacggtcctctactttggtcagcctcttggagaggcacttctaagtctgttagtgtctaccacatgggttcttgcaggagaggagggagggtggatcttgccagaccttatggggcattcctgtgtccaccacaaagtcagggactctaggtttaacttctccccaccattccctggactcctgaccagcagcccttccgccctgcagcaagggtcttggcccaggttcagtcttttccacctccccagaagaggtgtctgcccctggccagtcagccccaccattaaagccgtggcactttgatgcagctcagatgcccctttcaccctcgtcccctccgccccggcttcctgtcgccctctctgctgtgatggtgtgtgtgcttgcttctcccagtggaaggtgaactccttaagggagctgtgccatcttggacaagtcacttaaccggcctgtgcctctgtttcctcacctgtagtatggggatgatgacttgaccacctcctagagtggtcaggtttacataaagcacttagaacagtgcctggcacataggaagtgctctctgtgagtcagttaaattgcttttagggttctcatgactcttttccgtgtctccagtgcccagcccagaagctgtgcacagcaggcctgaatattggtggtgtgaattggtggatggcgggtgataggtggagcccctccttttctgcctcctcccccggtgacctgtcctgccccctcctccagctctgcctccccagctctttcctcccacaatacagacacacgggctcaacagtcacaggagatgtcaggcaagggcatggaggggagaagcgtttgtgagagtcatgcagcaggcatcgaagtcctgttggctgccgtgggtggggaggccagtgggggagaggagggggataagggtgaggctggtgtgcagcttggacgatggggggctggtagtgctaaccctgccacagggagtgcaagaggagggcatgcctaaggaggaaaggagccaagtttctttctttttttttttttttggacggcgtttcattcttgtctcccaggctggagtgcaatggcgccatcttggctcactgcaacctccccctcccaggttcaagtgattctgatgcctcatcctcctgagtggctgggattacaggcacctgccaccatgcccagctaatttttgtatttttagtagagatggggtttccccatgttggccaggctagtctcaaactcctgacctcaggtgatttatccacctcagtctctcaaagtgctgagattataggtgtgagccaccttgcctggccttttctttctttctttctttctttctttctttctttctttctttctttctttctttcttttctttctttctttctttctttctttctttctttctttctctttctttctttctttctctccctctctttctttctcctttcttccttctttcccctttccttccttccttcctccctccttccctccctccttctctctctttatttctttctttatttccttctcttttcaaggtggagtcttgctcttgtcacccaggctagagtgcagtggtgtgatcttggctcactgcaacctccacaccctagattcaagcgattctcctgcctcagcttcccgagtagctggggcgtgtgccaccgtgcccggctaattttttgtatttttagtagagatgggggtttcaccatgttgcccaggctggtcttgaactccatacctcaggtgacccacccaccttggcctcctgagtagctgggattacaggcatgagccaccgtgcccggcccaagccaagattcatgttggacctgaactcatgcagcaagcagtccctgagcacatattccgcaccagagttgatgttagctaacaggggcccatggaggaacaactcgggttttgtcctcagggaaatcccctgttggataggggaggcagatggaggcactgaaggtttccagctgtcgcctcaggaggaagtccagggcacccaagggcccagggaaggaggcagtcagcctaaatgaggccaggggcagtgtcaagcctagctttaaggctctgagttttggatggagccctgcgaggtggcaggggtcagagtggaggtgggcatcccaggagaagggcattttgccagcacagaaggggtggaacagcctgggtagttcagagaacaggagacagcttggttggaagctggctggctggtggtgagggtgtgggctggagggtgggcacgctgctgttaatgaggccacaggatctcgtgggaaaggcaacaacaagcagtcacaggggctcggagctggagagtgacacactcagctttgccacatggtgctgatggacatcagacggagacttccagcaatctgttggttttgcaagtctgaagctccgggcagagctgagcctggtatccaatgtgcaatcccagtgcatgggaggccagggggctgccctgcccccctcagcctgggaagtaatgaccctttgctccctcagctcctccagatggagcaggtgcgccggatccccgaggaatactctctggggcggatggcagaaggcctgagccaccacgaccccatcatgaaggtgctgtccattcgaggcctggtcatcctggcccgcaggtctgagaagaccgccaaggtgaaggccctcctgccctccatggtgaagggcctgaagaacatggatgggatgctggtggtggaagcggtccacaacctcaaggctgtcttcaaggggcgggaccagaagctgatggacagtgcggtctatgtggagatgctacagatcctgctgccgcacttcagcgacgcacgagaggacgtgcgctcctcctgcatcaacctgtatgggaaggtggtccagaagcttcgggcaccacgcactcaggccatggaggagcagctggtcagcaccttggtgcccctactgctgaccatgcaggagggcaactccaaggtaagccagaagtgtgtgaagaccctgttatgctgttcttacttcatggcttgggagttgccaaaaagagcttatagccggaagccctgggacaaccaacagcagacagtggccaaaatttgcaagtgccttgtgaacacccaccgagacagcgccttcatattcctcagccagagcctggagtatgccaagaactcacgggcctccctccggaagtgctcagtcatgttcatagggtccctggtcccctgcatggagagcataatgacagaagatcgtctgaatgaagtgaaagctgctctggataacttgagacatgacccagaagcatcagtgtgcatctacgcagcccaggtccaggaccacatcctggccagctgctggcagaactcctggctgccgcacgggaactcatgggtgtgttactcagccaccacccaccgctggagccccagctgtgagaacctgcccacttcccaccagcggcgctcctggatcatgcaggcactgggctcctggaagatgtccttgaagaagtgacgtccctgagccccaaaccctcctcagggtggttgagttccagccatgctccctataaatgtcatgtggcttacctctc

SEQ ID NO: 1491 - DNA, 3020 bp, Homo sapiens
tctgacccaaatctagggctcttgcttgctgcatcctgtttattttcatccaaaaggctacatggcaattgggtgttttatgtttagatttcctccctggcttcagtcacttactgagaacttatgcgccaggccctgtgctgcatcttttacacacatcactgtgcttacccattcaggatgctttaacaaagtaccatccactggatggcttataaacaacacaaatggatttctcacagttctggagactgaaagtcccagatcagagtgccagcatggtgggattctggtgggggccctcctcagagttgcagactgctatcttctcaccatgtcctcacatagaggaaggggcaagagagctctctagggtgctaatcccattcatgaggtttccaccttcatgacctaatcaccttcaaaagttcctacctcctgataggatttcagtttacgaggtttaggggaatacaaacattcagttcgtaacggtcaccttgtttagtcttcagattgtctagaagaggaacccagagatctaagatgaaataattttgcagaggtagctcgcctagtctgaggaggatcatggattggtacccaagtattctgggctgctgtcgcctgagcccttgacactctatcttcttgaggtgaatgtgcttcctgtccttgagaagtgaaaggaaattagcagacaagatccttcaaaatatggtcataaggaactctgttcagtgtcaaggtactgattcaggcagttaactttttgggaggataaaaggaaaagagatggtaatgctttgtggtctagaaagatcttgtgaagaaagtagaatttgaacttgcagaggatactaagagtagcttcaaggtgtggtggaagggatagaaggaggaccaggcactggtgggaaatgctgggcacatttgggggaaatgcattggaatgaagcagaggggttttggtaggtgacaaaaggacaggtaaactggggctgctgaagaggactcagggcatcagtgtgtgtggccttgatatttggcatgtacatgtttactttgtgataccaccaaaatgcagtcttaactagaatggtttcagttggcttgtgactgattttcgtttaattgaaattttagtggaatgaaatcctgtttggcttcttagggtctctcgttccccaagagcttgcctaatagtcttgcttccttttaactccatgagaaataaaagccttattgtttcttatgtattcttatgatgtgattagatcttaagtgtttacatgtatattggtattttagtaaacattccttttgggtgggtgaaggagggaggttatgcatcattgagaaactctgggtttgggattttctaaggaaagaggatggcatagaagtcaggacatctctaggccaggcatggtgggtcatgcctgtaatccctacactttgggaggctgaggcggacagatcacctgaggtcgggagttcaagaccagcatgaccaacatggagaaaccccatctctactaaaaatacaaaattagcctggtgtggtgacgcatgcctgtaatcccagctaactcgggaggctgaggcaggagaattgcttgaaccagggaggcggaggttgtggtgagccaagatcacaccattgcactccagcctgggcaacaagagtgaaactccgtctcaaaaaaaaaaaaaaaaaaaaaaaaaaaagatgtccttgtcaggacatctcagacaagtcagaagttaaggtggggagtgatttgcatcaaagactagatgcagataatactcttgttaggaagcttacagttcttttcaaactttgggtcatagggagcaatcatcagtttccctaaagcttttgggcagggtaataacaagtgaagttcactcattaataatcatggttgactgtgatgagctattctccaccaagatttgaataaatgacttacatatctgctttacataagagcaattattgttatagtttctggagaagaaataaaggatagatcggagactcaactgggagtttggcaaggggctatgaaaattgcgtgtgatctagatggtagaatgggatttttttttttaaaagaagaatgtctttttgtctattattctcatcttacctattttcttttttaatgttgcagtgtgcaaagatccaccttacaaagtagaagaatctgggtatgctggtttcattttgccaattgaagtttattttaaaaacaaggtatgtaatctttacccattaatctttcagtagacgatccaccattagccaaatgatgtttaaaataattttgactcataagcacttctgtcactagatgattttaaaataaaagttaaatttgtcttctaggaattttggctatcattacccttaattatcaaggaagtggctagaagaagataattttaattatatgaagtcagattatgtgaaattcattaagtgttcctttaaagagaggagtgattaccattttggaaaagataaatatgtttgtaaaatagaaaagaagaattatagtttttcagtaaaatgcttcttttctcattttcatgtctgtagaatttttttgaggcttgcaaagaatactctcattttatctttagctggtacccacaccatacatgtatatagttatttcaacttcagatatatggattttactggatttaaaagttttcaggcctggcgcggtggctcacacctgtaatcccagcactttgggaggccgaggcgggcggatcacttgaggtcaggagttcgagaccagcctggccaacatggtgaaacctcgtctctactaaaaatacaaaaattagccgagtatggtggtggatgcctgtaattacagctacataggaggctgaggcaagagaatcacttgaacctgggagacggagatggcagtgagccgagatcgcactactgcattccagcctgggtgacagagtgaggctccattatttttctt

SEQ ID NO: 1492 - DNA, 3067 bp, Homo sapiens
agtgttcctgctgccagaattggatccaacccattgttccagacaagatcagggcaactagtatggaaaacataacctcaagtatctttgatgtaatctccaagggaaaagttgctccaactttttcttactaggaggaagctgaggcacatggagctgaaaaacttgatccaggccaggcaggcatttgcttagagcaggctgtgtgcgagcccagcgtcaagtgattccggcctcctcgagtcagcggtggtgggatgaggctctgccgaggggactggctgtgaaggatgagttcagggtgggatgacggaccgcttctgggaccagtggtatctctggtatctccgcttgctccggctgctggatcgagctttggcttctttaagaggttttggcaagaatgagatcaaactcctgatggaaaagatggccctggggaagccttgctatacagcccaaggtgtattcatctctgtgaggaatagtcttggtgtgccgggagatcaataccaggtggaagcagacagctgcacagagcaggtgaaacagggcccttatcaggggagaaatcaaagatggaggaaaccaaaccagcacacactaaaagcagtttctcactagcaccgagaaacaggccagtgggagcccagacttgagatgagggcgttaagaagggcatcagaacttcacactgatgaagattatagactgggagaagggagaagagaccactagatgtgaatcctccttatctttgtgacctcagaaatgcttgaatccatgagtcacaaacttaggctcaagttctggctccattgccttctaagtgcccttgaataaatggctaagggttagaagacaggtcccagtcttcctaatgaggcattgaaagtctaggtggaatagatgcttgctggagcctgtggatattataaaagaaagagctcactgccttaatgtggtcaggagaggcaggagtgagagccagtgtgaaggtgtgggagttggaaggaacttggaactcaacttcttttggcccctcaacttgagattcacaaagaaaaaaagcaatgtctcctcgctgaaagcaaaatggaagctcctccttgcacagtgcagccccttcctcactgtaggttattccaagtgagaagagtaaacatgacttctaaatgccatctaacgatatatgcatatctaaaggagacaaggatgactgaatgcatcttcatgtgtaggaagtgaagtgtctgttgacattaagtacttcttcatgagtgagaggaggcccatgatggagatgacaccagtacctccttctagcactctgaattcccaatgtttactactgctgtctctgaaactgcagcatcctcaccaggaccacacagggaacaaaggcaagacacctgaaatccctttagccatattcacaacacttacttcatagataagatgatgtttgaaatatgagaaggatttttttttaaaagagcactctattctcttggtatcctagtatgagtgcctgaaagtgcacattggctagaaggtttcatgtgagcatcagccccagggtccagaagacactcttggcaagcctggagagtgagtatgttgaacaggcaatggaagcatccatgaaaggcaggcaactgcgcacgactttccaacagatggctggtcagttgcacagagggaaggagccatggattccatgataatgacacttgtgccagcttttgtgtttccagaagttttgaagatataagggaaccaccacatgtagagtatgtgaagtcttacagagacgaggtcctaaggtatttattttgacaaatcacgttgcaagtaatgtgaaagcagtttgaagaaaaaatgtccccatctaatgctgcattatggcatgcatttctttagcctaaatctgtcagtgacatgaaaatacatgttttgctggacacataataggttgaacacataataggttctaacatggatctgcataaagaagaaagaagaaaggctataaaggtagaagaataaatgtataaatattacaacaggacactgagctgagtggctctttaccatagaccttgctcatagttctcactacaggcttgctctgagccaacttccaagttctctccttctccttccaaacttccctgtatgtcatcttgctcctgggccacctgactgatgtttaatgcctggatatttgctttcacctctgcatgaccaagccttggccaagtcactgttgactcagttgcaacatctgtcccctgctgagggctgttgtagctttcatagctcacagtccagcttgaatctaaccttttctgtggtcattcagagtagcaagaagcattgtgttttggatttactgcagaactcacacacttaactgtacacagtcagtttttatagctatcactgcatccagattggacagtgaccttggctgagacatcctttacctctgtttcagattaatttaggcggcatataaaatctctgtgcactgccaggggaaagtaaagacttcatgaagaaatggagaagagccgaatagttgaccattgttgctgtataaatcttggatccagggctaaaaggtggcagtataaatgcagatggtgctgctgccatattttcctggcacacctttaagcagcacatttcaagccttcagggttggaatggcatttccaaatatagactcaaaaaatcctcagatgtttgattctagaatagagctgggaattctgtcctgcaaatgccttctgcagcatgggagcaaacccactcttctgtgtctgttgcttcaaactctctattttctggaaactggagaaagatgtgggtctacattttgaaatatatgccttgaacaagaattatgcacctatagaaaacttgtcatacattgaataaactctcagtttacagaaatctatggaaatatcaaaataaaacatcagaaggagcagtaactatagaggttattaactaaggggataacctgaaaaataaagttatatttgctaaaaactgt

SEQ ID NO: 1493 - DNA, 3579 bp, Homo sapiens
ataatgcacagaggacacccacaaccagccttcagcatctggggtgacctgctccaaacacctctccgctcgggtgcccagccccacccctcccctggagcaagggacagtcccagtccacatctcacttgctcctcagcagcagtggacaagctggacccttcctcctcctggaagtgagccactcttcagcatctagagagcagctcctctcctgcgagcccgtgccagccagctgcttgggaaggtgagaagcatgcctcgccggcagcccctcgcccaagattgcagccccttccagagctggtctgcaggcccatggctgcctggtgagcggtccaaaggcctagccccttgcattcatgaggcacagctctggggggctgtccccactctcagtgccataggaccagccaaagcctcagttcaactgcccagagcctccctctgcccagccccacagccagcttccctgcagagataccttctgaaatcaccccacccaactctccagctctgcatctgtttccaggaaacccatcctaggacagtcagctctggcagcggacctgggaggccgactccaaaggcagatgttggagccggctctctgaccagcccgggggcaatggagacccgccactcctgggagatggagactggagagctctgggtgctgccaaggcataaaaggtgaatcatgcccatggtgagcagggccgggagacctgcagaggaggacgcaggggccagggcagcatcgctggccctgagagaagtagtcacataggaccagggaactggacagcacttggctgaggtcaccaattcactgaaaatgaaaacaggcttagggtgatcaatgacccattcaaggcacaaggtgaaatctcaggggcctccttgacagcactgagggaagccctaatctgagccaaggacagagagcagagagtgagctcaggacccgactgcacaagcaccacgcttcagaaaaaatggaattctagcccaggcatactccccacaacacattcagggctccaatgtgcaaagaatgggactcgaggccagggatgtggagacttagaggtgcaactcctagatcctggaatccgccaagaggagagggcagggcagccccctcccctatgaagagacagtgccccacctgactgaagagcctgcagcggctcaaatgaggcaggttccaggcggtgccagaggagacaagtgccccctccctcctacaaccagtatcacagctggcacaccccagtgggaaggtgctggtctgtgagaggaagaacaagatcacctccctgtgttcccagagggctgcaaggctaggggagatgccgtagcaggggaatacatgcccatttgggggtgccgcatcatggttcagagccacgggtaaggaaggaagtgctggcatggagggctttagcctcctgaaaggacccgggttacagagctcatgcttatggctcctggctcctgcaagcttgcaagaagcgagggcctgtgagaagtggaaatgccagcattaccacagcagacagcagaggcacagcagaggctctcagaagtgggcctgcttgagcagatgggctgcataggaaggaaacccaccatattccatgttcccaggaagggcagggggatgtcccgcacccccataagaaggccccagtggtgagtggcgcactcttgcggccctcgcaggttgggctgatggcaggagacgctgctgcagacctcggctgtgagcagcaggggcaaggacaggagcccaacctggcggaggccaggtggcagtgccacagccagaagcaggcataagtgcatgatgaggaacaagagctgagtggccagcgagtgccgagagccaggcaatcgcttaaggtctgccatcagaataaatcaaggttggaggacacaatggtttgaacatgtcccctccaaagtgcagatattgccagtaagcttgaacctgtcaagaggtggagcctttaagaggtgaccaggctggggggctcctccccctcgagtggggttaactgtgcttatgaaagggcttgactctcccaccttctgctgcaggggacacagcgtgcctcgcctccggatgactcagcaccaggcgccatcctggaagtggcgagcagccctcaccaggctcccaacctgccagccccttgatcctggacttccagcctccagagctgccagaggagacctgtctgttcctcatcagttacccatccttgggtgttttgttgtagcgacactaagcgactgagacagacagccaggacactgagggcaaaggcgctctagaaagccagtgggtccctcgcctggtgtcaggtgctaaggcaccggccagaggagagggcggtccctgggaggaaggccctgcaacctcatggcaaggatggccagtcacgttcctgggtccttccccaaaggggcagcagtgtgccggagaaacaggaaggcccaggcccctccaggactgttgagggtgatcctgagcacctgaagtgccccaggcccagagtagcagggctcttcatcttcctggagggtgagtcaggcctccccgccctggcccacttgcccatgggtcctcatccatgtgggatgaagtctgaagacatcactgggccctcccagcaccccagcccagggcaggactgcgtgagtgataaataaagacgccctggaccacccttgatgaaggccagctccctcccaccttctggactgccacctccccactctgcaccttcaccccctctcaagaaccacagcctctagggcccacctctctgcttctgaggaaagcattagggtggggacgtagatggtcccaccacttgcattgtaaaagacacacagagggcaatgctgtagtctaagaaaagattttctaatggtggagtttctggcaaaaaggcatggccatcatgaggcagttagtgctgttgggcaaagaattgcttccatatttgtctcaaagcattaaaatgggcaccaaatcaatatttctttaataaaaaacacaaaaatcttggcctatgctctcccaacacaccctgagcatgtctctagcatcactagaatgctagaggcatttgactgcatcttgcctgttacctgttaacttcttgcttccctccctcaattgtgagctcactgagggcagggataggactgaagtatcctctgaatctttaacctcaggcgcttagggacagggggatgggacggagatgtggcaggcagagtccagcctccccagagccacctcccagccctgcgcatgtgcttggcaagtccctgatgggagcccaggcaaggctggggcttgtgcgtgtctcccctgccaggctgtgagcacccgggcaggcttgtccaggccagcccagctgctgcctgacaccagcccaggtcctggcccccagagagtgcctggtgaagtctgtctggctgaggtccgacacaagggggtaaggaattatttccttccctgaggcttcattttgaaaataaatttagtaacttctaaac

SEQ ID NO: 1494 - DNA, 2796 bp, Homo sapiens
gtgggtcccatcctggggggtgcaggagggagctccatgtgcccctgctgatctgcccatctgagcctcaggggtcctgggcactgagagctgggctgggctcagcgggggtatgcattgacattggggacagagaggggatgctgaagcgggtgctgtctgggtggggcctgcctgatcgacccagcaggtgcacccagcagccggaggtgcttctagcagagtgaacgccctgtccttaggggcatgtgagctgaggctgggggcctggagctgcagggggaggaattggggagagcagaggtcccaaagatgtcccaaggccccaagaccctggtgaaggaatggaggagccagcattggtcggcgagaggggagtgggagttggatggcctggctctgggctggacacacggtttgcagccacagctgagctgtgctgtggagcccagttcccacctgggcatgtcctgtcctctgaggcttccgggagccggacggccaccgcggtgcaggcgcgcactcaagggctttcgaggctcactctgtcggagaggtcagagactgagtgtcgctgctgaaggctgtggtggaccgggctggatcgcggattctaggttagatcgcagatttgggatcgcggattggggattggattggggatttggggttggatcagggatgtgggggctggataggggatttgaggattggatcggggatttggggttggatcctggatttggggccgggtcggcggtggggggcagtgaaaaggtgacagagagcagcccctgctcaggagccggtggttgggggtctgagaagtcaccaccaccaagaagttcttcggcttcgggagccgcgggggcgagatggcccgggctccatagaccacgtctgcacggttccgggtaccgaatccgggacgcggaacagcggaaaatccaagggcggctgtcaaggaccggaggtggagcgcggcctggagcgcaggagccggagacctggaggcccgggacaagcagcacagaactgctctacatttggcctgtgccagcggccatgtggaagtggtcactctcctggtgaacagacaatgccaaattgacatctgtgacaaagaaaagagtgtgcctttgatacaggcacaggctgtgcattgccaagaagaggcttgtgccattattctgctggaacgtggcgccaatccaaaccttaaggatgtctacagcaacactgctctccagtatgctgtgtatagtgagagcacatcactggcaaaaaaactgctttcccatgatgcaaatactgaagcactggacaaggtttattcctttttttcctaattagtgtaaaacaacacaagaaagaaaatatgccctggaaataggctttatcttaaaactcaaacaagactaaagcaacttaaaataaatggacatcttgctgctgctgacaattttctaacaaactgacgtatcatctctcagtggcaaggcttaagagggagaaatgggaagggaaaaggagagcaataagaaatatgcaggtcaattggaaattaggtcatgagggaaaatgccaagaagagttttttttcttagtttgttgttcttctagtttatgtgttgagacaaggtgctctttagctttgggtctaataatttttggtttgaaaatgagagtgagttgaaacttgcctatggattaattttaggaggactctgaggaaaccagattggcagtgaatatgtggtgacaaagtgagaaacactttagcagaaggcggaacaaattaacttgtgggaagtcggggtccccaaacggagggaccggctgaagctgtggcagaagaatataaattgtgaagatttcatggacatttattagttcccagaattaacacttttataatttaatacgcctgtctttactgcagtctctgaacataaattgtgaagatttcatggccatttatcacttccccaatcaatactcttataatttcctatgcctatctttaatctcttaatcccatcatcttcgtcagctgaggatatatgtcacctcaggaccctgtgatgattgtgttaactgtacaaattgtaaaacatgcatgtttgaacaatatgaaatcagggcaccctgaaaaagaacagagtaacagtgattttcagggaacaaggaaagataaccataaggtctgactgcctgtggggatgggcaaaatagagtcatatttttcttctcacagagagcttatagatggacgtgtgagtaggagaaatattgctgaattcttttcccagcaaggaatattaataattgataatcctggggaaggaatgcattcccaggggtaggcctgtagacgaccactctgggagtgtctgtcttatgcagttgagataagggatgaaatacaccctgttctcctgcagtgtcctcaggcttactaggattgggaaattccagcctggtgaactctagtcagaccggttgtctgctctccaacccagtttccttttaagatgtttatcaagacaatgcatgcccagagggacttggaccctcatcagtaattctaatttcacccttgccttgtgatcctgctctgcccttttgccttgtgatcttttattgccctttgaagcatgtgatctctgtgacccactccctattcgtacacccctccgcttttgaaatccctaataaaaacttgctggttttgcggctcggggtcgccatcacagtcctaccaatatgtgatgacacccccggaggaccagctgt

SEQ ID NO: 1495 - DNA, 3992 bp, Homo sapiens
atctatcttgctgtgtttggacaggccagcccctgaaacatcttgggcaatggagggttaacttctcaaagtttaataggcaagaccagcaaccatgcaacaagaagatactctataaatgatgattcaatgaatgccaagccctgttctatgcactgaagaccaaaagaaataaaagacatcattcctgctctgacttcaactaaccaactaaagaactgttccccagagcattgttcctgagaaggaaaagagtccaaacacctacccacacctgctttgtgccaagaatccacagttggattgcaaggacagtgcgttcaagacccagctgttgagagtagaaaagcagaagaaaggacccgaggtcagcaagtgccctccccacaatggggcagatctgccagcgagaatcgagacagggtcttgctatgttgcccaggctgttcttaaatccctggcgtcaagtgatcctcctgcctcagcctcctaaagtgctgggactacaggctacagcagctgaaaaaccaaaacttcatctacttgctgaaagtgagattgacaagtatctctatgccatgcggctctccgatgaaactctcatagatatcatgactcgcttcaggaaggagatgaagaatggcctctcccgggattttaatccaacagccacagtcaagatgttgccaacattcgtaaggcccattcctgatggctctgaaaagggagatttcattgccctggatcttggtgggtcttcctttcgaattctgcgggtgcaagtgaatcatgagaaaaaccagaatgttcacatggagtccgaggtttatgacaccccagagaacatcgtgcacggcagtggaagccagctttttgatcatgttgctgagtgcctgggagatttcatggagaaaaggaagatcaaggacaagaagttacctgtgggattcacgttttcttttccttgccaacaatccaaaatagatgaggccatcctgatcacctggacaaagcgatttaaagcgagcggagtggaaggagcagatgtggtcaaactgcttaacaaagccatcaaaaagcgaggggactatgatgccaacatcgtagctgtggtgaatgacacagtgggcaccatgatgacctgtggctatgacgaccagcactgtgaagtcggcctgatcatcggcactggcaccaatgcttgctacatggaggaactgaggcacattgatctggtggaaggagacgaggggaggatgtgtatcaatacagaatggggagcctttggagacgatggatcattagaagacatccggacagagtttgacagggagatagaccggggatccctcaaccctggaaaacagctgtttgagaagatggtcagtggcatgtacttgggagagctggttcgactgatcctagtcaagatggccaaggagggcctcttatttgaagggcggatcaccccggagctgctcacccgagggaagtttaacaccagtgatgtgtcagccatcgaaaagaataaggaaggcctccacaatgccaaagaaatcctgacccgcctgggagtggagccgtccgatgatgactgtgtctcagtccagcacgtttgcaccattgtctcatttcgctcagccaacttggtggctgccacactgggcgccatcttgaaccgcctgcgtgataacaagggcacacccaggctgcggaccacggttggtgtcgacggatctctttacaagacgcacccacagtattcccggcgtttccacaagactctaaggcgcttggtgccagactccgatgtgcgcttcctcctctcggagagtggcagcggcaagggggctgccatggtgacggcggtggcctaccgcttggccgagcagcaccggcagatagaggagaccctggctcatttccacctcaccaaggacatgctgctggaggtgaagaagaggatgcgggccgagatggagctggggctgaggaagcagacgcacaacaatgccgtggttaagatgctgccctccttcgtccggagaactcccgacgggaccgagaatggtgacttcttggccctggatcttggaggaaccaatttccgtgtgctgctggtgaaaatccgtagtgggaaaaagagaacggtggaaatgcacaacaagatctacgccattcctattgaaatcatgcagggcactggggaagagctgtttgatcacattgtctcctgcatctctgacttcttggactacatggggatcaaaggccccaggatgcctctgggcttcacgttctcatttccctgccagcagacgagtctggacgcgggaatcttgatcacgtggacaaagggttttaaggcaacagactgcgtgggccacgatgtagtcaccttactaagggatgcgataaaaaggagagaggaatttgacctggacgtggtggctgtggtcaacgacacagtgggcaccatgatgacctgtgcttatggggagcccacctgtgaggttggactcattgttgggaccggcagcaatgcctgctacatggaggagatgaagaacgtggagatggtggagggggaccaggggcagatgtgcatcaacatggagtggggggcctttggggacaacgggtgtctggatgatatcaggacacactacgacagactggtggacgaatattccctaaatgctgggaaacaaaggtatgagaagatgatcagtggtatgtacctgggtgaaatcgtccgcaacatcttaatcgacttcaccaagaagggattcctcttccgagggcagatctctgagacgctgaagacccggggcatctttgagaccaagtttctctctcagatcgagagtgaccgattagcactgctccaggtccgggctatcctccagcagctaggtctgaatagcacctgcgatgacagtatcctcgtcaagacagtgtgcggggtggtgtccaggagggccgcacagctgtgtggcgcaggcatggctgcggttgtggataagatccgcgagaacagaggactggaccgtctgaatgtgactgtgggagtggacgggacactctacaagcttcatccacacttctccagaatcatgcaccagacggtgaaggaactgtcaccaaaatgtaacgtgtccttcctcctgtctgaggatggcagcggcaagggggccgccctcatcacggccgtgggcgtgcggttacgcacagaggcaagcagctaagagtccgggatccccagcctactgcctctccagcacttctctcttcaagcggcgaccccctaccctcccagcgagttgcgctgggagacgctggcgccagggcctgccggcgcggggaggaaagcaaaatccaactaatggtatatattgtagggtacagaatagagcgtgtgctgttgataatatctctcacccggatccctcctcacttgccctgccactttgcatggtttgattttgacctggtcccccacgtgtgaagtgtagtggcatccatttctaatgtatgcattcatccaacagagttatttattggctggagatggaaaatcacaccacctgacaggccttctgggcctccaaagcccatccttggggttccccctccctgtgtgaaatgtattatcaccagcagacactgccgggcctccctcccgggggcactgcctgaaggcgagtgtgggcatagcattagctgcttcctcccctcctggcacccactgtggcctggcatcgcatcgtggtgtgtcaatgccacaaaatcgtgtgtccgtggaaccagtcctagccgcgtgtgacagtcttgcattctgtttgtctcgtggggggaggtggacagtcctgcggaaatgtgtcttgtctccatttggataaaaggaaccaaccaacaaacaatgccatcactggaatttcccaccgctttgtgagccgtgtcgtatgacctagtaaactttgtaccaattc

SEQ ID NO: 1496 - DNA, 3451 bp, Homo sapiens
atgatgttcagggtgccccggtctcaccccgggagcctcctcgctccggcctgctcctggctacccggtgggcggctctggccccagcgacccgctactgtttctccatgcgctgccacttcgcaaaggcacatctctaggtcagtggtcagctgcagccagggcgctgcaactcgctccaggactcgggaatcagggccttggtgggcctcgcagagtgctgggtgtgtcgcctgcgggctcctcttttggagaaaggagggagggaaaggccttgtgagacgactccaggagcgaccagcgacccccacaaggcccaagtcctcccagcgcactcagaaacagtcacttaaatggcaataaggttgagaaagactctcccgtgcccccgtgctggtgtagtggctgtgattcagtcctttcaccaccgcatcccgggttcgattaccggtcagggagttgttttgcactgactgcccacccgcagtaatctttctttactccgctgtcagccggcctgctccaagagccagaggcagaagagtctccctgcaaggtgcaaaccctggcgaaggagggcaagtcctggtggacggcctctcatgacacaccctcttatttatctccgtgtccaccattcgcagaaggggctttagagagcgactgagcgtctcgctcaggtgtacaccaccgtgcagagatggcagctctcctggaggtgtacccaagaagcccaccatctttgccgcctccgccatcccagaggcgccgattgggctgagctgcaaataactaagagagagagaggccaagccaagtcgtggcgtttgtgtgcggcacacgtcgtcagctgacacaggcggtcagctgagcctcctcacctcagttcgcagctaacatgcttcttaggccttcggaagaggcgacaggaggcgatggccgcgaggttgggaggggggtgagcggcgggtgaggtcctccaggaccgcccatttattgactgggtggtacaggagggcgatgttcgcttacccaacaacgacagcaggtggagtaggcactaatggaaaactgtggccggtgccctaagcagaaggcaggtgtaaaaatcactaggacatcaaagggatagtaccacagtcaaatcccgcaatgtctgtctacactctaccaagcaattgtgcaccctcccccttttccattcagtactcccaagaagggttgggacgaaccctgtgtccactgtaaagctcaggggagagcgggagcgagggaggtgaagtgcacagactgggcagaggcggcgggcagaactgcgggggtgagagggcgcggtggctgcggggcgggagcctctgctgaaaggaggcctgggttgtcctgtgggtgactgttggtggaatctttggcagcgagtggttggaagaatggcgacgggcgagcagaggggaaggtggtgaccctgagcgtctggctaggggagaggaggctgtactgacactcgtctcctcttacctggcgagggacagaccgtggtcaagaagggagctctccctggttgaggctagtccaccacactccagctgctctgacccctgcgatttccctacacgcggggcgcttgtctgcggtggtgtttgcgctacccgggggctgggttcacgcaggctcctgacagtccttggctcaccgcccccgacgcggatatcgccgctagagacccttccgccaccctcctagggatcttgagggccttccttgttgttccgactgaagctcacgaacagacagatgtgagctctctgtcttttacacgttgaatttggctattggcaaaaaaagccctgacccagagcttgggactcctcccggcctgcacacgacttcccgactcttgcctcctagcgcggctcttggctagcgggcgggcagcctccacccagcgtagaaccgcggcagccgcagcccccgcaggctggcggtcagacactagcaggaaaagggacacaaggcctgcgtggtgggaaagcatgggagacgtcgctttcccaccaggcgagaaggtctccctacagtctttggacagaagatggagggaggcaccccttccaggagcaaggcggctgctcctgaggcctggctccgcacggaggctcctgggtcccgcgcgccctctccctaccggttatagccagagctgcttcacacatctcagccggcttcctcttccgcctctgccacctcttcctccccagctcgtgggaaagacctagcctcctctccaacacttggagagggagttggatgaacgtctcctaaccccagtaggacagagatcctgaggtaggaggggaccccttgccttgctgcttcttttggcaccgctgacccgggcccaggactcctcgctcctcctggaaggcctgggtcgtgtagcccacagaggtggccacgtgggcatctcccccactgctcctcatagaaccggaggcattatcctgccgggcccactcttacccatgaaagaaacttgggaaatgctcccggggaagccggggatctgggcgctcgaccacttcggtgtgaatcttccgtccgctcatccttccttcggagggtcttggggagaggagaaatgctcaaggacgatgcgctttgcagcgtctcaagggaaactagatctcaacggataccagaagtctggagcgtcttcctggaggaaggcggcccgaggcctgcggttgcagggaggcttgcggagcacagcgccctctctcagcctgagctatccagtggcttccagcatcccagctggccgactccacttcctctctcttcctcctactgcgggtcttcttcttctctttggggaccgaatctcgctctgtcgcccaggctggagtgcagtggcgcgatctcggcttactgcaacctccgcctcccgggttgaagcgattctcctgcctcagcctcccgaatagctgggactacaggcgcgtgccaccacgcccggctaattttttgtatttttagttgagacggggtttcaccctgttagccaggatggtctcgatctcctggcctcttgatccgcccgcctcggcctcccaaagtgctgggattacaggcgtgagcctccgcgcccggcctactgcggctcttctatcctggtgttctttgaatgcctatcttccttttgtgccacagaacctctcacgcccgccacaggttgctcatttccttggttgttctgaactttaaataagttaatgtatgtaagagtgccataaatgctcagtaattgacatctgttattttcatcagtaacatcatctgaatcatctgtattgtctatttttaacaactgcatttttcattgtccaaataaagtcacatacatttgaacattatataatgattgaataataaaattattctgctattttacaat

SEQ ID NO: 1497 - DNA, 3743 bp, Homo sapiens
gtgcctccccaggagcctggatggaggtgaggctgctgaacggcacaggaatgtgctcaggccgtgtggaagttctcgtccagggcacgtgggggaccgtgtgtgatgatctctgggacctggctgaggccactgtcgtgtgccgccagctgcagtgtggccaggctgtggcagcccccacaggggcccactttcgggcaggctctgggaagatcttactggatgacatgcagtgtgtgggcagtgagagccatctgggtcaatgcatgcgtggggaccaggccaggcacaactgtgggcacctggaggatgccagtgtcatctgcacaggtgctggcaattcaccaggtctcgctccaaccacagagcctgaagctgtcacttcatcatacacaccatcagactggagtgcagcagcgtgaactcagctcactgcaacctctgcctcccgggttcaagcagttctcttgcttcagcctcccgagcagctgggactacaggtcaagcactgttattagctgtgcccaccacaaagcctgctgtgcttccctcaaccccctttccaacaggtgatggattatctgcaaccatagccacgacagccatgaccctgccatccacacccatgcccccagcaggtgccaagtcttcaatcacttctccaacagctcctgagtcatttgctgctcctggggcaacaaaacccacaatttatggtgctgattccacagctgctctgcctacagcccatgagaacctgctccccacatcattggtgatatcagtggctcaacacccaccgtcttctgcaccaccagaaaaatctcggtgtggtggcattattaccaactcatctggagcgattaggaatcccccacagaatgaaatgcatgacaacatcacttgtgtgtgggaaatcaaggcaaatgcatctgatcatatactgctggcatttccacatcttgaccttgactgcaccaatgaatattttgaaatcctggacggtccaccatcctcagtaaagtcattggggaggacctgctctggcttccaacacacctacatctcctcctccagctcaatgaccctcgtgtatttccgaagcttcaacaacctaggataaaacttcattgcttattattactctgcacccaaagaggcagtgttgcagaccccacatctaatcaccatcccgacagcaacacccagaacagtaacagcaagagcaggggactggctggagctgcagctggtgggtggctctggccggtgctcaggacgcgtggagattctccaccagggcgcctggggcaccgtgtgtgatgacctgtgggacctgaacgaagctgaggttgtgtgccggcagcttcggtgtggtcgagccatgtctgcccttggaaaggcccactttggccccggctcaggagacatcttcctggacaacctccagtgcgctggtgtggagcgctacctgggccagtgcacccactcgggctggtcagagcacaactggccaccacgaggatgccagtgtcatctgctcagatgctgaagaatcacttgctaacagtccagagggctggccggagctgaggctgatgggcggctcaggccggtgcttggggcgcgtggagattctccaccagggtgcctggggcaccgtgtgcgacgacctgtgggacctgaatgaagccaaggttgtgtgccggcagttggggtttgggcaggctgtttctggccctggcgaggcccactttggcccaggctcaggagacatcttcctggacaacctccagtgcactcgggtagagcactacctgggccagtgtacccacttgggctggtcagagcacaactgtggccaccacgaggatgccagtgtcatctgctcagatgcggaagacctacctccacccacacctccagattcttctacagcttctcaggatcacataaaaggaggaagtaactcttgtggaggggtcatttctagtctctctggctcattttctagtccacagtatccagaaaactacccaacagatatccagtgtgtttgggagatccacatgggtgcaaaatttcacatagaactcataattccaagtttgaaggttatacagtccaaagatagacgtctttgtcatctccattagagatgaggagtctgaggctcagagaggataactaatttgcccaaggccaacccatctagatctgtctgatgtcaatgacccatctgttcaccaatatgtgggtctgtaaaagagtctgcatgaagcccttcttcttgtgcatgacacacatcgtgttacaaacacagcaagactgtagaattccatgatcattagctccaggcatgcactgaattgcgttccatcatgactgtaccacaaccatggattcagacatgcactaagccaaaaatgcctcaggatatatttgttgactaaaactttagggacacaattagccacaatgaggttggaagatatccttggatgtccctatgactccgttgaaatcttcaatggtcccaggattgcctcgctctccatggggaagttctgtgcccctgaaactgtgatattcttctcctcctcacacatcatgacagtggtgttccaaagtgattctatgaaaaccaacactggcttttatgatcttttcaatgccattcctcagggtgaaagggagtcagatgctggggactgggctccagatgtgattcctccacccccagatatcattcctccagcccctataccacaaggaggaagtaactcttgtggaggagtgatttcaagtctctcaggttccttctccagcccttggtaccctacaaactaccccaccaacttggagtgcgtctgggtgatacacgtggctgagaaattccacatagaactgatgatcccaagcctgaagccctggactagaatcagactcatagtgccaaccaagaaagatgagatctctaccctcacagagtttatattctagatgatgagacaaatggtactcagataaaccaatgactcaatggacaatttcaactagtgataaattgaaaaatgctatgaagaaaaaaatatacatacatgataataggatagaaaataaagaaggagaagacagcaacagattagaggacatctatgggtgtccttacgactttatcgaagtgttcgatggacaacaggctgcctcactctccatgggcaggttttgtgctgggacagagctcacgttcctttcttcttcaaacatcatgaccacagtgttcagaagcaacgccatgatcaccaacacagggttttatgctctgtacaacaccgttcagcaagatgaaagggagaacggcttaggagaactgaagagagatgagctacccacaccttctatgtcttccactgcctctctgccttacctaggagcatctgctgctgtgagttacccaacctcaggtgcagtgactcacgcctgtaatcccagcactttcggaagctgaggtggactgatcacctgaggtcaggagtttgagaccagcctggccaacatggtgaaaccccgtctctactaaaaatacaaaaattagctgggcttggtggggcatgtctgtaatcccagctactcaggaggctgaggcaggaaaattgcttgaacccgggagatggaggttgcagtgagctgagatcatgccactgcactccagcctgagcagcagagcaagatttcatctc

SEQ ID NO: 1498 - DNA, 5072 bp, Homo sapiens
agttgccttaggaagccatgctattcaaaccatggagaatatcctctgttttctaaacagctatactgagacagggcttagccctgactcaccttgtttggatggatattgaccacaactgcatctacttgagtgggttggggttgtttatgctgtactttttctatgtggtattgatgctgtgtttgtcaacccttgggaaaaataatgatatccaaaagcatcagggcagagccaggaggagaaagaaaggtgggacatataaaggtaatgtcgacctgctctatctgagcttcagggtgacccttcctgtctctttcatgaggactcagtcccatgacttcttagaatgtcagttactagatacagtctcagaaaacagagccctcagaagacaggctcatgggaaagcgataagacctgagacaccgctcagaggccctgctctgcccatccatgggcaagacttagtgatggacctgagcaataggcagccaagttagatatcgaggaaggactactggttgacttggagtcagagcttctgtctcacaactttgcataagtaatttgacttccttgatgctcggattcctcctggaggtaaccactgatgtctatgtttcacgtggtggttttgagcatcacatggggtaatgtatgtgaaaggactttactaatgatgccacatacacatgtgaacttgtgaatattatcaatgactatttgcccttttctactgattcttgggactatcagagtttaatatcccaagggtcttccacagagtgacttctgtatgagccatgtgcctctaccttcattgcatataacatactgttctgctttcccagaccggaaaagtttccagagagaagccgaagaggaaaggaagttgctttctattctgaaaagctttggacctcctgcttcctgcagtcccctgggtcagcatcatgataccacccgctttcgtcgactgttatgcccagaccccgtctgtcaggtgtgtaacagagccactgctgatatccagcgactgctgtcttgggagtccctgaaagatgctgttccctttgtgtcccctttggcttcttcagcttctgcgactgagtcatcattcactctggcttccaccccctcagcaaccactccagaagacctaatattgtccccgcagcctaagccttctctactgccccacttaattctctcccctgacctgatcaccaccttagctgacttattttcaccctctccccttttcccaccgcatcacattcagagagcggagcccagtctccaacctgaggccagtttgtctctgaacactgtctttttatttgactccaccctatcccaagatatgaaccccttatcaaatatttcccaggccatgaatgccactgattcatgtgcttggcatcacgaaccaccaaacccatctgctttaccactggaggactgccctgtaactcagtctaaagcaagtcccacagtattgaagccttttccggagatgttatctctaggtagttctggtggatcatccacatgtgccccaacaatcagaggcattgacattcatgccctgcatcttcagaattctcctggtggcagcctcatgacaaggacttttttccttccactattgcaccatatgatttcatgcaagagcttcttacccttcattcttctgagatcactataggagggcactctgtggtcaacctcacagagcctattaacctctcatttatcagtcatgacattctggcactcctggagagacaagtcaaaaaaaggagtgatttcctgatgtggaaagagaatgaaaataaagcagaatcttttccaaaacaacgtaggccaaactatcaactaaattcttcacagaaaatgttagcctcaattgcagataagcaagacttggcaacctcccttcctttttggggccagtaaagacagactagaacaactgcacatccatcagcagcccccatattctaagtgttttgaggaccatttggagcaaaaatatgtccagctcttctggggtctcccatctttgcacaaccccaggatgaggcacggtctcttatgccatctgaaattaatcatctggagtagaacgtgttgcagaaagtgcaggaaagtgtgtggagtttaccctctgtggttcaaaaatcccaggaagacttttgtcctccagctcccaatgctgtattggtcagaaagtctttcaaggtccatgttcccatctccatcattcctggagattttccactcagctctgaggtaaggaagaaactagagcaacacattcgaaagaggctcatccagcgcagatggggcctgccccgcagaatccatgagtctctgtcattgctacgtcctcagagcaaaatttcagagctatctgtgtcagacagcattcatggaccgttaaatatctctttggttgagggtcagaggtgcaatgttctaaagaagtccgcatcaagcttccctagaagcttccacgagaggagctcaaatatgctttccatggagaatgtggggaattatcagggatacagccaggagactgccccaaaagatcacctattgcatgatccagagacatcttcagacgaggatctgaggtctaactctgagagagacctagaaactcatatgatgcatctgtcagggaatgactcaggggtgagactaggtcagaaacaacttgaaaatgccctgacagtacgtttgagcaagaaatttgagaaaatcaatgagggtcgaatgcctgggactgtgcatagttcatggcactcagtcaagcagacaatgtctcttcctgagaaatcccaaagccaaattaaacatcaaaatctggtagcattggtgagtgaggaccactgcgttgatacttcccaggagatttccttccttagttccaacaaacaaaagatgttggaagcccatattaaaactttccgtatgaggatgctgtggggccttccctgcaaggtccttgaatccatagaaatcttcaaatcggaagaggatatttccaattccttttcccatttctaccttccctcctcagccagctttatttctcagggagattccaaagatggggtctctaagtcttgtagacgaagcacttttcaaggagaaaagttgggaacaacaagctcagtccctgtccttaatcatcctcagcctgtctcctcacctattggcaaagaagggcaggggaccctgagaagacaattttctgatattgaccatgaccttatagagacagatgccaaagatggtgcctccacgccccttagaagaggcactacatattttcaaggagaaaaattagaaacaacaagctcattctccatcttgggtcatcctcacctcgtcacctcacctgttgatcaagaaaagcaggggaccctcagaagagaattcgctgatactgacgaggatcttacagaaagtgtctggacaactgaggatggcagacagacttttctgccccccacatacagcatcatagacgaagtcagtcagaaacagactgtacttgccagtagatgcagtgcagagctgcccatactgcaagctggagttggccgtgattcaagggataagagagagagtgccagtaataatgttaacaggcttcagggcagtggaaagacctttcctgtcaccaatgggtcgaaggagatgttcaaggaagaggagatctgtactcttcaatcacaaactaggaacaacttgacaaccagcaagtcaggaagctgcttagtgacaaacgtgaaaagaagcacttctcatgaaactgaaattttcccaccaagaatatcagttcctcaaactcctaaatcatcatatcttaaaaatcagatgttgagccagttaaagttggtccagaggaagcatagccaacctcagagccatttcactggcatgtctcttgccttagataacttgagttccaaggacttactgactcatgcccagggcatctcgaatcaggacttgggaacttcccaggtgctgcatgtccacttggaggtcagaggaatccgtgtggcacagcagcaggagcacagggtccctacgcatgtcttacagaaatgccaagttaagaatttttcaccagctgcaaagagagtgagccctttaagacccaatggaggagagcttggtggaggggatgcagggttggggacatcccaactcactagaaagagcctccctgttcataacaaggcatcaggagaggtgcctgggagcaaatcttccccaaccttgaaaacacagcctccttctgaaaaccttttcagaaaatggatgcagaccttattgcagtggtttaataaacctagcataatgtgtgaagaacaagaaagttcttgggaaaagggtagctccctgtcatcatctgtgcagaatagaagtcgagttacaagtagagctgcttttactggtgctactgaagctcagaaaattaggaaagacactggggagttcctagaagaaaagctggggcatagccatgggatagatatcacctgtccctaagaacccttttccttcccagtggagcttgggaaagctcagcacaacccagaagtgcaggtcagagcagagcctttccagggctatccccgcaactacacagctccctcccgcaaagtgacatgtaccaaatcttgcagccaacaagctatctttgttggacagaattatcctacaaggattagacagatcatagacaaggacagacagccccaggaagttgaggcatttaaggggaagatattgtatcaaaggcatccccaatccatgccccacagggatcctgtgccacatctaaaccccacttgtcagcgtcaagtcaccctggtgtgtccagctgtcccaattagtggcaaaagcactgtgttcagtgatgtgcctttactaactggacgcaaaatgcattggaagtatttgcagggaggcaaatctccccccacaaaataattcactacttgttgagaatcttgattctccctaataaatgttctaataag

SEQ ID NO: 1499 - DNA, 3957 bp, Homo sapiens
agctggccgggcgggggggctgacccccccatctccctcccagacggggtggctggccgggctgaggggctcctcacttcccagtaggggggggcgggcagaggcgcccctcacctcctggacggggcggctggccgggcagggggctgacccccccacctccctcccggacggcatggctggccaggcggggggctgaccccccacctccctcccggatggggcggctggccgggcggagggctaaccccccccacctccctcccggacggggtggctgctgggcggagacgctcctcacttcccagatggggtggctgccgggcggagaggctcctcacttctcagacggggcggctgccgggcggaggggctcctcacttctcagacggggtggttgccaggcagagggtctcctcacttctcagacggggcggccgggcagagacgctcctcacctcccagacggggtctcggccgggcagaggcgctcctcacatcccagatggggcggcggggcagaggcgctccccacatctcagacgatgggcggccgggcagagacgctcctcacttcctagatgtgatggcggctgggaagaggcgctcctcacttcctagatgggatggcggccgggcggagacgctcctcactttccagactgggcagccaggcagaggggctcctcacatcccagacgatgggtggccaggcggagacactcctcacttcccagacggggtggcggccgggcagaggctgcaatctcggcactttgggaggccaagggtctgacagtttgatttttaaaggccaaatctctccagactccaaagaactctgtagccaaacagcagcacatactaatcaggcctgcctgtccttagagcagcagcatagaagcctggagacatggacttccatcccatattcacattcaacagcaaaataaatccaaatataaggcagtgctacaattcaaagactgtctgagatcagatgagattgggcatgttcagcgtgatacgggtagagatgttccctcactccactggcccacagccacatgcagaccaaccctgaagaatacacccaagcggtctgcactcagatcaaaccctgatctcccacaactacatcaacacacaaacaaccaccagaatacaatctaactgctgcaacaataagcaagtcccaagagagtccaaactgaaacagttgagttgctttctccctgtttgttgggctagttcaatctgcaaatggagattccttcggaatttctcaaattgagaaaagcagatcctgctgtctggacccacaaatgacactcacttatccagacacatactcaattactaacaagccccaagagtgtctgaactggaacagtcagggtgcttcctctctccgtcagttggccttgctgaacttgccaatggaaattccttcagaatttctcaaattgagaggagccattcccactgtcggtatccacaaaagacactcacctatccacatgcagaagtcaaatttgaaaggctgttcttcctaggcaatcagaaatgtggttggggctggcagcagcaatgctaaatagaaagactaaaacccacatcctgcctaaaacacataggctgctgcttagggttgcggaaattctcccaactggtgacagccaagccaagagcaatgtcttcctgatgagggaaccaaaatctgttactgaaatgccagaggttcagcctaggtcccgttactcattgcacagaatgccaatcactgaggcaagtatttccaggggagatgactttattcagttgctgcagctgagaagaactgcagatcagtctcaaattcatctccccaagtgactgaaattgggggtttacatagcagaggagggatgtagctacgtgcaggaaataatgtagctatgtgtgggaaaacagaatttgaatttcagggcaacaggagatttgatggggaatgaacaccccacagctctgtgcaggagtgcctggaagtgaggccagtcaagggaatgctgccagacaaccaactcagcttcagaccatcttcagatcgtaacccaccagggactgtgggctttgccagaccacatttttggttactgcaactcaagttggcttctaaatctcaaaaaatgtgacaatgatacagatttttttatctacttttgtctaaaacatttaaatactcattctgaagtaactcatctcaaaatccaatgctagaaaaatggaaataattacaggcagatgcaatgatttaaaggtttaaaagaagctgtccattctaaagagtcagaggaaacctttccttatgaaatggttaatgaaataaataggaaaaaaaaatccaacacaatcacgaggttccagaaaacattgtatatttatttaaaaagtaattttgtatgaatgaaatatttcttaaggttctgcctttctttccttccactcaacaggaaacaaaattactggatttatggtcaaggaaaatcactaacccacagccctcagatgcactcatgaaaatgggaagaatgcatacacagggatcagagaacagagaaacaggtgaatcttgtggttggaaagaaacgcacttttgtatgtacacacagaattaactttacttttccactaagctctctctgagacttagaaatccctacatctgggtaggctggagtcaatcccaaggcttttatggttccttgaagtaaaaagagcagtctcatgtcagaaattaataggtccagtctagcacagtattgaaactccaaacttcaatttaaactctacttggaagcctgcagaagaggaggcaggcggttttgctgcctctttttttccctagcatcatcaaatcctctattcattggctgctgtttcttaaacatttcatgggaaagagaaatagaagcacagatatctgctgttaatggttctttctcttaccaagtgctgttgggggtttttcagaagtcacatcatatgactgaaacttatctcctgtctgatttctcctcaacttttgggattctacagattctcaccattaggatttcagtgtctggcagtcctctgggaaactactttttaaaaattatggtaaaatacacataacaaaatttttcatcttaaccatttttaagtgtaaatttcagtagtaagtacattacattgttttgcaatcaatctccagaactattttcatcttgcaaagctaaaactctgtatctgtcaaacaatgactccccatttcctctttcccccatcacttagccaccaccattctactttctgtttctatcagcttaagtcttctaagtaactcatgtaagtgaaatcatacagtacttgtccttttgcgactggcttattccgcatagcataaagccttcaatgtttatttatgttgtagcttgtgtcagaatgtccttcctttttaaagctgaataatattccattgtatgtatataccacatttttttagtccacccatcgatggacaccagggttgctttaacctgttgacttgtgaataacgctgctatgaatatggctgtataaatctcttggagataacctgctttaattattttggctatatatccagaagcaaaagtgccaggttataatttaatgtttaatttggcggggggaaccaccatattgttgtctgtagtggttgcattattttacattgccatgaaaatttcactagggttgcaatttacccatatccctatagtatttgttattttctgggttttttttttccacaggagccatcttaatggatgtgaggtgatctcttaatatagttttgattttaatttctcaaatgattagtgatattgaatgtcttttcatatgtttgctggacatttgtttatgttttatgaagaagtatctattcaagtc

SEQ ID NO: 1500 - DNA, 3176 bp, Homo sapiens
aactcggtctccactgcactgctggccagacgagggatgttattttgggcagtgcatctggacttggttcaagtggcaccagccaaatccctgccttactgacctctcccctggaggagcaggagcagtgctcaaggccgccctgggagggctgagaggcaggctctggactggggacacagggatagctgagccccagctgggggtggaagctgagccagggacagtcacagaggaacaagatcaagatgcgctttaactgagaagcccccaaggcagaggctgagaatcagaagacatttcagcagacatctacaaatctgaaggacaaaacatggttcaagcatctgggcacaggcggtccacccgtggctccaaaatggtctcctggtccgtgatagcaaagatccaggaaatatggtgcgaggaagatgagaggaagatggcgcgagagttcctggccgagttcatgagcacatatgtcatgatggagtggctgaccgggatgctccagctgtgtctcttcgccatcgtggaccaggagaacaacccagcactgccaggaacacacgcactggtgataggcatcctcgtggtcatcatcagggtgtaccatggcatgaacacaggatatgccatcaatccgtcccgggacctgccccccccgcatcttcaccttcattgctggttggggcaaactggtcttcaggtactgcccctgcccaggcccattcctttgagattttctgtggggcccctgtgtgttgaggtgtggggggtgatgtgaggggcagcacaggagggtcctgcagagcccccaggtggcctggggagcaggagtgagtcccaacatttccccaggccagtagagatacagatcctgcacctgcactgagtgtcaaccctgtccctgaatcgggctgaggctgaccagggccccgggttgggggtgtttcctgggttagcctgaggatgactcctctgctcaaccagtcttggcccgaggtggatgagggtgctgtcctgggcatcagccccctcagccggcctctgcctcttgcctgcagcgatggggagaacttgtggtgggtgccagtggtggcaccacttctgggtgcctctctaggtggcatcatctacctggtcttcattggctccaccatcccacgggagcccctgaaattggaggactctgtggcatatgaagaccacgggataaccgtattgcccaagatgggatctcatgaacccatgatctctccccttaccctcatctccatgagccctgccaacagatcttcagtccaccctgccccacccttacatgaatccatggccctagagcacttctaagcagagattatttgtgatcccatcccttccccaataaagagaagcttgtcccacagcagtacccccacttcctgggggcctcctgtggttgggcttccctcctgggttctttcaggagctctagggctatgtcttagcccaaggtgtagaggtgaggcacctcaagtctttcatgccctgggaactggggtgccccagggggagaatggggaagagctgacctgcgccctcagtaggaacaaggtaagatgaaagaatgacagaaacagaatgagggattttcaggcaagggggaaggaagggcagttttggtgaaaggactgtagctgactggtggggggctggctttggaaatactttgaggggatcctgagactggactctagactctcccctggttgttcccttccccgagttctggccggttcttggaccagacaaggcatggcccaagaaggtagatcagaattttttagcctttttttcattagtgccttccctagtattcttccagattttttttcttaatcacatgaaattttaataccacagatatactatacatctgtttatgttctgtatatgttctgtgctttatacgtaaaaaagagtaagattttttttcacctccccttttaagaatcagttttaattcccttgagaatgcttgttatagattgaaggctggtaaggggttgggctcctctttcttcttcctggtgccagagtgctcccacatgaaggaataggaaaggaagatgcaaagagggaaatccttcgaacacatgaaaacacaggaagaggcctcttagggctccaagggctccagggaagcagctgcagaggttgggtggggtgaggggccaggatccactgaccctggggccaggcaggaatcactctgttgcctggggctcagaaggcagtatcacccatggttcctgtcattgctcatgtattttgcctttcaacaattattgtgcacctactgtgtgcaggccctgcctggacactggggatgcgcagtggatgcactgggctctgcctttgagggttgcagtttaatgggtgacaggtaattataaggaagaaggtgagtgcagagtgggaggcttggaggctgtggggcttggggtgggggagctcacatccagcctctgggccaaggccaggaggcttcccagagcaggagacagagcagggtattgtggtggggggtgtcctttttggggctgggatctgcactttacagtttgaggggatgggcagaggaggctgggcttcattctggaggtggggacatggtgaggtgaggtttagaaagcacacctgagccgcagtgtgtaggatgctggaaatggtggagatgggcctgcaaagagagtgctgggaagtgatgacccaggagcagcagccgggcacctaacaatgggtcagcaccgtgggcgtggagacaaaggccgggattgatcaatacccgagaagtacaatgtacaggacttgggctccatttggatggagtgggtgagggaggagtcagaaatggcttccgatttccagcttgggcctggggattggagatgtccccactgagagtagggcacaagtgaggaaatggtttggagaggaagatgataagttacatcatggatgtgctgagtctgagttgcctatgggacttggaatggggggtggcaaaaggtgtgtgatcttgagcaagatattcaactcttctgggccttggtcttctcatttgtaaaacggtgataagaatattacttcccatttgtgttgctgtgaatattaaatgcgctaccacatgt

SEQ ID NO: 1501 - DNA, 3678 bp, Homo sapiens
agcccacgttcactattgaacacaacggaagggggaattattgtgcttcttgctttgattcccaagctggtgttgtctgagcctgtctggcatgtgctctgcctgccctgacttctgaccccaggaggagcattcaaggagccaaggaatgggtccaggcattgtgctagtatctagccatggcaagatgctagatctaaccatgacgagagcagctaagatcggactgtacctgagtgagcccattgaatcctccaccagcaccacacggggtttctattgtttgtctcagctgcagcaacataatatgagacaagggccaagaactgcagaactgtgcacggtgtttagaagaggctgcgagctgctgctctgcagagttgggaggtgctttcgggctctgcaggctccctgcaggcccttgctgactgtccatggcctgcacctgccctacctgctgagctgccccatcagctgctcctggctgtggtttcctgaggggtcccgtctgcatcggctgccctgtgtcctgacactatggtgggtttgcaagtggcaaagtccagggaaggagactggggagcatggccatgggtcatccggggggcacggagggttccggctcccgcccaggtccacctgcttcatcagcagtggtcaccaagattgcataaccaggacgatgacaacgctgagagctctgttgcagttaaagacttaagaacaacttgtgcctgctgactaatacattttatcacccaggcagcgtcaggactctgagagcctctcacatgctgctgtcatctgagcgagacctcaagatttgtcatcgagcaggctgacccttgcctgaatggacctcacattcttgaggcagggagagatctgcaatcagcatgatcgatcagcgattttcataagacgttagaagtcatcagagcttaggaaacagggtgaggaagtaggggaggagccggaagggcccccatttaaaacaaggtggccaggataggcctctctgtaggggtgacattgaagaaatggtgggagagggtgtgaggtgcacatctctgagggcagagtgttctggagacaggaaaccatctgtgcaaaggccctgtggtgagagggtgctaggagctagcaagcccagtctactcaacacagccatcattttaaaacctcggtgagccctgtcccttatcttctgaaccccctcccacagaagcggatgtcactgagagtgaaagctgcagtgtagggtggcctcctctgcacaccggccctggccctctgacctcttctaccccatgatggtcccctgtcagctgggtctagagtggaccgtcggggcagacctggaaggggaaggctgtcaagttcctgctcccctgtgacatacagcaacacatttgtttccccctggattctggggatcagcaacatgtgcgggtgggggcagggcagtcctgctgctctgggatgggctgccccctcagggaggactggccagctgggtggctctgctcctggagagtgaccggccatttgctgggtggatggggtgactgtcctgagagcttggcaccaccagaagtgtagtccacgcagcccttcacaggtggctcagggtgcccagcggggcaagaggtggccctcaagctaagcttgagcttaagcctaagcctaagcttgccacgcttgggctaggatgccaagtctccatgctggctgctggtcacagctctgtccctgtgggagaagacgactgaagcctggccaggctgggccatctccccagcagccaccagggcttgctgtgagatgtgggagccatgctagggtcctgccccggggatgttggtaggcatggtgggaagcagtgcaattatggatattttctggagataatcatcaacaggatttgctgatggaatggacctggaatacaagaagaaaaggaatcaaggatggctctgaggttcggggcttgagcaacttggatgggggtgctgctgagtcaggtgggaggggagcaggctcaggggatgcggactccatttgaagtggccgcgttggagatgtctgtggacatccacgtgaaatgctgagtggccagctggacatgtggatctggtgtccagggggaagtttgggctgcagatacagatttcaccaggacatatttttagtgatgcatagactgaccaggctcgaaagaagcacagggtgtgcagccccattctggtaagcgtgtctctgcctttactgaggtgtctccactgcatccttgatttaatggaattcaactgaaccatcattgagcatctgttgtatacgatgtactctggaggcataaaaactattgggagaaatgaggaagtaaataagtaatattgatataattcttctattaataagaatcaatttatctgaaaacaaaaagtctcttaagcatttgaataaaatagaaagcctttattaacatatgaaaataaatccatacccataaataaaaatctgcacactcacgggtgctgaccagtatatcctagctcaccagcacagtgggctgggtgtggagaaggtgggcattcagctttcacatcaggcagagggagccttggagcggagggtgctggctcaggactgctggccaagcccatggtggagtcaggccggcctgcagttggacactcttgactgattaaacattaataggcaattctaacaaaaacagagaggatggcaactccataggaaggagggccacatgtgggggtgaattccaagtcaaacattttccccaaagaatttgttgttaaacttttaattttgagataactgaagattcacatgtagtggtcagatataatatagcatgatcttctgtgccttttacccagttttctccgtcataacatctgcaaacgtagcactatattacagtatctcaaccagtgtataaatgcatacactcaccagtgtcactggggttcctccagtctcagttcatttgtgtgcatttattttccgtaactgtatcactgctgtagagtaggatggccaccttgacagtcaagaggcagaacagctccacacgagggttcctgtcttccttgctcctggaaccattaatctgctctccgtctctacaattttatcctttgagactgttacataaacaaaaccacacagtaacctcacaaggcatttttgcactcagtaaaatgcccttgagacccattcacgttgctgtgtgtatcagagcccgttcctttccatagctgagccgtgttcctggtgtggacacaccactgtttaatcagtcatcgtcgaaggacggctgccttgtcccccattttcgaccattacaaatgaagcttccatgagcattcatgtacaagtttctttgtgaacttaagctttcaagaaattaaaaaagaaatgttttcaaatgcttgagcaaatagccaagatcccagggcaccgtgggaaagtgtggaagtgaggattttttttttttttttgagatggagccttgctctgcactccagcctcggggtcaagagcgaaactctgtctcaaacaaaaagaaagaaaggaaggaaggaaggagggaaggaaggaaggaaagagagaaagaaaagaaagaaagaaagaaagaaagaaagaaag

SEQ ID NO: 1502 - DNA, 3823 bp, Homo sapiens
ttctgatttcttgtaaaaatattttgtatgtgtgaatgcatactgaatgtaaagtggataaaaaactcacacttgcactcatggaaggcttttcatgaatttgtcaatttttattttttatatttccccacttcaccagataatgcatacctgaacctggaaactgattcccactgcagaaagtgttctgagccacatcccttagcttcactagtgcaggtccacctgggaggatgtcccagcatcagcttgacccatgctgtgatcagccacctccatgcatcacaccaagcaagcccctgggtgattcacagtctccaccaccagggcactgaccttaactctgtgtttttctagctccccatgaggacaccgtacacgacatcactaacgaggacgccacacacgacatcgctaacgaggatactgtacacgacatcgctaacgaggccgccgacaagggcatcgccaacgaggatgccgcccagggcatcgccaacgaggacgccgcccagggcatcgccaaggaggacgccgcccagggcatcgccaaggaggacgccgcccagggcatcgctaacgaggccgccgacaagggcaccgccaacgaggatgccgcccacggcaccgccaacgaggacgccgcccacggcatcgccagcgaggacgccgcccacggaatcgccagcgaggacgccgcccacggcatcgccagcgaggacgccgcccagggcatcgccaacgaggacgccgcccagggcatcgccaaggaggacgccgtccacggcatcgccaacgaggacgccgcccagggcatcgccaaggaggacgccgcccagggcatcgccaacgaggacgccgcccagggcatcgccaaagaggacgccgcccagggcatcgccaaggaggacgccgcccagggcatcgccaacgagggcgccgcccagggcatcgccaaagaggacgccgcccacggcatcgccaacgaggacgccgcccagggcatcgccaacgaggacgccgcccacggaatcgccagcgaggacgccgcccagggcatcgccaacgaggacgccgcccacggaatcgccagcgaggacgccgtccagggcatcgacaaggaggacgccgcccagggcatcgccaacgaggacgccgcccagggcatcgccaaagaggacgccgcccacggcatcgccaacgagctgtatacgacatcgctaacgaggacaccctacaagccgtcgctaacaagtacactgtacacaacatcgctaatgagggcactgtacaagacatcaccaatgagggcgctttatacgacattgctaatggcaccgacaaggcacgctaacgtggacgctgtacacgacattgctaatgaggacagcgtataagacatcgctagtaactatcgcaagaacaaaaaaccaaacaccgcatattctcactcatagatgggaattgaacaatgagatcacatggacacaggaaggggaatatcacactctggggactgttgtggggttgggggggggagggatagcatcgggagatatacctaatgctagatgatgagttagtgggtgcagcgcaccagcacggcacatgtatacatatgtaactaacctgcacaatgtgcacatgtaccctaaaacttaaagtatatatatataaaaaaagacatcgctagtgagcacgctgtatacgacatcgctaatgaggacaccatacaaggcatcgctaacgatgacgctgtacacaacatcactaatgatgacaccgtataagacatcgctaattatgacgctgtatacgacatcgctaatgacaccgtacaaggcacgctaacgaggatgctgtacacgacatcactaatgaggacagtgtacaagccatcactaatgaggacactgtatatggcatcgctaacgaggacactgtacaaggcattgctaacgagtacgctgtacacaacatcgctaatgaggacaccatataagacatcaccaatgaggatgctgtatatgacatcgctaatggcacccacaaggcatgctaacgaggacgctgtagacgacattgcttataaggacaccgtacaagacatcgctaacgaggacgctgtatacgacatcgctaatgaggacgttgtatatgacatcgctaatgaggatgctttacaagacatagctaatgaggttgctgtatatgacatcgctaatgaggacattgtatatgacatcgctaatgaggacgctctatacgacatcactaatgaggacgctgtatacaacatcgctaatgaggacgctgtatatggcatcgctaatgaggatgctgtatacgaattcgctaataaggacgctgtatatgacattgctaatgaggacactgtacaagacatctgtaaaaaagaagatgctgccaatgagccattgacactggagaatgatacgtaccctgaaataactcacttcctgaggaaaaagcgccatctctagggtacagaaacctgattctgggctccttttgggaaggaggatttggggtctggtgagagcaaatgattttgcaagtataaaaccatgtccagagaggctgtagggatatctgtgagcccagaggaaacaccaggggatcctgtgcgaagcaccatggcttcagctagggtgggaggagtgggtgggcctctctctaatgacttatcctggtgtttgtgtttctaaagatttgattgtggagagcatatctgatgatggggatttgtaggtaggtaactgctttccacgtaagatccaattggagagagttcccaggggccttcggggtatccatgctgcttgggaggttaagggagggggcatgaaatcaaaacgaaacaggaaatatgtgtcatattggatttggtcttttccgggtttattggcataatagttggaactgtctctctgggctatgagggtgctgtgttatttaaaggtggtctttcccagaacacctggccttttcttttctgcctctgccaaacatcacagcctttgggttggattagtcagcaccccttgggattgtgcagaagaggtttggggttgcatcgagtgtcacctgtggtgaacagaatctgagggacacaactctctcacaggcacttcctccaacctggagacagagttctcctggtgtgtgcccaggggtggaggagaaattgacagtctgcctctgaactttcaggactttaaaaagcactcatgtttccatcctcactgttgactcctggcttaaagggatctcccggggtgagtgaggaggcgggatcggaccctggcagtctgacggcagcacctgtgttcctctgcactgggccgtggatgacattacacaccttgccactcccacggtcctgtgtgttccggatattttaaaataatggctataaggttgagcacttcaggatacgctgttttgctgtgtgcagatggaggcagtggctggagtgaatgaacggcaacacttgctggcaaccggcagaagctgagagacagggaacaggctctcctccagagcctccaggagccaggcctttggacaccttgaatgtgggcttctgggagaccatgcgtttctgttataagcagcccagtctctggcagtttttacggctgccccggaacactcatctatacctgtctgacaaggtcaagctccaaggaagggactctctacatatctacattgtttgcagattttacaataatcatttattcttgcatggctgatcattgttaaccaatacaaataaaataataaagaaatgacccac

SEQ ID NO: 1503 - DNA, 4856 bp, Homo sapiens
attcccacgccaggatcgatgtttggccccagcgtggaattcacctcggtgctgaagccagtctttgctcgtgagaaggaacccttctccctgtcatgcttgttttcggaagatgtgttagatgctgagagcatccagtggttccgagatgggagcctactgaggtcctcgagacgtcggaagatcctctacacagaccgccaggcatccctgaaggtgtcctgcacctacaaggaggacgaggggctctacacggtccgggtgccctcgcccttcggaccccgggaacagagcacctacgtgcttgtgagagatgccgaggccgagaaccccggggccccaggctccccgctgaacgtccgatgcctggatgtgaacagagactgcctcatcctgacttgggccccgcccagtgacacccggggcaaccccatcactgcctacaccattgagcggtgccagggcgagtctggggaatggatcgcctgccatgaggcccccggagggacttgtcggtgcccaatccgaggcctcgtcgaaggtcagagctatcggttccgggtgagagccatcagcagggtaggcagcagcgtcccctccaaggcctcagagttggttgtcatgggtgaccatgatgcagcccggaggaagacagagatcccctttgatctgggaaacaagatcaccatcagcacagacgcttttgaagatactgtgaccatcccctcaccgccaaccaatgtccatgccagcgagatccgagaggcctatgtggttctggcctgggaggagccgagcccccggggcagagcaccactgacgtactccctggagaagtcagtcataggtagtggcacctgggaggccatcagctcggaaagccctgtgagatccccgagattcgccgttctggacctggagaaaaagaagtcgtatgtcttcagagtgcgagcaatgaaccagtatggcctgagcgatccctcggagcccagcgagcccatcgccttgcggggcccgccagctaccctccctcctccagctcaagttcaagctttcagagacacacagacctctgtctccctgacatgggatcctgtgaaagacccagagctcctgggttattacatctactcccggaaggtggggacatctgagtggcaaacagttaacaacaaacccatccaaggcaccaggtttacagttcccaggctgaggacggggaaggagtacgagttttgtgtcaggtcagtcagcgaggctggggtaggcgagagctcagccgccaccgagcccatcagggtcaagcaggctctggctaccccgtctgccccatatggctttgccctcctgaactgcgggaagaatgaaatggtcattgggtggaaaccccccaagcgtcgtggaggtggcaagatcctgggctacttcctggaccagcatgactcggaagagctggactggcatgcggtcaatcagcagcccatccccacccgggtctgcaaggtcagtgaccttcatgaaggccacttctatgagttccgtgcccgggctgccaactgggcaggtgttggcgagctgtcggcacccagcagcctgtttgagtgcaaagagtggacaatgccccagccaggccccccgtacgatgtacgggcatccgaggtgcgggctacatccctggtgctgcagtgggaacccccactgtatatgggggctgggcctgtcacaggctatcacgtcagtttccaggaggaaggctctgagcagtggaagccggtcaccccaggccccatctctggcacccacctgagggtttccgacttgcagccaggaaagagttacgtgttccaggtacaggccatgaattcagctggtctggggcaaccgtccatgcccactgatcccgtgctcctggaggacaagccaggtgcccatgagatcgaggttggtgtggatgaagagggctttatctatttggcttttgaagcccctgaagcccccgactcctcagagtttcagtggtccaaagactacaagggcccactggacccccagagggtcaagatcgaggataaagttaacaagtccaaggtcatcctgaaagaacccggcctcgaggatttgggcacctactcagtcatagtcactgatgccgatgaagacatctccgcaagccacacgctaaccgaggaagagctggagaagctgaagaagctgagtcatgagatcagaaacccagtgatcaaactgatctccggctggaacattgacatcctggagcgaggggaggtgcggctttggctggaagtagaaaagttatctccagccgctgagctacatctaatcttcaacaacaaggagatcttcagctcgccgaaccgcaaaatcaattttgaccgagagaagggcctggtggaagtgatcatccagaacttgtctgaggaggacaaagggtcgtacaccgctcaactccgagatggaaaagccaaaaaccagattaccttgacactggtggatgacgattttgacaagcttctgaggaaggcagatgctaagagaagggactggaagagaaaacagggtccctattttgagcggccgttgcagtggaaggtcacggaggactgccaagtgcagctgacgtgcaaggtgaccaacaccaagaaggagactcgctttcagtggttcttccagagggcagagatgccagatggtcagtatgacccagagacgggaacgggacttctctgcattgaagagttgtccaaaaaggacaagggaatttacagagcgatggtttctgacgatcgaggggaggacgacaccatattggacctcacgggtgacgccctggatgccatcttcaccgagttgggcaggattggtgccctctctgcaactccactgaaaatccaggggaccgaggaagggatccggatcttcagcaaggtcaagtactacaacgtggagtacatgaaaaccacctggttccacaaagacaaacgtctggagagtggtgatcggataaggacgggcaccaccctggatgagatctggcttcacatcctggaccccaaagactcagacaagggcaaatacactctggaaatagctgcagggaaggaagtccggcagctctcaacagatctctcagggcaagcttttgaggatgcaatggctgaacaccagagactgaaaaccttggccatcatcgagaagaatcgtgccaaagtggtgagaggtctgccggatgtggccactatcatggaagataagaccctgtgcttgacttgcatcgtctcaggagaccccacccctgaaatctcttggctgaagaatgaccagcctgtcaccttccttgaccgataccgcatggaagtgagggggacagaggtcaccatcaccattgagaaggtcaacagtgaagacagcggccgctacggcgtcttcgtcaagaacaagtatggctccgagacgggccaggtcaccatcagtgtgttcaagcacggggacgagcccaaggagctgaagagcatgtgacagcgtgtgtccaggcacagtctgagtctagtctgcatggaccagtagggacaacctgtaccagggtcacagcctggcacaggctacaggggtggggcagaaggaaaggggacaagatagaacccaggatgtgagggtgggggtggagcggatgcaccaaagtggagaagcaaagatctttctggggtcctgagtggcttccaggagagcgggatgaaccctggacctggagtaggagacccggatgcactggggctatctaacagtactggcatctgataggtagaggtcaggtacgctgctaaacactgcagctcccaccacatagaattatccgaccccagatgtcaaaagtgccaagggccatgagccctgccataaactgatacatcgcacccctcttttaggatcccatagtttcaattcatgtaagttcaacagacacctgaagtctagcatgtgggaggctaaggatggagctgggaacacaaaggcagctgataagcaggttctgcttgcaaagaggcctcagtccagtgggagaaacagacctgggcgcaaacaactccaggacaaggcaggacatgataaagattataaagcaggtccaaggaaagtgccgccagtggtccaaggagggagacagagggtcgtcccaacagggggaggtagggctttgaaaacaccttcatccaggctgggcgaggtggctcacgcctgtaatcccagtagtttgggaggccaaggcgggcagatcacctgaggtcaggagttttagaccagcctggccaacatgacgaaacccggtctctactaggaatacaaaaattagccaggcgtggtggcaggtgcctgtaatcccggctattcagaaggccgaggtgggagaatccgttgaacctgggaggcggaggttgtgatgagccaagattgagccaaaaaaaaattagcagaattggtgttgggccctgaaaaattagtccgattttgtggtggtaatgggagaaggacatcccaggagcagggtctggtgggaggaaagggaaggaggaggctaaggctgcccaggaggccttggataccaggcttggagctggtaacctccagggcttccagcacggggcctctgcctggtgtgacagataccggctggcctcacttgatggatctcagtactgagctgggcatttctctgccccccaacttttttctttttaaaaataagatggggagtgttcataaaattatagatgtttgttgtaaaattttggaaaaccctggaaattatagagaaaataaacataatctatactcccaac

SEQ ID NO: 1504 - DNA, 3273 bp, Homo sapiens
aagatgtctaatttttctgccactcaccagttcccagaatatgaaagcagcaattttgtctcctttctcaactcttccttatgtgccatggattctgttttcttcttcttctttttttttttgagacagagtcttgctgcagtgtagtggcgcaatcttggctcactgcaacctccacctccgggactcaagcaattctcgtgcctcagcctcccaagtagctgagactacaggcgtgcaccacaacgcccggctaattttttgtattttagtagagatggggtttcaccatgttgccctggatggtctcaaactcctgatctcaggcaatccgccagcctcggcctcccaaagtgctggaattacaggcgtgagccactgcgcctggcctatttctttttcttttttaaagagacagggtcttgctttatcacccaggctggagtgcagtggcatgatcatagtttactgcagcctcagactcctgggctcaagtgatcctcccacctcagcctcctgggtaactgggaccacaggcctgtgctaccacacctggctaattatctgtattattattttttgtagagatggggtcttgctatgttgcccaagctgacctcaaactcctggccttaagcggtccttctgcctcagcctcccaaagtgctcgaattacaggcatgcatcaccatgcctagcttattttttactttttgtaaaaataagatctccctgtgttgccctggctgtcttgaattgctgggctcaagccatcctcccatctcagccccccaagtagctgggactacaggagtgcaccatttccaagctttttttcttcttcttcttgttttgctcttgtcgcccaggctggaatccagtggcgcgatctcggctcactgcaacttccgcctcaggggttcaagcgattttcctgcctcagcttcctgagtagctggaattacaggcacccaccacctcgcctggctaatttttgtatttttagtagagacggggtttcaccatgttggccaggatggtctcaaactcctgaactcaggtgatctgcccaccttggcctcccaaagtgttgggattacaggcatgagccactgagcccaattactatttttttactcaaaaccgcacacacaccttccaccccctcccccctctccattttccttcatagggaaggatgttgctctctgatattctactgtcaatgctttattccaattttcttcccctctctttccaccctagactgcctgctccgaggggccagggatctctgtccatcttgtgctcggctgtatccccagtgccttcagtgacgcccagcacatggatggcgaccacagagaagccagaattgggccctgctcatgatgctggtgacaacaacatctatgaagtgatgccctctccagtcctcctggtgtcccccatcagtgacacaaggtccataaacccagcccggcccctgcccacacccccacacctgcaggcggagccagagaaccaccattaccaggtatggagttgggagctgggaggggtggtggggatcccacggatccaggagccccgaagccggggtggggaggggtcaagacaactgaaactgggggctttcctcccctcgtccccccaagcctcacggtctctgctctcgaagaagcccaaaccgcctccctgagagaccctggcaagtcccttttcctcccaaggctgcaatttccttctttgcaaaagggatccaaaaccttgaacttgcacaggaggaacaaggcccagagagggacaggggattgcctggggccacacagccagtcaggtccccagtgaaaccccaccgcagagctcagtccctctccatcccctcctgtcagctgtctgtccctgtagttctgtctctctctctcagtggcctacatatgtctgtatgtctgtcttcccctttcttggactctctctctctctctctctctctctctcagtttctcttgctgtgtcctttttaatctgtctttctgtttccagtttgttcatgctgccttgtctaagatgcatctctttacatgtcttcgtttctctgcatctctgtctctctctctctccattctctgtctctcctgcctctatgtctctgtcactgtgtccacctcatttcttggctcttccaggacctcttgtctctgcatctcactctctttccaccttgctcttccattctctctgcgggtttctctccatctcacgctgtctctcatcctctgtccctctctgtctccccaagactctccccctccacccagttataattctgttctctcttccccccaagcaggacctgctaaaccccgaccctgccccctactgccagctggtgccaacttcctgatgggtcctgggccaggccagccagggagaagacaaggccccagccctcctctgggagcctcacacctgagaccagcaggacaaggccattgggggctgtggggccgatgaggtggactcagccaaagactcagcagcacatggggcaggtgtcctggcagggggacaggagactgtaacaggcccaggtccttgtgcagcccctgaatgcacgcccgccttcggtctgttccttcaagcaagctggcctgggccatgtgcctgtgaaaggcaggctctggcccctttccatgccaaagtcccccaagatctggatatctggggacaagatggtggcctcaggcctgcctcccaggcagttggctgggctcccaactgtctgtcctcaatgccctaccccaactccactagtgaccctcagagtcttctccccttaggacaaggcagacaccccaccatgcgggcctcaggtggcagagaggcccagcctcacaggcctgtggccccacacaccagtcccagcaaggtgaccacggctgccggaccccttccctgttcaggcaggcccagcccctctcagaacctgctgccagctgctggtcttggcccccaccctgaatcttactgagtccctctgggcagcagctcccttctccaccccaccccagcacccgtcccaaatgtggcctcagcttgtcctccccttccccaaactatgcattcattcagcaataaatgagcctttgctgtatgccagacccagttctaggctcttgcagccctggtagaaagcaaaacaaaaactcccgctttcccagagggtcacttggcaggggaaagaatcaggaaataaaataaataatgaac

SEQ ID NO: 1505 - DNA, 3128 bp, Homo sapiens
aatgtcccctgagaagtttaaccatttgaaagatgcacaagagattatcattcagcagttaactacccctgaaaatgatgaactttctccacttgctcaaaagcccacaacttggtctccagctcagctctcctcagacattgtaagtccattgaatgatgagatggaatttttcacctgaagatctgtcttcaatattcagaaataattcaactttgcctaaaatcacagttaaaaatgtggatatagagtttaccatacctacagcagtcactatagaggttgaaccttctccagtccagcaggacaaccctcctatttccagtgagcaggctgacttttctctagcccagcctgattccccttccctacctctggagtctcctgaagagagtgaatcttcagcccagcaagaggctacagctcagactccaaatccccctaaggaggtagaaccttctccagtccagcaagagtttccagctgagccaacagagcctgctaaggaggttgaaccatctgcaacccagcaggaagcctcaggtcatcctctgaagtccacaaaagaggtcaatcctccaccaaagcaggagataccagctcagccatcagagccacctgagaaggttgaactatctccagtcctacagcaggccccaactcagcttttagagccacttaaaaaggtagaatgctctccagtccagcaggcagtccctgctcagtcttcagagccctctattgtggtagaaccctctccagtccagcagatagcccatctttgcctccagagctccctcaggaagtggaaccctctctaactcagcaaaactttccagctcagactccataccccctatggaggcagagccttctccaaaccagcaggaggccacagttcaggcttcagagccccccaagaatatagaactttcaagccagcagatggtcccaggtcagcttccagagccacctaagcgggttgcagctcaacatccaatgcattatgagatgataatttcaacagcaaggcaggaccaggctcagtatccagtgtcacccagtgtcacatttcaacctttagacctagggcttactataactccagtatccacaaaggaggctgagcattcgacaaccctgagaaaaactgcagttcctccaaaacaccctgaagtgactcttgcaactccagaccatgtgcaggctcagcacacaaacctaactgaggtcacagtttaaactttggatctgaaacttaccacaactccacaacctactgcagagaatatatttcctccaaccatggagaactcaaatcaacttccagaaccacctacggaggttgtagctcaacttccacctcgttatgaggtgacaattccaacacaaggtcaggatcaagctcagctttcaacactggccagtgtcacacttcaacctttggacctggggtttatcatcactccagaatccactacagaaattgaactttctccaaccatgcaggagaccccaactcagcctcctaaggaatttgtaccccaacctccagtatatcaagaggtgagtgttccaacaccgggtcaggatcaagctcagcatccaatgtcacctagcgttacagttcaacctctggacctggtggacttaccataactccagaacccactacagaggttgaacattctacacccctgaaaaagactacagttcctccaaagcaccctgagatgacacttccacatccacaccaggttcagactctacattcaaacctgattcaagtcacagttcaacctttgggtctgaaacttaccttaactctatggaggttgaatcctctatggaggttgagccttctccaaccatgcagaagaccccaactcggcctccagagctacctaaggagtttgtagctcaaccgcctgtgtattattatcagatacccattccaacaccaagccaagatcaagctctgcccttctacagccccgatgactacagctcctcctccaaagcatcctgaaatgacacatccacctccagacaagaaccaggctcagcatccaaacctgactcaattcacagttcaatctttggacctggagcttaccataactacagaacctactacagaggttaaaacttctccaaccatggaggagacctcaactcagccttcagacctgggatttgccatagttccagaactcaccatagagactgaacattctacaggcctggacaagactacagctccacatccagaccaagttcagactcagcattgaaacctgactgaagtcacacatttcaccttctgaactagaacctactcagaattcactggtgcagtctgaaagttatgcccaaaataaggctttaactgcacaggaggaaccgaaggcctctacaagcaccaacatatgtgatctctatacctgcagagatgaaacactctcatgtattgatctcagcccaaagcagaggctccaccaagtgcctgtaccagagcccagcacctgcaatgacaccttcaccatcctgtgagaatcgtctttcctcaattgttctgtgtcctgcctgacatgacagccttttcgtggaggccttcctgggcctcctttatctcaccaaaccgaactgacaacggactttctgctttcacctttcttgtcaattcttccttctcctggttctcctttactgttaggccccttctctggtcttttacttgtgattgctcttaacccttttcttatccactttcctttagccccatcacatcattgcttaacagcggctctcctcccattttcacttcaccctctttacagcagcctgtccctcttcccatctcagtgatgatgctctaagtggttaagagttgattctgtagccaggctgcctgggtttgaacccaggtctgtcatttattagcttggttaccctgagcaagttattcttctctgtgactcagtttcctcgtctttaaactggggattatgctagttaccatgccataggattgttgtgagatttaagtgagtgcatacatgtattgcttacatcggtgcctagcatatgtgggagtgttggctgctaacatgattactcagtccttt

SEQ ID NO: 1506 - DNA, 1468 bp, Homo sapiens
gtctctgtctcggcttctctcggcccctgggtctcttcgtctctgccgttctcaggctcagctccgtctcgctcggtccctcgcttccccgccgggctctagccggccgtctggtggcccgaggtggcggcgggctgggcgcggggcgcgatgagcggcgcctgcacgagctacgtgagcgcagagcaggaggtggtgcgcggcttcagctgcccgcggccggggggcgaggcggccgctgtcttctgctgcggcttccgcgaccacaagtactgctgcgacgacccgcacagcttcttcccctacgagcacagctacatgtggtggctcagcattggcgctctcataggcctgtccgtagcagcagtggttcttctcgccttcattgttaccgcctgtgtgctctgctacctgttcatcagctctaagccccacacaaagttggacctgggcttgagcttacagacagcaggacctgtgcaggttgccacaaacaagaggaatcagacagttctcaccctcaaggggctcacatggaggacaaggcaggcacacaaatggccaggaggcccagtggtggcccttcatggggctttagggaggaagaaatgatgtctgagctgaatcatcaaagatgactcaaagtttccaggtggttcctaacttcctggcaacaaccacaattgtaattcgttcaaagagattgactgctgtggagacagatcatcaccatcaccatcaccatcaccatcaccaccaccaccatcatcatcattgtcatcgtcatcattatgttgcttttagctcactggagcctcacagaaccctgtgagcttctctgtgtcatagccccgaccacactggattgtcattttctatgtgtccatctcgccattatggactgttaattccagggcatggacagaccttcctcagaggaggcctcagcaagtgtcagccacacgaatgagtgtatggagcaaaggaggagtgaacgtctaggagaccagccgttaccccaactcctccccatccgctcctactctggactccaatctatgccctaccccagctcttggatttggcctttggatcaggttcttctggtaatgaagcctcacctttcccccaactaactctgatctggcctaccctgctcctgactaacctcaaggatcctgagtctccttcagcctaacagctccagaagctgaactccagccctaagagccccagctgcagacaggcctctggccaagagcttagtcaggctaccctgactaagccacagggttggcatgccctctgggcagcccctgaaccgggctctgaaaacacaggaatggacaaggtaatctacccgagtcctgagcctgcaaggtagttgagacagatcttgaaggagagtgggcacagtcagaaaggaaaaagtggctcagtgtaaaataaaactgacacaagcccatgt

SEQ ID NO: 1507 - DNA, 3068 bp, Homo sapiens
agccgggagctgcggagctggagggaggaggacgagagcccggccctcagcccgctgtgactctcctcagccccctcccccagcccggggtgggggccgattgactgtttccaggaccccctcgggtaggggggctggagagcccccaggtggaccatggcggtgagattccaggtggctgacatggaggagctgaccatctgggaacagcacacggccacactgtccaaggacccccgccggggctttggcattgcgatctctggaggccgagaccggcccggtggatccatggttgtatctgacgtggtacctggagggccggcggagggcaggctacagacaggcgaccacatcgttatggtgaacggggtttccatggagaatgccacctccgcgtttgccattcagatactcaagacctgcaccaagatggccaacatcacagtgaaacgtccccggaggatccacctgcccgccaccaaagccagcccctccagcccagggcgccaggactcggatgaagacgatgggccccagcgggtggaggaggtggaccagggccggggctatgacggcgactcatccagtggctccggccgctcctgggacgagcgctcccgccggccgaggcctggtcgccggggccgggccggcagccatgggcgtaggagcccaggtggtggctctgaggccaacgggctggccctggtgtccggctttaagcggctgccacggcaggacgtgcagatgaagcctgtgaagtcagtgctggtgaagaggagagacagcgaagagtttggcgtcaagctgggcagtcagatcttcatcaagcacattacagattcgggcctggctgcccggcaccgtgggctgcaggaaggagatctcattctacagatcaacggggtgtctagccagaacctgtcactgaacgacacccggcgactgattgagaagtcagaagggaagctaagcctgctggtgctgagagatcgtgggcagttcctggtgaacattccgcctgctgtcagtgacagcgacagctcgccattggaggacatctcggacctcgcctcggagctatcgcaggcaccaccatcccacatcccaccaccaccccggcatgctcagcggagccccgaggccagccagaccgactctcccgtggagagtccccggcttcggcgggaaagttcagtagattccagaaccatctcggaaccagatgagcaacggtcagagttgcccagggaaagcagctatgacatctacagagtgcccagcagtcagagcatggaggatcgtgggtacagccccgacacgcgtgtggtccgcttcctcaagggcaagagcatcgggctgcggctggcagggggcaatgacgtgggcatcttcgtgtccggggtgcaggcgggcagcccggccgacgggcagggcatccaggagggagatcagattctgcaggtgaatgacgtgccattccagaacctgacacgggaggaggcagtgcagttcctgctggggccgccaccaggcgaggagatggagctggtgacgcagaggaagcaggacattttctggaaaatggtgcagtcccgcgtgggtgactccttctacatccgcactcactttgagctggagcccagtccaccgtctggcctgggcttcacccgtggcgacgtcttccacgtgctggacacgctgcaccccggccccgggcagagccacgcacgaggaggccactggctggcggtgcgcatgggtcgtgacctgcgggagcaagagcggggcatcattcccaaccagagcagggcggagcagctggccagcctggaagctgcccagagggccgtgggagtcgggcccggctcctccgcgggctccaatgctcgggccgagttctggcggctgcggggtcttcgtcgaggagccaagaagaccactcagcggagccgtgaggacctctcagctctgacccgacagggccgctacccgccctacgaacgagtggtgttgcgagaagccagtttcaagcgcccggtagtgatcctgggacccgtggccgacattgctatgcagaagttgactgctgagatgcctgaccagtttgaaatcgcagagactgtgtccaggaccgacagcccctccaagatcatcaaactagacaccgtgcgggtgattgcagaaaaagacaagcatgcgctcctggatgtgaccccctccgccatcgagcgcctcaactatgtgcagtactaccccattgtggtcttcttcatccccgagagccggccggccctcaaggcactgcgccagtggctggcgcctgcctcccgccgcagcacccgtcgcctctacgcacaagcccagaagctgcgaaaacacagcagccacctcttcacagccaccatccctctgaatggcacgagtgacacctggtaccaggagctcaaggccatcattcgagagcagcagacgcggcccatctggacggcggaagatcagctggatggctccttggaggacaacctagacctccctcaccacggcctggccgacagctccgctgacctcagctgcgacagccgcgttaacagcgactacgagacggacggcgagggcggcgcgtacacggatggcgagggctacacagacggcgagggggggccctacacggatgtggatgatgagcccccggctccagccctggcccggtcctcggagcccgtgcaggcagatgagtcccagagcccgagggatcgtgggagaatctcggctcatcagggggcccaggtggacagccgccacccccagggacagtggcgacaggacagcatgcgaacctatgaacgggaagccctgaagaaaaagtttatgcgagtacatgatgcggagtcctccgatgaagacggctatgactggggtccggccactgacctgtgacctctcgaaggctgccagctggtccgtcctccttctccctccctggggctgggactcagtttcccatacagaacccacaaccttacctccctccgcctggtctttaataaacagagtattttcac

SEQ ID NO: 1508 - DNA, 4234 bp, Homo sapiens
ttttgattgaatagatttaatctggatctcacgtgggggcacagtttcttttagaaattttaactcgtggttcagttaaaaatctcatgatttttcaacttttgtctgtttagtttgagaaatgctccctattcagttgggttcctctagctgctgtggttgggctggctctcaaggtttccagtgtgtgtcatgtcccaaatccaattctcatccttattcttttgacacatttgacactattggacctctttttctctctctctctctctcttttaaagagacagggtcttggtctgttgcccaggctagagttctacggtgcaatcatagctcactgcagcctccaactgctgggggcaagccatcttccttcttcagccttccaagtagtagggactacaggtgcgcatcaccttgcctggctacactttaaaattttcgtggaggtctcactttgttgcctgggctggtcttggcctcaagtgatcctcccacctcagcctcccaaaatgttgggattataggcatgagccactgcacccagcccctccctttctccttgaaacttctttcctcttgacttctggggttactcctctctttgggagttccccctgcctcactggctgatatctgtccttttttttcttttctcatttcttccttctaccagtccaaaatccatgctctgtaacacccatattcaaaaattctttaaaatattttttaataacatatttgacagcaagacctaacttgacctgaaattattcagtggaaaaacctgacctaaagtagcaggaggctatttctagcttttatcccaacttagtgtgaatattcatatttttttttgccacagaaatgtttcttccaagatcttgctgggaatgttatgtaataaatcatattatttccaaagtctgaaatattctgaattctgaaacacaccttggtgccaaggaattctgagtaaaacagagcatagacccattcactcagtttcttggtgatctctttcatctggtctcatgactttaattccatctttacatcaatgactcctaaatttgggtgtctagcccagccctctcttctgaattccagactcatctactcagctgcctgctcagtgcctctgcctgcatgactagtgggtgtctccaagacagcgtgttcagatcccatccttcccctccagtctcttcctcctgctgtctcccccatctcaattaatggcagatctatctttcatctgctcaggccatgtacttgaggattgttcttgacactctggcactccacatccaaatctagtggcaaatcttgttggctcctaccttcaaagcagctccgaatcagactgcttctcacccccaacctgtcagcacccttacccagtgctcccttgcctcagtgttctccacctgttctccctgcttcttttcttgcccctacaccctgttttcaacagagtgatgcttttataatgtgggtcaaatcctggcactactctcctgcaagccatttattcattcattcattcattcattcattcattcattttttttagacagagtcttgctctgtcacccaggctggagggcagtggcacaatctcagctcactgcaacctccgcctcccgggttcaagtgattctcttgcctcagcctcccgagtagatgggattacaggcatgtcccaccacacctggctaatttttgtatttttagtagagactattttgccatgttggccaggctggtctcgaactcctgacctcaggtgatccccctgcctcggccttccagagtgttgggattacaggtgtgagccactgcacccggcttcctgcaaggcttttagaagacttcctcttatgctcagacctcaccattggatacagagcattgcatgacctggaccacctgctatctctcttaccctcttgcctccccttcttgccctttcatcactctgctgtcaccacacggccctccccactgtttctctgttcttcccagatctatacacagccttcaggtctaggcttagatgtcaccgtatgaatgaggcctttctgaccactgtagttcaaacagcaccttccttgtcgctgcatattccccttccctgctttagttctcaccttagtgtatatcttgccatctaacatgctatatagattttacttgtttgtccctctccgagaatataagctctttcactcttttgtcttcaaagaagcttcacagtttctagaaccagaaaatttactggtttgtggtgttgcttaataactttgttgaaggaaggtatacacctgtttgatccaataatcatttattgagtatgcctactatgtgcaagacactctgatagatgctgggcataaaacataaataagacacatgatctctgctttcaaggaatctggagaagacctctgggagatacatatttttgagtaaagcttcaattcaaactgtgctaaatgttataaacagaggtatgtatgtgtaaatttgagatagagttagccacttgaggaagttggggacacttgaattgattattgaagaaagatttcatttacaaagccaaaaagaggtgaaagggaacctaagatgtcagaaacttctgggtatggtagcatgtgcctgtagtcccagctacttgggagactgaagcagggggattccttgagtctcgcagttcgagtccagcctgagtaatatagtgagaccccgtctttatgaaaagaagaagataccagaaatcacatatacataggcgtagagggatgaaaacatcttgtgcttgaggaattgagagtgattgtatgtttctgggctggaagagtgggaaagtaggtttagctaaagctgaggagccttctaatcatactgaagaatttgagctcttcgttgagtattggtgagctctccaaagtttaaagcagagaaaagatgtgatcaaagctatgctttagtaatattctcagaaaatacttagttgatgttctggaggtagaaggatcagtgaggaggcattgcgcaagttcaggactgagacgacaagggccggaatcaagacattggtagagggaatgaagaaggaggagggaacagataagttgttaggcagtattatcaacaaagcttggtggctggttggatatggaatgagaaggagaggaaatatttgggattatgattcaggtgtttctatcttatgtggcacctggataggtgttagtgctgagaggtacagggaaagaagtagaaatggagaggatggtggatgggccttgatttttagacttgctaagttcaagatgactgtgtaacctcaaactgtggagcagtctgcccatcattcacacatgtgtcttcatcttaggagagaaggaaagtgaagataaaatacatgtgagtttacttacaattggatctgaaaaatggagtggttaaggttgcccagggtaagcctgggagatgaagaagaggaaagggccaaggtaagagaaaccctaagaaatggtaacatttaaggagcaggcagaggataaacagcccatggagatttacaaggcatggccagaaggtaaaagagctgctctatagtgcaaaggaagcactaatatgctttgttttttctctccttcaggagaagtttcggtgtccgacatccctgtctgttgttaaagacagaaacctaactgagaaccaagaagaggatgatgatgatatctttgatcccccagtagatctgtcttcggatgaagaatattatgttgaagaaagcagatctgccaggcttaggaagtcaggcaaggagcacattgataatatcaagaaggcattttccaaagaaaacatgcagaagacacggcagaatcttgacaagaaagtgaacagaattagaactagaatagtgaccccggagaggagagagaggctaaggcagtcaggagagaggctgagacagtcaggggagaggctgagacagtcaggggagaggtttaagaaatctatttctaatgcagctccctcaaaggaagcttttaagatgcgcagcctcaggaaaggtaaggaccgaacagtggctgaaggtgaggaatgtgccagggagatgggtgtggacatcattgccaggagcgagtctctgggccccatcagtgagctctactctgatgagctcagtgttctccacctgttctccctattt

SEQ ID NO: 1509 - DNA, 3542 bp, Homo sapiens
gacaattcttgccatgtgggacacttgaggtgagacccggtcctgcttcctaatccacctaccctgctgtgcccggcagatgccacagaccctcctagccaggtgctgatggatgaattcaagaaagaccaagtcctccttgaaagctccctctaggcacacacggggctcctgcccactgcctcactgcctccagagccacaggtccagcgtccccaggtggcccctccacaggggccccaggcacggcacatgctccctcatctatttctggagcctagttacacagtgcacaccgggcctgcaggttctgcacgtgacccccgctgggactgcctaagaaagggagaaggagcgagctgggcctggagcacgggaggcactggccaggccaggcctgggagcaagctggcacctcaggctcagaaaaagggggaagggccagcaaagctgactgggagagggatgacagcaaggtgggagagaacccacagagcatgcagccaggagcagggtagggagaccaggacaggagaggccacctgcgcctcccaggtgaggatggagggtgagctcatctggggagcaggctgcagagtcctgggtccaggcacctcaacagtaatttctaaccagaaatgccccactgcccccagggagatggactcagttatgaggtctgctgtgcgtgattctaaagcatccgctcccctacagacagggcactgggcatgcttgtgttctagagcccacagggctggtgtcaaatcagtgggcaaacagggccaccaacgcccgtgcaagcgtgatgacgttcacaccatgcccacccatcaccccacccaacagtcacgaagatagcgagactcttgctttacaaaatgaagtgctggcccaagagctgtagggacagctaagtcctacaaaccccagggctcccgccaaccagagccaacttgtggccccgacaccaacaggcctccaatgcctccttccacctctgtccccatcctgctgctggtctcagaccctgctccggcttcctcccaccatcccgccggagcaagtggggccaggccctgatggtgtcagcagccttgctgggcaggaggcagccctgggcagacacaccctgtgcgcgcgtcggaagagcaacgcgagaggagagtcaggcacagaaaactcaagactgattcacaggctctaaaaccagcttctcttccacacgcacttctgagactggcgtcagaatccatggaattcaggcagaggacacacccaaggtctagcctgcctgcctgtggagataaacctgagaagacgagtttactcgcttggctgctgaccagatggtctgcggtccgtgtcggcccctgtccgtgcaagagccccgctggctaacggaaccagcacgcggccaccgcaggaacctcacccccggagacgcccaaactcaagggctcagccctgtagctgctgcagctcgttccaacctcaacatgcaaaactcagaggaaacgcagcacaggctgccggtcacgtggagatgacacagactcctggctcccagtgacaggcgacgggggctgaccgggaacgccacgcagcaccaagggcagccctggagtctgcacatcagacacactcaagggagaggccggcggccccacgcagccctctggtgaaggccttctgagcccccggcagcccgagcagtaagggtgccacacccaccacacggggcacagggcagtttcagaaggcaggacaagagggcagcttacctcttggtgttgtaggccgtgtcctgaggtgtttcctccagcagcgtcacatagccaagcgtacaggtgaggatgaagagcacggttaaggtgtgggctcgcctgaaatccaaaaacgcataagcatggtgtcagagcttgggcagcattgctaaatactcacgtaacaggccccaaatcctctctacgtcaaggagagggcttaaactccactctccaactcccaaccagcaactggctgcgagtccctagctgggtaactccgagatgaccctgcgtctgctggccagtcagggctgagaccagcccccaggaggctggacaggaagagccccgtgttcctgggaagctgaaggccgctgctcagagggcacatgctgccactggcgtccagggcaggtatctgctattaagagcaactggacacgtaaaacacgcgcttttcactgcgcaagacaagccgagacaacaactctttgggttcatgaaataacatctgagattcagtgcagcagcccaagacaccaagagctgagaaggggcctgagcagaggcctgcagagtgaccgctgctagctggagtgagccacgagccgtgggtctgcccgtcctctggcctgtcagagcccagacgtgggaggaggaggcagggcgctccctttgcagtcttgtcctgtcccatcgctggtggaaaagcccacaaccagcctagtatcagaactgggggccaccagaccccagccactgcctgtgccagacactcgcctgagaccccctctgcatgaccatctgcaaatggaggcagagacctagttcctacatccatcggagtgtgtcctcggagagatgatgcacccctctgtgcctcagtttcctcatgtctaacccaggtcctacatccaccagagtgtgtcctcacgtctaacccaggtcctacatccaccggagtgtgtcctcacgtctaacccaggtccgacatccaccggagtgtgtcctcacgtctaacccaggtccgacatccaccggagtgtgtcctcacgtctaacccaggtccgacatccaccggagtgtgtcctcacgtctaacccaggtccgacatccaccggagtgtgtcctcacgtctaacccaggtccgacatccaccggagtgtgtcctcacgtctaacccaggtccgacatccaccggagtgtcccctcacgtctaacccaggtcctacattcaccggagtgtgtcctcacgtctaacccaggtcctacatccactggagtgtgtccttggagagatgatgcacccctccgtgcctcagtttcctcatatctaaatggggaagcttctgacttccaaggacatcatgaaaattaagtgaacaatgcacttaaagcatgttgcccaggacttgcctccatgaaatgtaaactatttgtgccctaaagaaatgaaaaggcaagtcacaaactgggagaaaatattcacaatacatatatctgataaaactttgtaggctgcacgcgtctgtagtcccaacgctttgggaggctgagacaagaggattgcttgagcccaggcgttcaggaccagactgggtaacacagtgagaccccatctctataaaaaattagccaggcgtggtggcaggcacctgtagtcccagctactcgggaggtggcagattcgcttaagcccaggttgaggctgcagtgcgctaggatgattgtgccactgcactctagcctgggagacagagcaagatctgtctc

SEQ ID NO: 1510 - DNA, 3104 bp, Homo sapiens
ggacgtttacgctgactcctccagtgcctcatcaatgaagtaagcaggcagctacgttctggatggctagcatgtaccgaaggcacaaaacctccagagttggcagagttaagtcctggcgtgcccgaggctatccaggggaacacgcgggacagacagcaccctcagcctgtccccatgaccctctgctccagtctgaggggcaggacaccatgagacctctcagacacagagtccaccctcgacatgacccggatgaaaggcaggagtgtgtgccctgcttttgccctcgaagctcgctgaaggggacccatctctgcaagcccacagccctacctgcagcatccacagcctcagagagcagcggggccccttacccctgaaccccctccaagagcatcaggacaacaagccttgagctgtggagacaagagaaccagtatccctggcccagggaggattccaggagaggacacgggcaggagccctggcccagagccagaaccaagagtccagccagcgaaactggaactagggtccccggcacccaggactctgcgagcatcccccaacagcaagcccttctgcaagggagacgggttggcccaccccaggctgtccagctccagcagccttgcaggcagcctctccagaaaaagagcctggtcctccccaccctgctccccacaggctgtccctgaccctgaggcccagaggcacaagaggacttctgtagagcccaggggagcaggctgttctcttggggccccagcgggctcaaggtgtggccaggctgtccccaactcaggatagatcataggctgtcctgcgtacctcctctggaactccctgcccaagctctgccatggacctggacgtcaggggcctgtggtttaactttgaatagggattctggaccttacacgtgtgccctggacagccccagaaccatggggtggggaccgacccagcaagcccaccggggccctgaaacccggccctgccggacactgtgataataaccaagaggcaagtccagagacatccactttgcccaatggcacctgcatccaacttctcagcaggcagtgactggcatggtgtgggggcagccggggcagcacctggccagcacctggccagctgccctgtagcccccgatggctccagtgcctctggacctcattttctactttctacggggaaacctactccctcagaggccaccagagggaagagtgagcaaggcgttcctgcagtcccgaccagccagcggcatgtcctgtggcctctgactcaacctatgagacagagctctgatcccagggcacacttcccaggacacggggcccagcctcaaccagagccctgtgaagggaggggcaccaggatgaccacatgggggaccatggcgctgcacacctgggcactgtacttctcattggagaatccaggcaagatcttgaagcaggtgcatgaggtcctgagcctgtgcagcaaacagcactcatctggggttggcacgaaggggtctacagagccacggccaccgcagcctcttcccggccccatctgtgcagtgcaagtgatccacgcctgctcctaaacccagcccagcaagcagcagcagcccgggcccccaagcccgccaggccaatgtgctgcccagaggcttcgaggccctgcccgctgtacctcccaccacctggaagctgcctcctgacgccttccagccactgctgcagccgcaacaggtgtcgcggccagtgcaggctttccagacggtggcagcgcccagcagccgttgcctcagctctttggtggcagccaggccaacaagggcagcgacgatgactaggatgatgagtgagcaaacagctccacactggtggacaggctgggtgcgcacccggtggtcctcaaaggctcgctgggcctgtaccaccgttataaatttgagatcatgagattataccgtttgccttcttgctttttgaagtacgagtatttttatgcacactttgtagacttcaaaatccatgaagagtctcaaagaagccggatggatggagcctgctgcggatgccttttactctcgtagatcagggtgatttacattccacctgtagtctgcttgcaaacacacagagcagccttgcagctttgtgcctttagactcttggttttgcatttctccctgctcccttcttccttccagtaagctgcaacttttctgattgaaagggtgcaaggctaacacacggaatgactaactcaggatcacatactggcagtgggagaggcaggaggagcagctgccatcaattgccagggccaagtggatgataggatggatgctggtgcatgcggaggaggcagacgcaacgctcatctctaataatgatgtctgttccctcagaggcggctagagcatcacctcttcacgcaagtgtcttgaaactcagcttgaagatttcagcaaatgtgtcttacagagaagagaagagggagtcagcccatcgggattaaaaatatagaggcagtgacaacacacactcggcttcagttcttaggagagttttggttttgatttttttttttttttggagaagattttttttttaatggatctacactgttaactgagactctgttgagattcactggtttacttaaaaacttctcagggatgtctgtaaatttcagtgttatatgtcatgaaaactggtgtgggcagatctgttggttgaaataatttctactgtttcaatgtttttgtagttactgagctaaatcatatggtaattgacagtttctaaatctgtcacctaaaggttaaattatctactgttgccgtgaagtcaaacttactgctgcctcagaaatccctgggtaccgcgatggtcatacagaagtaaggaagtcaatttgaaatgtcagtgagtcaaaatgattaaagaggccaggtgcagtggctcacgcttgtaatcccagcactttgggaggctgaggcagtggattgcttgagtccaggagtttgagatcaacctgtgcgacatggcaaaaccctgtctctacaaaaaatacaaaacaaatttatccag

SEQ ID NO: 1511 - DNA, 4516 bp, Homo sapiens
aagagaattgggtggacagcaggaccatctacgtgggacacagggagccacctccgggcgcagaggcctacatcccacagagatacccagacaacaggatcgtctcgtccaagtacacattttggaactttatacccaagaatttatttgaacaattcagaagagtagccaacttttatttccttatcatatttctggtgcagttgattattgatacacccacaagtccagtgacaagcggacttccactcttctttgtcattactgtgacggctatcaaacagggttatgaagactggcttcgacataaagcagacaatgccatgaaccagtgtcctgttcatttcattcagcacggcaagctcgttcggaaacaaagtcgaaagctgcgagttggggacattgtcatggttaaggaggacgagacctttccctgcgacttgatcttcctttccagcaaccggggagatgggacgtgccacgtcaccaccgccagcttggatggagaatccagccataaaacgcattacgcggtccaggacaccaaaggcttccacacagaggaggatatcggcggacttcacgccaccatcgagtgtgagctgccccagcccgacctctacaagttcgtgggtcgcatcaacgtttacagtgacctgaatgaccccgtggtgaggcccttaggatcggaaaacctgctgcttagaggagctacactgaagaacactgagaaaatctttggtgtggctatttacacgggaatggaaaccaagatggcattaaattatcaatcaaaatctcagaagcgatctgccgtggaaaaatcgatgaatgcgttcctcattgtgtatctctgcattctgatcagcaaagccctgataaacactgtgctaaaatacgtgtggcagagtgagccctttcgggatgagccgtggtataatcagaaaacggagtcggaaaggcagaggaatctgttcctcaaggcattcacggacttcctggccttcatggtcctctttaactacatcatccctgtgtccatgtacgtcacggtcgagatgcagaagttcctcggctcttacttcatcacctgggacgaagacatgtttgacgaggagactggcgaggggcctctggtgaacacgtcggacctcaatgaagagctgggacaggtggagtacatcttcacagacaagaccggcaccctcacggaaaacaacatggagttcaaggagtgctgcatcgaaggccatgtctacgtgccccacgtcatctgcaacgggcaggtcctcccagagtcgtcaggaatcgacatgattgactcgtcccccagcgtcaacgggagggagcgcgaggagctgtttttccgggccctctgtctctgccacaccgtccaggtgaaagacgatgacagcgtagacggccccaggaaatcgccggacggggggaaatcctgtgtgtacatctcatcctcgcccgacgaggtggcgctggtcgaaggtgtccagagacttggctttacctacctaaggctgaaggacaattacatggagatattaaacagggagaaccacatcgaaaggtttgaattgctggaaattttgagttttgactcagtcagaaggagaatgagtgtaattgtaaaatctgctacaggagaaatttatctgttttgcaaaggagcagattcttcgatattcccccgagtgatagaaggcaaagttgaccagatccgagccagagtggagcgtaacgcagtggaggggctccgaactttgtgtgttgcttataaaaggctgatccaagaagaatatgaaggcatttgtaagctgctgcaggctgccaaagtggcccttcaagatcgagagaaaaagttagcagaagcctatgagcaaatagagaaagatcttactctgcttggtgctacagctgttgaggaccggctgcaggagaaagctgcagacaccatcgaggccctgcagaaggccgggatcaaagtctgggttctcacgggagacaagatggagacggccgcggccacgtgctacgcctgcaagctcttccgcaggaacacgcagctgctggagctgaccaccaagaggatcgaggagcagagcctgcacgacgtcctgttcgagctgagcaagacggtcctgcgccacagcgggagcctgaccagagacaacctctccggactttcagcagatatgcaggactacggtttaattatcgacggagctgcactgtctctgataatgaagcctcgagaagacgggagttccggcaactacagggagctcttcctggaaatctgccggagctgcagcgcggtgctctgctgccgcatggcgcccttgcagaaggctcagattgttaaattaatcaaattttcaaaagagcacccaatcacgttagcaattggcgatggtgcaaatgatgtcagcatgattctggaagcgcacgtgggcataggtgagcttcgtccttgctgctggcacatcctggtggccaggtcaccccttcgctagacaaaggcccatggcagcacgcaggtgcattcaggacacccccgtcaccaccctcgtgtgtgaccgggaaggctcatgatgatggtttcatccgttcttctccccgtccctgccctgtgtgtggtgtgcagaaagcatttcttcagctccttcacctccgtcttctaggtgtcatcggcaaggaaggccgccaggctgccaggaacagcgactatgcaatcccaaagtttaagcatttgaagaagatgctgcttgttcacgggcatttttattacattaggatctctgagctcgtgcagtacttcttctataaggtaggagggtcgccgctccccctcacggtgttagcaacaggtcacgctcagggtggcacgacccttgtctgagccacttgatgccacaagaggtcattgatctccgaggagcagcaactgtcagaaaggaaggggtgaatctgattgcagtcatctcttgcttagctgtgactttgctttttacagtttccattacctacagtcaacccatgcccaaaaatatcaaacgcaaaattgcagaaataaacagttcctcaggtttaaattgcatgccattccgagcagcgtgatgaagtctcacgccgtcctgctgtctccttcctgggatgtggcttgtccctttgtccggtgtgccgatgctgtgtgtacactacctgcccctcagtcactctgtagctgtcttggtgatgaggttgacagatcacaagaagaagggtgaatatgacacaataatatattttaagaggaggagggagagaccaaattcatgtaactttgattacggtatattattatagttattctatgttttgttgttactctttcactgcacctactttataaattaaactttatcatgggtgtgtatgtatacgaacacacatacccatctagagcatagacagggttcaggaccatccgcagactctgcatccccccagggtctgggaatgtacccctgaggatgaggagggcctgccgtgccgcgggaggagacccccagcccttttctccccccacagaattgagtgtggaaccagtgagaacctttcaggtggaaatgtttgaggaaggattccttattcactgtgcagttcgattctttcccgtttatactgatacctgcattgccttcttgtttctcttggagctgacaaatttcctctatacgttgtctgtcctgagtggccaaaacgtggtcacatgtgcatttcagttgcccctgaaataagagaaagctttctagaacccattagtgctgttctgccgcacgctgggtgcacgtggatccctcctcccatgtggggtgggccacgtcggtaggtggcggctgcctccctctgtcccgtcaccgaactaacagttatgccttgcctttcagaacgtctgcttcatcttccctcagtttttataccagttcttctgtgggttttcacaacagactttgtacgacaccgcgtatctgaccctctacaacatcagcttcacctccctccccatcctcctgtacagcctcatggagcagcatgttggcattgacgtgctcaagagagacccgaccctgtacaggtaccatcctccaaacagcctctcctgagagcagagagagtaactaggcagcactctggcagttccttccaatagccacctggcagacctcagttgagggccagaagcattcggcatctgctgatattcttgcttgatcaggagcttgtttaaactggaagcaacatagctcaaatggagattcttcaagtcttgctggatggtttatgctgcatttggaacatctgtgtggagccagtttgcactttcctgtgctttctgacagtcctgagggagctggggtacaagcgtcttcctcgttgtgaccctagggaatctgtggcctaagttatcctttaaaaccatgtgtgttccattcagtgagaaaaaacaaaaattaacagc

SEQ ID NO: 1512 - DNA, 3451 bp, Homo sapiens
agctcggtcgcttgtgcgttccgctccggccgccctttgcgcttggatccacttccccatctgtaacgaggtgttgagacgagcggcatggagcaggcctaccagctcttggcctggcgcagtggtagggtcgtgggcagccttgagaagacaaggaagctcgtgctcaggcctgccctggcagtgggagtgactgctgtgctcagcgtggccgggattctgaatgccgcgcagcccccggctgtgaaaactgtggaggtgcccatccatcagctgcctgcctcaatgaacaacctcaagatcgtgctcctctcagacattcacttgggccccacagtgggcaggaccaagatggaaatgtttgtgaggatggtgaatgtgctggaaccagacatcacggtgattgtgggtgacctctccgactcagaagcctcggtcctgcggacggctgtcgctcctctgggccagcttcattcacatctcggtgcctacttcgtcacaggcaatcatgagtactacacgtcagatgtcagcaactggtttgcacttctggaatccctgcatgtccagcctcttcataatgagaacgtgaagatttccgccacacgggcccaacgtggtggtggtggcagtggcagtgggagtgaggatgaggactggatctgcttggctggggtggacgatattgaagcagacatcctgcactactctggccgtggcatggatcttgacaaggccctggagggctgcagcccagaccacacaatcatcttgctagctcaccagcccctggctgccaagagagctctccaggctcggccagatattaacctgatcctttctgggcacacacatgctgggcagatcttccccttgaacgtagcagcctatctcctgaatcccttctttgctggtctctaccaggtggcccaggctacattcgtgtatgtcagcccaggcacagcctactacgggatacccatgaggctgggtagcagggccgagatcacagagctcatcctgcagcggtctccctgaactggccctgccctgtgcacctctgccctgcccttgtcctcgaccctccatcctgcttcagagtggtttgcctgcttttcccctccagccttgcccactcatccttgcctacacacccttggtcacaagcctgactcaaacagtgacttatggtgggcctgcctggcatgttcaggctggtttaactatttccttggccagttgctttttttgatgcacttgtgagatcactaaggtcacatatattagcactcccctctattttccagatgatgtggaatggggaccttctcctgcagagctcccagggatgaacctcccctcggggttgctagaaaggcatacctctagaaggtggggcggggaggagcaggagcatttttctcctggtgttttaaaattgtctttaggacttaagtggtttccagaatcattgatccagagcctttctggggaaggggtagtgttgccaggtaatttgggagaacaggcaagatggaagggccctctggctgctagagaagaatattttcttttcctctgattctatcaggatcacctctattgagggcatcagcaaaatctactggaatgcaaagctcctcctgttccaggccttgagggatgctatttaactgtctgtgctcctgggcctttgggggcaaggtcaggggagaagaacggtgggcgccatggtcggtgatggtgagaacatggctgcttaggaattcagagggctttgcctcccttgtctcattttatacaacccttcggggagctcactggggacaggctgcttttccctatttggagataaggaaaccaaggcaaagagagatagggcacaggcagtatgacaagatatgtaggagatttggggctagaaaccaggtcttgtacctcccagtaaaagcggtgcttttgcccttttgccagaagcaatagatcctttgatcctgagatggagataagcacccgtgttagaaaaggcctcactgagaagacagggctgggctggttccctgctgggtgatttaggcttgtgatggaaagtcttcctccaatggggagtgaagacactcgctctgactggagaggctaaccctgctgctcactcatagggcagcgttgggtgggtgactttccctcactcagccttggtttccatcaaccctaaaatggggataattatcgtatctacctcaagattgttttgtcaggagggatccatcaagccttgtgcatgagttccacatggcacagcgtgcacagtaaacactcaatgttaatttttcaacgttccagtggagcttgctaaggaactctgttgggcacaggtgcccagaggattcatggagcagccagtcctggggaatgtgagtgggtagcgagctgcctgctgctggggcaggtgatgtgtcaaagcagcaactgctaggggtttgccttcctcccctcatgtgcattctggcaggcaaagggggtttcttcctttcctccttgtcctcctggtgtatagtggggttctgggggatctggagaccaccctttttgttcccaggcagccacggtattgacagtgggccataccatgcagtttaaaatgtatctttgagttgaaattttggtggtttccttattcttttttctctcttcactgtccttccaaactcacttttcttgtgtcccgaccgcattttgtgaatcatccttactccctttaagttctcgctttggatttcaccaggtgggctagatggtgccatttcacttccactgtttgatgcggctggtaatgtttgactcacctgttacgtgttatttcactggtttcttgattttacatctttctcatcagtgacctgggcttgatgaaattagctttcattaagtcctatttttttttcaattttgcatccttacctcttttctttctcttgaatgccatcattgtgtggtcttatgtacccttcatccactctgaagtccttgcttgactgattgctttctattagcagaaagaaaacaggtccatcctatgtatctgagaaacaacatcaacaccctctcgtatgtggtttgtattccctgacgcggcggacatttttgcagcagaaatttctccatcactgtccagattctggccctggtgggcaggtctccatgacacctttagtccctttgttcaacattcttaaaccatggacctttttgtttgtttgtggccgggggaggtggtgagaaacgttacttgaagcttgatcattctttcaatttcatttgtttctttatttttaatctgttagatgcaaattgaaatgcaatgctttttgaaaatcagcaatagtgtctgtagtatatgatgctgtcacaaaatctcaataaattgatcctgctgccattccttccaaat

SEQ ID NO: 1513 - DNA, 3029 bp, Homo sapiens
agtagagtgtgtctgggtcagctgagtgactacatcaaagctcccagccttgaaaaacacatgctgttcccaggcctcaagatattgaaacattaattagataatttaaagtagcgttttcttctacaatgtctgaagaagtgaactatgcgacactcacatttcaggattctgctggagcaaggaataaccgagatggaaataacctaagaaaaagagggcatccagctccatctcccatttggcgtcatgctgctctgggtctggtaactctttgcctgatgttgctgattgggctggtgacgttggggatgatgtttttgcagatatctaatgacattaactcagattcagagaaattgagtcaacttcagaaaaccatccaacagcagcaggataacttatcccagcaactgggcaactccaacaacttgtccatggaggaggaatttctcaagtcacagatctccagtctactgaagaggcaggaacaaatggccatcaaactgtgccaagagctaatcattcatacttcagaccacagatgtaatccatgtcctaagatgtggcaatggtaccaaaatagttgctactattttacaacaaatgaggagaaaacctgggctaacagtagaaaggactgcatagacaagaactccaccctagtgaagatagacagtttggaagaaaaggattttcttatgtcacagccattactcatgttttcgttcttttggctgggattatcatgggactcctctggcagaagttggttctgggaagatggctctgttccctctccatccttgtacgtctctaactattgagggtaaacacaagctttccatggaatcctgggaaaattaataatgattgtgagaattataaatacagacataaaaagaggagtacaacatactgagaaaagagctccagtaacaaatattgaaaggaggtatagttcatttcatctctgtgacaaatttatagcaaggcactgaattttatcttttggtagaaatgtgtttatttaacacacacacacacctaatactacattcaaagtattttataaatactaacccttgaagaaagcagttatattcccattttataggtagaaatattataatagagagattaagtaacttgcctgaggtcactcagctcataaattgcactttagggattgtgcactcagtcactcagctattctgactctccagcacctacaatccaaaagggtgctgctggtcataagaacacatatcaacacatttatttatactaaataactgtcaaccattttctaacaaaaagtaagactgaattgactgattagttcaacaattagtgtcatgttgaggacttgccaattacaatatacggcaagtgtcttttatgaattaaaatgaactaaaccttccacttcagggtttggatgaaactatttaaaggacaaatagaatatataacacttggaaaatttcaatttttttaactatttaaagttatgaaaaaatagacgtcaacaaaaatgtgtaaggggatattaggtttgctaaattctttcacagactataaaacaaaaaattttgaggaacacctctcatcataactacatttaaatgaaacaactgtattaatattttaaatataatagtatttttctattagataaaatttaagatctttggcatcttaatggatttttaaactttttattgatacataagagatgtatatgttttggggtatatgtgataatttgatacattcagatagtgtgtaaagatcaaataagtggaattgggatatcgatcactttaaatatttatcttttctttatgctaggagcattcaaattattattttctcattattgtgaaatgtacagtagattattgttaattgtattcaccctaataatctatgaaacactaggtcttacttcttctatctaacagaatatttgtattcataatggctttttatctaccttcctcccccaacaaatcattatccacccccctccctcctgtttcactctttaaagcatgttgtcaacgttttcttaaactgaataataatcactcatcttctgtcaaagatgccatgcttcagctgtgactcagcagttccttaaatcacaaacaatggtaggtctattattttctccctggatacactttatcttcatccatttcccaatgttttgtcatggctatttctactcaaacactaatcccccattttctaatcaccattattaatcatatcaagtcaattagtttggtttcacactaataataatgacaaaaagcacatgcagagtaatacacaaacaaaaaaagtgacagttacttttttgtgacaagagcaatattgggtatgaactgattaatattaatctgaggtgttgctactagactgagggtttccaggagtagtactatgacatcatgtaaacacattcagttttcatgttggaatctaagatgtgtcccttctcccaaagggattttaatcattcttggcctctctactcactcttaatcaaagtgtggaggaggtggcccccacagcagggtttggaacctacagaccctggcccctgagacatgcagctgtcagacaagccagcatgtcaaacacaggttagagagactgagcttccagattgcatagccatttccttgactactgagtaaaggccaaggctaagatttagtaagcctagccctgaagcaagcaaagaatatggcagtgtaatgcaggtcatttagaaaaaaacaatgttgggcacaaagaaaatttagatctgacaagtataattttctaaagacattatttcaggattaacatcaatttcttagcagaggaaatgaatactattgtcagaaccatatctatatagtcaatcatttcctcttttaacgtctgtcttgttctctttttacccaccacatatgtataactatgtgaaaaattatatttgtgcataataaaatgtgataactttttacaac

SEQ ID NO: 1514 - DNA, 3154 bp, Homo sapiens
gtgcggccgcgctgcctccaggaagcctcacgggccttcgtctgccgggccgcggcgccggctcccaggatgcagtgtggaccggccgggcgctgacggaggcgccgccctggccccaagattccagatgttcctgtggaccccagtccaggctcggggcccccagttcccgccccagacctcttgatgcagatcaagcaggagggtgagctccagctccaggagcagcaggccctgggcgtggaggcgtgggcagccgggcagccagatattggggaggagccctggggcctcagccagctggattccggagcaggagacatctccacggatgccacctctggtgtccattccaacttttccaccaccatcccgcccacctcctggcaaacggatctccctccccaccatccctcttcagcatgctcggacgggaccctgaagctcaacacagcagcctccacggaagatgtaaaaattgtaataaaaacagaagtccaggaagaggaggtggtggccacacccgtacatcctactgacctagaggctcacgggaccctgtttggaccaggccaagccacacggttcttccctagtcctgcccaggaaggagcctgggaaagccagggcagctccttccccagccaggaccctgtgctggggctgcgagagcccgcccggcctgagagggacatgggtgagctcagtcctgctgtggcccaggaggagacccctcctggggactggctcttcggaggggtccggtggggctggaatttccggtgtaaaccgccagtgggcctgaacccgaggacggggcccgaggggcttccttactcctccccggacaacggagaggccatcttggaccccagccaggccccaaggccattcaacgaaccctgtaaataccctggccggaccaaaggctttggccacaagccagggctgaagaagcaccccgcggcgccccccgggggccggcccttcacctgcgccacgtgtgggaagagcttccagctgcaagtcagcctgagcgcgcaccagcgcagctgtggggcgcccgacgggtcgggcccgggcacaggcggtggcggcagcggcagtggcggcggcggtggcggcagcggtgggggcagcgcacgggatggcagcgcccttcggtgtggggagtgcggccgttgcttcacgcgccccgcgcacctcatccgccatcgcatgctgcacaccggcgagcggcccttcccctgcaccgagtgtgagaagcgcttcaccgaacgctccaagctcatcgaccactaccgaacgcacacgggcgtgcggcccttcacctgcaccgtctgcggcaaaagcttcatccgcaaggaccacctccgcaagcaccagcgcaaccatgcagcgggcgccaagaccccggcccgaggccagccactcccgacgccgcccgcacctcctgatcccttcaagagccccgcctccaaaggacctttggcctccacagaccttgtgaccgactggacttgtggcctcagcgtcctgggacccaccgatggcggggacatgtgagcgcctccagccccatagcccctgccggccgcacgtgtaaaaagccccgtgtgcaggcagcagggcggcgtggaagcttcaggcagacgcgggacggggagaaccaaatgtccaagttgctgaactgatgatcactggagaaagagaaactatccaccaggacagctgccacctctaaaccaagtagaattctctgtgaaatgggagcgccgtagaattttaagtaatttaattgcaaacctgttttgttttttgttttttgtttttttttaattcttgaggaaaaagctggagaatagtaatagggctatttaaattttgtaggtacttttggttttcagggcgtgcatttctgtcactatctcactgagtctgatagtgtgttggaaggttggccagttggggacccctggcccactgactcctggggatggggtcctgtgtgtgcccctgctctgcccagttgggctgagtgggcctagcgcaccaagcccctgggcagtgagggccattgggtcccttggagcacacctcagtgcagcaggaaggacccctccgggagtagcggttgcatttcccagcttgcctctcctgaaaaggccccccaaaagtgctggccccaacttttctctattttgggccatctgtggtacccgtcccaagggcacttggtggtgtcccctagtgtgtgactccctggcctcataaggacgagttgtctgaaatcccagcgttaggtctggggagatggagaagctgaaactggggagctgcaccacaaacgtctagctctcagcagagctgggagcaaagcctggccgcccaccccaacctggggctgcctcccactccgtgagatgcttctgtctcctgttcactttgtgtggtagtttcttattttcaaaatgcatctcatttgatcattactgtgaccttgggaagcagcaggacagggatttctttttagaggtgcaaactgctcagaggggacacacctcagcctctcactgtgggtacacgtggcgtgccatgagtggggaagagcaacaggcgagatgcctcattctactggaacatcactgtgggtgaacagagatttccaggttttccctcttaaaatatttgtcccacaccgacaagagtccagtcaccaggcctcaaaggaacttctgcttgtagcagccgcctcccctgtgccccagcctccttaatgtgtgcactctcagagggcacagctcgcgaggctgggtttgggggccaagtggcttgttcattccagcatctaacatcataaaggtgggcccagatttcttgattcgaccacagtgctgttcctaccacacaaatatccattcctgttttgttgaagcagccactggccctcttgtttcccctgcagacggagggacctggcagtgcccattcattcagccccctcatgcatacttttattaggcgatagactagttaagaaaattgtttctatgtactgtatattttgtacctgtttacacttctaatattgatataactgatattttgaaaaataagagaaaacatcctgttaaaataaaacctaaccagcacc

SEQ ID NO: 1515 - DNA, 1859 bp, Homo sapiens
actcttttttttttttaagacagtctggctctgtagcccaggctggagtgcagtggcgcgatctcggctcactgcaacctccgcctcccgggttcaagcagttctgcctcagcctcccgaagggcgccaccatgcctggctaatttttgcatttttagtagagacagggtttcgccatgttggccaggctggtctcgaactcctgacctcaagctatctgcccgcctcggcctcccagagtgccgagattacaggcgtgagccaccgcgcccggcctacccttgaagaccccgcagccaaggtcctccggccccgctctgcgcggcgctctggtcttggggctccggactctgtcatgccgggcaggggccagtccgatccttgcacccttgcctggcaccgtccctggagccttggcgtcctggcctctcctccccgcgggctggaggtggagtggccgggccggaaccagtgcgcaaagcagatggcgagcgcggaggtcggttcggccccgccgcgcctcaaggcagcagccaccctggggaaggtggatgccggaagaggcgtcgcctgcgggtcacccagaggacacccggcggggaattccgagggtgggagtgaggagagagcgaccgcgcggtgtctcagagcgcggcccggagccgcactaagagcgctggacggcgggagagaggctcggaggaccggtagctcccagcaaagcggcccagcggatgtcgggagctatcttcgggcccctggagggcccgagctccctggatgccccgagcatccacccgctggtgtgcccgctgtgccacgtgcagtacgagcgcccgtgtcttctggactgtttccacgacttctgtgccggctgcctgcgtggccgcgcgaccgacggccgcctcacctgcccgctgtgccaacaccagacggtgctgaagggtcccagcgggctcccgccggtggaccggctgctgcagttcctggtggacagctcaggggatggcgtggaggcggtgcgctgtgccaactgtgacctggagtgcagcgagcaggcaggggcggcagggcgggtgggtgaggagcagagggtacccggttgcacagtccccaatgcttgcacatgcactcagcatgtcttcagaggacgacctggcagtggattctccagcacctccctagggcaccttggccccaaatgtgaaccccattataccggtggggagactgaggtccagaacaagggacttgagccagtgtccagacagtggcagaggctaaggccattcgatctggggagagctcactggtccccaattcagggtggagttgtggacctgcacaggaggggcagtccagtttgcaggcctgggccgaccctgaagggcctctgctacccaagtggcatagaagcagctacagcccaggggaggtggggacagcatgctgttccctctgggctgtaaaaggcacaggggactctggcctgcggaggccagaaaatgtatcgggaatcccaggaggacggcccgactggggcaaaagctccagcgttctggacaagtgctgagcaatgtgtgacccagacgtacagagaggattagcaggaggtagggactgcaggtagggcctgttatgtccatcattgcatgcgtccataccagggctgcaggccaagccctggaatcccagccctgggtcaggcttggggaggagaaccttaaggccctcactgctcttcccctccccccgcccccaagtgtgactccagatggccagggtgtacaccacctttcggccactattgagtgtgccaagggggccgtgagaggccctcacacccttttgttaaaagt

SEQ ID NO: 1516 - DNA, 2376 bp, Homo sapiens
ccaaaaaatctatgctggagagaaacctcacaagtatgatgagtgtggaagaacctttacccaggcctctcacctcactatacatcagattatccatactggagagaaaccatatgaatatgacatatatggcaaagtcttcagtcaaaattcacatttcaaaagttatcataggatttgtactgaagagaagccttacaaatgtgtgtggcaaggtcctcagtcaaaattcgcaccttgtaaatcatcagagaattcatactggagagaaatcctacagatgtcatgaatgtggcaaagcctttactcaaggctcacgcttcattaatcatcagatagttcatactggagagaactttccaaatgtactgaatgtagcaaggcttttaagaatggccctaaactcaggactcaccaaatagatcatacttgtaaatgcaatgaatgtagcagtgttttaaagtagtgcttgctactcattagataagagtatctaatatatcttggggcaaaggcacacaaatgcaatgtctgtgacaaggattttatctgaggatcaaaagttggggaacagaataattcgtactggggagaaaccttagaaatccaatgagcatgggaaaaactttaccatgagttcaagtactacaagacatcagagagttcatattgaagagaaaccatgtaaatataaggtatgtggcagaggctcttttcaggtttcacagtgcactggacatcagagtatacatcttttgccgggcgcggtggctcacgcctgtaatcccagcactttcgggaggctgaggtgggtggatcacctgaggtcaggagtttgaaaccaccctggccgacatggcgaaacgctgtctctattaagaatacaaaaattggctgggcgtggtggtaggtgcctgtgatcccagctactcaggaggctgaggcacgagaattgcttgagcctgggagatggaggttgcggtgagctgagatcatgccactgcacgccagcctgggcgacagaggaagactccgtctcaaaaaacaaaacaaaacaaaaaaacagagtatacatcttttagagaaatcaaagtaacatgcatgctaaagctttttttttttttttgagatggagtcttgcactgtcgcccaggttggagtgcattggcccgatcttggctcaccgcaacctccgcctcctggattccagcaattctgcctcggcctctcaagtggctgggactacaggcgcgtgccaccacgcccggttaattttttgtattttttggtagatacggggtttcgccatgtcggccaggctggtctcgaactcctgacctcgtgatctgcctgcctcagcctcccaaagtgctgggattacaggcttgagctcctgcgcccagcccatgctaagtcttttacccagtggtcaaaactggcacaacacaggatttatactggagagcaacctcacaaatgtaatgaaagtggtaaggctttttatcaaatgtccttgtctttggggtcatgagaaaattcatacagaatctattaaaaatgtactaaacatggaaagacctttaagcaacagtgatgtgatgaaggtggtagttttttaaatgaactcccataagagtctacacaccatagaactcataccaggaatcacaaagtctctaaatttccaaagttaactggaaatattacaaactgcagaataattccaggccaaaatatgttaaattcataacatgatgtatatcaaaggaaaaaaggacatgtggaaatgacacattatcttcagtgtataaaatattcatttatgtgaagtttcttggaaaggctacactactattactggtttccgtctgatgtttgagatctgttgattttatgcttttcttacaggcctttcattatgatctttgggaaggaatcaataaaatgatagggcctacttcattaggtgtggttcattcctattcatgctccctggaagaacaagaatgctgaattttgaaatttaatattgtatgaattagcatcagggagaggtggagaaaaatacaaaactaaaagtcatgcttattgtgttcagtgtgcccttctccagagggccactggcttataggaaaggattgctgctctaccagttgaccaggagatggcacgccaggacattaagacactggagttttgtttcttttttttttttttttgagactctgcctcaaaaaaaaaccaaaccaaaccaaagaaccagaatagcatgtgcacgtatacacagacgtttcacaactggcattatgttttgctactgttttatttacaatgtatcacaagttttatgctttaataaaatttaatcataacttc

SEQ ID NO: 1517 - DNA, 3671 bp, Homo sapiens
tgatgacaggagggcagagtgagggcttggcctggtctttgcctcagaccaagcattggtgcgggaagggtgtagttggagagatgaggaggcatttgggggcacctagagccgtgctctatggcagacagatccttcaaccagcggtggaagccccaagctcttgtcctgtctccgataccacctggccaagtggccatgggcgggtcactcagcttctagggccttacttctctcttttggaaaagggggtctacgaggaatggtctttggggtctgtgcccctctccgattgtgtgggtcagagggtgcagggaaggcaggcacagaagcagaagtccaagatggaggagtttgagtgcaggtggctcccccaccagtgtcccctggggctgggatggttccccatctgggaggggcctcaacaagactcctcggcccgcactaaggaagccgtccccaaagatgccccccagcagcaggctgcttcaggatggccacaggctcccagacctgaagaaaagaagggcacatgcaagaaggaccaccacaagagaggccagcactcaaccagccactgtcattagactttcccatttccaggcagagacccccaccaggcacaggcacagaggtagaaactccttctgaaggggtcacagtacgcaaggggtaggacctgcatttggaccaggcggtctgggccttaactgccaccctccaccatctccctagtgtccatttttctggtacaataacactagccacaaagagctactaaaacttaggtttaaattaaagttggctgggtgcggtggctcacgcctgtaatcccaacactttgggaggccgaggtgggaggatcacttgaggtcaggagttcgagacccgcctggccaacatggtgaaaccccgtctctactaaaaatataaaaatgagccgggcgtggtgcccggcatctataatcccagctactcgggaggctgaggcaagagaatcacttgaacccaggaggcagaggttgcagtgagccgagatcacaccactatactccagcctggataacagagtgagactctgtctcaaaaataagaagaagaataagaagaagtaaaaagaaaatttcagttcctttagaaacactggccacatttcagtgactcagtaaccatgtgtggcaagtggctattgccagcacagaatgtagaacagtcaccgtggaaatttcttacgggctggtgctgttccagtgcctaaaggaagagggctgttactggggggtgcacggtccacacactcacacatgcgcaccactccttcctggagacacccatggggtcagtgtccctgtgcttcattctctgccagtcttgctcagcccagaagctggtggcttttcctctcacttcctcccctcgcttcccctccaggggatgacaggtgcaaaggctcacgcatctcggccctccaggtgcagcactgatctgtgcactcagcctgcacaacctgctcccctccgtaatcaggctgccattgcccctgagtgtgatgctagtcccaggaggacagagttgagggatcttaacatggaataattgggagaggacatcaatgtggaccctatgctaaggcccctgtctcatcagagggcctgccccggggcccccatgagctggctcaggagacatctagtagaactctgcctccatggcctgcatccctgggcctgccccaggcagacggacatgcagcagtgaccagattgaggctgggcagagtgagatagggtcccctgggtgcccagcccttcaccaaagccaagactttgggaactgggggggcgggggatggactgggctgcaggaaggaggatagagtggggttggagtgtttttgcccagggcccatccgtttgtcatggccacagtccctgcagcttaatacaatcaggtgggtttgaatgggacagaaatcaggcattacaatgtacagacagcagcttcctgacctttgggagttagctgccctgttctcaaccatcaaacttttatttttccatccttcccaccttcccactcactatggaagcctcttgattctcttaactaatggccagaaaggggccaccagtggccacaagagtaaggttgcctgctctcagggagggcaagagtggagtggccctgaactgggaagggtggccccatggctggggccgcccaccccactcatctgagaagccaggctagggtcagagtctattcccctcctgaccccctcccaaaggatatgctccttgtggagtgttgggtctgtgcttatcccagatgcctccccaagcagccaaatgtttccagacacaaagcctaggtaggtccatgtgtcattccagtcaagagcgcagggagtagctgagcccctctagaaccaaacttgatgactcctggagccacagcctcagggccagggctacagagaagcttctggatgccctgacttccatctgtcacctcatgccaataaggaaagtttcgggtggatctggccgaggcggctggggtacagaagggggacccagagatggggcagcccagccctctgccctctcctcatccccatcaggtagattctgcgaacccctgccatgccccggggatcctgtgacttcgtgacattacacagcagtcatgtcacctcccaactatcctgatgttttctttgtggtctttcttttcagtgtcctcactgtatgcccactttacccacttcccacctccggtccccctcatgctgtgcatggatcccgaacctctcccagcccctttctgagtccccctagcagggccatgcaagacagctagctgggagaaatgaaagcacgcccaggtcctagagagctccgagactcttcatcctggctgttctcactcataaaccaggtagcctgggtcccctttcaggaagatgcaatctgatcccctttatgaagggtcctcctttccacctggacttaccctttctatgaacatccatctcatctggttgggggtgcagatatcactcttagtagagcctcattctcaccatgtaacatggggctgcacggaccttcctgggccacacagctggtggcaagtggcacctggctgtgcccatcttcagaattctgtcagaataaatgttcctagagaaggctagacactggatagtttttagagtggggagtagttcttttctagaaaggctgggtggtgaccaaccactctgggaacagctccttcttcccacatccaggtgtccaccccagcctggaatttggatcaggatcccgtcttgaattattatgggttgtgatcagggatctcccctgcttcctctcttttccccactctggacttctcatttcagtttaatctgttaatttctgttcttatttcactttgcagactatttgccggtttcacaagacataatttttatcaactagctcttaagagaggcatagcaaagtgggggttgctaccatttctagagagagaggacacagtcccggcctgggctgcccccgctccagtcaatgctcactgaaagtctgtcttagctgcctgtttgaatgactgttctttttctcatttttaattcttggactcatgtcctcattgcttcactc

SEQ ID NO: 1518 - DNA, 3755 bp, Homo sapiens
atgagcacgtggtgtagtagcagctgcccactgtggaccccttctccacccacttggatttgtttcctgctcctgacttccagcaaaactgggcagcaggcagcatttcacagacagcctcttcctgctagatgctctccacagtcaagtagagtccccccacttcagtttctcacccctctggctccccagggctccccgacatcaaagcttctacgagaaagctccgcagtgggggctgcttacccacatagctgtcctcaagccccggggaattaattccttgacctccctgccctcagatcctgtattgatgggaaactcatacttgatagatgagtgagctgactggcagcgaagaggacatagaggctcttccagggcctcccagtgagtcagcctgcacagctgccctagggccccaagctgtgtgattcatgtgaccactgaggcctcagctgcctcagacagctcaggctgtgccatgagtcacacctttgcttcatggcctggcccctggagctgaaggggtgtcacgccacagttactctcttgttcacttgtattcatggtcttcaacaaccaggaaaggcaaggctggacttcagctcttgagaagacagggcccataggactagcttgttaactgctggaaaaaccacatactggggctctgcagacccacagggtagagaatcccaggagccaggacttctgtttgaccactcttcaaatctgctagagccagggagagggcacggcatggccagagggccccactcacagagaattctgatactctgttgactggactcaccctcagacgggagtagcaattcgcaaagcaaatgctgtgttttctgagagacctgcccaacatttccatctgccatggtgggcttgtgccagaagccccaacaagacacactgggacttctccgagggccctctaggaaggggctgccacaaccattgtccctacaagaggtcccatgtggccccagtgagaggcagtggaaaaaccgtgaaggggttcttgggaaagcagggagctttggtggggacccagttctatcagcaaaccttttgagcacctgctgctccatgtactcttgggaaagcaacgattaataagacccagtcctgccctcgaggagccagctcatggtttggtgaggaagcccaggcacacggctaaccctggagtaagccagcctgttatgtgatacagggagggcagagtgctgaaggccgggaaaggaagagcaggagctgggccttgagcagactgtttggtgtggccgatggcccaagagccaaccagaggttctgttgagattttcaacccaggaggtgggcagaggggtggcactgggggcagaaatggagtcactgtaagggaggagtgggctttagggaagagatggcagggcaggtgggaatccagagccaagacacgtgcgagaggctggggttgagttcaagcgtcagcagctggaagcggaagcaaccagagtggtggattcttggaagggggaatgacctaaagcctaagatgaagtctcctggccctgcagcagtggcttctctggatgatgaccattttaatggcagagctgtctgcccctactgtcctagagaggtgatactggggcccactgaccaggggcccactagaggacaacagaggcatacatatgtttaaagcgtgagtgcctagcactgcatatatgcatattgttgaatctcttcatgtgtcctgtgaggtacctgtttctatcccctctctcaagacaagggaacttaaatctcagagaggggaagctgccaccctgggtagcagcactgggaagggacagaatcaggactctcacccagcagtgctggggtggacagcatggctgtgtgcgctgcaagccctgacttcctggcctgcaggagctgtctagggagggcgtgtaggggagacgtgtccttgggaggtgtgtgtctgtctccattcagaggtgtgatagggaattccctaactgcccccgccacccagctccccagtgactgctttctctgaaccaccttagtgaaattatctaggagatcagagacggcttggcctgggacggcttggtctgggacctgggatggtcagaagcccccctcatgccccgtccccttccttcctctcctctgggaggctggttcctgacgctggctcctcacctctgccctgcctctgtcgcttcctccttccccctcccctggttgcagatacagtacctggactccatgaacggggaggatctgcttctgacaggggaggtgagctggcgccctctagtggagaagaatcctcagagcatcctgaagccccattctccgacttacaacgacgagggactttgatgggctgggccctccgcacggcccgccagctggcttcgaggaacctccaggagagaagtgcctgttggtccaggaccctgcagaaagtggcctgaactgacctctgaacagcatctgtcaaatacctggccccatttgtgttgagtttcctcttagtgtgcccaggagtctgatctgctggggtacagggctgggagaacccctagctctcccggggtgtcctctcccttaggggaagccccgagtgagagtcccccagcacacactccccaaccccctccagcaactacatgtgactgatagcttttcccaaaggccaaggaagggatggtgtaggttcaaaagggaaaccccccagggcctgctgtggcctaggagcagattgtaatgctgccgagtccggtcggtgaccacgcgttgtccctcggctttcagccatggggttgagttggccattaaaagaaacagagacttctctctgccatggcccttctttattccagggacttagaaacttgcctgagatggtggacgcagtaatgagggcaccgcgcagctcagttagagacggagaaggggaagaggctgggatggtctctgctgctcttgcctctagttcatggagatgtgtctctgttcaggccaagatacagccagccaggcctgtcgtctgggacccaggaggcctctgatgaccaagggctttcacatcctaagtcatttggaaggaggccttgagaacaaagtcacctttgtcactcccagtgaactgaatgaggaacatgctgtctcctgtcttggcctcccctttcatgagatactggggagaagagaacatccctcctggcttagttgtagcagacccagacctgtgcccagctttggtcccccttcccaacttctgaagcacgtgctgcagagccaccttggtctgagcacctgaggaccagcccctcctccctcagtgcgggtcatctcttgggggattttcttaaagtgaagaaagggggtggggaaccatattgcccctccctcccccatcaaacttccttcatttaacttgctataaaatgagtcatataaagaaactctatatgggtgaggtatatcccacttctgtgaaaacattacaaatcaaaccgcttctctcagtttatttaagatgcttttgttgcgagcggagctctagagtgaagcctcctgtgtgtgtgtgagataataacaccttgtaactcattacagctgggcactatttacataaaccagagctgagccaggcaggaatttgctgattaatttatttttaatggagtgaagtataccatgcaccaaaataaactttactgtgtgtacct

SEQ ID NO: 1519 - DNA, 3322 bp, Homo sapiens
ttttatttcagccaattagaagccccactcggccacctggcacctggtctccgctctcctgctgtggttcagtcttgatttttcaaaggcacgggtcaccaagtcgctgcccagttaggtggctgagggagaggctcgtggagaggctcgtggagcgcctcgagcatctgagctttctcaggactcggagctgtgctgttggcgtcagcgtgtgacaccaagaacctcctcacttggggtcagaaatctgcttgattcacttagctggtttgatgccagtcctccagccacacaccctgccctcctcacactgtcctgaggatgccgggttttcgtgtcctgactcctgggccatgtctaaaactgacaggtgattctgttcttccgtcccctgaggcttccgaccaagaccagatgttgcggatgaacccatctttcctttccaacaggactccaccttctctgcccctaacccggttaagttgcacgagtgaacaatttggttctcagcgatcccgaccctgcctcatcctgggggttgcatggggggtgtcttctctgcatggggggccagcgccccatgcaccggtggccacaagcccatgctgggcactgccccacgaccctcgcccctcgtcagtgctcagcgtccgctgctgctcagtgtcccctccatgtcgcctctgccgtcccattgttaaaggctttctatgatctgtcgctgtgttttccctctagtcaggagtggcaggaaaggacgccgacgagtgttcagcctgtcggaggccgacagtcatggcggccactgggtttagtgctccgaacggcagctgccacggcacctcacgcacagtcaattcaggcaggtctcccctgtgagccgctcgggccgcgacgtccactcgccacgctgcatttccacagtcggcagggtccgcgctggcaaggtgggccaagctgggcctgagcacagagccatttgccaaggcggcacttccccattttcccccaaagttggttctccctgctccctgtctggcctcacctcatgtgaagaccagatccccggcccttgaccttcgcgacagtccttcaccttcgcgacagtccttctgagccagacctgtacagcctggaaacgctgtccttctctgtgacgtgtgcaccagtgtcaggctcggcccgggccagaagcagatgctcctgccaagtcccccaggggtccccccagtttaggccatgggggttgggcggcagttggctggcaaagtgagaatttgtagaaagcaaccaagaagtctcctcatttcttttttcctttcttcccctagtcttgatctaagataagtggcaaattcagtcctgttttgaccggaagccaagagccatttccctcatagacacatggatggatgtggccccaccatctccctttctgagtggcacccacacagcagtgaggctgatccatgggccaccacccagcagcctggctcgctgtcggggccatccctgctgcctcccctatgacgcttcttctgtggtttctgatgcgcttttctccattggccgttgcgcttgtctgctgggagcctttgccttcttttgtgttgaaatcctattttctctgagctttgccctccacttgctctacaggtaccatccttttcttccccacaacactcagccccaccttttcccagcccagcacaacaaatccaagtttttgctggaagtcaccatttgcttgacaaggatgtgttaaggccccaccctaggcctgcagatcagtttctgaggtgctggccaggcacatgggggacctgctgccttggtgtcctcactggccacagccacgggatgtctgtccgctgcttatggaaacgtggccttcctgaatgtcccattaccccctcggctctgtctccccagcccgtggccaggaagtcagacttttctccaaatccctcatttcctgagcctggcctcaacttgtggccctagagttcaaaaacaccagcaggcatgaagccaaggcttcaccagtaacttttgcagctcagcacttgactagaaaaaagtgtcctcactgggtaattttccccccaatgaaaacctggcagagttctcctttttcacctgccttggttggatacccttgtagatcaagttcaggaagcagttcttaaacaacaacaaggccatgtcataggtgatgggtaagaagaggttattttttccctatttaaaaagaggctacttttagcggggaaaccaacccttttaataaaaattgttggtccttttcctgaagaagaaatcagttctgtgcgcatgctattgttagttggtttgctctttttgatatatttgcctacaaggtttccacatccctgattattctcataaccaaacaccccattaaggagcagggaacgaagttggccagcttctttgaatatctgcatgcaaatgcagacttgagcaaagagagaaaacacttacatcgaaattttaagaaaacgtgaaggtaacgcttggctactttgtctccagatggtaggacagtgccatttggggaattagtcatttctaaactgcctcctcagcagcaaaatttatgtgtggatccacatgtgtgtgagtttgtcacaggtctgctcatgcccattcgaagcaagggcagaggccaccagagcaggtgagcactgctcagggaaccacaggttctgaggaacagcaggcagatcgtgctaggtcagggcgcacgcctgagctgaaaccagcccagcaccgcaagccatccttactgaatggagcaaatcagttgaaattcaaagaaaccagaattcgcatgtagtgtttactcagcatttctgggctcagatcacacctcaaatcactttttccactagtgttcaccgatgcccattgccaccctcccagagcgaggaccaaagcctcatgcagtggtttcctctagatctctctctctctctctctcttttaaaaaagacattaggaagaaattaattgggctgggcacggtggttcacacctgtgcacatcccagcactttaagaggccaaagcagaaggattgcttgagcccaggagttccataccagcctgggcaacgtaatgagaccccgtctctacaaaaaactttaaaaattagccaggtgtggtgacacgggcctgtagtcccagctactcaggaggccgaagcaggaggatcacttgagtccagaaggttgaggctgcagtgagctatgatcatgccactgcactccagcctgggtgacagagtgagaccctgtctc

SEQ ID NO: 1520 - DNA, 3176 bp, Homo sapiens
ttagtaaggaactctacccatttgggttcatggttccatttggttgatgggatattttgtcaagattggaatttggtccaggagagcatcaggggggttcggttatatggggtggggtggggtcttgtgccgcctttgcatccccagtacaaatgcgtggtgactcctggtggagggagcccaagtctgaacatatgtaagatgggccttgcctcactccctttgaagcccagccgcagccggagagcagtaattgctggctttgattgcgcagacttcactggtgggttgggctgtgccggggctcgcctggcctggcccagcttcagccgcagccccccagtgaagccttagatgtgggaaagctccagcccctggagcctcatgcctgtggtttcttgaaaataatctggactggacctgttttatatctgtaaagcaacactacaagtgatgatatagtgattaacacaatgctgtagtgttttcctgttaaacagggaatggttgattttccaggagaatagaaaatgaaattgtcattggaggacctcctcagttgaaatcattctgtggctgatttcctcctattttgttttttgttggttggttggtttttgctttttcagtagctacccaggtatacaaatagcttctttgcagttctgatcatctttaggggccgcattgggcataattggaataataatactagctaacctgcttgcagggcttgctctgtgctgtgcactttgtgagcactttaaatataggagccaaacctctctttccaaaagcctgaagggcaggtgtcctcgcagttcccattccatagatcaccatccttccatggaaagtactctgtggactgtaacttgccatctagacttttgtattcattattaaactatgtcaaagtttccttttatttctcttttactttctttttccattgaaatgaaagtgtacgataatccaccattatttagaatgagtttctaaaaggaaacttgtgcttgtaacacggatagcacaatcacaagcacaaagtgttgggattcatctgaggctgtcaagggacccaggttgagaaggtgcttccagcatcgctgccaccaaaggaaagcagcctccccaagttcaaagcagcggaagcaggtgctctctggagtgaaggaacggaactttgccatgcttttactttccttttgtctttgtctcatcttgttacaatgttacattttacttttaatcactttttaaaaaatctcagatcattaaagctttgaggatgtgggagttctcttatttgaaaatcattatcaccaatatctggcaacattattttaacatatttgctgagtgtcctttccgaggctatcattagagatccttgatgttaggaaggaaaaaaaaatcttgaaaattgtaagatcttaaggaaaaagggagcggtttgtatcctctgggctgtgagtgtgagcggacagagcacatagcgtcacgggagttggcagtgcgttgggtaatgtgattatgtctgtcctatgtagaatcatacagtggcttcccacagtggaccaaaaacaccaaacactgcagaatgacacatctttccctgatctggctgttgcccgccttccctattcatgtttgcctgtttcctactggtgtttttcaaacttttttttttgttctgtttaccatgacccagagtattcactacacttcacatcataactctgggcatacgtatacatggaaccaaagtaaaaatgtcactatattaactctgtagtgtactctcaggatttttgactgatagggcaattcattttagccatccccaaattaacaaaatggattaattaaatgcagaggttgtaagacatatatggtatggaatagaggttataatcttaaggcctacggcaaattcatattaatagcatttcatttgttccttcttgaggtggaaaacgaagctcattcccaacgtgcaaagccaaggcagcgaccccaggacctcttctggagatggaagcttgttgaaaacccagactgtctccacggcctgcccagtcgaccccaaaggaacactgacatcaattttaccctgaggtcactgctagagacgctgatccataaagacaatcactgccaacccctctttcgtctactgcaagagccaagttccaaaataaagcataaaaaggttttttaaaaggaaatgtaaaagcacatgagaatgctagcaggctgtggggcagctgagcagcttttctccccccatatctgcgtgcacttcccagagcatcttgcatccaaacctgtaacctttcggcaaggacggtaacttggctgcatttgcctgtcatgcgcaactggagccagcaaccagcacatccatcagcaccccagtggaggagttcatggaagagttccctctttgtttctgcttcatttttctttcttttcttttctcctaaagcttttatttaacagtgcaaaaggatcgtttttttttgctttttttaaacttgaatttttttaatttacactttttagttttaattttcttgtatattttgctagctatgagcttttaaataaaattgaaagttctggaaaagtttgaaataatgacataaaaagaagccttctttttctgagacagcttgtctggtaagtggcttctctgtgaattgcctgtaacacatagtggcttctccgcccttgtaaggtgttcagtagagctaaataaatgtaatagccaaacccactctgttggtagcaattggcagccctatttcagtttattttttcttctgttttcttcttttctttttttaaacagtaaaccttaacagatgcgttcagcagactggtttgcagtgaattttcatttctttccttatcacccccttgttgtaaaaagcccagcacttgaattgttattactttaaatgttctgtatttgtatctgtttttattagccaattagtgggattttatgccagttgttaaaatgagcattgatgtacccattttttaaaaaagcaaggcacagcctttgcccaaaactgtcatcctaacgtttgtcattccagtttgagttaatgtgctgagcatttttttaaaagaagctttgtaataaaacatttttaaaaattgtc

SEQ ID NO: 1521 - DNA, 3686 bp, Homo sapiens
tgtctaaccacttggggtttctcactgggcttgtgggatgatttcggaggtggcaggtggaggggtgtctgcaggtccagaatgttccaccctgctgctcagggaccatgtcagcccatctctcccactctctctccaccaccttcctctctcttttccaggccataggccccatgctagtcccagagatttccaccccccaagacagagaagggagcccacatttcctctatcctaccacgtgccagcagcctgctttacccgtgcacagtctctcaggcagagcccggcatgggcaattacccacctatctctgggacctccccacccatctactgcctacctgctgtgtgaccgagcaaattcactaccctctctggtctctgcatttactttctgtaaaggtggctctcaggtgaccaagagggtgcagggcacagtgacggatgtgctttggagcagtcggctattgctgcataacacagcatcccaaaacagtggtttacagccccagtaattaacctactcatgattctgcactttgggctgggctcagctgggtggttctgctgctgtccctggggctcacccatgtggtgctcatgggagctcagctgcacctgcatagtcagggggtcccttggccaggactgttggcagcaggggtcagattttcctcatggcctctccagcaggccagcccgggtttctcctggtggctgggagccaggagagcggctcccatgcagagtgctggtttcacatttgtgggtggcccatccgttgaggccagtcacgtggccaggcccaggaccagatgggagaggaccgcacaagtgcagcgtgagctgtgggaggtgtggctgaccacgcttagagagtgtggtgccaggaaagatctgatgtgtcaccattctatatctgtgatgggcagacgcaggcaggtcaaaggggccctggggacttaccgagcccctgcctattggccaggcactgtgattgtcctcggtgccatgtgccatggaagccctctcagaggtcgaggggaggcaggtggagacagagcctctgtaggcctttcaagctgtagccccagagcccagaggcagccgaattcatgtgtgcagtcagagagcacttagtgggcactgtagtcaatcagtgagcgcttactggacaccacaggcagcaagcatttactgagtacctctggcagttgatgcatacttcctgagtacctgttcatagcaggcttagctctggatgtggggtggtgaggaatcccacaggctgagaggtggcctgggagctttccagggggcctgaagcaggaggggctgcctgagtgggtcagcagcccagcccagtgccctacgcagccctgcccacacccccaacccagcctctgtctccccagtcccatcccccacaccctggtccctcctactttgtgcctcgaggacactgccccgctgccctcctcacttcccagcgtctgctgtcccctccgctgctgctgcccggcaggattgctctgtgtctcatccacgtttgtccctgcagagttcctcgcctctccccggaaccgccagcctcatgccgcatctcagaggctttttttttctctcttttttttttttttgagatggagtctcgctctgtcacccaggctggagtgcggtggtgcgatctcggttcggtgtaacctctgcctgtcaggttcaagcgattatcccgcttcagcctcccgagtaggtgggactgcaggtgcctgccacctcgcccggctaatttttgtatttttagtagagttggaatttcagcatgttggtcagtcaggtctcgaactcccgacctcaggtgatctgcccgcctcggcctcccaaagtcctgggattataggcatgagccactgcgcccggcctcagaggctttcattcccacttttcccccaaaactgcgcctctttggggtcatcagtgaccttcgcagggtcaagtcatccccctctcctgtcccaggaccttaagcactgccctgttttacagaagaggaaactgaggccccgagaggtaaggcagccagctcagggtcatcgcccacgcccagaaatgccaggattcccacccggacctctgaccaccaagctccaccttagtctggcccggggtcatccctcaggtgctgcctcatgccttgggtctgtctctcagaccaccctggcccttgcccctgctccccagcctgactgaagctgggccaggcagagactgaagactgaacgagtgtggccagcattcctcctgcacctgcccggagcctccaggcccagccgtccatgttcccagaagtccagaagtggctttgctgctcctggactctcactggccccccatcgacccttggaccaataactgccatcaaaataatcctgattatgcacctatcaagtccctggccctgggctaaagtcttcacaggggtcatctcatttcatcctcagccccaaaaggcaggtctcacccccaaatacatatggacaaaaagaggctctgccaggtgtgatggcgggcgcctgtagtcccagctactcgggaggttgaggcatggggatcgcttgggcccaggaggcggaggttccagtgagccgagatggcgccactgcactccagtctgcgcgacagagcgagacttcgcacccgccgcccccccaccaaaaaaaaaaagggcacagtcagagaagagcagagcccggcttggtttggtcccagccctgcctgcctctgatgtgctgtgtgacataggcctggtgctggccctctctgggtctccctttctttcttcctttcctttcttttcttttcttttcttttcttttcttttctttccttccttccttccttccttccttccttccttccttccttccttccttccttccttccttctttctttctttcttttgacaggatctggctgtcatccaggctggagtgcagtggcgcgatctcggctcactgcaacctctgcctcctgggctcaagtgatcctcctgtctcggcctcccgagtagctgggactacaggcgcacaccactacccccagctaattttttgtattttttgtagagacggggtttcaccatgttggctaggctggtctcaaactcctgagctcgtgatcctcccgcctcagcctcccaaagtgctgggattataggtgtgagccaccgcacccagccttggttctccctttcttcatctggataaggaaggctggactgcaccttctctacaggctgagttggacattcgcagatctaccctcccaacctgcattctgcctcaagcagcaacgcccaccccaggctcaggccacatggagaagccacccctagttccagtggtggatgtggcacctcggcctggccaatcagagctcccttgtcctaggttcctagtgattggttcgagatggacacgtgacccaatgagcggcctttcctgggagttctaccaggagcatcaggaaggttgagctgggtgtatgggaaccaggccggggcgaggggttccaggggggacctgagaacattgcgtggagccctggatccaactgtacctgacactagccaatttcatttcttcagtttcatggacccctaaattatgatttttgccaaaatg

SEQ ID NO: 1522 - DNA, 3940 bp, Homo sapiens
tgttgcagacgtgcaggtcagtggtgttacattcatgctgttgcaggcgtgcaggtcggtggtgttacattcacgctggtgcaggcatgcaggtcggtggtgttacacacaacgctgttgcaggcgtgcaggtcagtggtacacacattcacgctattgcaggcgtgcaggccggtggtgttacattcacgctgttgcaggcgtgcaggttggtgttacacacattcacacttgcaggcgtgcgggtcggtggtgttacacacattcatgctgttgcaggcgtgcaggtcggtgttacacacattcacacttgcaggcgtgcaggtcggtggtgttacacacattcacactgttgcaggcgtgcaggtccgtggtgttacacacatgctgttgcaggcgtgcaggtcggtggtgttacattcacactgttgcaggtgtgcaggttggtgttacacacattcacactgttgcaggcttgcaggtcggtggtgttacacacattcacacttgcaggcgtgcaggtcagtggtgttacacacattcatgctgttgcaggcatgcaggtcggtagtgttacacattcatgctgttgcaggcgtgcaggtcggtggtgttgcacattcatgctgttgcaggcatgcaggtcggtggtgttacattcacgctgttgcaggagtacaggtcagtggtgttacacacattcatgctgttgtgcagctatcacttccatctccagagcccttttcatcttaaaactgaagctctcccatcacacagtgacccttcatgtccctccccagtccctgaaaaacactgttcaggtttttcttcctggacctcattgtgtggagttcctcgtgtgagtgcagtcacacacgatttgtcctttttttgttttcgtttgttgagacagagtctcattctgtcactcaggctggagtgcagtggcgtgatctcagctcactgcaacctccactcccagattcctttttcaggctgaatatctgctgcgtggctaggccactttttgtttaatcctctctcctctggtggacaccaggactgtgctgttttggttgctgtaagcgcgggtgcacacgcctgcctgaggctgtgttttggccgttgtgagtgtgggtgcacacacctgcctgaggctctgctttgttgtgagtgcgggtgcacacacctgcctgaggctgtgttttgggtgttgtgagtgtgggtgcacacacctgcctgaggctgtgttttgggtgttgtgagtgtgggtgcacacacctgcctgaggctgtggcgcgatctcggctcactgcaacctccacctcccgggttcaagcgattctcctgcctcagcctcccgagtagctgggaccacacccaccaccacaccccgttatttttttgtatttttagtagagatggggttttgccatgttggccaggatggtctggaactgacctcaggtgatccacccactggcctcccaaagtgctgggattacaggtgtgagccactgtgcccggcctctttttactttgttaatggtgtattttgatagataacagattgtcattttcatgaagcacagctggtcagtttattgttgctcatgtatttggcctcatgttcgagtccctgtttttaatcatgagctggacacagccctctttagagcaactgtgaccacttgtggtgagaagtgcagcccacaccatccacgtgaggctcccacacgccatccacgtgaggctcccatgcagacatttagaaggcgttttcactgcagctcagaaaatggccccaggcccccatgggcacccccatgtcaccagggcctctggttgctgccggtacacagggataggcagccaggcctcgaaggtgctgggcatgggtttgggtgtctgcgttgggtagagacccggagcgcccttgctgggcgtgccctaacatcccggtaccctgtgcccctctgtgggccaggacgcctggtgctgccagctgggcgtaagccctgaggggctgagggtggctgtgactcggaggatgagtaggagctcaccaggagggcgtggagccgaggcgtttaatatcatcaggagcaacactgggctcagaaggcaggcacacttgccgtccctccagagccatggctgacggccaggcctggtgggctctcgtgaggacagtgcctgtggttgtcagatgctgtcccttcgagtaagggatgagagccatcctgaagatgggtcagctctgtggtgaccacccgttgggagcagtgacattcaggtgcgttgcactggtggctgtgtggctgtgtggtacggccaccaggagccatgtgggcaaggacagctgtgggctgggcacagagctctctctgctgggagtcagtcggtgctggggcgaggggaggcagagctcacagagcccctctacagctcaccctgcagctcggccctggccagtaaacccaccatccccctttctgccgcaggaggcagtggagaaggtgacacagcacatccacggcctgtctgggaagaaggatgggctggtgcccatgttcatcaatacccacagtggcctcttcacccacctgggcgtattcacgctgggcgccagggccgacagctactatgagtacctgctgaagcagtggatccagggcgggaagcaggagacacagctgctggaagactacgtggaagccatcgagggtgtcagaacgcacctgctgcggcactccgagcccagtaagctcacctttgtgggggagcttgcccacggccgcttcagtgccaagatggaccacctggtgtgcttcctgccagggacgctggctctgggcgtctaccacggcctgcccgccagccacatggagctggcccaggagctcatggagacttgttaccagatgaaccggcagatggagacggggctgagtcccgagatcgtgcacttcaacctttacccccagccgggccgtcgggacgtggaggtcaagccagcagacaggcacaacctgctgcggccagagaccgtggagagcctgttctacctgtaccgcgtcacaggggaccgcaaataccaggactggggctgggagattctgcagagcttcagccgattcacacgggtcccctcgggtggctattcttccatcaacaatgtccaggatcctcagaagcccgagcctagggacaagatggagagcttcttcctgggggagacgctcaagtatctgttcttgctcttctccgatgacccaaacctgctcagcctggatgcctacgtgttcaacaccgaagcccaccctctgcctatctggacccctgcctagggtggatggctgctggtgtggggacttcgggtgggcagaggcaccttgctgggtctgtggcattttccaagggcccacgtagcaccggcaaccgccaagtggcccaggctctgaactggctctgggctcctcctcgtctctgctttaatcaggacaccgtgaggacaagtgaggccgtcagtcttggtgtgatgcggggtgggctgggccgctggagcctccgcctgcttcctccagaagacacgaatcatgactcacgattgctgaagcctgagcaggtctctgtgggctgaccagaggggggcttcgaggtggtccctggtactggggtgaccgagtggacagcccagggtgcagctctgcccgggctcgtgaagcctcagatgtccccaatccaagggtctggaggggctgccgtgactccagaggcctgaggctccagggctggctctggtgtttacaagctggactcagggatcctcctggccgccccgcagggggcttggagggctggacggcaagtccgtctagctcacgggcccctccagtggaatgggtcttttcggtggagataaaagttgatttgctct

SEQ ID NO: 1523 - DNA, 3685 bp, Homo sapiens
tttgcagagtgcccagtcccagatccataacacatgctgggccatgatggggctgatggccgttcggtggggacgacgggaccgtccctgagccttgggtttgggtagaggagggacactcagctgtgagccggtggcctgggctgagtgaatgtagagaggaggggaggcctgtgggccaggtcagctgccactctgggaacagacacctacaagagccacatgcctggttcctggggcaagaacgtgggctgctctgaccaagtggggccctgcagagaggctcgcctcttagaagtgaaccacccaccattagccatgtcagtggaagagcaagcacatcagggacccatggaaacagcgaggtgggctgcgatgaggatgctgcttcctggtgtggtagtgatgacggtcacagcagctgctctctgtggccctactgtgttcacagctggtgctgagccacatatgtgccaggtgcacacacacgcagacgcatgcaggcaggcatcagtgtacacactgatgtgcacacacagatgtacatggagacagatgcacacacaggcctatgcacacacgtacgcatgcccacacaggcacctgtgtccacacacatacagatgcacccacagcatcccatctgtgccacacactgacataggtacatggagacagatgcacacacaggtctgtgcacacacgtatgcatgcacaggcacctgtgtacacacacgtacagatgcacccacaggatcccatctgtgccacacacagacgtaggtacatggagacagatgcacacacaggtctgtgcacacacatacatacgcatgcacaggcacctgtgtacacacatgcagatacacccacagcatcccatctgtgccacacacagacataggtacatggagacagatgcacacacaggtctatgcacacacatacgcatgcacaggcacctgtgtacacacacgtacagatgcacccacaggatcccatctgtgccacacacagacgtaggtacatggagacagatgcacacacaggtctgtgcacacacatacatacgcatgcacaggcacctgtgtacacacacgcagatacacccacagcataccatctgtgctacacacagacgtaggtacatggagacagatgcacacacaggtctgtgcacacacatacatacgcatgcacaggcacctgtgtacacacatgcagatacacccacagcatcccatctgtgccacacacagacgtaggtacatggagacagatgcacacacaggtctgtgcacacacatacgcatgcacaggcacctatgtacacacatgcagatacacccacagcatcccatctgcgccacacacagacataggtacatgaagacagatgcacacacaggtctatgcacacacgtatgcatgcacaggcacctgtgtacacacatgcagatgcacccacagtatcccatctgtgccacacacagacatacgtacatggagacagaagcacatacaggtctatgcacacatgtacacatgcacaggcacctgtgtacacacatgcagatgcacccgcagtatcccatctgtgccatacacagacatacgtacatggagacagatgcacatacaggtctatgcacacatgtacacatgcacaggcacctgtgcacacatatgcagatgcacccgcagtatcccatctgtgccacacacagacatacgtacatggagacagatgtacacacaggtctatgcacacatgtacacatgcacaggcacctgtgtacacacatgcagatgcacccgcagtatcccatctgtgccacacacagacatacgtacatggagacagatgcacacacaggtctatgcacacatgtacacatgcacaggcacctgtgcacacatatgcagatgcacccgcagtatcgcatctgtgccacacagacatacgtacatggagacagatgtacatacaggtctatgcacacatgtacacatgcacaggcacctgtgcacaccctatacctccttatctgctcttcccctccctgccgccttctgggcaggtagcagtccctggcctctccccctggctgatcactctccctcaggcagtggagatctgcgtctggacaccctcagatcctgtcattgcctgcccagagtccttcaggggcacccctctgccttggtgtgcagtccagggctctcacccaggtgccgcaccctctggggtcttctgtccagctcccttgccccatgtgctgtcacggcctcaaggtagtgaggctaggaggttttttctgaccaatagctgagttcttgggagaggagcagctgtgcctgtgtgattccttagtgtcgagtgggctctgggctggggtcggccctgggcaggcttctcctgcaccttttgtctgctgggctgagggacacgagggcaaccctgtgacaatggcaggtagtgtgcatccgtgaatagcccagtgcgggggttgctcatggagcatcctgaggccgtgcagcagggagccccatgcccctgggtcgtgagcttgcctgcgtatggggtggtgtcgtggagcctcatgcccctgggtcgtgagctcgcctgagtatggggtggtgtcatggagccgcatacccctgggttgtgagctcgcctgcatatgcagggtctgtcatggaacatcccaagtctgtgcagcagggagccccatgcccctgggacatgaacccacctgcgtggaatgctgtttgtgaggtgtctacagggtttatagtagtcttgtggacacagaaatgcacaggggacacttacggacacagaaatgcacaggggaggccgagcataaccaggggtgaggggcaggcagcagttgtagttactgccgcggggcactgctatgtgcagggacagccagcacccagcccatcaccactccctgggctggctggcaggtatggcaccctgggagcccggcatatacccagggcacccctacggctgccgccagtctcatgcccaggtgggtgctctgggctggagcgagggccaggttttgggccgaggcttccccaggcaatcctgtgagctcccttctagcctctgacccagtctggtctggcttgcatggatgtagggcttggggtgggaagttcaggtcctggctttgcctttgcctgatgtggatgagcagctcacatgctcagggccacctgagactgtcactgctctcccctggctactgggaggagtcactgagagcttcgttacccctgctgccttgcccagggcacaccctatacctccttatctgctcttcccctccctgcctgttcagtgtcaacacttccctgcacatcttaaaactgggctttattttcgctgaaggaactgtgttgggacccttgacatctgtcaggtttgcacatgctgtttttttttctcagcccacgtgttctcccccacgtggggtagcagcaggacagacagtgaatcacagagtctgccctgagcagaggctgctgtccctgggactcctagccatggtcagactgtacaaaacggttttccagaaatgaaatgtaaatccatttttatactgaaaatgttactgaaagtcacttttatgagcatctgccttaataaacagacattgattccctt

SEQ ID NO: 1524 - DNA, 3798 bp, Homo sapiens
ctttcactcactggttgtttaggagtgtgtcatttccacatatttttgactttcccaaatttccttcactgttgatgtccagtttcacgccagtacaactgaagaacactcctgctttggtctcagtccttttccattcactgaggctcattgtggggcctggcacgtggcctgtcttggggaatgtcccatgggcgcttgagaggactgtgtattctgccgttgttgggtggcgtgtgtgatagatgtccactcggcgtacctggtttctggtgttcatctccggaatgttgctgacactagaaaatcagcagctttccaccgttcccagcgccttggctttgggagaggcccgtgagcctgtgggtttggagcctggctgcacgggaggagcacgtgtgggaacgccaggggccggctttgagccccattcccccaacatgatgccgtgtgtggcagacgtgacatttggttttgctcccccagggttccatctgcgacaggggctacttgtgtccctggcctcgtcagctcgggctgaaggcggccctggtcctggccagaggggctttgtgaagcagaaatagatggcctggtgcaggggccaagctcggctagggcctcagccctgggagttgtaaagaaggccggcctctaccatgggcatctgcaccaagctgtgcccatgtcacggtgtgctcagcggttccccgcctgtggggcccaggctcacagaggtgtgaaagaggcaagcacaccgcaggggcctctgagcccagccagcctcgcttcaatgctgggaggctgacgtcttcctttttgtcttctgcccaggccagctgcgggccgtccagcggctgtgccacttctacagcgccgtcatgcccagcgaggcccagtgtgtcatctaccatgagctccagctctccctggcctgcaaggtggccgacaaggtgctggaggggcagctcctggagaccatcagccagctctacctgtccctgggcaccgagcgggcctacaaatccgcactggactacaccaaacgaagtctggggattttcattgacctccagaagaaagagaaggaggcgcatgcctggctgcaagcagggaagatctattacatcttgcggcagagcgagctggtggacctctacatccaggtggcacagaacgtggccctgtacacaggcgaccccaacctggggctggagctgtttgaggcggctggagacatcttcttcgacggggcctgggagcgggagaaagctgtgtccttctaccgggtgagctggcctgtgggctgatgtgggtgggtcccagggggggcaccttgagggctgaggcacaggtgtggcagggcagagccctcgcacctggaggcagggccgcccatgcacatgcttagtttcctagtggtttcaccgggaatgatattgactgtgccccccgcccgggacaaacacttggggcctggacacagcaatggccttacccttgcacccgatgatctcaagcaaccttgagtgggaagtcctgtccccatcttacagatgaggaaactgaggctcagagaggcacagggacacgtcaaaggacacacggcatgccagtgggaggcccagggccagggcccaggtctgcatgcaccccgaagcggggacggcttcccccttcctctgagctcatggtgtggctcagccctgggcacagataaatgtcgtgtttttagagcagagaggagtgcaggctccccccagtcagacccctggtgcccaggcgggaggggctggtttgaggctgccgggtgtagctggatgggcctcaggtgactcttcagcccctagcttgggtgtctgaaccgccctttatctcagagcacacagctgtgtcgaggcccaggggtagctggggcgtgggaagctccgagcacatgtttgagctctgaggagggcgctgggcaaggtgggtgctgcgggaagcctgaccccacctgcctgtgtggcaggaccgggccctgcccctggcagtgactacgggcaaccgcaaggcggagctgcggctgtgcaacaagctggtggcactgctggccacgctggaggagccccaggagggcttggagtttgcccacatggccctagcactcagcatcaccctgggtaagccccctgagcccctgccctgccaggacccacactttgccagagctcagcctccaggtctgcagggcaggagccgaaacagctgccggattttcctggtctcctgtccaggcaggcacatctgcccagctggctcccccgtccggccgtggggcacagcccgaggtccttcactcagtgcagagctccctgcctggctgagctctgcttcctgtgcctcttccccctgctgaccacgagggctgcccagtgtgccctctgccttccagacatgccagacatctcgttggtccctgcatgtgccaggctgagtggcacattccctttctcttgtgcccttcccaccctcatcaaccacacggctctgtggctgatgaagtcccagttccccttccagcagcctgccccttaatgccgggcatcccccggtgctgtgccagggtcgtctgtcctctagagagagggagccccagacaggccacatgccccaacgccttgtggcccaggggctggtacacaggtgtgcagccgcgtgggaatgcattgaatgcaggctccacagcactcaccctgaaaaggggaggacaccggagacagcctgggtgggctcgcgcatctgtggggggacctggagctcaggcacgcagtgactccccaaggtaggggactctgatgatgacacacccaggaagagttggatgtcatgtctgtgggttgcctggagccctggtgcccaggagcgcgtgggctgcatgccttttgggctctcctggttaaaaacagtgagcaaaggcaggtggctatatgtaggcacagagctgggccatccaagtccgactttgccaaagcctcacggtagatgggggcaggccttattagttctgctttgtagatgggaaagtgagtctgggagctgggaagggactggccagaactgcccaggtgaccgcagtgcctggaggcgagccaggtgctgccggggtctgcatgcctgccccggggagccacgtcctcacacctgcccccttggcctgcaccccaggggaccggctgaacgagcgcgtggcctaccaccggctggccgccctgcaacaccgactgggccatggcgagctggcagagcacttctacctcaaggccctgtcgctctgcaactcgccgctggagtttgacgaggagaccctctactacgtgaaggtgtacctggtgctcggtgacatcatcttctacgacctgaaggacccgtttgatgcagccgggtactaccagctggcgctggcggccgccgtggacctgggcaacaagaaggcacaactgaagatctacacgcggctggccaccatctaccacaacttcctcctggaccgtgagaagtcgctcttcttctaccagaaggccaggaccttcgccacagagctcaacgtccgcagggtcaacctgcctcctctgccactctgcgggtgggccccctggttggcccccagccaccctcgctgaggacagcatccaagggagtgggttttgtgcaagggctgggggtctcctgcctttcctggtgtcgccggtggctcattttctggcaaatggaggcacgaacgcaggggccaaatagcaataaatgggttttgttttt

SEQ ID NO: 1525 - DNA, 3423 bp, Homo sapiens
cttattattgcaattgaagtctaatgcatgttcacttttaaaaagtttagaaagtttaagacgtttatacaagaaaaagcacatattccttcctcacagacaccacagctcctgccacccatctgcctgccattttcacactgccatggtttaactcgttccctgtggccatgtagaatgatatgctgccaccaggtggcagcaccaggccacagactccaggtcctggaggtcaaggcccagtggcctgtccactgaccttgagaaccacacatttctctgtcatacacatcaaaagagccaatacttttgttttttttttttttttctttgagatggagtctctgtcgcccaggctggagtgcagtggcatgatctcggctcagtgcaacctctgcctcccagtttcaagcaatcctctggcctcagcctcccaagaagctgggattaaacatgcaccatcatgcccagtcaattttttgtacttttagtagagatggggtttcaccgtgttggccaggctggtgtcaaactcctgacctggaactcctgatccgcctgcctcagcctcccaaagtgctgggattataggcatgagccattgtgcctggcttcaacttacttttttaaaacttgaatcacattctgtagactgaaaaataacagaagttagcacttataccatcacttcattaattccctgtcacagcctaccatgagggttcattatcccttttttacaaatgaagaaaccaagtctctgaggggtggagtagcgggctaaggtcacacaggaagccacactatgtcccaacacttggaatgatgtcaccagccctgtgctttctttttttcgagatggagtcttgctctgtcgcccaggctggagtgcagtggcacgatcttagctcactgcaagctccgcctcccgggttcacaccattctcctgcctcagcctcccgagtagctgggactacagttgcccaccaccacacccggctaagttttttgtatttttaatagagtcgggggtttcaccgtattagccaggatggtctcgatctcctgacctcgtgatctgcctgcctcagcctcccaaagtgctgggattacaggcattagccaccgcaccttgccagccccatgctttctttgtgaccactcccagcctgtttcccaacctcccaccccacagggagtatgaggagtagcagtgatgcctgtgacagaggcaatgccaggcactatgtggtgtgggtaaggggcaggttgtcacaggagctgccatccagcaggtgtcctgatacccaacagggaagctgaggctgggggcctgaccttggtgccctgccctgacccacagccagcccccctggcctgatcttccctggcacccccttgtaccctcagttccggaaccccaaggcatccttgcgtgtgcggctctgtgacctcctgagccacctgcagcggagcggtgagcgggactgccaggagttctaccgagccctgtatatccatgcccagcccctgcacagccgcctgcccagccgccacgctctgcgtaagttccacatcaccaaccatgcatgcttggtgctggcccggggagggcaccccagcctgccgttgatggcatggatgtcctccatgaccacccaagtctgctgcagcccaggcctggcatcccctctcgcctcagcccctccccagaggccaccctctggccccgaggggagagtgtggcaggcacaggcagtgcagatgttggtctctgtctcccactttctcccccttcctccgtctctctctcatggcagttttcacacagcatggggcatcttatacgtccactcttgcccttccttttctaacctcattccacggggatcccttcatgtctgtgtggacagcaaccttgttcccacagctgcatggcgctcctaggcggtcccagctggaattacccaaccccatgacggaccctttcattgcagcgatctgcacacgtgtgggtgtttccataggacattgtcaggcacggatggctggtccgaagcacgtgcatttcagttttgaggctcctgtcctcaggcagtgtggactcaggccctgggagtcatgtggatgccagtagcctgggcccacagagctgctgggatgtggggggcatatcaagttgaagatggcaactctgatctgacgcctctgtgctcagggcccctggaggaggggctactgccccttggcccttagacaacaggacagagaccagagggactgggcggcttgtcccaggctactgggctgtggtctctgaccccctggaggcctccccacgcctcacagaacacagtgcagacggtgggcggggagagctcgaggggaggcccagccctgcaggtgggactggctctccctccccagccacgagtatgccacagggggctttcaaaaccaggcagggccaagccttggccccactggaggtagagcaccttctgtggctcccgggtgcctttaggcccgtccaggagttggagcagaggagaagacccagactgtgcatagttccctgaggagggctagcctcaggtgccacagcctggttcggcctggcggccccaggacgcagcagcaaccttgggcttcctgcggggtgactaccttgccctccggccctgcccgttgactaactatgctctgtggttttgtttccagagaactcagattgcacagagctagactcgggcagccagagcggcgagctgagtaacaggggtaacacctccctgctgcccctccctctctctccctctctctccctctctctttaccctccccagggctccatctccgcctcaggggcttctccaccccaagtctggctccattcctggccttctgttggtgacagacccccccctaaggtgctcgtttgggggctcttcaggcagcacctcagcctggcacccccactcccctgcacagcccccaggcctcaggaccccacccctctgaggcccaggggagccctgttcacgctggtttctccccaggacccatgagcttcctggctggcctgggccttgctgtgggactggccctgctcctgtactgctatccgccagaccccaagggcctgccagggacccggcgcgtcctcggtttctcgcctgtcatcatcgacagacatgtcagccgctacctgctggccttcctggcagatgacctaggggggctctgacagaccctggacccagggcctcacctgccactcaaccaaagagtcctcgagccggcccgccaaggggactgctgcttctttttctaaatgcatatttttcattatttataatttgtgtaaaaaacacaccttcaccttacaaggtgctgaccatattaaatgttcaagttctctc

SEQ ID NO: 1526 - DNA, 2931 bp, Homo sapiens
agccatggtttcgcttccatagtcactaattaaagtgaatcataattatttctgctaatttggattcgattggaggagtttttaggctgtggtaatttggtcattacacattatcttctactgcgcctgagatgctcagagtgtcgacttttgttctctatccaaaagccgctcatggtgcttccacggttttctgaagcgtcatttggccagtggatgcggcacagggctttctgccctgagaggcagcagctgtttcagatgtgggttctgtccctttagggtgagacatgaaaaagtggtggctttgcagggagggctgcggttcagaggcctgcctagggcaggtttcctcacttcccagttcgccttcagaagcaaccacactccgcctgcccagggaaacactggtgcgcaacctggcgcctgccatgagtggcagagcttgtcttcaagccctatgggagccagggcaggcagcaagggccctggcccccacttctggttcgtcgatggctcttgtgtggctctaccaggcccagagtttgggtcctctgctcttcattcacagcaagggatgctgaaattgaagcaactcctgacagatagatccaaccttcccattttggcatatggtccgttggtgttctgttccctggatatatttttgtctcgacagctagagtgactttctggggaggaaggggatgtgttgccaggtccagggtgggaggatgtgccccttactcccacccctcactcccaccctactacaggtggctcagaggccgggccctcccccgccccctaccccagcccacttctgcacagatcaatccacacatcctgtccccacctccctcctctgtggggcaccctcactgttcccactgagctcaacagtgtctgcctgggacagcccctcctcccaggttctgtcctgaaagttcttttcatcttcctctacctcctgggtctcaaactgtaacctgatctatgacattcaaaaattttttgtattgaccaatttttttttttttttttttttgagacggagtttcactcttgttgtccaggctggagtgcattggcacgatctcggctcaccacaacctccgcctcccgggttcaagcaattctcctgccatggcctcccaagtagctgggattacagacatgcaccaccacgcctggctaattttttatttttagtagagacggagtttcaccgtgttggtcagggtgatctcaaactcccgacctcaggtgatctgcccacctcggcctcccaaagtgctggaattacaggcgtgagccaccatacccagccttgaccaatatgttaaaatcaagatatttcacagaaaacccggtttgcaggttctctcagcagccccaggcctgccacattccgtaccccacgcggctgcagtgagctggagccgtggttggctgccccgcagtggggtttcccagcaaccaccatgacacctgcctgggagtgagactctgcagcttccatttctgccctttctgaggcccctctgctttgtcctggcccagacctctccccccagccctacatctggctgcctccaggacacatccccattcactcgcaaaccagactcagcctctgccccgggctgctcctcttctgtgttctgccatcctgaagccagaaggaccaccttggctgctctgtcctgtgcccgacccatccattccaggcccctagctcactttccagatggccctgggtgcaccccacatctccagctcccttggcccaggccccctcctctgcatcagccctgctgtggtttcagccaccctcctcgtctgaggccaggtgtgactcctcttatgccctccactgcctcaggaagtctgaacgtcaccttgtaccacctcccgcccccctgcccccgccacccttagctccagctctgccccagccacaaccccgatgaggggctcctgtacccctggcccctgcttgtcttggtcccacactgggtgtggccacaccacctcatggagctccctcagcggccagccacacaatcctctcttcccttcatgggctcctctgccctcgtgcccagggtcttgtctgtccatcagacagagcaccaggacagcagagctgtggtgtgcccagcacacgcggatcccagcgcggagaagtgaagtacgtggggctgccttggggacaggcccagccggagaggggccgggacgctggagggactcgctgcagaaatcagcggtcccctccttcccggaaggccctcatggtttcccgtatgggacttcagagccttcagggaaatgtggctctgtgaaggaagggactggaatccctttttcctcacctacaatagagccttattctggacacctcttccgttgacagtctttgcccaccaggactcaaaggcacagcctttcgtgtgattgcttgtttttgcaagagaaacacaaggctctgcggctcccaaggccacgagccaggaatcaatgaggcccagcaaataatcaagtggatcttggtgagatcacacggcagatgaggagggagaagcggggcgggagggagcaggacctcgtcactcctccggccagtgggttcttgtcgtgcagggcccagtctgaggcctccctgcgagtgtccaaccctgtccgggacacagcgcggggcaggtgacaccaagtgttggatgagtgagaggctgacgccttaagaccaacaaacaggcggccggggagaaaccgcaaagacacccgctcctcagaaagcagcgcagagcagcgcacgacaaacagatccgactggaagctgcctcttagaccatgtgagcctgtgaccccggcccacaactcaacttctggcctcagtgtgttcaacggtaaaagcagcatcacttt

SEQ ID NO: 1527 - DNA, 3117 bp, Homo sapiens
ctgatcatctttccaggtaatacaagagtgttcctgcaaagtgagcctctgaagctttggaggggaagtgtattagtctgttttgcgttgctacaaaggaatacctgagactgggtgatttataaagagaagaggtttatttgacctatggttctgcaagctgtacaagaagcatggtgccaacatctgcttctggtgaggactcaggaagcttccactcatggctgaaggcaaaggggaagccggcatcacatggcaagagagggagcaagacagaggagggggtgcttcaggctcctctaaacaaccagatctcgtatggactcacagagtgagaactcactcattacttcaaggacagcaccatgacattcatgaggggtgcgcccacatgacccaaacacctcccactaggccccacctccaacattggaggtcacatttcaacatgagatttggaggtggcaaaacatgcaaaccatacagggagggaggagcagggtggtggatacagctgcacagactgggaaatgggccagaagcagctttccggcttgtgtaggtgctaggaaagacaggctggtaagacacagaatgcctttcggtctccaggcgtccagcatggtctagatcagatctgcatataaggtcatcttatcagaagggttctttgagttctggaaaccacactctgcccctccactttcacatctggaatatcaggacaatatttgacatgtagcatacatcggttttggagcctaggaaattcccacctaccttcttccacccactacactcctttctgttcctcctgatgctaggcttgttcccgcctccgagccttcacactgctagccgttacctatgcctggaatgctctcccctggtgtctaatctgcctgatgcttcctcatccttcaggactgagttaaatgtccccacctcagagaagccttcgctgactgcctttgctcctcctgggcctggttgcccctagacccactctctgccccccaacacttagttctatcctgcaggagcactggcttccagcagagagcagctgctggggaccactgacaggagactgggaagacaaggaaaaagccctctcctctctgtcccaggtggcttcttaggtagtggccatgtcttcatggttccagcttctgcagagtggcgtccgaacctggcttggaaaataccgcttttccttttgcccctccggtccaggcatgattgcagcaattcagtcacttgtccgggttccactcctaattctagttcttttgctattttcaccacatctgcagtgacttctcccactgaagtctttaacacttcaaaggcatccttgagggttaaagtcaacttctttcaaactcctgttaatcttgatattttgacctcttccctggaatcacaaatgtccttaacggcacaagaatggtgactcctttctagaatgtttccaatttgctttgcccagatccatcagaggatctctctgtagcagctatagccttacaaattgtatttcttaaataataagacttgaaagttgaaatgactccttaatctatgggctgcagaatggatgctgtgttagcaggcatgaaaacaacttaatctctttgtacatctccatcaggactcttgagtaaccaggtgcattgtcaatgagctgtaatatttttaagggaatctttttttttctgagtagtaggtctcaacagtggacataaaatattcagtcaaccatgctgtaaatagatgtgctgtcatcaggctttgttgttgcatttatacagcataggcagagtagatttagcataattcttaagggcctaggatttttggaataataaactagcattggcttccacttaaagtcaccaactacattagcccctaacaagagggtcatttagttatttgaagctttgaagccaggcattgacttctctctagtgatgaaagttctagataacatcctgttccaatagaaggctgttttgcctacactgaaaatctgttgtttagtgtagcaaccttcatcaatgatcttagctagatcttctggatgacgtgctgcaacttttatatcagcatttactgcttcacttgcccttttaagttatgcagatggtttctttcattaaacctcatgaaccaacccctgctagcttccaacttttcttctgaagcttcctcacctctctcagccttcatagaattgacaagagttagggcgttgctctggattaagctttggctcaagggaatgctgtggttaatttgaccttctatccagaccactcaaactttctccatatcagcaataaggctgttttgccttcttgccacttatgtgttcaccggagtagcactttcaatttccttcaagaacttttcctttgcattctcaacttggctaactggtgcaagggacccagctttcggtctctcttggcttttgataggtcttcctcgctaagcttaatcaattctagcttttaatttaaaatgagaggcatgcaattcctcctttcatttgaacacatagaggccattgtagggttattaattgacctaatttcaatattgttgtatctttgggaacagggaggcctcaggatgagagtgatgggggaatagctggtcagtggagcagtcagaacacacacagtatttattaagtttgccatcttgtatgggtgtggtttatggcacccccaaacttttacaatagtaacatccaagatcactgattatagatcaccaacaccaacacagacataataacaatgaaaaaaaaggtgttttttttttctgaaatggattctagctctctcgcccaggctggagtgcagtggtgtgatctcggctgactgcaacctctgcctcctgggttcaagagattcttgtgcctcagcctcctgagtagctgggattacaggcacccaccaccacactcggctaatttttgtatttttaatagagaaatggcctcgaactcctgacctcaagtgatccacctgcctcggcctcccaaagtgttggaattacaggcatgagccaccgcgcctgaccaataataaaaatgtttgaagt

SEQ ID NO: 1528 - DNA, 3230 bp, Homo sapiens
ggttggccgcgcatggcggcgcatgcctgtggtcctagtggctcggggggctgaggcaggaggatcacttgaaccaagagttcaaggctgcagtgggccatgaccgctccaccatactccagcctgggctacaaagtgagaccctgtgtctaaaagagaaagaaaaataaaaagtgaggctgggttttttcactgtaacacatgtaggccaggcagctacttagttctttctaagaaactttcagctgtaggagttgaaaccagagggctgtcctggttctctccttgtggcagagtgaaccatgaaaggcccgctgtgctgtcttgcgctccgagcatggggatgcagacgccactctgcagtgctggaggagccctgccccgtccaggttcccctcctgcctccccttgggagctctgcccggtggcccatccatcttctgtcccgcagcctgagatctgtgagcctggtatgtcccgtcagctggaactcctggtggctagaggcacacgttcctcttgaactgtttcagccaaggcgggttgagtggtctcagagaatccaggggagagtccagcagccacattgggggcggtgggtctccctgggccttgggaacgatagcattggctcactgtccatgtggccaggtgtgcggtcaccacagcctcctgcagacttccaccagccacgtgcctctggcttcgcagcagaggccaagcaccaaagactgggtgcctcccccacgtgctggtgctcctctcttctgcggagttcaggcacctgggcacgggtgaggcaggatcgaggaggcaaggccagagcccgtcatatggccgtggggtccctccgcgcatctggccaggccaactttcagtgtttgatgttttgtacctgagcagcatctgtatttctgtacgtgacccatttttatcttgttaaaaaattgacaatggcgttaaatgtattgtgactcaagtaggaaagcttacgcaacccccttcatcccaaggtggacctggctgtttcctccgtcagcgcccgtggctgctcctttcccggaggtgcggctgcggccatgccacctgctttcttgtcttcggcccatgtgccgtgagcgtttctccacggtccctacaagcctgcaggggctctgcttccttgcttctccacctgttgcgggggcctgggtgcactgctccttcacccttgacctctcgtggctaaccatctcacgacagtcttcgtgctaaagtcccctctccccttctctgggtctatgtcataggtaaagttctaggaccgggactcttgtgtgatggacctaaccccccacctccatggcctgtatacaaattaccgccctgaggccgataggaacttctggctccgtcttccacagtccatcctatgtaaaagtccattctgaaaatggcatgcttcaaaactagttctagaaagttctgcagttgtttcctagcccagggagagtcatcacggccagtccgtcctgtgtgttaacttatttggtccttaccacggctggatgaggagatgcttctgttgacagatgaggaaactgaggcaccgagaagtcacttgcctagggacacacaggtggggctggtgagtggcagagcaaggatttgagccaggtggtctggctcctgtgtcctgtactagagaccacagctgggggccctggggcaggtggcgtctgaggccatccgtccttggctctgccgcctcctccggaatgaatggccctggcatcccggtgcagatcagtagagtcctggctgcacactggggccaaaacaggcacttgaaattagggcctcatcgtgcccttctctcttcttcttcctggactttgaaattgctcactgcttgttgcacatctgctggagataacacggccatgtgtgcgtgtgtttgggggggttctgcctgcaccctgaaacctgtgggccaggagaggcctggggcatttgtcaggagcggcgctgtgcagcctgtgttttgctctccatacttcctggcacttaaaaaactctcgtggtattgctctaaaagcaaaaaggaaaacggaaggactcgatactcacatttcaaaaggaagttgtaaaatgtacggtctgtgcctggggtgagaagccctcgtgccttcctggcatgctgcaggttcccgttcaagttgctcagccagatctgattgtgctggtcaggctcacctgccaggtgagtgcgcggccggcctcacgtggagatgtgcctggtgtgcctggcagagccctttcaggctttgctttctaggagagtggtggaggaaatcagtcatttcaaaaccttttgtttttcttttgtacagcaaaaagatggcacctttgcagcagggggctacatgccccctctccggtttaaagcacttaccctctctgtggtgtttggaaccatggttggtggcatccttatccccaacggtaaggcgggagggctgccctgttgccggggagtgggacccgggggcttcggcatcaaccaagacctgcacagttacgagacctgcacagagaccatcttctctggtctcttaaaaaagtctagagactttgtcagtttttctctggcccacagagaaaggcaggggataaaatctggcaacttgagccaggtgcggtggctcacacctgtaatcccagcactttgggaggttgaggtgggtggatcacctgaggttgggagttcaagaccagcctgaccaatgtggagaaaccccgtctctactaaaaatacaaaattagcagggcgtcatggtgcatgcctgtaatcctagctacttgggaggctgaggcaaaagaatcacttgaacccgggaggaggagtttgcagtgagccaagattgcgccattgcactccaggctgggcaacaagagagaaacttcgtctcaaaaaaaaaaaaatctggcagcttgctgggcgcagtggctcacgcctgtaatccccgcagtttgggaggctgaggcgggcggatcacgaggtcaggagatcgaaaccatcctggctaacacggtgaaaccccgtctctactaaaaatacaaaaaaattagccgggcgtggtggcgggtgcctgtagtcccagctacttgggaggctgaggcaggagaatggcgtgaacctgggaggcgaagcttgcagtgagctgagatcgctccactacactccagcc

SEQ ID NO: 1529 - DNA, 3061 bp, Homo sapiens
tggttttttctttggagatggagtctcaccctgtctcctcccaggttcaagtgattgtcatgcctcagcctcctgaatagctgagattacaggcacatgctaccatgcccagctaatttttgtagttttagtagagacggtgatatggtttggctgtgtccccacccaaatctcaacttgaattgtatctccaagaatttccatgtgttgtgggagggacccaggggaggcaattgaatcatcgggctggtcttttctgtgctattctcgtgatagtgagtaagtctcatgcgatctgataggtttattaggggtttctgcttttgcttcctcctcattttttctcttgccgctgccatgtaaaaagtgcctttcaccacccgccatgattctgaggcttccccagccatgtggaactgtaagtccagttaaacctctttttgttcccagtttcgggtatatcttcttcagcagcgtgaaaatggagtgcacacacacgtcagcactgtgggcgcacacacctgcactcacacattcatcaggacccatgggcacacgtgcacacacacgtcagtcctgtgggtgcacacacctgcactcacacattcatcaggacccatgggcacacgtgcacacacgtcagcaccgtgagcgcacacacctgcactcacgcacacacctgcactcacgcactcaggaccgacggacatacgtgcacacacacatcagcaccgtgggcgcacacacctgcactcaacgcactcgtcaggacccacgggcagatgtacacacatgcaccagcacccgtggacacgtgcacgcacacatcagcacccatgggcatacatggatgcacacatcagtaccatgggcacacacacatgcacccactcccgatggcttcggcttgctgggtgcctgcttcgccctcgggtgagcaagtctggaggcaggcacttggggtggggccacagtatggttcttaggagcccagtgtcccctggacccacttgctcccagccttgggtcccaaagtgctgctcccactggtctctgtgccccacccatcatgggcagggctgtctgaacagggcagagtcacgagtgatgcaagggtggggtgtggaggccttgcctagaggcagcagccagctctggcttggctgggccttaccttcactgtcctgctgtgagacgcaggagccctgggggaggacggcagtctgtatcagggcagtggtgaaactgcagattcctaaatgtgatctggagacgactcttgctggagaaatctacccaggtcccttgggtctgtccctcccttcaccctccacagtcagggacaggctgcgtggtgtgcctccccatctgtgcgtggcctcagcgcagcaggcctgtcctgcccattgctaaaggtagagcccggcagattcattgtgtggtgagggcttccccagacccaccaactcctgtgtcttcccatggtgagaagggtggggtctctctggggcctttttttttttaggaagtcactgatgccactcaggtgggtgcccagctccccacctgatctctggagtggccccttctgctggaggctgccccaggctggatgccgtggcctgcagaccccccttcttgcagtccctgggcaggcagcacccatgcgcacacgtgcacacaggccgtgagcactgccctgtgagccaggtggtggtggggggtgttggggctaaggtttggttagggcccgagtgcttgcgcacccccccatccaatttcccatggtgctgggatgctgccgcctcctggaccctggcgttgaagtgccaccttcatctccctccccagacagtaagctccagacaagggcaggctgtggccgtcactctggccagctgctcgggggcttggtggctgctgggtggtcgcctggactctgccctcctgtctcctggtgtcccggaggggccttgctgggctgggccctccaccgccccattgggcgcctgactctcagggcgcagtcagttctttggggatggccctgatctctgagcgggactgcctctggcctttcttctgcatcccctacggaacagcagcctgctagacgccctgaggaggcaggctgaggggtggaaggggcgtggccgtgcccagcagagaccaccctctgatgacggtgggcgtcctttccagcccctctcggggcatcgcttcatcccttcccccatttccttcctggccctgctctccaagtcttgtgtgtgtggtggggcctggcttccctcccggcctctcgcctgttcccgcccatccctctctggttctctcaggcctcctctgggcttgccaggaatgtaggggaattagggggagggggacacaggaaatgcctcccctcctctgacaacagctccagctgcagggggaggggggaggggagagcagagtgggtgagacgagggagggctgaaggggggagtcggcttggggggagagtgttctcctgcccacccaggcactgggcgtggcccagccccacagacagaacagttctttcttccttattttattttttattagagacagggtctcactctgtcgcccaggctggagtgcagtcgtgtgattggcctcaagcgattctcccacctcagccttccaaagcactgggattacagcagtgagccagtgtgcccagcctcttcctaagtttacaccagtgtgggcatccagtgaggggaactggcctgtgatgcggtggtccttgtgacatgtcaggcagttttagagtagggtttgttaaaacatgggttaaattgggccccacccccagccctccactcctcagccattcaggagaagcgcgaggcatgggtgcgcgaaaattctgagtctgccttccacctgaaccccctctggaaggtctgaccacgggctgggtgtggtggctcatgcctgtaatcccagcacttttgggaggccgaggcgggtggctaatgaggtcaggagttaaagattagcctggctgatatggtgaaaccacgtatctact

SEQ ID NO: 1530 - DNA, 3385 bp, Homo sapiens
gttggggggaggcgcagagagcctctcaggtttgctggtgtctggcttagtccaagggggggttcaagggtcttgtacccccacctcagctgggaccccaaacctcctcagctcacctctctctctcccacgagcccttccactaagaatggctatggagcagggttcaggaccttcgcaggtgctgcagcccagccaggatatggaaacgggctgggagcagcggccttcccagtggccggagcccagtcaggattggggagcagaagtggtttgggcgctggcactcttccaggggcaggaaccccaccaggtgagggtggctgggcaggggccgcagggaggggcgggcaggagggtttagggtcccaaccctcattcttaggggaggagctcttagggtcaatgtcagcctctttctagctctccccaggcctggggaagagggaacctcagaagcggatgaagggaggaccccgcccgtgtgccacctccatgccacactcaccatgtcctgtccctctctgtccccctctcggtctgtgttaccctccccaggcactcgtccctctgtggcctgccaatgccattcctgtgggtggggactcctgtggaggcctctgagctgcttcctgggcatgcgcccttagtgaactgtcagggtgtggagcacagtggccctgggtggtgtttggaccacggacccgcactccacatggcctaggtccagcctctgcctccctcaccccacaggcccaaaaccaggtcagggagggtagggtgttgcggagggcctgggcttgggtctgggggctccagggagctgcagcctcctttacctggtctctctctctattcctggcatggggcggggggtgaaacctctgaagacaggtgtgcctgccctttcctgtgtccctgtcctccactccccacatacacacatccggccctgcctctgcttcctccttctactcggtctcccaagatctggtgatgggaatgggatgggagctggggccttcctaggagctggagcccagccaggtgagggcagctggaccacactgggattctagaagacacagggaagaaccaggggatatcagaggtccagaaggcagaaagtttatttctgggggaggacaggggatgggtggggtccgtgagcccctgctctcctctcccctatcttgactgtttcccctgcatctatggccttgtcccaccctcaagccctccccagatccacccctcacacactgcttctcctcccaggatacaacaatggaaacggaccgggaacccagccaggtcggggccgaaggggctggggtggctgggggagaggtcaggggcccagggccacactctgggtcccaacagatgggctcttgggggttcattcattcacccaatctcccctgagcacccgtcccaagccaggcctcggctggccatggaggacacccaagctggtcaagggtggccacggtctggactcccgggccaagaaccaaatccaactttgactgcagtcaggcctgggagggagttcacacaagacagaaaggcagagggcaggggtcacgcgagacagaaagggagagggcagggctccaggccccagctcatccccactgcaccaccttccacactcctgtgtctgccctcaaacaggtcctgccgcccaaaatggctttggaccaggtaaagagggtggggacggaagcggggagcctggggctgagattctgggcacaggcccagaggaaaggatccctcaccctctcatcttccccccaggctttggagggggtggaaaaccccagaagccaggtgagccactccctgtccctgtctccctgcccatttcctatgcatctgccgctgcttccctagagtccctgatctccccattctctttggctctgtcccctgggatttgggaataggaatgggtggggagtcggggccttcctgggagctggaacccaggcaggtaaggccctggagttctgggagcatggaggtcttaggggttgggggttactgatgtaggggcctggccctggtcctgagcagagaggaagggatgggtggactcacaggaagtccttccccttctcttcccaggcctgggagggggactaaaggctcagagagcaggcgagccccaatctctagcctcccaacttggtctcacacaacaaacctcattcgacaaaccaatccaggcctggagcagtggctaacacctgtaatcccaacagttcgggaggcagagttaggtggatcaattgagcccaggagttcaagaccagcctgggcaacattcccaggctggtcttgaaatcttgggctcaagcaatccatctacaaaaaaaaaaaacctagccagttgtggtggcacgtgcctgtagtcccagctactctggaggctgagaggtgaggatcacttgagcccaggaagtcgaggtagtagtgagtggagatcttgccactgtactccagcctgggtgacagagagagatcctgtttaaaaaacagacaggccgggctcagtggctcacgcctgtaatcccagcactttgggaggctgaggcgggtggatcacaaggtcaggagatcaagaccatcccggctaacacagtgaaacgccgtctctactgaaaatacaaaaaaatcagtcgggcgtggtagtgggcacctgtaatcccagctactcgggaggctgaggcaggagactggcgtgaacgcaggaggcggagcttgcagtgagccgatcgtgccactgcactccggcctgggtgacaaagcaagactccgtctcaaaaacaaacaaacaaacaaacaacaaccaaagtaatccgtggaccatgcctgttctgagccaaccaggtgctggggacaggccctccccaaccagggccacgctggggcatacagtatgggctgaggctgccccagagctgggctctgggagttcttaggaggcagtggaggccagggaggagagagtggcccaaccctctgagaaactgaaccaaaaggagagttttgaacaaagaaggtacaggctccagcaagatctcagacctggccaggcgcagtggctcacgcctgtaatcccagcactttgggaggcctaggcgggcggatcacttgaggtcaggagttcaaaaccagcctggccaacatggtgaaactccgtctctactaaaaatgctaaaaattagccaggcgtggtggcgggcacctgtaatcccagctcctcaggagactgaggcaggagaattgcttgaacccgggaggcggaggttgcagtgaaccaagatcacgccattgctctccagcctgggcaacaagagcgagactccatctc

SEQ ID NO: 1531 - DNA, 3879 bp, Homo sapiens
ttggagtgtttaaactattcgcatttagtgtaattattaatatggttggatttacatgtcctttttttttttttcttttgacagagtttggctcttgtcacccaggctggagtgcagtggcgcaatcttggctcactgcaacctccacctcttgggttcaagcaattctcctgacctcaggtgatctgccaccttggcctcccaagtgctgggattataggcgtgagccaccccacccggccttgctattagttttctatgtcttatgtcttttttgtttctcatttcctcccttaatgacttcttttgaggtaaacacatactgttctaatatactcttaattcctctgatttcattaatatttttcaccttttagttatttgattggatgctggacattgtgaattttactttgttgagtaggtttttggaattccttgtttctgggatttgttctgggatgcagtgaaattacttggcatctatttgatcctttcaaggatcaaagcaagtctggagttgggtgatggccaggatgcccaggcccagggggagcaggcaggaaggattggaaggcagtcaggtgaggactgcaggtagcctctcttagtcccttggggcacagaacttgctgatatatacaaggtttccttccttagagtgtaataacagtttctagtctgggatcggatccttttgcgttactgagctttgaatagagttgctgggatttttgtactattaatattctctcaaatttttaagtttgaaattcttgactccaggaagcatagcatctcacccaggacttagagcctgatacaacagccatgtacagcccctgggtcccaccgcaagttgccagggccctgtggtgtctattcagacctgctttcccaatctagaaggtggtgtgggaatgcatgccaattcccagcccccctccctgcccctggtccccgaattcagtcatggtcagtgtctacagcacaaccttctggcatgggagaaggtcacctgaggttaaccctttacttgtagggtccttaatcaatctctggctcctttggaaccatggacacagaatcagtcctgggtgagaacctatatgtcatttcaggaatcggtgagtttcaaggatgtggctgtggacttcacccaggaggagtggggtcaactagactcccctcagagggccttgtaccgggatgtgatgttggagaactaccagaaccttcttgccctaggtaaaatccccccagccccaggctgggcgtcggctgtcagccttcttctacatggtagatattaaggagaatcccttcagtgccggccctggtgccagatatatcatggggtgggaagcaaggcctgtgccttggggcactcatggccaggggcttcggccacgccagaagtccccaagggacagcgtgggagctggtagcatccttgcttggtgtttcccctggtcctgggataggggcagggagagaagagaagaaggtgggaccctggagcccagctggctctggaacagtcctcaagcaatgaagtaaggacgtcagcacacgtggggtcttcagagtatacactgggatttgggttccagtctgagaccctcactgcttttggcccagaggacctcctgttcccagagagggtgtccacttcacaggcattgtcctcgttagggggcggcctgtaaggtcgactgggcctggagagctgcagcatgcccagcccactttctctccacgagcaggacctccactgcacaagccagatgtgatctctcatctggaacgaggcgaggagccatggagcatgcagagggaagtccccagagggccctgtccagaatgggagctgaaggcggtgccctctcaacagcagggcatttgcaaagaagaaccggcccaggagcccatcatggagcggcccctcggcggggcgcaggcgtgggggcgccaggcaggtgctctgcagaggagtcaggctgcgccctgggcgcccgcacctgccatgatctgggacgtccctgtagaggaattccccctcaggtgtcccctcttcgcccagcaacgcgttcccgaggggggacccttgctggacacacgcaagaacgtccaggccactgagggcagaaccaaggcccccgcgagactgtgtgcaggggaaaacgcctccacgccaagtgagccagaaaagttcccccaggtgcgccggcagcgcggggcgggcgccggggagggcgagttcgtgtgcggcgagtgcgggaaggcgttccgccagagctcctccctcacgctgcaccggcgctggcacagccgggagaaggcttacaagtgcgatgaatgcggcaaggccttcacctggagcaccaaccttctggagcaccggcgcatccacaccggcgagaagcccttcttctgcggcgagtgcgggaaggccttcagctgccactcgtccctcaacgtgcaccagcgcatccacacgggcgagcggccctacaagtgcagcgcctgcgagaaggccttcagctgcagctcgctgctcagcatgcacctgcgggtgcacaccggcgagaagccctaccggtgcggcgagtgcggcaaggccttcaaccagcgtacacacctcacacgccaccaccgcatccacacgggcgagaagccctaccagtgcggctcctgcggcaaggccttcacctgccactcatccctcaccgtgcatgagaagatccacagcggggacaagccgttcaagtgcagcgactgcgagaaggccttcaacagccgctcgcgcctcaccctccaccagaggacgcacacgggcgagaagcccttcaagtgcgccgactgcgggaagggcttcagctgccacgcgtacctgctcgtgcaccggcgcatccacagcggcgagaagcccttcaagtgcaacgagtgcggcaaagccttcagctcccacgcctacctcatcgtgcaccggcgcatccacacaggcgagaagcccttcgactgcagccagtgttggaaggccttcagctgccactcgtccctcatcgtgcaccagcgcatccacaccggtgagaagccctacaagtgcagcgagtgcggcagagccttcagccagaaccactgtctcattaaacatcagaaaatccactccggggagaagtcgtttaagtgtgagaaatgtggggagatgttcaactggagctcgcacctcactgagcaccagaggctgcacagcgaggggaagcccttggccatccagttcaacaaacacctgctcagcacatactacgtgcctggcagcctgctgggtgcaggggatgctggactgagggacgtggatcccatcgacgcgctggatgtggcaaagctcttgtgcgtggttccccccagagccggcaggaatttctccctggggagcaaacctcgaaactaacatgatgtgctttggtgtcagtagctgctttctgagctactcaacaaggaaagcaccctggtcctccctggctcctagatccagaccaccttcctccaggtgtgggagccttgccttatcacccccatcaggtctgcatgccagggtgcctcctctagttaaagtcagtcacctccccagaagggccacactccaggaggagtgttgagagtcatttgaggtagtcttgccacctgttttccttgatgggcctggaagttgttgacaaggggaaagatctttcttgccaataaaaagaagggatatcgttgggtgccatggctcacacctgtaatcttaacactgtgggaggccaaggcaaggggatcacttgagcccaggagtctaggaccagcctggacaacatggtgagacctcgtctctac

SEQ ID NO: 1532 - DNA, 4130 bp, Homo sapiens
tttcttccttgtcaaattctaagcttgttttggtgtatagaccatgtcatgtatctttgcatctctaccacacatagcaaggtgccacacacatgtaattagtacatgttggttgaattaatctatgtcaggtgaccttaggtcttctctaacgcagagactatttatttgtgtgccttttattatgtgtctactacctgccaggtattatatatatgtaatctcatttagaaagcagaatttcgcattttctttttttttcccccttaagtgatggtcagtgaaactaatgtgaaatgttataaaggcagagatactggaattgaaggaaaaagaataattatctatgtgttagtttgggtcatccaaaaaacagatgccaagataggattaaaagtacaagagatttactgggggaaacacctgcaagggaaaatggggctgggagctggaggctgttggcagagttggcagacccctgtggaggaggaaaggccgggggagcggggaagttttccactggagtgtggtgctgagaaagtttcagcaaagccattggggagccagtgctgcccctcagacgagtccctcccatgctcaggcattggctggaagcagcaggtgggaagggtggcctctgcatgaatgtgctgatggattttagagtgcagccactctgtcccctgcatttggagaaatacatcttcatgactgccacaccatagaatcaaccaagctaaaagttcaaaggtggcttgtggcacacaggccctttagccagttaggcaaaacgagggcctgggaaagagaattcttcctctcgtcggcagtttgaatatttgcagtcttagcttggaatggtctttctgcactagagggaaacctcctttagtgcagaccagcctaaagccaagccattgctgcctgaggaagctgccatctctggagcacggtgacatgccaccaccctggacctattcccatcccccggagcactgtggcatgtagcctcttcgtgccactgcaaggtcagaaagcacctctgggcacacctccgtcttttgggtctgcctccccactagactgagcattgtgcatagaagctacttttattctttacatcccagtggctcacatgatagatgccaagtaaaatttccagtttgtactttaaattgtttttctggcactggagatgggcttgcagtgatccctccatccatgtaatggccctgggctcagtggaccatccagagtaggcttctccaccatggagctgcccctcctcaggagtctgatgtgagtggctcttgatactcattctcacttcactcactccatatcacaagagccaaggatttcccagtaccaacattttcttgggctgcttttgatggttttttttcccccttcctgtcctctttttccaaccccagaacaaactgccagcgttcctggttggtgttgctaactcaggtcaccctgaggctgccctgtctttctcttgcttgttgtgagcccctccctctacgcccatgtgcccgaggctgtgccgctgccttgtgcaggcacccagggtttatgccagtgatttcctgacacaagcagcagcacagaacgtgtgtgtcccaggtttaggtttgggaggcctgcctggagaacagccatcccaggttctgggagctttctcaatttactgttttatccaaagatgggttggcctttctctggacatagtgagcttccttgggctagttcttaagcctgagactaaaagttctcaccatgagttattagggaggcctgtaaaatgtaaaggccatgcgtcttttttgctctgttacccaggctggagtgcaatggtatgatcatggctcactgcagccctgaactccttgggctcaagcaatcctcctaactcagcctctgcatagctgtgacaacaggtgtgtgccaccacacctagctaatttttaaatttttgtagatacagggtctccctatgttgcccaggctggtctcaaactcctaggctcacatgatcctcctgcctcagcctcccaaagtgctgggattacaggtgtgagccactgcacccagccaaggccatgcacctttaagttctttacctgggctttactctaagatgggaggcctcagagtgagaaaagctgctaagaagtgggaaggagcctgtacctctggtgattagggatttctcttttcgtccacccccattctcacctccactggaagtagacctgtaagaaaaattaaagcagtttagaaagggttgaaactgtttattcacccatccctgccaaaattttctggaacattcctagtttcagatgttccttatatcttaaaacagcataagaactgttttttgtttttaaaaaaaaaatttgtagagatagagtctcactgcgttgctcgggctggtcttgaactcctgggctcaaaccctcctcttgcctcagcttcccaaagtgctgggaatacaggcatgagtcaccatgcttggcaagaaccgctggctatagaccatgacttttttttttttttttttttgagacggagtctcactctgtcacccaggctggagtgcagtggcgcaatctcagctcactgcaacctctgcctcccaggtgcaaacgattgtcctgcctcagcctccctagtagctgggactgtaggcgtatgccaccaccctcagctgatttttgtattttttgtagagatagggtttcatcatgttggccaggctggtctcgaactcctgacctcaggtgatccacccatctcggcctcccaaagtgctgggattacaggcgtgagccaccacgcccatcctatatacctcacccaagtcgtgtaaataaagcctgaaacttgggaagaggaggctggactattgaggtcttattgaggttgctgtgcaaatcaagatgatcccatttctaagaaatggctagtctggtatagaagctaaggatttgtttaggaaagcaggaagctcttgaatatgaatccaagctcagtggaaatgggctgagttgaattacatttagcaggtggctgctgccgttctagagagaagagacttggagggacctctgccctcactaccaggcagacctggcttggcagggtgccttgagcctcactggaacagcagttggttttcccagaactcaccccagaagcctgtgtcctctgatagcactggccagttaggacaggaggctttgattcccagagagagccagcaggactccactctcatctatgcaagcacaggctgagggtggatggcattaaagtgactgcactgctgagtggggaataggggctgggaactctcctggaagctttcatcatattaaaagtaggcatttctttaactgcaaagagatacttttatattttgtactcagtggtaaggcaagattaattggtaccttcctgcttctgttcattcctgtattcatttgagtttttgcttttacattacaggtaaattaaaagatcttgggaacttggttctccgaccttttgggctctccacggaaaatttccagatcaaacaggattcctctaccggctcgtactccatcaatttcgttcaaaatccaaataataacagataacaaagataacaaaagctttacaagctgacttggaattgtgtgctgcttgctgttagctaggggaaaggccctgccaatgtttaacttttaaaagcatcttatctaaaagaaaggctatccagtagagcccagtgctcccttgtccctcttttatgatcagggtgaaatgtacttcctgatgtaatgaacctaatttgatttccattttaaggtggtgtctgtgcagctggtgtccccgattctggctgtcctatgtccaggaagaagcccatttgttgaggctgaccttcctgatcatacacacacacagcccagcaaaagcctctcctgaaccaaacaaacctgttggttgggagactgcccagacatgattgatgacgggttcccgcctgctgtcccctccctgatcacacagctaacgaggctgcctccagcatttcctgatttcctctgtggtaataaaagctttctgtgctt

SEQ ID NO: 1533 - DNA, 2894 bp, Homo sapiens
acatctaaggaggagaagaagcatgagatacatctggtacagaagcttgggaggagcttgttcaaactcaaaaaccagacggctgaacccctggccccacagcccccagcagggccatctaaggtggagcagctacaagatgagaccaaccacctaaggaaggagctagagagtgtgggaagacagctccaggctgaggtggaaaacaatcagatgttgagtctcctgaacaggagacaggaggagaggctacgtgaacaggaggagaggctacgtgaacaggaggagaggctgtgtgaacaggaggagaggctgtgtgaacaggaggagaggctacgtgaacaggagtagaggctgtgtgaacaggagaagctgccagggcaggagaggctgctggaagaggtggagaagctgttaaaacaggagaggcggcaggaggagcaggagaggctgctggagagggagaggctgctggacgaggtggaggagctcctggagcaggagaggcttcggcaacaggatgagaggctgtggcagcaggagactctgcgggagctggagaggttgcgggagctggagaggatgctggagctggggtgggaagccctgtacgagcagcgggccgagccacgcagcggcttcgaggagctgaacaacgagaacaagagcacactgcagttggagcagcaagtaaaggagctggagaagtcgggtggagctgaagagccaagaggctccgagtctgcagcagcagccagaccagtacctggagccccagtcccacaaggagcttggatgtgcggacaagcagggtggactccccaggagcacccaggcttgagtggagaagctgttggtacaggagaggcggcaggaggagcaggagaggctgcatgccattcttttcgggctgccgagaacagggagctaaacatcaccatcatctaagagcgggtcaagaaattgaaaaaaaaacaaaacatttaaggggttaatatcctacacaattcatttacttcatttgaatgttagagccacttatgtttgtgtttctaatttatagtttaaatttatttgtgtttctaatttatagtttaaatttatttgtttctaatttatagtttaaatttatttgtgtttctaatttatagtttaaatttatttgtgtttctaatttataatttaaatttatttgtaaaaagttaaatgagagtgggtctttctctcatgttcactctggcatcttttagcatttttttaatttgataattataggacgttagcatgcatatcgagtttgcccttatgtggtgggagttcaaacacacaaagacccactgtatgcacacaactgttcttgctggtttgggataggctgccatgcttttttaatgttagtacagcctgtatattcattacggaattcagataaaatttccttatgttctgctgttatgtttgatcgaatcctaatcacagtgagctcttcattagctcaatatgtggtttgccctctggaaacagcctttccccctttttctgtgtattggggatgggagtaataacattttggggaggtttttaaatctcccagaagaggaaagtggcctgctttggcaggtgtgtgcaggatagaatatgtttcatttgttccggtgccaagaatgagcgctgtactacggtagttcccttaggatttgtatgtgctctaggctcatgaagatactgcctcatgagctgtggcagttgtactcttttttgatgacctgaaaagggattatttctgaggaatgaaaggctcccatcatgactgtggatgtggaaaaccttttctagctgagagcatttatatctacaatacattttaaagtcagagttcatgttccctgttttaatcacatgactacatgtcccagtacacaaaagggcactggttggcgttctccttaatgtatttagtaaagatcagaagaaatcctttaagagtttaaatgcccctggaacaggcatatacaggctctagtcaagaatgaattcgagtgaaggaaagctgtgtgacacctggcattcctctgtgttcatggagcttatttgaggctagaagatggattttaccatctagacctctctggctaatagctagtcttcaaccatctgacataggaatttacttcttttccttgaatggagaacactttaaaaataataacaaacattattataaactaatatatgtgagagtacttagttgaaacaaaaaggagttttagtagacagtattatactacatttgaaaatcaaggagcagtttatgcaacgtaaaacgtttacaaactgcagcacaatctactgttcgtgaatgtcaaagtgtcatgaggaaagtgtctatacaatcacagagttatatttcctcacaaagttctttacaaagagtgaaatatgtttttatacctctcagtttcagttagaggcatattttgtgtaatatttatggcttaaaatggactaaaggtcctgttcttgccttgtctgaacttgccgcttttgcattctttgagttcagtttaaagacagttactttaagcccattttaaaccctcaggctagaaatcgtaccactgttaattagccacattatttggtctaacagtttatcattctgaaactgagcttacctaatacattgataaattatttcaaaggtatttttatagttcaaatcgcttcacttttaccctgacacgtataaatgactaggaatgaccttcagatagcgtttagcaactgtaaccaatctgacaataatgtgttcatcaggtacctgtggattaaatcacatactggcatatttaagctgaatgtcagtctgaaaaataaatgtactatattaactc

SEQ ID NO: 1534 - DNA, 2887 bp, Homo sapiens
atttctagagaaaatagcatcatgaatctccatatacccagccctcagcttcaacagtttttaccatttagctaagttttattttatctgccctttcatctgtctatttaaaatacgccacccacccacacagtgtattaaagcaaatggaagacatcatattattacatctagaaatacctctctctaacagagaaggactttgtattgttccttttaatggaattgattgccaccatttgcaaaccgagtgcctccccagccccagctgctgctttggaatggaggccagggtgcaggggcctgtagacagggcctgtgctcacccatgtgctgccgcccgggtcttgttgacatttgattttgcagccactggcatcattggagtaatcatctttgtaatcttccccagagtcttcatgcctgtgaggctcagtagccttacctttgaaatggttctagggctggatgtggtgactcacacctgtaatctcagcactttgggagtctgaagtgggaagatcacttgagctcaggagttcaagaccagcctgagcaacgtagtgagaccttgtctctactaaaatccaaaaaaatagccggttgtggtggcagatacctgtagtcccagatacttgaggggctgaggtgggaggatctcttgaacccgggaagttgaggctgcagtgaaccctgatcatgccactgcactccagcctgggggacagagtgagaccctctttcaaaaaaataaaaacaaaaccaaaacagggttctaaaagactttccaaggagctcaagtgagatcacatgtaaagctcacagcaccatgcttggcacttagtaggtgcccagtgagtgggagttggctgcttccctgctgcagctgctgaatacgcaagctgaaactcatcctgctgggctccatggggctggcattttctgcttaagcaacactctgagaacagtgtcctgagacattcaggtcattgctcggatgatggcactgttttgaggggtaagaaagatatagctctggctgctttggccagaggaagggagctgtatcccgtctaggctgtgagactcactcactccagtgtgcctcctgaacagggacaagcaggctttgaggagaaaccacagattccttgggattgacctcagagcctccttaaaggattctcgcctgtttccaaatatcatgagcaaccacaataggggagaaatctgtccattatccatacaccccaaagagacacctggcaaccaggtgtgttcagtgtccagtttccttgcagcctgttcatgtgggcacctaacattcacatagttgcagccatagcatgtgctacatgtatctaacttgtattctgatttctaaaatcaattcgtgaagcccattcaatgaagacccattcatgcattcagctatttattgagcacctgctgtatgccaggcacagtgctaggagctgagatgtgagagtgagcaaaagccagacttcacttctgttcttgaggtgtttccagttgtggagggagcaaccactaacaggtaggttaagtaaatgcatgatcacagactgattgggatggctccatagaggtgatgagcagggtccatgctggagaataaccaggaggaaaatcctcatgggctggttagggaaggcctctctgaagaggtgctgtgccaggagggaccagaagcttctacgagaaagcacagaaatgaggactgccttttaaggatggcagaggtaaggctgaggtgggagagagggtgctgtgtcccagggtcctcacagaaacttgggtggctggcacacaagtagcaagagtgggtcagtggctgggaagagccagatctcaactacagggctttctcacagggacatctgtcccaaacggacacttctagagctggcactgcctggtcagacggtcccagaaggggccttcgagctgcactgggggctagaaaggcctgcagcagggcggcgaggagcatggactcaggggccagactgtgcctggatggaagtcccagctttgctgccttctgcttgccagctgtattaccttaagggaactgagtctcccggcacttcagtttccacagctgtgaaataggacttgctgggaggagtagatgagcattatctgtgctgtgcctagaacagtgcctgacagaattgcagagaggccatttaggaggctgtggcagggaccaggggtcagtgctagtgggcaaagagggacgggacagtctgggtacagcattttgtgacagtttgcagtggcgatgccagagagctcggttaactctggggttctgagcttggggcagtccagggggcaggggctgggaggatggtgattctgtcatcagcagggctgatcctggaggaggagctggttccaagcagaaggtgctgaagttggtcgggcggccaggtgagacgtgccatgagggagctcagccaggatgtccggtgggcgggggagcagtccggaagcctcctcgctacttcatagattcagaactcttgtgtttagtagcctgcatgatattctgttgtctgagacttctgacgtaaccatggtgcaattttgggtcatttttactcttgcctggcataacctagctggctgttcctcaaaagatcctcgcgacagtgtgttagatcatgtggtgtgtaagggaagtcctgaaacctgcagagaaacgtctgtgaataagcagacctctgtacactgggtgtgagtgctctcccaggcttgaacatacttcccagggtctgggggcctggaaaatactcatcaagtacagaacagtaggtcccagcccttaggatttcatagcccagaaaagcatcaaaac

SEQ ID NO: 1535 - DNA, 3315 bp, Homo sapiens
tttgctttggctgacatgcccgtcctctgccccacgcaggctgttacaggcgctggaacgcggacgggagcgccagctgcgtccgctgtgggaacggaaccctcccagcctacaacggctccgagtgtagaagctgtaggtctgcccggctccccccggctcccttctcacagctccagctgtgggagacactgtgggagttgctgtctgtgtccccaccttgccccagagccactgtccactggggaacagccccgggagccccctcttcccgagtctgctgggccattcgggacagctctgtggtgagggctgctccgccccctcagcccctcgctttcatatttccgtcctgagatcccttcagggtgcacgtgggtgtccccgtgggctccgtgcacacaggcttcccacagttctgctatcccacagttgctggcccgggtgcgccattccccatgaacagaagctcagggacccccgggcggccacatcctggggctccgcgcgtggccgcctccctcttcctgggcacgttcttcattagctccggcctcatcctctccgtagctgggttcttctacctcaagcgctccagtaaactccccagggcctgctacagaagaaacaaagctccggccctgcagcctggcgaagccgtaagtaacccacatcatccgggctgagcgtccctggccgcgtgtgcctgtgccaggccatcccgagtcctcactctgcctttctctccttttcaaggctgcaatgatccccccgccacagtcctcaggtaacagcagctgtcgcatccccctgtggggtttcccatctctgggccagtcccagggtgctctgtgggtttgtccccaaacgggtttgcctggctctggatctcggccacccctgcccgggtccccaggagacccacccacaaggcagggccagggccggatttggctggtgccccctgctctggatctcagctggatttggccggcgccccctgcccgcccccctttaatccccgtgacttccatgctctttcctgttcccgagacgtggggtctgcaggaaaggaggacccaccacgacagggcagacccccaatacctgctcctccttgaagtccagctccacccgaggacagacgcagccggcctccgccaggccctcctgagcagccatcgcttcagtggtgctgggtcaggcggacccaagagtcagcccggttaggacccattttatgtgcggggccacagacacaggctgagtgaccggcgcacagccacacagctccaaggccatgagcagggctcacccggcctccgtccccctgtgcagaggtctctcatgggggcaggtgaccgtgcctttaggggacagaccgttctccatcaaggctggacgtgccccgtccctaaagcagccctgtctgcaagtgcccagcagaccccacggtgcccgagtgccccggggctgccagcttcaacagcagacctttaatctgactatcctagagttcagaagtccaaaaccaaggggcaaacaaggccacacgcttcccgaggctccggggaggacgctgtctgccttcccagcccctgccggctcaggcatctgtggctgcgttgcccgtctctgtcccctggtcccacggcgtctcccccacctctgcgtcttctctctctgcctctctctcaggtgggccctggccgttgtttcagggcctgcccggggaaccctgggcgatcacacctgagaccctgacgtaaccccctgcaaagccccttcttctaaataaggtcacattcgaggtctcgggactacggcctgcttgtcgccccctgaggtgcatgatactctgggacccacatctctgtcttcggggatcgcctggcccttgtccaggccccggggcccagggtgtaaatgagaggacacagccgggcaggaggaagccatccctttcccgagctggagctctgagggcgccttaggggcagggggcatctgggttcccacctggtcagagtaaacagccccgggcgcctgtgccatatgcccactcccgagagcctccggtgagggctgaggcctgcactgtccctgctgtccaggtcccactctgacctcgcctgtctctgacccgtttcagtacggaagccgcgctacgtcaggcgggagcggcccctggacagggccacggatcccgctgccttcccgggggaggcccgtatcagcaatgtctgacctggaggccgagaccacgccacgcacttggcggcagggacccggaggccgaccccttggcgggaaccagcacaaagtgttggcatcgcccggcgcccgggacagtcctgggcacagcctcggctctgggtccctccgcctcccagcgacggacgccaaagggtcccgggccgcctgaggctcctccccaccacagccatctcgtttatcggaccaggagcaggcatccatgagacctcagagcttcagatcgaggccttggggggtccgggcccccccaggaaacacggtgaggccccagcgcctgcagccaaagctggcacgatctatggggcaggtgccgctctgcctagaaaagccaggggctctgctgccgtgccctccagagcccacagcgggcaggactcctccagcaccaccacacccagtggcccgagacccctctgagaacagtgaggctggtcctcgtgccgttccagccggtgcccggccagtggggaggacacagcctaggaaccagctgcctgagaccagggtgcctctgggctgtcctcccgcgtggcggagaccccaagcacgcagccacccatttccggagctgcaggatagagcttcctcttgatctctgtttttaagcagaaattcattgtgcagaaaagtcctccagagctctgtggccccgctcggatccgctggacccccatgcctggctgatccctgcccacgtggggcaggcccacatctaacccccacaagtcactgcctcactgcacctgccaaggctgccctggcgctgagtcctggggtccctcccggagttcctgggagaaaggcgccgtcgtggccgcctcccgcacgccaggcccgggctccaccgtgggtctcagacgccctgcggcaccggcaccgtctgctttagcatgggacccccatctgaggggtggcctggccttcggggtccccacgctcctttgcgaagtccactgtgggtgccatcatggtctccgggacctgggccagcgggaacgtgggggcactgggtgtgctgatataaagtcggcattactc

SEQ ID NO: 1536 - DNA, 4052 bp, Homo sapiens
ataaattaaaacaacaaaacgtttcatccttcaatgacggtgcatggtatcattgtctccatttcagatgaggacactggagcccagagacattaaagtcataaaacaagcagtgagtagccagagtgcaaaaccaggtctggcctgggccaaagttcattcttttaatcacaagactcagtggacacatgtcaaagcatcaactacatacatgtctatgggcatgtatgtgtccactcatacgccccgagttggctcaattcactcttcaaaagttaaaaaaaacaaaagacaaaaaaatcttaaagccatctattccattctgaaaattttttccctcattaatctatgatattcacctatgttgaaaattattctataaagctcctaaaagaaggcacagcaacacaaattttaaaagaaaatagcagggaaataattataccaaagaactttggaggctgaggaaagccactgcatgcaaagcatacttctgagctttctggcaacatatgccaaaagagaaaggcaatgggttttacagccctcaaatgaaatgaggagacacctgcactagcttctgctattactctcttactgcagaggaaacagctatgacttctgaagcattttaataactgcttccatggagggctcaaccataggccagtctcaactagagtcacggaaatagcatgaagtttaaaggcttttggaaaggcctgatgtggagccccagatatgtgactcaccatcttgaggaaccagagtagattatataaactttctgtgcctcagttttctcatgtataaaatgagtgaaaacacacttattttgcagttgcactgaaacttagtttagacattacatatggcaagtgcgccaaaggatggggcacaaagacggtatctctaacctctctccttatcaggcctgggcttctgcggccctgcagagactgctgtcatctagagtgaagaggcgaggactccagacacagggcattatcctagccctccccttcctcactgggactggaggaattggagagacttggacacagacacctgcccttctcccacaacaaaccagacaaccatattcctttgccatcttgtactgcaaatttatcctctaggccaggggttctcaaagtgtgggccccagaccagagcatcagcatcccctgggaacctgttagaaatgcaaattctcaggccccaccacagacctactgagtcagaaactctgagggtgagatccagcaatctgtgtcttaacaagtcctccgagtgatcccaatgcagcctgatgtttgagaatcactgctctagaatacacatttcatgagggctggggtagtttgcactgctgcatccccagtaatagaatgatgtctgacatatagcaggtcctcaataaatatctgttgaatgaatgaatatattaaataatggatgaatatgtatgccttctctcccgaaatgagctccttgaaggtagggatggagacattaatttttcagctgtagaatccaacaaatagttaataagcccctacactggtccaggccaacacggtgcttaggtaccaggaatgtaaaataggatccccaaccctcaagaagatttgaccaattattacgaacagagtttaaaaataattacactatcatggaacaattaatgcttgaaatgacatataaaaagtcaagattctaaacttcatacactttattatgacaactatgtaatacacatacataaactatgcataaaaacagtcaccaaaatgaaaacagcactgtatttggggagtggggctataagtgatttttttctattactgtgtaattttcaaaatttacttaaggggcatggatgttacttttagaattgaaaaagtaaatattgtaaaaattcctcatagaggataatatagtaatggatgtgaaggcatagacatgacagtgacaatggtgattatttctgcctgaaggggaggttgagaaaagtttctccgagtagatcagggatgtaacaaatgacgtggtgtaacacaaaaggaagaataagaaatgtggcagaactggagcatgcatgcctcaccttaaagcattcaaatccaatttttttttttccaaaatgccatgctagacaaaacctatttgggacctactctgcagaaggctttgaaggatgaataagagttcagcacatatgtaaaggaaaaggagagggcaatccatgtaaaggcaaggaaggatcatgatgggcaaaagcgtgacagtatgcaacagcctggtgtgttgaggaaatttctagaaatatttctggaacatgacatgagaaaccaagaggagcccagaaatgaagcttgactagacatgacaaggaccggatcacatatggccttggatccatgcccgcaaaggctctcagttcaccctgcaggccagcatatccgactctcccaccacagtcataacctcaagagcagaggagagtgggagtctgagggaaaactgcaagatttcttcgaatgctcatcttttaccttcaacttcagcacaaattttgtatcttataccatagtgctacctaggatccaaactttaaaaagatgtcaaagttaaatgctgcccttatcctatgcattccagggaaattcacacccccaagaagaggaagcatatttgtagctctgcttatttccttcaaatagattcctggaagtagaattaatgaatgaagggatattaacttttcaaaggcttggcagaggctgccaagttgtttaccaaaaagggtgcgtagtcctttttaactagacgaccacatttagattttatgaagatcaatatttggctagatctaggggccacgactcttacagttctgtcttaccctagtatagacactttcctctttttcagaaagtcatttgaccgtgtacttatggctaaagtaaatcctgcttctcattcttgcatttataacctttactgagccagtctcacattcatcatggtggtgggcatgcgatgtattcatcagggttcatccccggctgccagctctcctccactctacactccccttggtgacttcctctactcacatgggtttagctacaaatcagatgttcattattcctaagtgtgaacccctagccctggctttccttgcaagttcagacctacacagaagacgatcacagctgacgggtccgctgttgatctggtctcaccagctggaatcacagtatcttcttccctgtttctaatcctgtgtgtctgttcaccacaccctaccacatttatcccccagtgtttctggaattacttcctccttctccataaagtgaccatccaagctcactttatttcaagccctcatcatctgttgctggacatcaccatgacctcaggcgatgccagggtcttcatgagcatggaaccaaatcaacatggaagaacaggtcatgaggagccaggtcacctcagccatggagctccccacagactcccacgcatgcccacaacatctctaacaacagcgattacaggaaacagcaactattaacattgcacagctcttctacaaagaactttcacatgcattcccttaggcctcaaaatcataccttacagaagagaaaactgcttaagacattctgtgactggtcaaacctcacagaactacccaaagccatgcctggctttcgctctgagtatcctaagcccaacctgatgcctcttcaacgataccactctttccacttcagataatctgacctgtgccaagatgcccaggtggatgcctgtttaaactgatatacaccctcacccaccttattctcatttctgctgcctgtaagaacccacctgccccaaatacttaaagagtaacaatttctggttgaggcactgaaaattaaacatggctgttttgactaatccacaacttcactcagttgctctataataagtaaggacatgctccactgtaactataatcaggaatcatgatgtgaaaaatatttcttttt

SEQ ID NO: 1537 - DNA, 2738 bp, Homo sapiens
caattgtaagtgccaaaggtaacttaattttaattattttaatgtgttatttactgggtcacagcatccacgcccactgtggaacattttagggccatgttatgttacgaccatggggcagttaggcaaggcaccaggaacaacagttcccatactcctgcacccaaatgccagttatcatcatttcttactttggtcagttagatctattaatagaggcctggtgggctcagcaaatgcgcccagagtggcccagctcaaagcacaagcttgccagcaggcagcagcacagctcaaaacgcagcagaacctgttggcaagccacagccagagaagaaaagtcctggtggcggcggtcaccacccagactctctgcttgttgtgccatttgtcttgcaatttcccccagggaggtggcatcagctccccccatcaaaaattgggtttggatatccactctggcacacacaaaaatgatgtgttctagaaccccacagggtcagcattcgtgggtctccatggtcctagcggtgcccacgttatctgcccttgcagcggaaaaactcggatgaatgcgaggtgtgctgtcaagggggacaacttctctgctgcggtacttgtccacgagtcttccatgaggactgtcacatcccccctgtggaagccaagaggatgctgtggagttgcaccttctgtaggatgaagaggtcttcaggaagccaacagtgccatcatgtatctaagaccctggagaggcagatgcagcctcaggaccagctggcttctgactttggccaggtaggacttgacttagaggcagaatttgaaaaagatctcaaagacgtgctcggttttcatgaagccaatgacggcggtttctggactcttccttgaccctgttctgtaaagactgaagcatccccacctcaggattcagctgatgggaccctggcttggactgttgattgccagtgagtctgggatgtaattggctgccctcaggacccaaacccagacacttcataggattatcacaccctccatctttattctttctttttacctttaaaagtctatatctacattaaaaaaaaaaaaaaaaaaaaaaattaatacttccttaataccatcagataccccatcatagttcacattctccccactgtctcataagtctttttagagttgatttgttcaaatcaggatctaaacaagttccacacactgcatttggctctcctgtccctatgtctcttttaagctataaattgtcatgtatttattgaagaactcagggttttggtcctattacattttttgcaatctggaattttctggttgcattttcttagtggtatagtcctctcttcctctcattttttgtaagctagaagttagatctagaagcttgctttaactcaggttttgaggggtttgttttgatttgggggtttgggggcacatgcaggcttcacaggggaatttagtattattttttatgttaaggttggcagcaggtgcacgtgttatcagcctgatcatctatcacctgatggttttagcaatacctaaatccgtgatatcatcagaggttgcaaaatgatgagattcaggtttttttttacataattattggtcagaattattctgcaaatagcttctctttaacagtattcggttaccttgaaatacaggttgtacaaaaaataggataaatgcttgtttttttatttagcaatgtccaaaataatgaattgatttcccagtatcctctaaaggtaaccagggattttttttatttaattatcttgaacccacatatttaaatatacgtagtatgctacaaaccattgcagttaatacctttattgatgcttgagttgcccactttttcttttttttttttttttttttttttttttgagacagggtctcactctgtcacccaggctggagtgcagtggcgtcatcttggctcactgcaacctcctcctcctgggtgcaagcgattctcctgcctcagcctccgagtagctgggattacaggcatgtgcaagttccccacttttagtgagaaactcctcaatttgcctcctgagttgttttgaaatgaccccagaactctttgatggtgtattagctatctattgctgtgtaacaaatgacctcaaagcttagctgcttaaaaagaaaaaaacattttattgctcactattctgtggatcaagaattcaggcatcatccatgaggatgcttccctttgctccacatggtactggcagaccccattcatacttgcacactgtcacttctgccacaatctattggtgaaagcaagtcacagggacagattcagaaggagggagaatagaccctacctcttgatgcgatgggtggcaaagtcacatttcaaaggagaatgttgcttgggaagaaacattgctgctcccatctttagaagcaatctaccatagttcaccctctggccacagtagttcacatctttcccaaatgcaaaggacactcctctccccacagaagtctcactctctgcagcattggaacaaagtccaggacctccttatctaaatcaggttcagatcagataaagcttcttcgggctgggcacagtggctcacacctgaaatcccagcactttaggaggccgaggcaggtggatcgcttgagtccaggagttcaagaccagcctgggtaacatggcaaaacctcatctctac

SEQ ID NO: 1538 - DNA, 4055 bp, Homo sapiens
cagtgttcacagatgtgaagcaagataatggagatctgttggaaaacaagcatggtgaattctggttagagttcaatagtggttcattattttgtgtgacaaaatatgaaggttttgatgacaagcactacatttgccttcattctagcagtttcagtctgtaccataaaggcatagtggatggagtgattctcccgacagaaacacgacttcccagctcaacccgcccacactggttggaacctactatttattcctctgaagaagatggcctcagtaaaacttcttcagatggagttggaggagacagtttgaatatgctgtctgttgccgttaaaatattgtctgataaatcagagtccaatacaaaggaatttctcattgccgtaggactgaaaggagccactctccagcatagaatgcttccttctgggcttagctggcatgagcagattttatacttcttgaatattgctgatgaacctgttttgggatataatcctccaacttcatttacaacttttcatgttcatctttggagctgtgcacttgattatagacccctttatttgccaatccgatctcttcttaccgtggaaacattcagtgtttccagtagcgttgcattggataaatcttcctctactctcagaataatcttggatgaagctgctttacatctatctgacaaatgcaatactgtcactataaatctgagtagagattatgttcgtgtgatggatatggggcttttggagttaaccataactgcagtgaagtctgattctgatggagagcaaactgagccccgctttgagttacactgttccagcgatgttgtccatatcagaacgtgctcagactcttgtgctgcgttaatgaatctcattcagtacattgcaagctatggtgacttgcagacacctaacaaggcagatatgaagcctggagcctttgaaagaaggtctaaggtagattccagtggtcgatcatcctcacgtggtccagtacttcctgaagcagatcaacaaatgttacgagatctgatgagtgatgctatggaggagatcgacatgcaacaaggcacctcgtcagtaaaaccacaggctaatggtgttttggatgaaaaatctcaaattcaggagccatgttgttcagacctcttcctgtttcctgacgagagtgggaatgtatcccaggagtccggccccacctatgcctcattctctcaccatttcatcagtgatgcaatgacaggtgtgcccactgagaatgatgacttttgcattctttttgcaccaaaagcagccatgcaggagaaggaagaagaaccagttataaaaatcatggttgatgatgcaattgtgataagagacaattatttcagtctgcccgttaataagaccgatacgagcaaagcccccttacactttcccattcctgtgattcgctatgtggtgaaggaggtctctcttgtctggcatctttatggaggaaaggattttggaacagtccctcccacttctccggctaaaagttatattagtccccacagttcgccttctcacacacccacgagacatggacgtaatacagtatgtgggggaaaaggaaggaaccatgactttttaatggaaatacagctaagcaaggtgaagtttcagcatgaagtctacccgccatgcaaacctgattgtgattccagcctctcagaacacccagtctcccggcaggtgttcattgttcaggatcttgagattcgagatcgtttggcaacatcacaaatgaataaatttttatacctgtattgcagtaaagaaatgcctcgaaaagctcactccaacatgttgacagtgaaagccttacacgtgtgtccagaatctggcaggtccccacaggagtgctgcttgagagtgtcgctgatgccgctccgcctcaatattgaccaggatgctttgttcttcctgaaggatttcttcacaagtctttctgcagaagtagagcttcaaatgactccagatccagaagttaaaaagtctcctggagctgatgtcacctgcagtttgccaaggcatttgagtacctcaaaggagccaaatctggttatttctttctctgggccaaaacagccttcccaaaatgatagtgccaattcagtggaagtggttaatggcatggaagagaagaacttctctgctgaagaagcatcttttagggatcagcctgtgttttttagagaatttagattcacgtcagaagttcccattcgacttgattatcatggcaaacatgtatcaatggatcagggtacgctagctgggattttgattggtctggctcagttaaactgctctgaactaaagctcaagaggctttcctatcgacatggtttactaggcgttgacaaattattctcatatgcaatcactgagtggcttaatgacattaagaagaaccagctaccaggaatcctgggaggtgttggacctatgcattcactagtacaattagtacaaggcctaaaggacttggtctggctcccaatagagcagtaccggaaggatggccgcattgtcagagggtttcagagaggcgctgcttcctctggtacctcgacagcgatggctgctctagaactcacaaacagaatggttcaaaccatacaggcagctgcagagactgcttatgatatggtgtctcctggtaccctttctatcgagcccaagaagaccaaaaggtttcctcatcaccggttagcccaccagccagtagacctgagggaaggtgtggccaaggcctacagtgttgtgaaagagggaatcacagacacggctcagaccatttatgaaactgcggctcgagaacacgagagcagaggggtgactggtgccgtgggcgaggttctgcgccagattcctccggcagtggtgaaacctctgattgttgccacagaagcaacgtcaaacgtgctgggtggcatgagaaaccaaattaggccagatgtccggcaagacgagtcacagaaatggcgccacggggatgactgatggcttggaactgacagtgtgaagataaggagagtggaaccaggagctcagagtcctgacagcagcttcagaggaagctcgtttaattttattgtgctcatctcaggaacaaaagcattttttagttaaataatttaacatcaaaacaacatgcaaccaaaaacttctgacatttatagttgatacttgcctatagaaatgtttggtggctggtgtcaaaggtccttaaagcatttgctgccaagttagtggaaggctcacttttgttaagatgactgtaattctccttgttaccgacgagagatcattggaagctgccttctaacactttgtgtagctctgtggagttggattttcttaaggtttaaaaagaatcacagcttcggaacttttaactgaaaatgagagacagaagccacaggggaagcaaagcaaataggattttcaatataaatatcagtgtggaaaaataacctattctgttgaatttagtgttcatgcacttgagaacaacattatttccatttactccgaaaatccttctgtgggggtttgagaaagtgaatgttgcagacatgttctgttgtgttgcactttatcctgtgtttatgtgtatgtgtttttagattaattcaagttgtgtgctatatttcttgtataatttacaaagttacacaaaatataaagagcagtaaacttgtctgaaagtttttggcaaaggaaggtaacttcaatgtaatagcttcctttaagagtacaggaaaatgcattctgtaatgaagtggggcccatgtaattgtttatattttcagttttaagcaggtatagtgcaggcttgttaggaatgtgtggaagggaagattggaagtgatttttcctcttttaaaagtaaacaaaattcttcaaatatgccctagttaactatttcagcataccatttttacttggttaacagtgtacattttgataacctatcaggaatgaataaagtatttttatttaaaggtg

SEQ ID NO: 1539 - DNA, 3069 bp, Homo sapiens
aaaattcactctggtatacagttctataaagctctgataaatgtgtagagttgtgtaaccaccaatgcaaccaaggtacagaacagtcctcttagcctctccctaccaaatttattcctgctactttgtagtcaaaaccagtcccctacacccaaaccctggcagtcactggtttttttcttcgttctcttttttttttttttttttgagacagagtctagctctgttgtccaggctggagtggtgcagtggcgtgatctcggttcactgcaacctccgcctccagggttcgagcggttctcctgcctcagcctcccgagtagctgggattatgggcgcccgccaccacgcccagctgatttttgtatttttggtagagatggggtttcactgttttggccaggctggtctcgagctcctgacctcatgatcctcctgcctcggcctcccaaagtgctgggattacaagagtgagccactgcgcctggcctttttctttgttcttatatttttgtctttttttttttttttttgaaacagagtctcactctttcactgaggctggagtgcagtggcgtgatcttggctcactgcaacctccacctcctgggttcaagcgattctcctgccttagcctcccgagtaacagggactacaggtgcccaccaccatgctgggctaatttttgtatttttagtagaggcgggggtttctccacactggccaggctggtcttgaacttctgacctcaaaagatccgcccgcctcggcctcccaaagtgctgggattataggcatgaaccaccgtgtccggccatatattttcgtcttttgaagactgttatatacatgaaattatatggtatgtagcattttgagagcgacttcttttgctatgagtaatacatttgagattcatccatatttctcagtatattaatagttcttatttctgagtcactccattgtgtggatttactattgtttgttccccagttgaaggatgtttaggatctttgcagttttggacaattacaagtaaagctgctataaacatttgtatgcaacattttgtgttttcatttatctatagtaaatacctagagttggattgctgggatatatggtaagcatatgtttgacattttaagaaacttctaaactgtttttcaaagtggctctaccatttcacattcccatcagtatgaaagtttcatttccacatcctctctagtacttgggggtgtcagtttagttttttaatttttaaattttttaatttttttaatacatttaaatagagatggggtctcactgtgttgaccaggatggtcttgaactgctggcctcaagtaatcctcccatctcggtctcccaaagtgctaggattacaggtgtgagccaccatgcccagccaggttttttgacattaagtatgtggtggtatctcatcgtttttatttgcatcctctaatgatttgagcatattttatatgcttatttgctatctacatatcttctttggcaaggtgttcacatctcttgcatattttggattgttttattatttttgaattttgaggattatatgctggatacaggggtgtttttttttttttttttttttgaaacagagtcctcacccaggttggagtgtagtggtgcaatctcggctcactgcaacctctgcctcctgggttcaagtgattctcatgcctcagcctcctgagtagctggaattacaggcgcaggccaccatgcttggctaacttttatatttttaccagagacaaggtttcaccatgttggcaaggctggtcttgaactctggacctcaagtgatacacccgtcttagcctcccaaagttctgggattacaggcatgagccattgtgcctggccagtatcttgtcttctcattctgtaaacggtgtctttttttcattatgggaaagctttattgacacatttgtttttatttttaaaaattatggtaaaatacacagaacataaacgttaccatctgatatggtttggctgtgtccacacctaaatctcgaattgtagttcccataatccccacacatatgtaccacattttctttatccagtctttcgttgatagacatttaggtcgattccatgtctttggtattgtgaatagtgctgcagtgaacatatgtgtgcatgtgtctttatggcagaatgatttatattatgcataaccaaaactgtacttattaaacaataacctcccaaccccttctgcccacaacctctggcgactgccatgctactttctgtctctgaatttgaataccctgatagtcatataatatttatctttttgtgactggcttatttcactttgcataatgtattcaagcttaatctgtgttgtagcctgcgtcagaatttcttttctttttaatgctgagtattattctattgtgtgtatataccacattttatttatccattcatccactgatggacatgtgcattgttcccaccttttggctattgtgaaaaatgctgttatgaatatgggtatggagatctctccccttattttgagacaggatctcactgtcacccaggctggggtgcagtggtgtgctcataggtcactgtagcttcgacctcctgggctcaagcgaacctcccacctccgcctcttgagtagctgggaccacaggcatgtgccaccatggctgttaaatttattaatttgtttttctatggatcatgctttttgtgttacatcagaggagtctttgcttaacatgagatgacaaaggttttctcccatgtttcctcctaaaagttttatagttttaggttttacatttaggtctatgatccattttgagtcaatttttgtatatggtacaaggtatgaatctatgctttttaaaaaaatatggttacccaatttttctagcagtatgtgctaaaactttgctaaagtcacttagttctagtagctttttttgcagatttaaccagactttctacatagacaatcatatcttctgtgaataaacatggttttatttcttcatgtct

SEQ ID NO: 1540 - DNA, 2923 bp, Homo sapiens
aaagatactggggagtgggagccgcggggttcagagcgatgattcccccacaggaggcatccgctcgacggcgggagattgaggacaagctgaagcaggaggaggagactctgtccttcatccgagacagcctggagaagagcgaccagctcactaagaacatggtgtctatcttatcatcctttgagagccgccttatgaagctggagaactccatcatccctgggctattccagacacagagcagagggacaggattcgccaggcccagaagaccattgtcaaggagacctacggggcctttctacagaagtttggcagcgtgcccttcaccaagaacccggagaagtacatcaagtacggggtggagcaggtgggcgacatgatcgatcgccttttcgacacctctgcctgagcctgctgctagccctgcctggttccaccagactggcgtgtcattggacagataaaccagtcccgtgttcccagccgaaccagcactctcccggaagcctggggtccctccacaccttggcttttatgaccctgatggcttctgaaacaggaaaagagagaaggaagacagaggcctgtgcccactgctgctccatgtgtaccaagagcagcagggcagaagggccctccctccagcctaggtcagaggtggggacagagaactcccctacagcccagagatgtggcagggctcagagaagcagccagagctcctggaggaaaggcagtcgggactgaccccctctcttaaaacacattcccgcccgcccacaggcctgaggtctgggacctttccctcccaggagtcccctaggtggctgggggaggcaggctcactggccattttccctagagtccagcacactgcaggaggcgttcggaggaggagttccgccccaccctctacagccttcctcaggcccctgtctctggtccccagcctcagtgcctcttggcccagggccaggcagtcgtggttgcagaaggagcaattaggctgcctgcctgtgggctgggagacagggacaatggggaaaagttaaggagcaaaatgggggttggaagcaaaaaatagggccccacctatttaggacgagattgaagactgacccttgaggcacacttgcactggagatgggtttatttcacgctctgtgcttgtgtgctagcggagggagagctcagggtggcttaatccagaggccctgtcatggcccgcccccagccatgggaaagcaaacttcatcctaaggtgtgcagcccaggccctgcccctttacagtctaggccgcctgccatggggtgcagcctctccaggggctgcgtcagacttgcacgctgcccacatccagattcctgcaaagacgaattgggtgcacagcaccccaaccacatacacgaggaagaagatgcggtcagcagtctcaggccagcttctctgtgacccctttactcctctggagggctctgtggggagagatacagggaaaggagctgttcttcaaggtcccctcaacatgagcggaagagcgaaccccaggggtcatcagcctgtatcgcttcctttcttagattctcagctgatgaaaatttgggtctggcccgtttcaggccatcttcagttgaagaaacaccctcttaggctgtgcaaggcatgggttatcaggggattgaggtcacctgggacttcagggaggctcagcttgctccctgccccagacctgtttcttctaagggaggaggacatggtggagaccagggacaggagagccagcagggtggatgcaaggggcctctacccacacctggacctccgtgccctcaccccagccctaggtgtgcacctaggcctcattccttaccccccagcccctgcccaccttcagcaggatgaggccctgggttgccgtgctctcgctgttcccctctcggggctgggctggggccgctcttggccccaaggttgccccgggccagcagcccagccagcagcacagtctctatggtgctgaggaagagcagcagcagcaggatggtgaagtagtaaactgggggaggcagggcacagggagatgctcaggggccagtccctgtgtctctggtgcccagcgagctgagcaccagtgggtgaccggggagaaacagggcagactgggtaagggagcagggcttactgagcagtgggttgcaggaggaggagctgggcagggcctgcaccagggaggagtggaggacgaggtaactcagcagcaatgtcaccttgtagcctatgcgctcaatggcccggaggggcagcaaccccccgcacacgtcagccaacagcagtgcctctgcaggcaccaagagagcgatgatggacttgagcgccgtgttcttcagcctcagctggaaggggaaaagtcagggccttcccggcgggggggaaggaggtgggcatcgggggcatggggcctggcctctggccgtgcatcctcactcccacccgcctccagcagccctctgtcggcctcctcgcgacttgactcaccgtcacctggaagcagggcaccagctgctggggtgggacttgggtcttcagatcataaactacgtattccctcttgacactcacaatctcgttcaccacgtgggcctggaactctaactccatcgctgaggggtgggaatgagaactatgaaccaggaaggagagatcccagctgccaagtctgggggtagcagactggagcccaggggtgatggagacttttgatggcttttggcagggacagacttggacacaaaaccgatccatagaagggcttcccaaaccttgttttgcaacatcccaaattgtctccagttgaaggaaggcctttatcagattcatagatgagctttcattgtaaaaataaatgtactttgcatc

SEQ ID NO: 1541 - DNA, 3316 bp, Homo sapiens
tttttttttcttctttttcttgagacagagtcttgctctgtcgcccatgctggagtgcagtggcaagatctcagctcactgcaaattccatctcccagattcaagtgattctcctgcctcagcctcccatgaagctgggattacaggcagccaccaccatatccagctaattcttttatttttagtagagatgaggttttgccatgttggccaggctggtctcaaactcctgacctcaagtgatccacctgcttggcctcccaaagtgctgggattacaggtgcgagccactgctcccagccaagtattcaataattttcataagaaaagaaaccaacagtcagctgactctcatcctagaaattctaaactactattttttttccccctggataaagttgggtttttagaaactgatgattttttagtaaacttccctggagtaaccaactgagtcagtgcctttattagttacaaatacatgtgatccctaaattctcacctgtaggatctaatctcaaaggcttgggccctgagactatgcagctataaaaattggttaggtaccaagttgatcacaaaatgggattatctttctaagtaaatatttgccaaaaactagttaatcaaagatatcccccaccccttgtgtgctgttctttactctaaggctggagccatgtagacactggggcatttttgttaagtgatagctcctgtccccaggttccttactgtctacaccattatagattattcatacaacttgatgatttgccttgatgttttctctcctttcctcctatcccttctttctctttgttttacactctttgttgcggtgatgagttccttccagaggaaaaacaagaaatccagaaaagctgcctcctggattgtaattctggtccccatctaaggccaggatcatcagacacctgaaaaataatcacgttcaccctgagagcaagggaagagagacttttctcaggataaaaggaaatccagacaaccaacactgcagagaacagagcctgatcccctaagcaacctgccgagaaccagagggaccaaatgaggaaccttactgcagtttatcatttgaaatgctttgtaggaagagggaggtgagcctggcatttgctaggaaccagagtggaaccggcaaagtggccagcaacagagtcctgatccaaatggagaaagggaaccaggcgtacctcaacctggagtgggaaacttgataggagtttgaatcagcttgggtactgacaaatattgcttcaggaaattctcttcagacccgaattgtgattcaggcaggagctgtgcccatcttcatagagttgctcagctcagagtttgaagatgtccaggaacaggcagtctgggctcttggcaacattgctggagatagtaccatgtgcagggactatgtcttagactgcaatatccttccccctcttttgcagttattttcaaagcaaaaccgcctgaccatgacccggaatgcagtatgggctttgtctaatctctgtagagggaaaagtccacctccagaatttgcaaaggtttctccatgtctgaatgtgctttcctggttgctgtttgtcagtgacactgatgtactggctgatgcctgctgggccctctcatatctatcagatggacccaatgataaaattcaagcggtcatcgatgcgggagtatgtaggagacttgtggaactgctgatgcataatgattataaagtggtttctcctgctttgcgagctgtgggaaacattgtcacaggggatgatattcagacacaggtaattctgaattgctcagctctgcagagtttattgcatttgctgagtagcccaaaggaatctatcaaaaaggaagcatgttggacgatatctaatattacagctggaaatagggcacagatccagactgtgatagatgccaacattttcccagccctcattagtattttacaaactgctgaatttcggacaagaaaagaagcagcttgggccatcacaaatgcaacttctggaggatcagctgaacagatcaagtacctagtagaactgggttgtatcaagccgctctgtgatctcctcacggtcatggactctaagattgtacaggttgccctaaatggcttggaaaatatcctgaggcttggagaacaggaagccaaaaggaatggcactggcattaacccttactgtgctttgattgaagaagcttatggtctggataaaattgagttcttacagagtcatgaaaaccaggagatctaccaaaaggcctttgatcttattgagcattacttcgggaccgaagatgaagacagcagcattgcaccccaggttgaccttaaccagcagcagtacatcttccaacagtgtgaggctcctatggaaggtttccagctttgaagcaatactctgctttcacgttcctgtgtcagaccaggctacccagtcgagtcctcttgtggagcccacagtcctcatggagctaacttctcaaatgttttccataatactgtttgcgctcatttgcttgccttgcgcacctgctctcttacacacatctggaaaacctccggctctctgtggtggaatacccttctaataaaagggtaaccagaacggcccactctcttttacggaaaaatccctaggctttggagatccgcacttacattagagttatgggaatatacacatattaatgtggctccctttttcttgtgggggaataaaagaggactcctcctcattccctttaacatgggggaaaaaactgacattaaaagatgagactaaatctttatcttgaattttacacaactacttacgacaagggagatgtttagacctgttgtgtatacttcagagtacttttcatgagttcttccacagtgaacccttggattacctggtggctttttctagccagatttgcattaatccttactgagattggatggttttctttcctctattggcgccattcttcagatattaaagttaaaccatccactccctcaccttcagccttcagtgaatgtgctttctagttgtcaggaatgctgaagaattaacactttgactcctaaatgtgatactggtttgtagattcccttagagcagaaaggagaggggcacatattaatttgtatcgcttttgcttctctttggtcttttgtgtcttagaatttggaagtggttcatttctgttgctggtatgaggatttcgaatacttagtaatcgaaaaccatatcctgtaatttaataaaaaaaactaaggacg

SEQ ID NO: 1542 - DNA, 3507 bp, Homo sapiens
atgacaatcaagtggaagagggtcttgcaattgcacttgtccctgaggggggcccttgtccttgccaccttggttcttgctcaggctgctggggctgaggcctgaggtctgggatggggagagagccttcagtatgtgggccgccctcctgtcagaacagtgtttgtcgtctcctgctatcttacgtgagtagctctcaatcctgctgataatgtgggtatctttgctctctacagttagctgtgagttgatggcttcaaagcccagttctccaatagcttcctgtctcagggagggagctccatgcttgagaggggccattgctgcctgcctggtggggctaaatcaggcctggctgggtcatcggcaccggtgcataggcagggcaggctccgcacagtgtgggctcctcagcaccagagggtggcaccgtggcatccacctgggccacactgtatctgggggaagaaactccatggcaatgtttcattatacctggccctgctggctcatccaggtggtcactatgacacatccttaccacactgcacattgcctgctttagccaccaacatgccaccaaccaccacagatcaccttggtcagccagcaacctccacctcccccaccagtcaatgtctatcagtcaaaattcctagaactaaataagtataaaagaaacttaactacttcaacttaaaaataatttgcttctgtctgcctatgaaaatgttaatatttgtgaaatctgagtgaagggtatatggcaattcttcaactattctttcaactgctctgtaagcctgaaattatgttaaaataaaaattcaaaaacaaaggccaaaaaccttgtacccttaagggttacttgagttagtggttcacagcaacagatactcaaatctggtttgtgttacttctgaaaattaagcttcatatctttttcttcatggctctttctggtgtaaagtacaacttgaatctcatgttagaaggtctatcccaacaaagcccagaccactggactctagaggcttcacgcatgtggcagactcctgaatattgtcaggctttatctcccattttctggcattgcaggtactttactaaggcatttaggtgctagctctttggggctctccaggtccaattagcatgataaagatatgtaatggatcagcttgggcttctgggtccctccagattgcattctgactaagtgcaggcaagccgacatagcccggaggcaggacagtaaaagtatactgctgtccctgccacaacagggcagaagaggattaaggtgggggtgggcaggataaagcatttgccaggtcaatagtggcccaggtgccagggactgtgtggatttgctccagtaaaaataccgtctctgcaattctggttgtgattcacctcaccactggattagtccgtgatgatctgtggtcattttctatgacctacttgatttgtacactgatcaaacaagtgagttaattgtggatttggtaggaatcactaccttgtatctttcaagtctttggtggtggcattaagctcatgtgaggagcagaaaaaaagtttgtgagaaggctggcacactgtaggagcttgataaatgatagctatcatcattgttgttgtcatgtgttattgtcttagccaagtcagggtcaaaatttacattatcttttttctttttgaaatatcatatttcattgctcctaagaagcatactgttgtgtactttaacatctctgaagtcaggatatgataatagttgatggtatgttgtgattgctgttgtttcgattaaaattgtgttcatttgtagaggatttttctttgcttctgcctgtcacttggggcacaggctgagttaccaatgagagtaaagcttcaggacacctcatttgcatggcccttccaaggtcctgaaagggttccacctcacagcttcatgggatcaaattacatattttttttctgagacagtctcaatctgctgcccaggttggagtgcagtgttgctatctcagctcactgcaaactctgcctcccaagttgaagtgattcccatgcttcagactccagagtagctgaggcacgtgccaccacacccagctaattttctttgtatttttagtagagagatgcagttttgccatgttggccaggatggtctcaaattcctggcctcaagtgatctgcctgtctcagcctcccaaagcgctgggatcacagatgtgaaccaccacactcagcctcatcataggtttttataaaatttgcaagagtaagatattttgtatttcttttttaaaagagggcatcaaattatataagctttgggttctacccttgccaaggaactcataataatgtgaaactacaggtggtccctaactttacgatgtttcagcttatgattttccaactttgtgatagtgtgaaaacaatatgcattcagtgtgcttctcaacttacaactggataaagttgacttatgatatagtcaccttatgatggtttatcaggacataacatcatcataagttgaggtgcatttgtacattaaattctctgaggtttttttgatggcacaagtagtaccagaaaactgcatgagaaccaacttttgattcaaattatacgggcagattttacttcctccatccatggcaaaattgaaacatgcaacttctcttgctgtcctactatgcatgtccctttctttctcttttttctgtatatttctcatggaccccctccacagaggcctttagtgtctcagctttatctggggtctaatagacttctatctggagtattttcatttttagtggcacatccagtaatggtatctctattaatcaatgatgccttaggttccatgaacatagtacataatagggtactcaagatgggtccccctgagaccagcaggctggcctgtggagtttggacaacactgccccctagaggtctgtcttgtaacctgagaagattagccccctaacaattactgacagggagtttcttaaaaatcaggaaggatgctcacttttatttattatttattttttattattattatttttgaggcagagtcttgctctgttccccaggctggagtgcagtggtgcagtctcagctcactgcaacctccacctccagggttcaagcaattctcctgcctcagcctcctgtgtagctgggatgacaggcgcctgccactacacctggctaatttttagattttaagtagagacggggttttaccatgttggccaggctgttctcgaactcctgaccttgtgatccaccagtctcgacctcccaaagtgctgggattacaggcgtgagccaccgtgtctggccttatttatatttttaaaaacaggatctcgatctgtcacccaggctggagtgtaatggcatgatcatggctccctacagtccccacttcctgggctcaagcaatctctcccacctcaaccttcc

SEQ ID NO: 1543 - DNA, 2899 bp, Homo sapiens
aaaatgcctcatgctggcgggaagttttatggatgtaagaaatgtgggaaagcctttattagtttctgtgcctttcgataccatcaaaggactcacactaaagagaaaccctatgcgtgtaaacaatgtgggaaagcctatatttcttacacttcttttcaatatcatcagttgaatcacactggagcgaaacgctatgagtgtaagcagtgtggcaaaggcttcgatttgcccaattccattcgatatcatgaaatgactcacactggggagaaaccccatgaatgtaagcaatgtgggaaaactttcagatgtgcctcaagcctccgaatacatggaaggactcacactggggagaaaccctatgaatgtaaacagtgtggtaaagtctctcgttattggagcggccttcaggtacatgaagtaactcatattggaaaaaagctttatgaatgtaaggaatgtgggaaatcatactatagttctggttcctttctaaatcataaaaggatccacaccagggagaagtcttatgaatgcaaggaatgtgggaaagcatttggtaatcccatatcctttcaaaaacatgaagggagtcacagaaaatggaagccttatgaatgtaaggaatgtgggaaggtattcagtttttccagttcccttcggagacatgaaaggacacacactgaaaaactctgtgaatgtaaacagcatgggaaaggattttttcatagaagctgtcctagacacatgaagatagacactggagagatacttcataaacgtaagatacgtggaaaagtctttcattctcctagttcatttcaaacatgtgaaagatctcacactagagaaaaacgctataaatgcaagcaatgtggaaaacccttcatttatttcaatgcctttcaacgtcatcaaaggagccacactggagagaacccctatgagtgtaagcaatgtgggaaagcctgtatttcttccactgcttttcagtgtcgtgaattgagtcacactggagcaaaacgctataagtgtaagcagtgtggcaaaggcttcaatttgcccagttccattcgatatcatgaaatgactcacactggagagaaaccctatgaatgtaagcaatgtgggagagctttcagatctgcctcacacctacgaacacatgaaaggactcacattggggagaaaccctatgaatgtaaacagtgtggtaaagtctatcgttactggagtggccttcgaatacatggactaactcatattggaaaaaagccttatgaatttaatgaccgtgggaaatcattctatagttccaatttctttctaaatcataaaagggtccacactagagtgaagacatatgaatgcaaggaatgtgggaaagcatttgataatcctacatcctttcaaaaacatgaagggagtcacagaaaagggaagtcttatgaatgtaaggaatgtgggaaggtattcagtttttcccgttcctttcgtagatatgaaagggcacacactggcgaaaagccctgtgaataaacaatgtgggaaaggatttttcatatcttctgtggagctttgaatgcatgaaaagacagactacagagaaatgctaaatgtaaggcgtgtataaaagcatttagtaatttctcttccttgcttatacatggaaggatgcacactggagagaagccatatgaatgtaagaattgtgggaaagccttcacatctgccaagagccttcaaaatcatggaaggacacacaccggagagaaaccatgtgaatgcaagcaatgtggcaaagctttcatttgttccagttcctgtcagagacatgaagagacacattctgttaatatgcattcagttatcctaattcctttgaaacacagaaaaagagtagggaaaggacctctgagataactgtttcctgagttgagaagagctacttgtgaatggacaattaaatctagatgtatttagatctgatacaattcatctgtagccaacctttttttaaatttttttattttttagatggagtcttgctctgtcgcccagactggagtgcagtggcacgatcttggctcactgcaacctccgcctcctgggtttaagcaattctcctgcctcagcctcccaagtagctgggattacaggtaaccgccatcacgcctggctaattttagagatggagtttcaccatgttggccaggctggtctcaaactcctgacctcaagtgatccacccacctcggcctcccaaagtgctgggattacaggcgtgagccactgcgccctgccacctatagccaatcttaatgagatttcataggcacagacaaggaaggttatcagtcacatattagaggcaccacacagggagagcagtgtgtggccacatgcttcagcccattttttctgattctcttgcttgcaaattaagagtattctccaaatcacttgactttccttttctcagagttatagttctccagagatgtcaccagatgattcacattaaaggtacatttccagttgacttttttatttcagatattagtaaatgattaccagagaactaattcaaactgtcatggttggaaatactctgatgctcaactccctaatctatagagtgagttaaggtctctactcttttgcaagcattgttctagtggcagtgaccctgttcatgattcagcctgacatttactatgctgccctgaaaaccaactagatgggagcttgtttctctctgcattgtgtagtgagtggtgtcacccaggactttcatgtgagaaaaagcaccttgcttttaatctgggaattttgagtgttttttgtaatgcctcagtttattcttatttatggttgattatatgtgatttagaac

SEQ ID NO: 1544 - DNA, 3225 bp, Homo sapiens
accaagctttcatgccctccttgggcacaccatcttcaaggaacctccacatattcagctatctggaagctctctgtaccctctcctcttgggccttttgtggggacatcactggataggtgtgactgaagtatggacaaccatgtagcaatgtgattggacagaaactgtgacctaccacaaatagactgagtgggaaaaccccacagggcctgtgtgttcagattccccagcttctctgtgcagcgtttcttccttcaggtgtgggacaggactccttctgaaatgagggtctatgacctacagtcagataaggtaggtcagagaatttctttccttctttctttttcataagttcaacttttattttagattcagggggtatatgtataggtttgttatatggatgtatcgtgcgatgctgaggtttggggtatgattgatcctgtcactcaagtagtaagcacagtacccctggaattagttttcaacccttgcttcccttcctcctctgtcagtctccagtatctattgttcccatctttatatccatgagtacccagtgtttagctcccacttgcaagtgagaacatgcagtgtttggtttttcgttcctacattaatttgcttagaataatggcctccagctacatccatgtttctgcaaaggacatgattttattctttatatgactgcatagtactctgtggtataaatgtaccatgttttctttatccatttcaccattgatgggcatctaggttggttccatgactttgctattgtgaatagtgctgtgatgaacatacgagagcatgtgtctttttggtagaatggtttattctcttttggatatatacccagtaatgggattgctgggttgaatggcagttctgttttaagttctttgggaaatctgccaactgcttctacagtgactgaactaatttacattaccaccaacaatgtataagtgttcccttttcttcacaacctctccagcatctgttgttttttggctttttaataatagccattctgactaatgtgagatggtatctcattatggttttgatttacatttctctgatgattaatgatgttaaactttttttgtatttctgttggctgcttgtatgtcttcttttgagaagtacctgttcatatcttttgcccactttttaatagagttatttgttttttctttgtcaaattgtttaagttccttatggattctggatattagacctttgttagatgcatagtttgggaatattttctcccattctgtaggttgtctgtttactctgttgataatttctttttctgtgcagaaatggtttagtttgattaggtcccacttgtcaatttgtgtttttgttgcaactgcttttgaggatgtgggcatatattctttcccaaggctgatggaaccataaaagagcctgaatatccaaaacaatcctgagcaaaaagaacaaagctggaggcaacacgttacccaacttcgggctaaactgtaaggctacagtaacaaaaacatcaaggtgccggtataaaagctgagaatttctttatggtcagctccaagacagaaaggcagggggagattagggtatatttttagtttttatgaactgcctaggggagaaataacagtggatgtgggagttatgagccaggaattgtagatgaaaacctatatacataatttcaacagtcatgcttggaactcatcctctctccctccatgtcagctcctcctcctgttcatccagcccaatgcacggcccaccacccacctggctgcctgggtgggcgggcaccatgggctcatgctggctcaccagcctcctttctcactcagttcccagtcttgtcagtcttgcctctttagcatctcacaagcctgcctacctttatcacactgacattgtgggcccctcttctgatcataatagcaacttttcctgctttgctgttccactgttgccctcttaccaccttctccaggtggttttgagtaagcatcttaaaataccaatctggtcattgcacaaggctgcccgatgtcctaagcataaagcctaaatgccttaccatggttcatggcattcttccatgtggcctctgcatgtacttgattatcacccatcactaccccatcatcaccctattgtagctgatacttgttcccttatgcttcccaatgccattgcatttttttttttctggaaagaaactaatttagaaggggacatggttaaggagtatcatccagagaaatattcgattgaatcatgtgaaattgctgatatttcaccatttttgacctagaaaaatgacaatttcatatagttaacccaatatttagggatttgaagtcatcttcagaagggtcagatgctgtggctggtctccttgcccttgacacacaggcatagtttgctcccccacccctctgcatgtgccctggtgggcctctcccagcccacccctcaccctcaccaggccttcccattcagccttcaaggtttagatttctcctctgtgcaaccttccctgactaaccaagactgagtaatgtgcttgcaatgatttattctcactttccaagtgctccttgacaggtattataatgtagcaggacaagccgcagacaaaactcctcagacgctgagttaaagaaggaaaagctttattcggctaggagcttcggcaagactcacgtctccaacaactgagctccccgagtgagcaattcctgtcccttttaagggctcacaactttaagggggtctgcgtgagagggtcatgatccatgtgagcaagcagagggtacgtgactgggggctgcatgcactggtaattagaatggaacagaacaggacagggattttcacagtgcttttctatacaatgtctgaaatctatagataacataaccgattaggtcaggggtcgatctttaactgccaggcccagggtgtggcaccgggctgtctgcttgtggatttcatttctgccttttagtttttacttcttctttctttggtggcagaaattgggcataagacaacatgagaggtggtctcctcccttaataagattaagtctgccttgttcaggactgtattctcagtgatttgccagtgctggatggtacaggggttcccaataaacatgtattgaatgaatgattgaataaatatgtgaattaatgc

SEQ ID NO: 1545 - DNA, 3071 bp, Homo sapiens
gactgcctggcccacagagccctcgcttcccctgcacttcagccacccactggcatcaccacgatgggctgtgttagcaaacattgtgcagcgcctgtgcagtctcgagccccgacatcgaacttcctgagtccagattggcgaccctcccgttgtctcactcttcactggcactgctcttgtttttggttctcaagacaggatgttgtctcttttactgtgttcctgtcagccctcttctgtcttcacttcttttctcacctccttactctccacagtgcatggggcatccctcctcactcccttcagtcatactcattagaccaaacccaactggaatcagtgcagccatccaccttctccccccaccttgacccactgtgtgctggtggagacaatcacacctccagagtttgctgcttggagctcacaaggctactgctatttcagacacagccgatgatctcacctcctgcattagagtgaggatgagccctctgagaggaactcctcaacttctaggctcccacctgagattccattctgtcgcactagtgtgttaaatccagttcttactggcttgcaagagtggattgttaaatgttcaggaattttatgagccagttgttaaacaccgttattactaaaaattaaatgaagactgggtgcagtggctcatgcctctaattccaacactttggagggctgaggtgggaggattgcttgaggccagaagttctagaccagcctgggcaacatagcgagacctcatctctactaaaaataaaaagtagccaggtgtagtggcacacacctgtagtcccagctactcaggaggctgaggcaaaaggattgcttgatcccgggggtttgaggctgcagtgagccatgatcacacacgcccctgcactccaccctgggtgacagagtgagattctatctcaaaagcaagacaaaacacaaatgatataaacttgcagttacatatattatattaaaaatagtggtaatacttaaaacattctagttcttaaattttactcttgtctagctttcagggttatttatgtctatcacagggcaaccaactgtccctgtttggtcaggactgagggatgtcctcagtgctaaaaagtgatggagaaaatgttattagtgcagattaaacttaaaagtgtgtggccaggcacggtggctcacacctgtaatcccagcactttgggaggccaaggtggacagatcacgaggtcaggagttcaagaccagcctggccaatatggtgaaaccccgtctctactcaaaatacaaaaattagccaggtgtggtggtgcacgcctatagtcccagctacttgggaggctgaggcagaagcatcccttgaacccaggaggtggagcttgcagtgagccgagattgcgccactgcactccagcctgggctacagagcaagactccacctcaaaaaaaaaaaaaaaaaaaaaaagtgttagctgggcatggtggtgcacacctgtagtcccagctactcaggaggctgaggcgggaggattgcttgagcccaggaggcggaggctgcagtgagccaagatgacaccaccacactccagcctgggcaacagagtgagaccctgtctcaaaataaataaataaaaataaaagtgtgctgcggggccgggcacagtggctcatgcctgtaaacccaccactttgggaggaccacttgagcccaggagttcaggatcagcctgggcaacatagggagataatcatctttacaaaaaaatcaaaaaattagctgggcgtggtggcatgcacatgtggccccagctatttgagaggctgaggatctcttgagcccaggaattcaaggctgcagtgagctgtgatcacgccactgtactccagcctgagtaacagagtgactggacggctttccaagattgagacctacccttttaaccattgtgtgtgtgtgtgtgtgtgtgtagtgaattagataatgcatataaagagcttagtatagtgcttgaaagtaagggcgtattagctgttgttctatttatggtctttagctggtgaccttcagatctctccacaagcaggaggcctgtatgtgtatccaaccacctgcttatatagcatgtggccttcgctgtcccacaggcagctccagctcagcttggaccaaactgaactcttctcctcagcttccatcctcaaacctggtccttctctcacgtgtcttattatggtgaatcctctcagctgcccgggtcccccaacctctcccatccagcaggtcacccaggcctgctcattctcctgcctcgtcagctctttcacgtgcccatttctctccattccccaccgccgctgccttcattctgaccatcggtatctgtctccaggactgctacagcagacttctggctgaggcctgtgccctgaggattgccacccccaattcattgcctatactgtagcgagagggatctgtcagtaatacgaacctgggcctgtcgtgatccagttggaagccttagtggcttccaggatgctccttatcttccttggagtcctcgtgctgcggcttcatctcctctttccctgggccctgcccccaccctctagattccttcccataccccatctttagctcagagcctttgcctgtgctgcttgttctgcatagaatatccttccctcccctacctcacccaaccctcctgtccccctcacctagcagctcccatctacactcagccaaggtgattttagaatctaggaagcaggccaggcacggtggcttatgcctgtaatcccaccactttgggaggctgaggcgggtggatcacctgcaatcaggagttcaagaccagcctgaccaacatggtgaagccctgtctctactaaaaatacaaaattaaccagacgtggtggcgcgcctgtaatcccagctactcagaaggctgaggcaggagaatcgcttgaacccgggaggcagaggttgccgtgagctgagatcacaccattgcactccagcctgggcgacagagtgagactctgtctcc

SEQ ID NO: 1546 - DNA, 3057 bp, Homo sapiens
aggccccagctgtacctgctccatcccagaaggccccagccgtacctgctccatcccagaaggccccagccatacctgctccatcccggaaggcctcagctgcgtcagcttctccccgaaaggcctcagccgtacctgccccaccccagaagaccccacccccatctcagaaggccccatctgtacctaccattccccagaaggctgtgtcccccactgctccaaagaagaaatctctactcctccctgccccatcccagaaggctctgccaacctcacctacccaataccagatggcgctgagcccgcctgcctcacgggggaagctccctggcgattttgacgtgttgccaacaggaattcctggaagagccgtgctggagagaagccagtctggagggaaaccggagccggtggtgacggtgcgcacccaggagacagacgtggtggagatgacgactcaggccaagtccccggagtcgcccttcaccgtgaccaagaaggagtccaaggacatcctgattagccaaaccgaggaggtgaccctggaggccttcaggggccaggggaagttggaggactgggcccactgggcaaagcttgaagagaggtccccggacctgcctggcgtgagatccaaggagttggagcagcggaagagatgggtcaaggccaaggaactggccgtcgagggcccctcccaggagcacagcaggcccttctctgtggaagcgctcaccctcaccaagctcatgatcacggccaactccaaagagcagcgctcgaaatccgctttggtctcacttccctcctggctcttggcgactccgcaggcgtcggccacgtcaatgatggcttcagtgccctcccgccccggccagctgtccttactggaggggaagccagtggtggtcagagagcagccagagtcgcacacctgggtgaaggagggcaagcggccatggggcgagatgaaggagccaccctgggaccccaaggggccacccaaggtgccctttcgctccaagcccacctctgccagtctgaagagggaaggaatctcccaggcgcctatccccctgaccgcctcaccgtgggaggacttacggccatcgcccctctcggagaccctcatctcaaagatggaggccacagccagggcgtcccagcagcccaagagggtgtcgcaggagcccatgaggatgccagcccagcaccccctggccactgtggggtcgtcttcagaaattcttttgcccatgctcttagaacttgaaactgtgaggaacacggccaccaaggcagaggagatacaggaggaatcgggcgtcttgaaccttctgcccagcctgcagcactcccagcactccgagtggccggatgcgggggcttaacctcagttggaaactgtccagaggagcccagcgctgccaggccccgagggttctgtgcgcaccgactgtaggaagcggaatgttgaaagccgtttggggggatttgccccctctggtagataccagaactatggatatgcctttatatattggggggcgggggggggcgggggcgagcccgtggagccgcccaacttcgcagagattaaagcttgagcctgagactcagcgagtcgcacctcggtgcctgtgtgcacgcgcaggcccccgagggggcgtcgggggagcaaggggtggggtgggggcgcccctaccagccccgcggtgcacgacggctcccattggctggggctcgggcgtcctagccaatccggccgcggggtgcgtttctcctgacccgggtgggaccgcaccccgcggactcagaagcgagcggcaccccgggaccatcccacagcagatccagtggccgccaacgtcaggctggagttgcctccttcgtggatgttggatgtggaagcccaggagccccccaaggggaaatggtcgacgccgcccttcgacccgcgcttccccagccagaaccagatccgtaactgctaccagaacttcctgggtgagacctgctcagccaggttatgggaggagcagggtgtgacaagggacggcagggaggggcactcccaccctaagtcccgcggagaccgttagggtgggaggccgggcggggccgggttggtgggggcggggcctggtcgagaaaaggcggggctgagcctggaggggcggggcgaggttggtaggggcgaggcctgatctggaaggtgcggggccgagtcgtgaaggtgcggggcgaggtaggtaggagcagggtctgggtaggaggagcagtgtgagggaggtaggggtcggggcctggctgggaggggcgggacggaggcctccaggggagagggaggcgggacgaagcagcgaagaactgggagggcccgagcagtggaggggcgggtcctgtcctggaatgggcgtggcttgccgcgtgatccccgcccgccacagactaccaccgctgcctcaagaccaggacccgccgcgggaagagcacgcagccctgcgagtactatttccgcgtgtaccactcgctgtgccccatcagctgggtggagagctggaacgagcagatcaagaacgggattttcgccggcaaaatctgactgccccagcgcggcttcctctgaagatgcagtgatcctgcatctttttgtctcgcggagccccgggtctcggttatccacccctacctcccagtgtctaagccacgaataatgcaggtagatgcctcgcgttgacagctacgagccagcccagggtccccagttctcaacactgtcccacccagatggctccaaggccaaggagtgccgcttgacaaagccctagggttccagcctggtcctgctgagggagccgtgagaccagtcagcctgaggtgctggttttcccaacgggtactccctgagctatcagccttccagaggggctcctaggagggggaagccccatcctctgactgaagcggtcctatgaggccctgttcaaccccagggttcaaaggacacaccctagatgaacgctctgaaccccctataaaaaatgtgcatgt

SEQ ID NO: 1547 - DNA, 3154 bp, Homo sapiens
tttgccaggccatggggaagttgtccacaactattgcagggttgggcacagatgggggccagggaatatctgccccagcagagcctccttccccatgcgaggatgaccctccagtcatatcccaggcagggaaccggggctggtgggtggaaagagcccaggctctggacgagttgcaaactctgcaagttgtgattgtcctttttgtgaaatgaggagcattgtttccgccctgtccacctcacacagcgggtgtgaggatggaagaagagagcacagctggaggctctgtagctggggagctgctcctggctgtggcactgcttcacacagagcagtcccagctggccactggcaccagaaaccacagtatcaaagagacactgtcacacctgagctgtcctggaggagacttcaggcaagatctactcctttggccagtagttgtctcaaggtgccactcttgattttttacatcatatcacaaagctcccttgcctctgacggggaggggactcctcgttccctaatcccagctccagtgcccctgccccacccgtgtctcccgctgcccctccttggaaggccccgccgcccaccttggagttcagatactgctgcagtagcgcctgcagctctgtgttctgctgctccagagaactgttttccagcagcagcttggccctctgggtcaggacaaggctttggacagaaaaatcggttagaggctcactgaatcctccatcctctgccaagtaggggccagggtcttggtggttgtactttggctacaggtggagggagactccagaagctacactcttcacccagccgccaggtgagccaggttagcaggaacagaacaggcaggccagggcccaagagccaaccgccccacatgatccacccacacaggagatgccaagggcagcaaacgcggctgctcccaacaaccgttcctcacctgcccgccagcaccctcctgctccatgacatgcacacttactggtacttctccaaggctgtgtagagggcatcccagaggttctgcttggaggaagggatcactgtggtcagggcctgccagtactccgagtccttggagttgtcacgcacattcttctgtaccctcagcggggcccgcgagtccctgaaggccaagagcacagtgattgtcatgtccattgggtactacccaggcccccaggcagtgccagtcacaggcctactgctttcccacctgtcaccttcccactcagcagtccaagtttattagacggtggcaggttctcagaaaggacgcatgcttattgtcaacgttcctgcctcggtaccaccggtaccttcgtgagggcataatcagtgcttcatccacccctctctctcccaatcagtttacctcactggctttacagctcatcactgtgcccatctcttgcaccaacacatccaaaacagcacttgaattcagtcatgtcctctccatcccctcatgacagccttaatctgggggatcctcacctcccacctggacaagcctcctgatgctttccctgtatccagcttcgccccttccctgacgccacaatgatctctctaaaacgcaaggctaatcatggctcttcggctgcttcaaatccttttctggctcccacccaccaacgggtaaagacaaagatcttgggcacattgggcaaggctctccaagacctggctagctccccacccaccagtgccacctcccaggcccttgacactccagccagacctcctgtgatgattcttgaacagaccagaccttccccatgctgtcatttcctgaaatgcccttacctccattttatctgcctgggaacacctagttccagtgccatttcctcccaaaaccctctgacatgccaaatggaaacagccacttcctcctctgaacagtggtgcaccttgaatgtgctttgaccattactctgatcacaaggcagtgcccccacagtgcttacacatggcagccttcagtgcatgtctgctgaatgaatgatgagtgaaaaaagcacagatcaccactatgccctattgctttcctgactgtccagcgattggttgccccagcccgccttcagatagccctgtccttagtccccgcatcttgcccagcagactcttctccactcactggctctgcctggctccccagcccatccagctcccctggttctggtctcaggcaagccttccagccccgcagcccacctaggcttcttcagacccatgacgaaggcctccagaatcttgaggacatcattggggtggatgacccagggggagggtggggtctcctcctcttcctccttctccccttccaccaggctttcttccttttctccctccatctccgtctgctctgccagctccaattctgacctcgtgcttgtctcctccatgctcgccttctccatgctcgcctgactgcagggcttgatctggagaaagatgcacggacaactgtgggctggggacacacgagcatgagcatggagagagaggcaggaagaagaaaaaccagaaaagtttacagaaagtgacagcttgcccagggagacatttacacagggacagaaacaggagagagagtgggaagaagggggatgggatggggagaggcactaggaggctacgagaaaatggaaaggttctgtttctaaatccgggctcctaggtgctcaccttactgacattcataaagcttacatgttagaaatcttcttttgaatcataatacagattaaatttttgctttaattgttaaatttaaaaggtcttcctcctactcctattttgcagttcatgcaattgacctcccacaggcaaacgaatgctatcaagtttcctatggttccttccaaggaaatagtatgtctatataatgtttatatataaatacatgcgcatacctttccatatatactcctccttctcgttttgacatcaatgatactatactacaaatagagttctgtagtttgcttttacacttaccaataaaccttaggtaccttttcatgtgaatacataaagaactttggttttttcccacagttttatagtaccccatcgtgtagacataccatatattattaaatagattcctcaacaatgg

SEQ ID NO: 1548 - DNA, 3084 bp, Homo sapiens
gagtttcactggtttaaaaatacacagaggaagcgagtaagagaaaggggaaggggaggtgggagaggcacctcaactttgatgtcccgagccttgagtggccactcgcaagctggccaagggcttcacacaatttgccaagatgacagaggggaccaagaagaccagcaaaaagttcaagttcttcaagttcaagggctttgggagtttctccaacctccctcggtccttcactctgagacgatcctcagcttccatcagtaggcagtcccatttggagcctgacacctttgaagccacgcaggatgacatggtgacggtgcccaagagtcccccagcctatgcccgctccagtgacatgtacagccacatgggcaccatgcctccccacaggagacgtagaagaggagagacctcccaagcccaacttggtacccggaggtgtacccgaccccccaggcttggaggcagccaaagaggtgatggtgaaggccactggccctctagaggacaccccagcaatggaacccaacccttcagcagtggaggtagaccccatcagaaagcctgaggtccccacaggagacgtagaagaggagagccagaggctggcagcgactatgtgaagttctccaaggagaagtacatcctggactcatcgccagagaaactccacaaggaattggaggaggagctcaaactcagcagcacggatctccgcagccatgcctggtaccatggccgcatcccccgagaggtctcggagaccttggtacaacgcaacggcgacttcctcatccgggactcactcaccagcctgggcgactatgtgctcacgtgccgctggcgcaaccaggccttgcacttcaagatcaacaaggtggtggtgaaggcaggcgagagctacacacacatccagtacctgtttgagcaggagagctttgaccacgtgcccgccctcgtgcgctatcatgtgggcagccgcaaggctgtgtcagagcagagtggtgccatcatctactgcccggtgaaccgcaccttcccactgcgctacctcgaggccagctatggcctgggacaggggagtagcaagcctgctagccccgtcagcccctcaggccccaagggcagccacatgaagcggcgcagcgtcaccatgaccgatgggctcactgctgacaaggtcacccgcagcgatggctgccccaccagtacgtcgctgccccgccctcgggactccatccgcagctgtgccctcagcatggaccagatcccagacctgcactcacccatgtcgcccatctccgagagccctagctcccctgcctacagcactgtaacccgtgtccatgccgcccctgcagccccttctgccacagcattgcctgcctcccctgtcgcccgccgttccagtgagccccagctgtgtcccggaagtgccccaaagacccatggggagtcagacaagggcccccacaccagcccctcccacacccttggcaaggcctccccgtcaccatcactcagcagctacagtgacccggactctggccactactgccagctccagcctcccgtgcgtggcagccgagagtgggcagcgactgagacctccagccagcaggccaggagctatggggagaggctaaaggaactgtcagaaaatggggcccctgaaggggactggggcaagaccttcacagtccccatcgtggaagtcacttcttccttcaacccggccaccttccagtcactactgatccccagggataaccggccactggaggtgggccttctgcgcaaggtcaaggagctgctggcagaagtggatgcccggacgctggcccggcatgtcaccaaggtggactgcctggttgctaggatactgggcgttaccaaggagatgcagaccctaatgggagtccgctggggcatggaactgctcaccctcccccatggccggcagctacgcctagacctgctggaaaggttccacaccatgtccatcatgctggccgtggacatcctgggctgcaccggccctgcggaggagcgggcagcgctgctgcacaagaccattcagctggcggccgagctgcgggggactatgggcaacatgttcagcttcgcggcggtcatgggtgccctggacatggctcagatttctcggctggagcagacatgggtgaccctgcggcagcgacacacagagggtgccatcctgtacgagaagaagctcaagccttttctcaagagcctcaacgagggcaaagaaggcccgccgctgagcaacaccacgtttcctcatgtgctgcccctcatcaccctgctggagtgtgactcggccccaccagagggccctgagccctggggcagcacggagcacggcgtggaggtggtgctggctcacctggaggccgcccgcacagtggcacaccacggaggcctgtaccacaccaatgctgaagtcaagctgcaggggttccaggcccggccggagctcctggaggtgttcagcacggagttccagatgcgccttctctggggcagtcagggtgccagcagcagccaggcccggcgctatgagaagttcgacaaggtcctcactgccctgtcccacaagctggaacctgctgtccgctccagcgagctgtgaccccagggacatttcccctctgcagctgcggacagcgtcaggggcagaggggcacacaactttccccagagcaccccaaggacactgtgatcaacccgagaatgttctgggttcaactcaagcatctcccttgcacctccagggtcctgcgtggactctgggttccatcccacctgctacatgctcaccaggtctccattgaggaagaacaggaacgccggttcccccaccagcttttgctgctccccttcctgctggggttccctgttttcgagccatgggaggcaggctgctcacgcctcctcactctctgtctgtccctcaccaacaccaaggcctccatctcactgtaaataagtctctgttctgtaaatagatgtacagaagccatgttatttctttcatataataaacttttatgactcttt

SEQ ID NO: 1549 - DNA, 4211 bp, Homo sapiens
caggacaaacaaacaatgatagattcatacccaagctgagaggggcgaactgtaatgccatccagcttccctcccagtacaacagggccctctggctttgtgtgggtgcttgtggatagacacctcacttccttccaaggtagctggttccacttccagccaacagctcaggctgcctcccagcccagctatcctgcaggttccagccccacagcacgtgtgtctctgtgtcctctagccagtaggcttctcccccagaatgctggatttcttatggagattttcctggataagatgagcaattgggctgaccattggaccatgtgtattgatgcagttattgtatgcacccagagatggagaggcctggtgcttccattctgatgtgctcttggagaaagccattgaggaactgtggtcagcaggtgttccaggagtttcagcgccatgggcttagtggggcttcatggccctgtgtatgcatttccgtgtcctgcagccagggtgtcagctcactgcattcattcaatagctcctgagttcccactgcatgccaggtactgtgtgtgtggtggtggggggtgactttttatcaagcaaagtcaaaccacacatgccccctgccttttaagagttcaagatctgtagcacagacagccatggggactaggagctccagcaccgtgagctgtagtggatgtacacagagtgccccgtgggcaggcacaggtggcagctaattccagccgggctggcttggggattccttatgtgacacccactgtagacccagcctgcagctgtttccttcagtggtcacctccgcctgatgaaggaaggcaatgcgttctcgtgtgaacggctgctctttgcttctggtccaggcctgctcggactccatctcgctcatggcgtggctttgaaatgatgctcatcaggctccctgacctgctcagggataggccactgtgagagttccgctttgattttcaagcagctgagacaccagaggcgtggtgaatccccccagccctcccctcagaataagctatctgtccggtgagaatagtcactcctcctgttctttgaggacaagaccagcaaaagacttgagtcaccatttccaaagaaaaacaaggagaatgcaaatttctcggcttaaaaatatatacaaagggattgattctatataactctctggagtaagaagagctgtgacttccattggctggtgctgtttagagaaggatcgctgtgctgaagttgaaaaagagtgtattcagctttgatatttggagaaagtgtcccaaccatcatgtatttctgcctggttttcttttagaatgcaccagctggagtcgacattaaagggccccatttcccatttgctgcagaagatgtttaattggaagtctctccctgtccttttgtaagcctcatttctgcatattagctttacacatgagttctggggtgactggtcaagacgggagtctgtgtgtaattagaccagaccaaggaagaagcaggaagtttgctggcggagaacatgggagtctctgtatcgcctttaatcactcttcctgcttggtgtaatgttcacatgttgtctttcatcacagccatggggacagagcgccagttcatgctatctcctcacggggcccttcggtccatctccacccaccacccagccctcactgtcatctgtctgaccccattggccttgctcttctttttggaacatgataacctcccgccagccgccccagcacagtctcaggacgtttgcatgtgtcgtggcccctgcacactgtttcctcagctcctggcctgcttgttcccttcccattacccttgtctctgcttaagcatcagctcctcagaggtcctcctgaccagcccattgcaagtaccctttccccttcctccttgcggttctgttgctccctccaccttgcagctctgcagcttcccgtgaatgtgattgtttacatgctgactatcatgtcccccacctggctgttcaccccttgacaccagcaccagctttctttctggctgcgttgctgcctgtgcctgcagtggtggctccgtaagcatctgctgaacaaacgcatggatgaatgagccctttcagatccaggctgtgtggggctcaaaattaaagaaaacaacatacaaaatgacacatataaaattaggaatggggtttatttaaattcttaaaagctgctaaatttctgtacgtcacaaaactatacagtattgaatattttaatagttacctgattgtattgtacgttttcctacatttttctcttgcatacattttgccttttcatatgacaaaaatgtttggtattgcttttaacaggacagaaagataattcctctagtgtggtcagataaagcttttttttaaagttatggatagttggtggcatgcaacgtgcagatggtcacacagacagactcatgtggcattgggtaaggttttgtcctatagacacaagaattttgatgtattctttttctttctttttttgagacagtcttgctctgtcacccagcctggagtgcagtggagcaatatcagctcactgcaacctctacctccagggttcaagtgattcttgtgcctcagccacccaagtagctgagtagctgggattacaggtgtacacacaacacccagctaatttttgcatttttagtagtggcaggatttcaccacgttggccaggctggtctcaaaatcctggcctcaagtgatccacccacctcggcctcccaaagtgctgggattacaggcatgagccactgcacccgtccttagattctttttcatcccataaaaaaaaaagattcatttacatttgtgtatatgcattacaaattattccttacaagggagaacatttattttgactaggtaataatgagaactgaatcctctcctgataatagcgtgtctgatgataagaagatttttcttagactggcttctggctccatacatttcaaaccttgctccttttcctcttccaccagaccctctggtgctgggcaccaatgagaagctcatctggccccgggatcctggcaggacactgggagcactatttccatgggcagcagggttgttcctggagacatcactgacccaggacacctagcacaatggcactcgatgtgaaagtggcttcgtacaaatctgccactcaagcctaaataagtgcattccagaagagccgcagcccctctaacagctcctgaggtgagggaaaccctagggatgggaagttggagcagaaagagatggtggcctgaagtcaactgcagtgaaaatctctccccatcagcaagttttgcaaagctatggccacagggacacatgactggggcccctcctagtcttggaaggagcccccatggaaatgagggcctcacagtgaatccacctctgatcctacttcacctgcagtcaaatgagaagagatttcaatcagctaaagacaccctatcccctctccccgacccctgcgaccccaggtgatccgccccaccttggcctccctaagtgctgggattacaggcgtaagccaccacacctggccctgggggtcatatatcttaaatcaaggtatcaacaggaccaagctccccaaaagctccaggaaaggatacttcttggcctctcttctggcttctggtggctgcagcaatccttggggttccttggcttatggatgcatcactccgtactctgcttccgtcctcacttgaccttctcacctaccttcctttacgtcatcttccttctgagatgctctgtgtccaaattttcttctttgtaaaaggatgccagtcattggatcagagaccaccttaatccaggatgacttcatcttaactaaattacatctgcaaagattctatttctaaataaacccacattctgaggttctgggtgggcatgctatttggcaggacaaagtcaacacaggacactcattttcaggattgatcgcatggtttgaggaagctgatggtgacatctcttcttaaatctgttttcaggaaaatcatactggtagccttcaagtggccatggtgggagcattgacccagggaaatccacatttcccaacacatgctggatacctgaggactccagagctactatctgctcatatctgctcaacatt

SEQ ID NO: 1550 - DNA, 3174 bp, Homo sapiens
taatgctccaatcctcaacatctagagtgtacttcatggagggatccagctctgcgttgtcccccggtctggatgaccccatgtgacctctagagcatccaatggcctttggagctgcaccccacccctgtgctccccaatgctgtgccagctcctcactccagggtcctgcccagccctgccctgcgtgcccaccccccccccccccgccatgcctcatacctgcctgtctccccaggcacgtgcgctaagctgcggctacccccgcaagcaaccttccaagtccttcgtggcaatggtgcttccgtggggaccgtgctcatgttccgctgcccctccaaccaccagatggtggggtctgggctcctcacctgcacctggaaggggagcatcgctgagtggtcttcagggtccccagtgtgcaaacgtaaggacccctctctcagctcggtggctctgggggtgggggatggccccaaatcctgtcatggggatggtgtgggtggggatggcgtgggtgtctactcacaagcagctaggccagtgtgtagggtcccattcccaacactgacagcttgcttacatgtcagcagccggctgtaggccctcagccctcccagtgccatgttggcagcacggaccgaaaacctagtagcgggcctccaatcctggctctgctaccgactcagcccctcaccgccaagaggctgtgcatgctctctgagccagcacgttttcatctgttaagcaggaaactatgtttgttcattcattcattcattcattcattcattcatgtacaggtgcacatggccaactttaataggatatttcacgtatcaggaatcttaagtactggcaacacggaaggtcataacgtgcctggccctggagctcccagtctgtgggaggcaatggttttctggttgtatttcttgtacaggtgttgaaaggtccacaagatagtcccttttcagtgcccagcatgacatttccaaaatgaagctatgtgtgttatgttcatgtgttttgtgcataaaaagggctcagagtcaaaatagtttggcagattctgggtttttatgctgcagaacttctcagagcctttaaaatgttcacgtgctaggtgattctctgaggatgcgagtgttaggattagattctgaaaggcagaaaacccaaaatactaggactaactatgatggagctcaaccttcagggtgggcaggcagatctgtataggctccatggcagtgggagccaggccccttccctggcatggctctgctgggcatggcctcagcctcatgattcaagatggcagcagctatgttccaggcagctgttatggggtgaggggccctggggccaaagagcaggccccagtgtctcagggaaggttcttagaagttgccccacatcacttcttatcttccactggccagaacatggtcctgtgaccactgggaaatgtagtctccattttgggtggccaggatccactagggagcatgggaaatggggcaggggacagggccatgttctctacgtgggggagtaaacggtgttgctcaaattaggattccgaggccttttttagccagaacatccagtagaatctgatggaactagtttttggagcatagctgaggccacacagcagatacatagtattttggaccttcctggaaagcgacctgagaaggcatgtaggccccctgaagaatgttgccaccttggggcattgtgaaaacccagaccatgggctgggcaaggcctcctcagtactgtctattgtcacctcctctctgtggcccacccttccttcattcctcaggcaggacttcagtgggtaggagccaaggaggccatcactctgaactccctgccagaacttctgtaattgaccactctgcagacttctacataccctacaaaaccctgctcaaataccctcttcagttagccactctgcacactcctacacaccctggaaaaccctgcttaaataccccctttaaatagccactctgcatactcctacacaccctgctcaaataacctgcttcttggggagagtcttctctgatagtcccacctccaaatatagtttgcacagatctttgcctcagcccccagcacctcactgcccccttaccatgcaaacagggctcactgagggctgcccaggccctgtctacacccaggccctacccgtaccacccctgagacccccaacccctgggccaagcaaatctgggcaaacctcgcccaggagctggtggttgtctcccacacagtggtgccaccacacgagacctttggcttcaaggtggccgtgatcgcctccattgtgagctgtgccatcatcctgctcatgtccatggccttcctcacctgctgcctcctcaagtgcgtgaagaagagcaagcggcggcgctccaacaggtcagcccagctgtggtcccagctgaaagatgaggacttggagacggtgcaggccgcataccttggcctcaagcacttcaacaaacccgtgagcgggcccagccaggcgcacgacaaccacagcttcaccacagaccatggtgagagcaccagcaagctggccagtgtgacccgcagcgtggacaaggaccctgggatccccagagctctaagcctcagtggctcctccagctcaccccaagcccaggtgatggtgcacatggcaaaccccagacagcccctgcctgcctctgggctggccacaggaatgccacaacagcccgcagcatatgccctagggtgaccacgcagtgaggctggtgcccatgctccacactgggaggccaggctgaccccaccagccagtcagctacaactccacatcaactccacatgcgcccagctcgagactgatgagtggaatcagcttccaggtgtagggaccccttgaggggccgagctgacatccaaggctgaggaccccagtggggagtgttctgttccggcatatcctggccgtaacgatttttatagttatggactacttgaaaccactactgagggtaatttactagctgtggcctcccactaactagcattcctttaaagagactgggaaatgttttaagcaaatctagttttgtataataaaataagaaaatagcaataaacttcttttcagcaact

SEQ ID NO: 1551 - DNA, 3773 bp, Homo sapiens
agtcgccgaggatggtgtcatggcgccccgaaccctgcttctgctgctctcgggggccctggtcctgacccagacctgggcaggcttccactccttgaggtatttccacaccaccatgtcccggcccggccgcgcggatccccgcttcctctccgtgggcgacgtggacgacacgcagtgcgtgcggctcgacagcgacgccacgagtcccaggatggagccggaggggccggaatattgggaagaggagacagggaccgccaaggccaaagcacagttttaccgagtgaacctgcggaccctgagcggctactacaaccagagtgaggcctgggctgccagccacacagagtcatggacaggtctctacagacacaacttagtgccagcttggatgaaaccctctgaggaatggctgccatctttcaggatgtggtgcatgtattgaatcaaagatgtctctatagtgctgtgtttacagaaggaagaatacgtgggtccaaaaaccaagaagtagaagcaggtgtggctccatatctaaacccttatattcaccttcagggtgattttgcacttctcatctccaatatctgggctctgtaggggaggaggtcctggtttcccaaagggggcaccctggcaaggagacatttaaatgagagtccatggaactacaccttatggctgcccccagggatgtttgaatagtatgtgtccagacacaagaaggtgagaagaggaggaggcagggctgctatcacacaaggagggcaggagatgtgtgtgtggaaataagagatccacttggagaccttatggttccccttgtcctgttgtaagtgtgagcagaatcatccagcaacccagcctgagagggtttcatattcaagagcccagaaccctcaggaaggaaggattgagcgatactcataggtaatgtcccaaggctgtgctcctgtgctctgacatcctcagcaggattggtgcaaagccctgcttcccatgggctgttcccagccagtgactggtcacagcaggcgttaaggcaagccattcctgggagacacgggactcctctgatggccaactgtagctggaaggctcctccacggccttgctcaactctccttagattgcctgtgctctaggatgcgtcgaacaaactttctctccttctgtccagcacttggggtcacacttgcatcgtggtctgccgccttttccagggatttctggctcacttcccatattcccttacgggtgtgtcccctcataagatgtcgcagactttaagctcatcttggcatctgctccttgaaggacttggactaaaaattatttccatctgcatatcaataactcttattccaacctgtaaaatccttctctttatccaacttctgccacccccacagaatctattttacttgtgtgtgtagtatctctttgagttaacagatatttgttctattaagctactaaattttgaggtagtttgtgacacagcactagataactattaaggctttcttaagtttccattttccatggatattatctacatatcttttaatcccttgcattttaataacattagctatacttgctgtttccaactctttcctcctatttttgaacattttcaaattttgtctttctctgtccttccttccttctttcctcctttcctccctcagagctttctccctccctccattttttttcataaactccaagtgtttaggccaaaaggaagcattatttgaactttatgctaaaagtataatgccgtaatttataatataaaagtaaagaaaaggaagttgttaatggaatatgaaaaaatgcctagggtgattctatagccaagacagtaccttttaacatttaatttctgtctccaactgaatgttttcagaacacatgagcaacacaagctctttcccattcttggtacaagcacttgagaaatcaaattagccttatctagtatgattaatgtccatacatcatataatcccaccatctgcctcctgatcataccccctggggacattcttggctatgtgtccaggagacatgtacaccaatgtttatggcaaaaactagaaacaatcacatatacatcaatgggaattaacaaaattgtcgtataataataaaaagtaaaacttcagcagcaacagtgaatgaacagcaccctcccacatcagagataactctcctacacataacatgcatcagcatcacagaagaatgcacattgtgtgagttctctgtacggggaagtttaaaaaagcaggtcaaactgtgatttggatatatatatacttattgtaaaaatctttagagacaatgaaaaggaatagtaaatacaagactcaagatagaagttccttttggggaatagaattggacaacagccgagggtggcttcataggttttgttttttatgccaggaggggatgtccaggtagttaagttacttgatcataaatctttatttatttatttatttatttattttcgagatggagtctccctcttgttgcccaggctggagtgcagtggcgtgatctcagttcactgcaacctccgcctcccaggttcaagcaattctcctacctcagcctcctgagtagctggaattataggcatccaccacgacacccaggtaatttttgtatttttagtagagacggggtttcaccatattgtccaggttggtctcaaactcctgacctcaggtgatccaccaacttcggccttccaaagtgctgggattacagacatgagccaccattcccggcccacaaatctttaaagtgtcatttttcaaaatgcaccttgtgtgccattcctgactgattatttggaaatgaaagagaaaagaaaataccaaagttcatctcaaggatccttagcaataactacacacgttaaaacaaagccacagccaattgtaaagagtcatgtgacagagaggaccaggatctcatgaaaaatagccttggctagaaagaggtcatttgaccctgggctaattggcaactctctacattgtctggcatacagtgttcaatctgatgtgcaaggcaattgtatcttgcaaagaatttgagaatttgatatgttgctcacattttaccacacatacaagtggattaaacttttacacagtaaaaaaaaaagcattgttgagcaaaataaattaaatgaaaagacataaaggaataactagtgatgaaatagcaataagaatggaaaacatgaaagagatgcttgtacagcaatgatagcagcacaaaagaacagtgtttttcagaatcatactggagtccaaatcacttctactacatctaatttaaaaacacagtgaaagatgttaaactttcataggatgcccactgaatagccagttattgaaaaatcttgttcctagattggagtaaacaatttctgcctaccctagccaaacaaattattgtcatgatgctaagctagtgtatagacagaggtgtgagattcacatttttctagctgcaaagcaccctgattaggcaaatatttttgtagatgcttgagtaagaaaattggcattttgggcattcttaaaccgaattagaaacttctgaagagaaacaaacatagttacgattgtaaaggcattattgtatggcaccaaagtcttgggacactttaatttagctactgtattttctcaactctgttgcaacttatcaaagagaacattaatattaaaggcatttac

SEQ ID NO: 1552 - DNA, 3144 bp, Homo sapiens
acttttcgcgcgaaacctggttgttgctgtagtggcggagaggatcgtggtactgctatggcggaatcatcggaatccttcaccatggcatccagcccggcccagcgtcggcgaggcaatgatcctctcacctccagccctggccggggcctgggccgcatgcgccgtgggctcctgtatgacagcgatgaggaggacgaggagcgccctgcccgcaagcgccgccaggtggagcgggccacggaggacggcgaggaggacgaggagatgattgagagcatcgagaacctggaggatctcaaaggccactctgtgcgcgagtgggtgagcatggcgggcccccggctggagatccaccaccgcttcaagaacttcctgcgcactcacgtcgacagccacggccacaacgtcttcaaggagcgcatcagcgacatgtgcaaagagaaccgtgagagcctggtggtgaactatgaggacttggcagccagggagcacgtgctggcctacttcctgcctgaggcaccggcggagctgctgcagatctttgatgaggctgccctggaggtggtactggccatgtaccccaagtacgaccgcatcaccaaccacatccatgtccgcatctcccacctgcctctggtggaggagctgcgctcgctgaggcagctgcatctgaaccagctgatccgcaccagtggggtggtgaccagctgcactggcgtcctgccccagctcagcatggtcaagtacaactgcaacaagtgcaatttcgtcctgggtcctttctgccagtcccagaaccaggaggtgaaaccaggctcctgtcctgagtgccagtcggccggcccctttgaggtcaacatggaggagaccatctatcagaactaccagcgtatccgaatccaggagagtccaggcaaagtggcggctggccggctgccccgctccaaggacgccattctcctcgcagatctggtggacagctgcaagccaggagacgagatagagctgactggcatctatcacaacaactatgatggctccctcaacactgccaatggcttccctgtctttgccactgtcatcctagccaaccacgtggccaagaaggacaacaaggttgctgtaggggaactgaccgatgaagatgtgaagatgatcactagcctctccaaggatcagcagatcggagagaagatctttgccagcattgctccttccatctatggtcatgaagacatcaagagaggcctggctctggccctgttcggaggggagcccaaaaacccaggtggcaagcacaaggtacgtggtgatatcaacgtgctcttgtgcggagaccctggcacagcgaagtcgcagtttctcaagtatattgagaaagtgtccagccgagccatcttcaccactggccagggggcgtcggctgtgggcctcacggcgtatgtccagcggcaccctgtcagcagggagtggaccttggaggctggggccctggttctggctgaccgaggagtgtgtctcattgatgaatttgacaagatgaatgaccaggacagaaccagcatccatgaggccatggagcaacagagcatctccatctcgaaggctggcatcgtcacctccctgcaggctcgctgcacggtcattgctgccgccaaccccataggagggcgctacgacccctcgctgactttctctgagaacgtggacctcacagagcccatcatctcacgctttgacatcctgtgtgtggtgagggacaccgtggacccagtccaggacgagatgctggcccgcttcgtggtgggcagccacgtcagacaccaccccagcaacaaggaggaggaggggctggccaatggcagcgctgctgagcccgccatgcccaacacgtatggcgtggagcccctgccccaggaggtcctgaagaagtacatcatctacgccaaggagagggtccacccgaagctcaaccagatggaccaggacaaggtggccaagatgtacagtgacctgaggaaagaatctatggcgacaggcagcatccccattacggtgcggcacatcgagtccatgatccgcatggcggaggcccacgcgcgcatccatctgcgggactatgtgatcgaagacgacgtcaacatggccatccgcgtgatgctggagagcttcatagacacacagaagttcagcgtcatgcgcagcatgcgcaagacttttgcccgctacctttcattccggcgtgacaacaatgagctgttgctcttcatactgaagcagttagtggcagagcaggtgacatatcagcgcaaccgctttggggcccagcaggacactattgaggtccctgagaaggacttggtggataaggctcgtcagatcaacatccacaacctctctgcattttatgacagtgagctcttcaggatgaacaagttcagccacgacctgaaaaggagaatgatcctgcagcagttctgaggccctatgccatccataaggattccttgggattctggtttggggtggtcagtgccctctgtgctttatggacacaaaaccagagcacttgatgaactcggggtactagggtcagggcttatagcaggatgtctggctgcacctggcatgactgtttgtttctccaagcctgctttgtgcttctcacctttgggtgggatgccttgccagtgtgtcttacttggttgctgaacatcttgccacctccgagtgctttgtctccactcagtaccttggatcagagctgctgagttcaggatgcctgcgtgtggtttaggtgttagccttcttacatggatgtcaggagagctgctgccctcttggcgtgagttgcgtattcaggctgcttttgctgcctttggccagagagctggttgaagatgtttgtaatcgttttcagtctcctgcaggtttctgtgcccctgtggtggaagagggcacgacagtgccagcgcagcgttctgggctcctcagtcgcaggggtgggatgtgagtcatgcggattatccactcgccacagttatcagctgccattgctccctgtctgtttccccactctcttatttgtgcattcggtttggtttctgtagttttaatttttaataaagttgaataaaatat

SEQ ID NO: 1553 - DNA, 3692 bp, Homo sapiens
atatacacttcagcaggaaccatgccattttaatacagatgaaggggctatagactgttgcttgctatgggtccctaacaactgttgtgttctcaaacactccagaataaatcagggtaaagtggtcaagttatatactatcaacatgtaggtttgcaaagcgtctagttgttgtagagttcaaggcaattttttgcctattctgtgaggcaaaaaatgataaggtgtgatccctgtacacttgtagaagaacgagcctccaggtactctgcttttcccagaagccataagcagcctgtgatgggagctccactgatcaagttaatgaaggcgagttctcttcccttctatcacaggtgctgcgacaagagactttggacaaaaattgacttgagtaggtgtaaggccattgtgccccaggccctcagtggcatcatcaagaggcagccagtcagccttgacctcagttggaccaacatctctaaaaagcaactgacatggctcgtcaataggctgccaggactgaaagacctcctcctagcaggctgctcctggtctgcagtctctgccctcagcacctccagctgcccccttctcaggacccttgatcttcggtgggcagtaggaatcaaggaccctcaaattcgggacttgcttactccaccggctgataaaccaggtcaggacaatcgcagcaagctccggaacatgaccgacttccggctggcaggccttgacatcacagatgccacgcttcgcctcataattcgccacatgcccctcctgtctcgactcgacctcagtcactgcagccaccttacagatcagtcctccaatctactcactgctgtcgggtcttccactcgctactctctcacagagctcaatatggcaggttgcaataaattgacagaccagaccctgatctacctacggcgcattgccaacgtcaccttgatcgaccttcgaggatgcaagcagatcactcgaaaagcctgcgagcacttcatctcagacttgtccatcaacagcctctactgcctgtctgacgagaagctgatacagaagatcagctaagacacacccagcccagattcaacaggaaaccgatcttcccctgactccccaccgaggagagcctctcctcgaccctgcacgggctctgaggccagcgtcacactccctctctgctctcctgtcccttgagcccttcctctacaggtggggcagagagggtggtggacaccaggcttatctgcctgctcctctccctcctaaggaaaagggagtagcagattgatctgaggggaaagcacaggctgtgctgtcgaggcgcctgctcgcttactcgcctgccaggaggccgggctctcagtttggggtgtttgtgcaaccttcatctgcactgggccctgtgcccctcctccccatccatggtccccagcagtgcctggttctgagcaaactcccagggaagaaaacggccctgtctccatggccaggttcttgtggtgtccagtgcgcgtctctcctccatcacactctcccggcttgcgcaggaggggccagcagccccaggagtcccagacccgtgccgatcacactggtgctgttgagatctcccaaacctcacgtccttaactgtgctctccctcctttcctctcccttgagcttggttctgcccagcactcgtgcttgttcacataattaggtttcccaccccagcctacccgacttacttgctagtctctatgaggtccttattgcacttattggggttgaagctcttcagaggagctggaactgtctaccccagggacacacccatttcgttgctacccaagtggattctgagacaggcaccatctccttgttccccctctctcttttgcctcccactgactgcccttttccatgtgtcttcattctgcctgaagaaggctttcccaggatgcacgtcctcagagggagcagcctatctcccccaagctggaggcggcagaggactgggccaagccccaacctgcctcccagccaggctcctccaggcctctggtttagcggagccccctgagcccaggcctgtgtctagccccagtggctcactgaactttcagggcagtcagggggtcctgcttagaagccagtcaccagccctctgcctgcagccatggaagggggtgtgcacgtgcctctgtgtgtgtggctgagtgtattctgcgcgtgtgtgtggagggagggagggaggggagcatggtgtctcccgctccaccgccctttgttgagccccatcagctgcccccttttactttgcattgaacggcctgtccaaagatcctctctctagggcagcagagagctttttgcactttaaaaaaaaaaagaaagaaagaaaggtcggaatttcttttgggtcaatatttttaagtgtgtgaggagatgctcagtagcagcagcctatggcaagagcttataaatgattgatgcaaatttgcactctgctccccctctgtaaggatactgatagcacaacctcttccccccaccccgccccgccttttggtcgtccatccctgtccctttctggccctcttcctgtagcccagtctcaggctttcctcttcctgaagccctacagagttagggaatggagcccaggcaccaggggtctaaagtgtgagccactgagaagagagacgccaactgcacccttgccacttccaaagcaatagaggcagagtggtcccctctttgccacctaggccagttttgaccctggcattaactggccttagaagaaactggatcctggtagggggtggcattttgcttgtttcttccaatctgctgaatcttttgactgcaccttacaaacagcagtctgctcccatgaccctctgcccacttccattggtctccaggccccaataatctggggttgaaactttgaggaaatgccagtgacttattccagagtgcctcagttaggggaacttctctgtaaagaaccctgggtattgagcaaaaaccttattatcgttaatgacctataattggaagcttcctgcctttttctttggttgctcctgtggaaaatactgaaaagattactttgttttattttgttgtctttttataaaaggggaggtggagagaccccttcagagcagggattgtgccgggagagtgcctctgactttgggacatttcatccacagaaatttccaagccaatggtttcttttgggttttggtttttatgtttgttttttggggtttggaaaaacatgcatttttaccgtgcacgtaaattggtcagcagaaaagggagcccagaaaaggcagcagatggaccatgcccttgctgggttttccttttctttgggactgtgaggggaaatggtttttagaggtgagggttggtccatgtggaggaaagaagtgtctctgttgggggacagaggaacctggggagtccatcgcatgtcctacaatctgctcttagacacggccttgccaggagagcctgccctcagactgcaggaccagaacccctgcctccatctttccaagcaccggggcgaaaaaccacaaaggaaaggaagaaaatttatatatatataatataaaatcacttggtgattaaaaaaataactgctccataaataaaactcctaaagtcacttatgttt

SEQ ID NO: 1554 - DNA, 3037 bp, Homo sapiens
ctgagaaagacctgttgaccacaaagccttgtcactgtaaggatatcctgaagttagtgctcttacccctcacccagcattgcttggtcgttggagaaaccacctgtgcattttattacctgctggaggctgcggctgcctgcttggacctgtcagataattatatggtctgtttcaacatgggacgtatcactttagccaaaaaattggctaggaaagcccttcgactgctgaaaaggaatttcccttggacctggtttggtgtccttttccagacattcctggaaaagtattggcattcctgtaccctgagccaacctccaaacgaccctagtgagaagttgtctctacctatgtggagctctctcagttctcccagagtgtgggcatcaaggacaagtggctgcactgtgagcagatggccattcagaaaagcagtttatgttggttctccagggaggggttgttggccacagctcagctcatgcaggccctggcctacaccaagctctgccttggtcatcttgacttctccatcaagctgggtaatgggacttagggatggtgggtctagggcttttagagagtacatgttcacagctagacctcacatggtgctcttaaacctcctcaggttttcaagctcgtgagatatgcagagtcagagctactatatattcctcagtacttgggtctcatggacaaagtttcttcaaaaaaaaaatctgcagggagatagagaattgcagcagctgaagactctggaaactgcctcagaggcaatctcccacctcctttgcctagagatgggtctgatcccaggcttagatattctctttataaatagagctatgaagagatttaaaggatgttaggctgctttgaaggtgtaagaccccttcctttcctacccatcctcctcactccctagctggtcccagtggctctctctctcggcagatttggtctgtgtgtccatgtactggagagtcagtgggcgctcatttctcagagttatgatgtccttggcctggcctgcttttactctgcttgcttagatctgctgctctatggaaaaggtaaatcttgcgcaggtctctgctgtactcctgagggattcagacctcagatggggctctaggtttggaatacaggcagtcatgaacctgtccctcaggcatggcctctgcccctgacctctggctccttaaagtctgggaaccatgttgtgattcaggggtgtctgcctttggggtcttttttccttccctgtatcacataccttctataccctggttcctacactgatattatatactagcgtggttaccttctctgtccacaggattgctgtgtcggccctttagtgagtgtctgcgtttcgttcaagtctacgagcacagccgtgttctaacctctcagagcaatgtcatgctgggggtccactcctccctggccatgtggtaatgtcttactcaagggctgtggaaaaggatagacatttatgtcatttaagctgtctctccccaccagacaggacttttgaacctctctaaccaacttttaaagaccattcacctcccataccctcccatcttattagaagggctcttgtcctttaacaggttttggcctataggtcaagggttacgtttagggttacatttaactgctagagtaacccatagcaaggctgaatataattggtctccttttaagtttccttgtatgtgagttagtagccttggtcactttctagcatcacaattctgattgtccatgaggtcttagagccttaaagaagtgatgattttaagcaaaagtcatggtgggtaagcagcggatattgctgcaagctgttactcttttcctccaggtttgcccaggaatcacagtgggacctgtttaagcactatttctccaacgcttgcagttggtgaaaagaaccaatgcctcgctatttggtgcacatggctttgtccgattcctagaatgccatgtgttaatgttacagaaaatgccagagggtatcttcatgcatattcctctagagcttcacagccaaacccttgaggtacctgtttctcagctgtcctttgactaacacctgattcacttagttctaccctatggtgctctttctaccacctgcatctcttccttttttcccttttactggctctgcttccctttactctttgaatcctttgtttctccacctagaaagtttctacctaccttatgtatccttcccgatattattgcatctagttctggactgggtttcttaactttccacctttgccagctgctacccagtatcattaaaatattaacatttagccttgctcaatggacctgtagtctatggttcagtctataatttgatacagctccctccagcccttctgagtctaaaacacattccaattcctctgttttccaggcttattttgccatcagtaactccttcctgttcccccagccatgagtgaatatgctgaatgaggacctttgtaagttctgatgaagtagcatttaggagaatgaagcactaatcccagagctaatggaccttcctttcctttcagtactgtaaggagttcttctctcaatgtgtgacctgccctgtctatcaccagtgggtatctgagcttagggcctctgtaatgagatgtgaaaagagagaattgatgtccctgactaacagcatcagaccttttgacacctgcttgaccaggatttggataaaaggagaatttctgcaggaaaataactcttagaaaagaaacttaggaatacagagatttgacagagtggctgatgtcaaggagaacaaggatgcagaagaaactcaagatgtatgtattaaaacaaaagaacaataacctgaagggaccatgattctgttattgtatataacacaaggaaatgccccagattctcctttaaaagatataatgtacatattaagtatactagcctttatagttactgctatctacatgtttatcaaaataaaagactatttttttct

SEQ ID NO: 1555 - DNA, 1237 bp, Homo sapiens
ctcaaacaaaaacaaaaacaaaaacaaagcaaaacaaacaaacaaaaaacctcaaaaaactagcttttctggaaatcagattaaaacttgtcataaaacacctgttgaattaacttaattctgtgatccaggctttttgtttgtctcataaccagccttaggtagaagctgtgacttgcccacattctgaatacatctaagaagatactgtatctggaaattttaatttttttttaagtctgtgtttaggtcttcactggggagcactcagggaccaagggatatcccttgtctcaataattcatgctggtgatttcaaaacttctggccatgtcttctgaggctaaaaatattgaagatactgccttccccaaaaggacagaggagaagcatgccaaaaggaggaaaggaagttaccatatcaaaagatacctgcacacatatgtgtgttgcagcacaattcacaattgcagatatggagtcaaccaaggtgcccatcagcttgtggataaaggaaagtgtgatgtatataggccaagcacagtggctcacgcctgcagtccagcaccttgggaggccgaggcagaaggatcccctgaagccaggagttcgagaccagcccggacaacaaagtgagaccctgtctctattttttttaagtggtgtatatataccatggaatactactaagccataaaaagaaccaaataatgtattttcagctatttggatggaactggaggccattatcctaagtgaagtaacacagggacaaaaaaccaaataccgcatgttttcacaagtgggaactaagctatgggtaagcaaaggtatacagagtgctataatggacactggagactcagaaatggggaggatgggccgggcgcggtggctcacacctgtaatcccaacacttcgggaggccgaggcaggtgtctcacccgagatcaggggttcaaaaccagcccggccaacatggcgaaatcccgtctccactaaaagtacaaaaaaattagccgggcatggtggcgcgtgcctgcaaccccggccactcgggaggctgaggcaggagaatcgcccgaacctgggagacggaggttgcagtgagccaggatcatgccacagcactccagcctgggcgacagagcgagactccgtctcaaaaaaaaaaaaaaaaaaaaaaaaaaaaaaatccttaccttttgttcaattcactgtctgtcacttccgtctc

SEQ ID NO: 1556 - DNA, 3311 bp, Homo sapiens
agctgggggctgaagaccaggagccagcacacaggagcctggggacatggtcagttgttcctccactgtcgtcctccagggatgaggagagccctggagaactgtgtaggctgggaggtgtgacgccaccttcctttctttgatgttttgggattagcctttgtcccctttctgtttatccttcctcccagagtcccgtctgtaatgccctcagggtcattacagaaaattctgtcccacatccatttaagtttcaagcagtgaagcgtcttgaacctccccaagaaaattattctgaagccccgttgtccaggaaacttctgttcagggcctcgttttttttccttctttaaaatctctccccactccttcattatgcccccttgtaccaaacgccacactctccctcccctcccgtgtgtttacaccatgccccatctctgcaaaacctcatctgaaagcccctggtagtcgtcacttggcaaagctgcatggatttagctcctttaatcttttctggtaaattaatcccccaagcgccttcattacttatgctgctcttccccgaattcccttcaatttgccgacgcctttgcagttctgctgagcccagcaccaaacaagatgtcctacactgtgaggctgttttgcctggggggactgtcactcggcatttctttggtgcttccctccaaaaatctcaaaatactcgtccagcttccagctaccacagttgtctcttgtgcccagttctgggccccccttcaccctgtgctaatacaccacgaggactttcgtgtgggagggacgccgggagtcattcttccagatggacagtgttggagggaccatgactcctccgaaagtctaagctgaatttggggtagggggtgtgcatgcctgtgtttctggagcaaggggccatgtgtttgcattttctttttgggaaatgttcatcaagtgataccacgggttggagaaataccagtctggtcccaggcctctcattttatcagtaaggaaactgaggtccagaaaggggacacatctcagcccaagtcccacagctctgtactagcaagacctagattaaaatgaacgtttgtagggatagaattttgtccctgtttgtaggtgaactggctgaaatgtagaccaaggagttccctgagtgggctggggcactgttggtccttcgtcacttggtagccgccctaccttctttagcccagtagttaccacagctccaaagaccccatgaagtcagcagccatgagcccctccccacagaccagtaagggaatactgtccaaaggtgcagggcacttccatccgtctttccatgcagggccacccccctctacttcaccccagaggctcagacgagccctccccaacattccgctaggatccccatcatcccactaggatctccatcatcccgctaggatctccttcatcccactgggatctccttcatcccgctaggatcccatcatcatcccactaggatccccatcattccactaggatcccatcatcccgctaggatcccatcgtcatcccgctaggatcccatcgtcatcccgctaggatcccatcatcatcccgctaggatcccatcatcccgctaggatccccatcatcccgctaggatcccatcatcctgctaggatccccatcatcccgctagggtcccatcatcccgctaggatccgcatcatcctgctaggatctggcttgtattgcccccaggcgctctggcagccatcactgcttccctggtttccccaggtctcaggccatctgtgtgggatcactttataccttccatgctttttctctgggctgcagacagttagcaggtctcagtaagaactcactactacagtggaagatcttgtgtggttggcattgggctggccaaggcagcccaggacccggcctcccactctctctccctgttgctttcaggtctccatttgtccacatctgagaaaatcttccgtttccaggacacagggctgctcctgcgggtacttgggagcctcttccttggcgggattctcgcctttggtttgggcttctctgagttcctcctggtctccagaacctccagcctcactctctccattgccggcatttttaaggaagtctgcactttgctgttggcagctcatctgctgggcgatcagatcagcctcctgaactggctgggcttcgccctctgcctctcgggaatatccctccacgttgccctcaaagccctgcattccagaggtaacccagagtcccttccagaagcctctgttttctgttcttctccctgtgactcttagtgattctgatgcaggaagtgtgcccggtggctctgctgccgtcactcctctaggaagatgtgggggtcatctccagagtgggtgggtggggcctgggtgactcagcacacatgcaaatcagagcaaaccaagaaaaccacgactgggcctgtaactgtggtctctctctatcccaaggtgatggtggccccaaggccttgaaggggctgggctccagccccgacctggagctgctgctccggagcagccagcgggaggaaggtgacaatgaggaggaggagtactttgtggcccaggggcagcagtgaccagccagggcaaatggcttagaagcaggccactccccagcctgctgccagcactcactgtgctcaagccgccagggctcatcatggtagctgggagctgtggacgggagtcaccaggtggtggggccaagccagggactcatgacttttgcccctcccttcagagcctggtcacacaaggggcgagcaccaggccagcctgggactggccagagctgggcccaagctgcgctggaatcgcagcaggagaggggagtgggctggttcttcccaccacttcccaggctctgacagccgagactcatttccaaggcacagcagctttctaaagggactgagtttggactgggttttggacctccaggggctggagcttcatcacctgggcagtgtcttttctcagagagcaggtttctttatagtttggaaataaatggttcacggtccactggccgccttgtgttgctggagacgtgggggcagggaggggacagtgtgggcctggcctctcctttcctttccctgcctggagccttcttcaaatgtctggtcttaagccaggcctccttcattttctcgctcctgttagaacaccagtcccctccccagtggggccccactgcacctgctggcaggaaataaatgaatgtttactgagtactgc

SEQ ID NO: 1557 - DNA, 3148 bp, Homo sapiens
agagcagagtacgagtctgaggcggagggagtaatggtgagtcccgcgtggccccgaggcctgcaggcccgggcctgtctgaggcgtacggggatccctgacgcccctcttttgttgggctgggcgggagggattggtggccgctcagtgaccagcgcccgatggcaccttggagtggcaaggcccgcccgacccttttctcccccagggctctttgcacgcgcgtgtgctgccggtgtgtaaggcaggggggcgagaacccgggcgcacgcgcagcgtctcacctgcttctgcagggcctttgtggatgtgtaatatcttgggtaaaaatcatggtgccaggcagggagcttgacccagcgtttcctgaaaatttctggaaaaacctgaagaaggaaaacatttgaccttggaataaactaaggttgaccttaaagctggtctggttgctcaccggaggagcgacaacgacccctaacagacgtaaggaatcgggaattaaacttggaatattggttagtacattcaaatgcgcttccttaacgaataagctgaggtttggtgttaactttcaaagccaaaacgtgttgagatgtatagcacggtggcgttgcctgttgataatgtgattacatttagtttttgtttcaaaacatttctcttcctacaggcaggacaagcgtttagaaagtttcttccactctttgaccgagtattggttgaaaggagtgctgctgaaactgtaaccaaaggaggcattatgcttccagaaaaatctcaaggaaaagtattgcaagcaacagtagtcgctgttggatcgggttctaaaggaaaggtaaatgggagctgcagtggaactattttttatagtgtgcagtggagggaaaagaagtaattctggagtattaaaagtcgcttattaagtagagtttatgtcgttttcaagatcattaactgctttggttctaatctgtttcttaaagggaaatgactaatataaagttgcttattttatatgaccaatgctatgatgcttattttatgtgatagtttcagagtattaaaaattgtcctcaataggccgggtgcggtggctctcgcctgtaatctcggcctcccaaaatgctgggattacaggcgtgagccgcggcacccggccaatcagtagcttcctcataggatctcaggcgttggatgagtgggctcaaacttgcatgctaggagacaaaatggtggagtttagctggtgtatgaccttcctctaggaacactcaattggtaagggaaaaaatgcctcaaatgaacatgtgcacagcttcagtaaacacactgtacatgcggcccctcccaagtgctggcaggccactgcacatgcggacagcccaccccaaggaaaaaccaagggaggagagacacaaacctcagcaccatgccattgtgtaaaaatcccaagtcaagcgtcggacagggtcctcggatctctcaaattgcccacttggccctcttccacgtgtactttgcttcctttcattcctgttctcaaactttttaatatactttaactcctgctctaaaacttgccttggtctcattctaccttatcctctctggccaaattctttcctccaaggaagcaagaatcgagttgctgcagacccatatggattcgctgctgctaatgttgccatttggattttttttttctttttagagtgttctagaatgcatgcttagagaagggaatgtaatcctaggacaccactcagctctgcaacagtatagctctgcagtaatgagtaaatgctgtttgttggtttactttaaagctctgctactgaatatatacaaatatactgttatattttcctggtaaaaccttttattatacaatcacttctttttatttctagcaattctttcttttacagtgtattttatctgacgttaatgtggctgcattgcatgtcttgtggctagtatttgccctgctttgcatcttctttaattcatttactttctactttttctacctatgtcttaggtttgtgctttataaacaacaggtggttagatttcctatttctagaagtttattgagattctccctctaccactgtctctaccaattccattttttcccacctctattggtttggaagatagaatctctctctctttttttttttttaagtgattatacttggaattttaacatgtctgtgtaacgaagtctaaagttagctaccactttaccctcctactgagcaatctaaggatgttagaatgtttttaactccagtcactttcctcctggcttatgtgcatttccttgatatttttgatatctttttatttttcttttgaagctccattaactagatgttattagttattccatccttctttgtttctatttacttacatgtttataattttttaacataccactttctcgtatagctcaaaccttccctcgaacatttccctccttcttcaagtagattctcttcaagtacattctttatttagcgaaggtatttggtagtgaacaatctcagttttctgaaatatctttattttgccctcattctggaaagctagtttcttactttatttttttaatagacagagggtcttgctttgttgcccaggctggtcttaaacttctggcttcaagcagtcctcctgccttggcctctcaaagtgctgggattacaggcacgagccactgcgcccagcagtaacgctagtttcactgggatcatggactcttaagagctagaaggaacttcactgattatttgactcagccttttccatttccagaaaagcctgccaccaggcacagaaagaatacatgacttccagagtccctcgctatattgtccagactggttttgtactcctggcctcaagtgatcctcccacttcagcctcccaaagtcctgagataataggcgtgagccaccgtgatcccctttacctttttcttttttttttcctttatttcttcttaataaaaaaaagtggggggggatacatgtgcagagcgtacaggtttgttacataagtatacgtgtaccatggtggtttgctgcacctattgacctgtcctctaagttccctcccctcaccccccaacctcttc

SEQ ID NO: 1558 - DNA, 3476 bp, Homo sapiens
agcttccccgcgaggtctgggacaagtgaagagaggtttcttttctggacctcagtttctcatctgtaaaatggggtgagtctgggaacctgcaccttggatggctgtcaggggctcagtagaggacctggcacacagtttgtgcttggcaatctggagcaggtgcagctcctttcagagtgacctggattggatcctggggacagcatgtctcagggccggagccagttcttggaggagactctgcgcagggcatggatcactgtggtgcccttttcctgtgcctgtgccttctgactttgcagaatgcaacaacagagacatgggaagaactcctgagctacatggagaatatgcaggtgtccaggggccggagctcagttttttcctctcgtcaactccaccagctggagcagatgctactgaacaccagcttcccaggctacaacctgaccttgcagacacccaccatccagtctctggccttcaagctgagctgtgacttctctggcctctcgctgaccagtgccactctgaagcgggtgccccaggcaggaggtcagcatgcccggggtcagcacgccatgcagttccccgccgagctgacccgggacgcctgcaagacccgccccagggagctgcggctcatctgtatctacttctccaacacccactttttcaaggatgaaaacaactcatctctgctgaataactacgtcctgggggcccagctgagtcatgggcacgtgaacaacctcagggatcctgtgaacatcagcttctggcacaaccaaagcctggaaggctacaccctgacctgtgtcttctggaaggagggagccaggaaacagccctgggggggctggagccctgagggctgtcgtacagagcagccctcccactctcaggtgctctgccgctgcaaccacctcacctactttgctgttctcatgcaactctccccagccctggtccctgcagagttgctggcacctcttacgtacatctccctcgtgggctgcagcatctccatcgtggcctcgctgatcacagtcctgctgcacttccatttcaggaagcagagtgactccttaacacgtatccacatgaacctgcatgcctccgtgctgctcctgaacatcgccttcctgctgagccccgcattcgcaatgtctcctgtgcccgggtcagcatgcacggctctggccgctgccctgcactacgcgctgctcagctgcctcacctggatggccatcgagggcttcaacctctacctcctcctcgggcgtgtctacaacatctacatccgcagatatgtgttcaagcttggtgtgctaggctggggggccccagccctcctggtgctgctttccctctctgtcaagagctcggtatacggaccctgcacaatccccgtcttcgacagctgggagaatggcacaggcttccagaacatgtccatatgctgggtgcggagccccgtggtgcacagtgtcctggtcatgggctacggcggcctcacgtccctcttcaacctggtggtgctggcctgggcgctgtggaccctgcgcaggctgcgggagcgggcggatgcaccaagtgtcagggcctgccatgacactgtcactgtgctgggcctcaccgtgctgctgggaaccacctgggccttggccttcttttcttttggcgtcttcctgctgccccagctgttcctcttcaccatcttaaactcgctctacggtttcttccttttcctgtggttctgctcccagcggtgccgctcagaagcagaggccaaggcacagatagaggccttcagctcctcccaaacaacacagtagtccgggcctcctggcctggaatcctcagcctctctggccgccagtagcctgaggctacggctcctgctagagagggtggcaggcctgctgctggaccccagaggccactgtgaccgccaaggggccttttccacttccacggcctctccaggcactgaggggaaggcattgctctacctctccctgacattttgctccggggcagatccaaccttacctggggcagcaaactttgtcctggtacctgggcccagctcgccagggatgtgggcagagcaccagcctgggcatcaggaagccaagtttcaaggactgtctttgagtctgtctgtatgaccttgggcctgccacttctcacagaccctaggtatccacagctgtgacatgggggcaagcggctttgtttcagcctaacccaggagcttagtaaaaattgcataagaccagggggaagagtgtcagcgtggggtgggaattcccgcggcctccacctgcttgctaggggcaggatctcattcaggctgccctggaagcacctgcttggccctgccaccttcctccaggggagggccagatggcatcctggcttggggcgggtgggacctacccaggctctgagactttactggcctatgcctgaggcctcttttcctttaactccctaaattatgatgactccaagtccaagcccacccttcccaaagattgggaggttccgccgttcccagaggctcctcctgcggtgctcccaagacttccatagaccatctggaccagtagcccatcccgcagttttcttgggggcagaggaaaacgcttctttctcctccagctgaatcagctggatcccagtgtcctggctgtttggtgattgggcaagattgaatttgcccaggtaggcgtgagagtgtgggttttaaattcgaagctcaggccatagtttcagagaatcacccttaccccagaccttcatgagacagtgctcatgaagccagtgcgtttcccagaacgaacactaggcggcaccgttggtccacactcagaggcccttggcgccaagactgcatctagaatcgctcaaacacctgtttgcagaccccatgcaccagctggaggggccgtaactgcaggactgcgcctactgagtgacccatttcctccaggaggaaaggcaagacacgcttacacggccatttgtctcttttcccaatgcggcggtgcactttcgctcttgggggctgcaccccagacatagctggcaccagagcagggtgctcaggtggtgtgctcagggccctgccccaggccactgggccgttttgatgacctcgaaggtcacaggcggaaaataggagcaggatttcccctggggaaaagttctcctgggacatcttctgctcttctgtacatttctagatgcaaataactccttcaccaggcagtgagtggcgtaggctctggagccaggctgcctgggctccaatgccagctctgccacttgctagctgtgagactgtggacaaaccactcagcctctgtgtgcctcagttttcctatttgtaaaatagaggccatagtggtacctattttgaagactaagtaaaagaattcaaataaagagacttggcacagagt

SEQ ID NO: 1559 - DNA, 3075 bp, Homo sapiens
atttttggtgatcaggactgaacagagagaactcaccatggagtttgggctgagctggctttttcttgtggctattttaaaaggtgtccagtgtgaggtgcagttgttggagtctggggggggcttggtacagcctggggggtccctgagactctcctgtgcagcctctgaatttatctttagagactatgccatgcattgggtccgccaggctcccggtgaggggctgcagtgggtctcaggtattagcgggagtggtcagagcacttggtacacagactccgtggagggccggttcaccatctccagagacaattccgagaacacggtctatctgcaaatgaacagcctgagagccgaggacacggccgtatattactgtgcgaaagatatgggtgtcacccgaagccgatactttgactactggggccagggaaccctggtcgccgtctcctcagcctccaccaagggcccatcggtcttccccctggcaccctcctccaagagcacctctgggggcacagcggccctgggctgcctggtcaaggactacttccccgaaccggtgacggtgtcgtggaactcaggcgccctgaccagcggcgtgcacaccttcccggctgtcctacagtcctcaggactctactccctcagcagcgtggtgaccgtgccctccagcagcttgggcacccagacctacatctgcaacgtgaatcacaagcccagcaacaccaaggtggacaagagagttgagcccaaatcttgtgacaaaactcacacatgcccaccgtgcccagcacctgaactcctggggggaccgtcagtcttcctcttccccccaaaacccaaggacaccctcatgatctcccggacccctgaggtcacatgcgtggtggtggacgtgagccacgaagaccctgaggtcaagttcaactggtacgtggacggcgtggaggtgcataatgccaagacaaagccgcgggaggagcagtacaacagcacgtaccgtgtggtcagcgtcctcaccgtcctgcaccaggactggctgaatggcaaggagtacaagtgcaaggtctccaacaaagccctcccagcccccatcgagaaaaccatctccaaagccaaagggcagccccgagaaccacaggtgtacaccctgcccccatcccgggaggagatgaccaagaaccaggtcagcctgacctgcctggtcaaaggcttctatcccagcgacatcgccgtggagtgggagagcaatgggcagccggagaacaactacaagaccacgcctcccgtgctggactccgacggctccttcttcctctatagcaagctcaccgtggacaagagcaggtggcagcaggggaacgtcttctcatgctccgtgatgcatgaggctctgcacaaccactacacgcagaagagcctctccctgtccccggagctgcaactggaggagagctgtgcggaggcgcaggacggggagctggacgggctgtggacgaccatcaccatcttcatcacactcttcctgttaagcgtgtgctacagtgccaccgtcaccttcttcaaggtgaagtggatcttctcctcggtggtggacctgaagcagaccatcatccccgactacaggaacatgatcggacagggggcctagggccaccctctgcggggtgtccagggccgcccagaccccacacaccagccatgggccatgctcagccaccacccaggccacacctgcccccgacctcaccgccctcaaccccatggctctctggcctcgcagttgccctctgaccctgacacacctgacacgccccccttccagaccctgtgcatagcaggtctaccccagacctccgctgcttggtgcatgcagggcactgggggccaggtgtcccctcagcaggacgtccttgccctccggaccacaaggtgctcacacaaaaggaggcagtgaccggtatcccaggcccccacccaggcaggagctggccctggagccaatcccgtccacgccagcctcctgaacacaggcgtggtttccagatggtgagtgggagcatcagccgccaaggtagggaagccacagcaccatcaggccctgttggggaggcttccgagagctgcgaaggctcactcagacggccttcctcccagcccgcagccagccagcctccattccgggcactcccgtgaactcctgacatgaggaatgacgttgttctgatttcaagcaaagaacgctgctctctggctcctgggaacagtctcggtgccagcaccaccccttggctgcctgcccacactgctggattctcgggtggaactcgacccgcagggacagccagccccagagtccgcactggggagagaaggggccaggcccaggacactgccacctcccacccactccagtccaccgagatcactcggagaagagcctgggccatgtggccgctgcaggagccccacagtgcaagggtgaggatagcccaaggaagggctgggcatctgcccagacaggcctcccacagaaggctggtgaccaggtcccaggcgggcaagactcagccttggtggggcctgaggacagaggaggcccaggagcatcggggagagaggtggagggacaccgggagagccaggagcgtggacacagccagaactcatcacagaggctggcgtccagtcccgggtcacgtgcagcaggaacaagcagccactctgggggcaccaggtggagaggcaagacgacaaagagggtgcccgtgttcttgcgaaagcggggctgctggccacgagtgctggacagaggcccccacgctctgctgcccccatcacgccgttccgtgactgtcacgcagaatctgcagacaggaagggagactcgagcgggagtgcggccagagcctgcctcggccgtcagggaggactcccgggctcactcgaaggaggtgccaccatttcagctttggtagcttttcttcttcttttaaattttctaaagctcattaattgtctttgatgtttcttttgtgatgacaataaaatatcctttttaagtcttgt

SEQ ID NO: 1560 - DNA, 3136 bp, Homo sapiens
ttttacattagctaggtgtggtgctgcacatctgcggtctcagcttctcgggaagatcgcctgagcctgagagttcgaggctgcggtgagctgtgactgtgccactgcactgcagcctgggtgacagagtgaaaccctgtctctaaaagttaaaattaaaacgcaaacttaaatgtgccaaaatgttgttttttagacatgcaagaaagcacttcagccaagcagaagggagccagctggacgaggtgcgccaggccatgggcatgctggccttcccgcccgacacgcacatctccccgtacaaggaccttctggaccctgcacggtggcggatgctgatccagcagttccggtacgacaactaccgactacaccagctgggaaacaattctgtgttcaccctcaccctgcaggccggcctctcagccatcaagacaccgtatcctacctcccgtgcgcagtgcggtttggcctggggttggcatctttggtcatattttaacacgctgaccctgcaccttgccactcttgtcctcccaccacagacagccccgagctcccgtgtgctgcacttgcgtggtgtctggatggtcggggtggggccgtgttgaggggcctcggatgcgtcgtgcagccttccctctgggaagtggcgcgcttcctctctcatcatctcagaggccgccatgggcattgatctaaaagcccgattttgatgtgttctggcagccggcagattaccattcagaatagttttcccgtgtgattaccaagaaccttgcctgtgactgactctgtcccgcctgtgactgactctgtcccacctgtgaccgactctgtctgcctgtgactctgtccctgcctgtgactgactccatcctgcctgtgactctgtcccacctgcgactcactgagttcctgcctgtgactcactcggctcccgcctgcaacggacttggtccctgcctgcgactcactgtggccctgcctgtgaccgagtctgtcccgtttgtgactgattccttcctgtgactgactctgtcccacctgcaactgacttcttcctgcctgtgacagactctgcccctgcctgcgactgagtctgtcccttcctgcaactgagtccatcccgcctgtgactctgtcctcgcctgtgactgactctgcccctgccctgtgactgtctcacctgtgactgactccgtcctgcctgtgactcagcctcttactgactctacccctgcctgtgactgactctgccctctcctgtgactgactctgtccccacctgtgactgactctgtccccacctgtgactgactgtcctcctgcaactgactctgtccccgcctatgaatgtctttcatgtgacctgcctcaggcccagagggcagtgagtgtttcgcgattgctgctggtacctggctgtgccggggtatgaatgagactcaggccccctcccttgtcccctctttgtggaactctgggcgagagggctggcgtgcttgcccactgcctgttcctaggtgccagcagaacgtccctgctgggtggctcttgtcctgcctggagaggttgcgtggccggggagagggcggcgggcgacggagccactctgtgcctgtggtcctggtgctggaggccggggtgagaaggcgcaggcttcttgtctccaccgaggcctcagtggggctgtttagctgtcgagtgcagcacttcctgtgcctcgaaagacagccccgtgtagtcagcatggcgcccacatagccagaagggcacgcagcccagggcagagtggccacagggggctgggctcaccccggctgccctgggtggcccccaacccttccttgacccgatgctcagacagtgctacaaggaggacggcagctccaagagccctgactgccctgtgtgcagccgctccctgaacaagctggcgcagcccctgcccatggcccactgtgccaactcccgcctggtctgcaagatttctggcgacgtgatgaacgagaacaatccgcccatgatgctgcccaacggctacgtctacggctacaattctctgctttctatccgtcaagatgataaagtcgtgtgcccgagaaccaaagaagtcttccacttctcacaagccgagaaggtgtacatcatgtaggccccacgtcgtgaagcgcacgcctcggggacgggctgcagtgggcggggaggccacgccttcctcctgtcccacgctccagcctgccgcggcgtttctgtttcttgcgaccaaagatccgtgagcaacgataaatactcttaggaagagagaaaataaggtttcataagtttgtacttgaaaacatttggattggtaggattttgtaacacgtcaaccatttgatgcttctgaaaagtactttcaacttgcgaaggaaactcttctttaaagactgacctaaacaccgagggaaacttaagaacgtttaaaatataggagtccgtgatttccctgtgttttcagtttctttccttctgtgaacgatgagacttggagaacgggctggtccttcaccacttcctgttggccctggcctggccggggaaggtggcagcggcaccggactgacctgcagtgacccgcgatgccgcgccacgagggacacttatggcttcattcgagagctgctgccaaaacgcctggcgccgccaccgtcgggggctggcttcgaggacgcccgcctgcctcgcgggtcgtgtccgcgggactgtgttcgtacgtgcatagtttcgatatcacatcgcggggctgtgttcgtagctgcgtcgtttcgatatcacaccctctgtgtgccgccttacttcctgcttcgagaatgtataacgtggaaatccacgggaccaaatttctgcagaggccttgccggatggttccataactgtagagtctaattgctatccattacagaaattaatcgttcagttgaaagaagtactgatgacttttcaaaacaaatgaaccaccgtagctgacagagaaccgtatcgtagaggtttgtagttagtgcttatttttgcatgttgatgttgactagctaataaactgtaaatgtaaaccatgcgaataaaatggttttctatttctcatttccgtgtg

SEQ ID NO: 1561 - DNA, 4197 bp, Homo sapiens
atgtaggtcccaccagcctcggacccacctcttgtcttctccctaaatctcaaagcttaaaaggacagaactcatgtagcaggaagcactggcaatagctgttttcctgcttcttttagccatattatttctgttcttctgatgctacaaccccccaggtcatgaatttctctgtcagtgctgggtttattatctctgctcaaaccttgttaaactgccccagaataggatactcttcttcccggcctcataaagatttgagccctctccaatgtatgttacaaaaattttctctaggcttctcagaggattatggggtctgccttaaaaaaggcaaactctggacactctgtgaagcagaatggccaaattttggagctgggtggcccccagaagggtcactgaagctcgcagttgttcaggctgtgtggcgggttgttgctggaactcctggtcacccagatcagtttccatacattgatcagtggctgagtttggtcaggagccctcctccatggctccgctaatgcatcattcataattctacctctaagttccttttgagccagacctcacttttgcctcaaccctcagctggctcggctcctcctattctgcttccttctgaagaagaagagaatcttcttcacccagttccaccagcttataaccctcttgctcctttagaatcttcccttgtctcctcgaggatgtcccctgtgggctgtccgcctgttgcctctagattgcggccatggcaggaggaggtagccctcctcctcccactgagagaggcacaagtccctttgggtgatgagcacttagctccattcttagtttatgtccccttttctacttctgagctgtataatgggaaagattataaacccaccttttctgaaaagccccaggtcttgacctcactgatggagtccatgctctggacccattggcccacctgggatgactgtcagcagctccttttgacccttttcaacgctgaagagaaggaacagatccaaagagaggccagtaagtatttcctcacatcagccaataggccagaagtggaagctagaggcctccttaaggaagtttttccttctacccggcctaattaggacccaaactcctcaggtgggaagagatctttagacgattttcaccggtatctccttgtgggtatcaagtgagccgcttggaaacccgtaaacttgtctaagatgactgaagttgtctaggggcctgatgagtcactgtgaacgttttagaatgcctccaggaggcctatcagacttacaccctttctgacccggagtctcctgaaaatagctgtgctcttaatttagcatttgtggttcaggcagcccctaatattaaaagaaacctacaaaaactggaaggatttgctgggatgaatattagtcaacttttagaaatagcccaaaaagtttttgacaatcaagagtttaaaaagcaaaaacaggcagctgaggcagctgacaaggctgctgacaaagcatcagaaagacaagcgaaaatcttagtggcggccatccaggaagccagaaaggaaaggcccccatcacagaacactagccagggggccctgggtccatgctagaaaagccagaaaagtgaccagggttcccttcaaagaaaaaccaatgtgcttattgcaagcagataggaaactggaaaaaggaatgcccattaagaccagaggaaaaaccagaagacaaaaaagtcctcaccctccctgctgcggaggactctgatgattgatgggaccagggctcctttacacttggccctcgggagcccatggtgaccgccatagtagggcgccagcctgtacacttcctaattgacaccagggcggaacactcagtactgcagatgcccctaggcagtgtctgtaataggaaagtggttgtacagggagctactggagttattcaggaatatcctgtcacccagtcataagaggtgagtttgggacagaaaagagcaactcactcattcctcttggtcccagagtgtccttttcccctcctaggatgagacctgttccacaagctgtaggcatctatttccttctcggcccaacaagctcacctcatgttaggggacacaatgccccctattgctcagctcctgttaaccacccctctgtcagaagaatatctgttagtttcacctccaaaaccaccagaaaataaaactaatcctctcctactggaattacagactctctttccttgagtctgggctgagccaatccccccaggacgggctaagcaccatccaccagtggtagtagaactcctggccaccaccttgccagtccaggtgaagcaatagtctgtgagtcagcaggctagggagagaatcaacccccatattcagcaactgttacaaactggcatactcacaccattgccagtccatctggaatactccattttttccggtccaaaaacccagaacaaatgattactggcctgtacaggacttaacggaagttaacagacagatagtcactgtccacccaactgtccctaacccttatactttactcagactgcttccaccagaacacacaatttgcactgtccttgacttaaaagatgctttctttgctattcctctggcccccaaaagccaacctatctttgcttttgaatggacagatcctggctcaggaaacaccacccaattgacctggactcagttacctcaaggttttaaaaattcccccaccctttttaaggaagcccttcaacaggatcttataccatttcaagccagaaccctaattgtactcttcttcagtacacagatgaccttttattaggtactgaaactactgacagttgcctgcaacacactaaggacctattttacctccttcaggaactcaggtatcaagtctcagccaaaaatcccagctttgtcttcccagagtctcctacctagggtatgagataaacagaggaaaaagggcacttatcagtgcttgtaaggaagccatcccacaaatccccactcccaccaagagacaggtacgtgaatttctgggggccataagatactgtcgcctgtggatattaaggtccgcagagattgccaagcccctgtacactgctactggaaggaatggcccactagtatggactgacaccaaagaataggctttcaaaaacctgaaaaaggcattaactgaggcccccactctagccctccctaatatctcaaaaccatttcaccttttattcacgaaagccagggagttgctaagggggtgctcactcagactttaggaccctggagatgcccagtagcctatttgtctaagagactggaccctgtggccgctggatggccaacttgtctgtgagccgtagtggccacagcaagcctagtccaggaggctaataaattgactctgggccaaaacttcaccctcatggctcctcacgccatagagattttgctaccaagtgcttctggcaaatggatgtcaaatgctcgcatcctgcagtatcagagtttactgttagatcagcctcttttgactttctcttccataaggtgtttaaatccagctgctttcctccctgatccaaacttcactacacctgtccgtgactgccaggaactgttagaaactacagaaactggctgaactgatctccaagatatgcccctataaacatataccatgtttatagatggtagcagcttcctcgaacagggagtacaaaagattggtgcagcctttactacggagacagatgtgctgtggtcccaggtgttgccagcaggtacctcggcacagaaggctgaattgatcgccctcactcaggctgtctgatgggttaaggacaaatgtattaatatttatactgacagcaggtatgcttttgctactgtacatgtacatggagccgtctatcaagaatgcgggctacttacttcagcaggaaagattgtcaaaaacaaagaagaaattttagccctgcttgaagcaggtggctgtaattcactgcaaaggacatcaaaaggaagacttggccattgcccatgggaaccaaagagcagattctgtaactcgaaaggcagcatggctccctgtcatgcctttaaccctgctgtccgctgtgtcctttccgcaacctaacttggcagccccag

SEQ ID NO: 1562 - DNA, 4048 bp, Homo sapiens
aaaaaatccagtaaaacttccacaacagttaaaaggatatgtataatttgtaataaaagaaagaattctacaagtaaatatcaacctctacttttaaaaagcagctggtttagaaggggggggtctgtcaagatacggtggagacacagacccaatgaatcaaaattggggagcacaaacagcacatggccaaactggtacaagaagagcatgggaaggtgggcattctgtactcagctgtggttccttctggtttcctgtgttcccttgttgatgtcctctgtgttcacttgacattacttggtggcacagaaattagcttgctggggaaaattcagtatgacgtcattggtgcactgccatcattatcctgtttaccattctcatgggagccaattcatgttactgaaacaacgtattggagcaaaacagactgtaagagcagtggctacattggcacttttctcgtgtcttccttactgcagcctggtataatggaaggagtgtggatcaagtgaactgacctcagatcctatctttgtcccctactggttgtgtgactttgggtaatttactcatcctcttaaaccgtatccccttacctataaaataaggatcataagagccactttttgaaggcttatggttgaattagtgagataatgtgtgcctggcatataggaagtacacagtaggggttagtttatttcttactttcttctctacccaagtcgctgctattattgcctctttccttccaggccatcacagagccatgaaccagcagcacatgatgccttcccaagccttccagatgcggcgttccctgcctccagatgacatccaggatgactttgattgggattcaattgtgtagggtttgtttctgcaagacaccagaccctaacgttacctttctgtgcagtgaagggaaaggtttaagagaatccagttgagaaaacaaacttgctaatcactttaccaatgttatcaaaattacttttgaagacaatcagaaggattttagctggataacttactgcttttatctgacccaagcaagtactacatgtttgtctccctgccagctgccctatgtagctcctaactgttgtgtgatttggacggctttttgcatatttgtgtcagtttgatgttaaccacaagtgccagactgatttttcagacggagcctattttgctgcaagcagtttatataaagatacatatgtgtaaatatatgtacaaaaattactgaaaggcttcagttttttctaattggattattatgtcttgaaagttattgtcagtttttattccttgttaggctattttctgcaggatgcttttaactggtgtaggaaactgaaaggaaatagattttttccaaaacccagttccccttatttaatcttttttagaaatgtgggtaatgaattctatctaataagtcaaggaaaccagaatttgacacactccaacaatccaaaggggcatgttgctcctgagcagcatgaagaactgaccaaattggttttgatgcttgggggatcatagagtatttatgtctgcttttctaaatctgcattataatagctctaaaatttgttgattggtaagaaattgggcattgcttggctctttaaacacatcagtgcttccacattcacctatgtatttattattcaaaagtgtcattttaatatttattgctaccttctgtgaatgcttagctcctgtcgggttcattaaggagaaatgtgtctgaaagcacagaactattattatttttttctttttttgagatggagtcttgccctgttgcccaggctggagtgcagtggcacgatctcggctcactgcaacctccgcctcccgggttcaagcaattctcctgcctcagcctcccgagtagctgggagtgcaggtgcacaccgccatgcctggctgattttttgtattttagtagagatggggtttcaccatgttgcctgggctggttgcaaactcttgagctcaggcagtctgcctgcctcagcctcctagagtgctgggattacagacatgagccactgcgcctggcccagcgttacttttcttgataagaatttacagataagacactcagagagacattgtgtcattctctatcatcactccttttaccatgtgaatagatttctctgtcttggcattcttgctgattcagacttattagttaaatcggatttttctggaatttgaatcagatttcatttgggcaacaacagcagggcagggtttctaaagcaggtttccccactcatctaggttgtcttgaaaggaggatagagccacttacagttttatttgcttcagtgtttaatgtagatattatgtggcctgctgtttctgttgtcttgtatgtctgtgtatgcatgacatttggtccctttctttgaaatgcagcccctcttacgggttttttagtggtggtggtttgttttgtttcatatcatatcacagtttgcatggactgattatcttagttttatgataaaactagaagaaatgagggtttttttttaatgaatagattttgaattgattctttagaccccccaaaaagtgtcagttctaatggggaaatatattccatcaagtcaaagagtaataactgctcactagttgctttttagcatctctggtcttatcagccatgctaaatcactttaattagccttagtgattctatggttgagtaatctctacttgaactaaacaaacatcttttgtttctgtgtgtgtgtgctgtgtgtgagagtgtgcgcgcgcgtgtgtgtgtgtgtgttttaatggagtgttgccttgaatgaatcactgggaagccagccatggtaagggctggtgaggttggggagaaaggaagagctttatgtttctctgttgtttggaccctacttggcatgaaaaaggaagctcagttccagccccttggatcaacgaaaatcagaggattctggaaaggcagccaacttgcgcctcttagaaggatcagaggcaagatgagatggcagcctgcagagtaaatgcttgaaaaaaagaggggtgattttcaatggtttgcttaagtcactgttttctagacaccaaaatagctgttttgaaactgttttaattgcttgggtagcaatgtgcactttaaacaatttggatattggaatgcagtctcatactgagtgatttgagtagaaccactgatgatgattttataaattgtgtgaagcgaatttcccatttggcaatcatttactgatttgcagtgatgaatatttttatgagaatttaaacttagcaagaatggccatggaggcaaagccttcacccagacccatcccactctcctgtgatccaggtggtccaggagcccaggacaggccttttctgtgggccctggccagacagggttacctggtgaggtgcagagagtccctctagtggccattttgtatggtagttgctaatgcagaacaagttctgtcttgggcttaaattgactgaagactttagggggaaagaatagtaaatgcatgtaaacaaatggggacactctgttcaggagaataatccgactggcatttgtggcagtttttgaaatgtaaatgtattcatgtgtgttcttgtaaatacgtgtcgctcagatgtcctttgaagtgggagggaatcaatccggggataatttcaaatggaatagagtattttgatattgttcattcagagggtgatgtgtacatatctatattgtatatatgtgatgaaaatgcattggctttttgtgcagatacaacctgctctctgtactgctgttggacagtcagtgttttaatgtttctacagttttgctattgcacgatttcatattttgcctctatgatgaacggcaaccattatttgtaactgtttagtgctgtaaagaaatattccaagtgtcattaggattgttgctgccagaactgatatgcatgaatggcacttaaaataaatatattatgttaactctatttacaac

SEQ ID NO: 1563 - DNA, 4266 bp, Homo sapiens
attttggccccttatccagcatggacctcaaggacaattcttttagcaatgcatttgctgcttctcgagaatcgtttgcttccttgccagaccccagttctgtatattctttggagtgttaccacccaaagtgtggtccatggaccagaactgttgggatcacctgggagcttgttaagaagtgcagaacctcaggttccaccccaaacctgggattcagaccccctgaatcagatttgcattttcataaaggccccaggtgacttgtgcacacagcagagtctgagaagccctgcctccgagttgacttccttcactccaagaggaccaaacattgctgaagaaactcgtggattccagcataaagttgccctggatttacaacctatggagtacataagagatgtctctgctttactttggggctaaataagcaaagggggaaaaaaagtaattttacctggtttatgcgaataattgcctcaatcctgagaactatgacatcctttctccaaaagaatgcaaaactcttcagactgacatttgaagacaggggcctaacaattaggtgtccaggtgagggcaaaagggacacctgtctcagggccttgtgagcactcccttctgtgcacgagcaagaggagagcaggaaggggtttcccgggaagaagcctggggacttaagactgattgtaaatgaggcagtgggacccaggaggctttctcagtgtcttccagccgtaatggatggtgatgacacacagtttaaactgggcacagaatggaggaagtgcagaggatgaatacaagacgcattttttttctaagactatacttcttaaagctttaaaaataaatttatttaaagatacatttccatttttggacagaggaagggacaaggatatgaggtttaattgtgatatatgcaaataatctgaaaacctaattgtatttagtactgttaatttcttcaagctactgagtagaagagaagtaggccagtgatggctttgctgcctgttcctttccctgtgaacagcctccacaggccatgctaatgagtaacataaagaaagatgagacctgggaaagcaaagaacatggacaatgcagagatgatgacattgcttttgaatttgttaaaactggttacaaaatatttttttgaatacatgaaaaatcatggttgccaacaagacttcaaatgtcaagatctgtataagaacatttctagtttatggaaatttgtcattaaatttatttcataattgatagtctataaaaatgaaaaggagctccatgacaatacccctggccagctgagtgacagctatggacggcctccagcccgtggaggccagccctgcatctttgcacacttccagacatctttgcacacttccagacaggcctgtgacacacctcagcactagaccttccgaatgtcagtggattccttgtggtaataaggccagacatggttataaagggatggtgatgtaaacctttagggaaaaaaagaatcatttttatctagggggctggctgactggaactttaaaaatccttgctaattcaaaatatccttgcctttgactttgaacagcttgagggagccttaccatcggtagtcaacgggtctgctttcccctcgggatcaactcttccaggaccaccaaaaataactttggctgggtaaggattagaagcaatacattgtcactctaatgtaataatttaagagactcttggatacgttcacgattttcttctatactataaaatgagcttcactgcacaccttcatgacttctgagaaatgtttttaccatcagcaatgccactaacggtgttgctgtctgtgtctggtttcactggggctgcaaaggctgctggaaagtctggcccataacctgcatctgtccctgtcctcctgtccgctgtcctatgttggtgtttctgaggcttgttgccatttatagctctttgtcttcattccatgttgattcaaactgtactggcctctcttttttgctgtcgtccgtggaaataatggtgtggcagccatgcagcatgaacggggggctgcagagtgccctccagctgcctccgcccgctgccttccatgctgagttggctcgagctctatggcaggtgctaatgcatgatctgtcttcacatctccaggtggacataggctgcacttatctgggacctcatcttgctatttcttgcctgtcttgtgtttataatcttgctatttcttgcctgtcttgtgtttataattgttgctaattaaactaatcagctggttgaaattatcaggttaacatttatgtattaacagtggtttgggcaaccctctccattcgttgagccctgtagttgattatggagatcagcatattcctgcctccaagaggtgtttgtttgtttgtttgttttttcttgttttttgtttgtttgtttgttttgtttttttgagacggactcttgctctgtcacccaggctggaatacaatggcatgatctctgctcactgcaacctccgcctcctgggttcaagcaattctccttcctcagcctcccgagtagctgggaccacaggcgcataccactataccaggctaatttttgtattttttagtagagactgggttttaccatgttggccaggctggtcttgaaatactgacctcagatgatccgcccatctcagcctcccaaagtgctgggattacaggcgtgcccggcctgcctgcaggagttctttgggcccacagtctaaggcaaacacataccctgggcctgagagacagcagtcaaacaccttacaggatacagcccgcagcctccagtgctttccaggctcctgcagagttctgccatcgggcatggcttcgtgatggccttggtaagtgtgaggagagtggtttggggctggaatgaaaggccgtgaatctggaaacacactggaaccgatcaacgctatcagccctcatggtcgctgaagggcgttggttgctcctgggcaccgctgcttcagtttctgcagtggctctttcagctgttgtaattctgtgcctaggctgttgacaacttttgctgagttggacagaataagactgtgggccatgctgcttgcttcactctctgggtgtgatggatcggtgagggtgcagttgctatgattgtaattggtcatctcatcatggctgttaacatttctggaccaaacaaaaatgacttcagctacttccagattctgctgatacattacacaggatgatctaaaaggctacagttctgaagatactcatctttcttgtaatctgggggcatctggtcaatagtattgcctctgtgctgtattgtgtctagaacattcaaggacatttgatacttctcatactttaattgcgtgctctcccagttgcagcaccctctgaggcttctatgtgttgcagccgatgggcatttgcacagagcagcagtcatgacagcgttttcagggcagctatttctccttttcccccttttcctctcccccggcttcccattctcctcctcctccttcctcttctcgtcccctcctcctcctctttgttctcctccccctgctcttcttcctctctccttttcctccttctgtgtctatactagattattttcaatcagtcacatgtttttctttattttgaatgttacaaaatatttctctattgtaaacggtgtgccaggaaaaacatgagatgtgtatttgtattttttatgcacataattacttaatccaatgcctctccacttaattgggcctgatgatttttatctcgacatctgcaatactgatgatatactggaatctctaccaatttatttttggtggtaagaaagcagtcagagaacgttttgctggttatttcattccgtgtgagttcccaaccaagactgtcagcccagtgtggttcagccatatctaacctatagaggccatagaagcagttcagcttaggctggaggccagcaggctgagtgtgcgagctgacccgatggtcatttgttagggttggggggtgaactggctaacttattaactagcttatcatattaataaaaactctttaatacaaatccttgtcctgacactctgtagctttaataatcctattaccaatctggtaataaatgtgaattctgacacattgttgatgctactggttttagtaacataatgaacatcataataaagaatattcaagagtc

SEQ ID NO: 1564 - DNA, 3348 bp, Homo sapiens
ctgcccgctggactgatgcgcgagggaggctgctagacaggctggctttgcggcagtgtgatggccgcgcagcaccccctgacccccacggctccccaaccccgccattcccttcatctagcgctcccggggaagccgaggcgggcaagtggcgtagcgatggagggcgcacccaggggcagcgacgctccctcgctctggctcccagccctggtggtgggtgcaggagtgagggtagcccagggtcgcaccctgctcccaacctcggctcgtccccaccctccacggtcgtccgcagctcgaggcagcctgcatttctgccagtatcctgtcccctcgcccggtccttcgccctcctcccactttcattgtgtgtctcctctctggctctgaggttcctcctccctcccttctctctctgggtgtctccgtgtctatctccacatctccatctccatttctttctctgcctgtctctgtctctagctgtctctgtccctcagtctctgctcaggtctccgctcgcctcttgctcattttcgttcctctctttgtctgtctgactctctcttgtctcccccccttcagttacccccaaccccccgcacacacacacacctcacagccctgtttacgacatcccctgggctggcaggtgggcggggctgcagcagagcgggggtgagagagggagacgcagcctcccccccagctgttaaccttcacgcttcaggcctctgcggatggcagaggagggggaaagcccagctgccagcttggcggaggtgaccgggcgggggctgggggctgtccctccctctgggctcgtctctggggagatctggggccggaaggaatgtggtggagggcgccttcggctgaggaaggctgttgccggatgggtggcctcctgaaggcttgtgctggcgaggcgggtgcccaaagggggctctgagcggtgtcggccctgcccgcagcccggccggacgtgggggccggcgtgagaatcccgcccatctgtgagccggcctcacgccgtcagacccaatttatctcgccgccaaagtttcacagccatctgctcgagtggaacggcttccagcgctggccccaccgggccccccagccagcgcggggatgttttccaatacgacagcatcgccccgccaaagcaaggagggggtgtagggggaggcggcagagcgcggtgcgcggggctggcaggcagccctctcccgcgagcgagccgaccctgaattttaagcgattgatcaggaagctcaggccgttcccatcactttgagcagccaaatgcgacggcgcagggatttcaaggggcctttgcggaggcggtaatgaggtcaccgtcactgcgccagcccgcgggcgggagggggcgaaggtctgcggacacgtgtgaacacagcctgtgaaccgagccacatctgtattcacgtgacccccggggccccagcactgacccaggaaaactcggcatttggatctgagctgattcacactcccccgcccccaccccacctacccagccagacacggttcgagaggctgagctagaacccagccctgccacatccatgattccatgatcacctcagacagcttcagcacaagagccccaactctcttctcctccccgctatgtgcctaaaatacacatatttgggcacctgcccattgcacttctgaacaagcctgtggagacagatgtaccctaggcccccggtaatcacacaggtgcacacattccaattacacacctgaccgcaatgctcgtgcattagtacactcccaaccaccaccactaccacccccaaacatgcacacaggtactccatcactttcaagccagcacccagcaacacacgagcccccaaactcccctcccccgggcgaactcatgtgcacactcattcccaagaccccgagcttgctgccatgtccgcgcgggtgggcgcctccactgcccgccaggcagcgcgggtgcagacctcgaagagaacaaaggccgggcaggtgggagggaggggcgctgagcccccggcccgtcctcctaggcaatgctcgtctgtctcggctccgcggccaccgcatcgagcggctctgattgccgagtaaatcaccgcgatgatctgaataattatcgtctcctgaaaagggaaaaaacagagaataaataaagagagaagggagcagtcacctgatttctaggagccctggggtatgttggggggggggtgaatacataggggtgggtgtcagtggccccctgcggatcctcgggacttctgttgggatggagtgcaggtgggatgggcctcagggcagacagtccttccttaaaggtggcagttagcatccagtctcccccttcgtctccccagggtaagtcaggccccctggagcacccaaccgaccccagctggcttctctgcttcttacacactcaggcccacctgacctgtagggcaccctcctgttccagggctttgctcagtcggttcccccctagcatgctctctacccaccactctggctggcttcactctcccatctctgaagttcagccccaggttacttcctctgagaacttcttcctgactgcccagccctccaggatccttctctcccagagttccagtgtctgattgcattttctctgactgatttgggtgtgttgtcctgatcttctcagctggatggcagctttggtggaagcagctatgttttaaacaaagcagtaatagtagcaacagcagcagccactgccccactctgagcagctaggatgtgctggccctgtgccaaaacatcatctcaccatggatcctccccagaatcctgtgtggaaagtaatgtctccatttaaataatggggaaactgaggcgtaccaagagtgaagcttggattcctttcctcagggatgaagatgctggtcatctacggtatcctttctgcagttgtcccctgatcccacatattggaggagttgcttctcttccagtgctgggcaccaagacacaattacctcaactggctgggcacagtggctcatgcctgtagtcctaacgctttgggaggccgaggtgggcagattgcttgagcctaggagtttgagaccagcttgggcaacatgacagaacaccatctctacaaaacaaacaaacaaatgaaaaacaccaaaaattagctggtatggtggtgtgagcatatggttccagcaacttgggaggctgaggaggaaggatggtttgaacccgggaggttgaggcagtgagccgtgattgtgccactatactcaagcctgggcaacagatcgagaccgtctt

SEQ ID NO: 1565 - DNA, 2845 bp, Homo sapiens
agtcgttgggttccagggtccttcacgttccattcccaggccggtctgagctccggggccgtggtcccgctgcctcctccggtcgtcgtgcggaagctgcgacgcaggcagaccatggcagagttctcccagaaacgggggaagcggcgtagcgacgaagggctgggcagcatggtggacttcctcctggccaatgcccgcctggtgctgggcgtgggcggggctgctgtgctgggcattgccaccctggccgtgaagcggttcattgacagggccactagcccgcgggatgaggatgacaccaaggcagacagctggaaggaactgagcctgctcaaggccacaccacacctgcagccccggcctccacctgctgcccttagccagccagtgttgcccttggccccctcgtcgtctgccccaggagaggctgctggccttcgagcgggaccgtgtgaccatcccagcagcccaggtggctttggccaaacagctggctggcgacatcgccctggagctgcaggcctactttcggagcaagttcccggaactgccctttggggcattcgtgcctggggggccgctctacgacgggctgcaggcgggggctgcggaccatgtgcgtctcctggtgccactggtgctggagccgggcctgtggagcctggtgccgggcgtggacactgtggcgagggaccctcgctgctgggccgtgcgcaggacgcagcttgagttctgcccccgtgggagcagcccctgggaccgcttcctggtcgggggctacctctcctcccgcgtcctgctggagctactccgcaaggcgctggctgcctctgtcaactggccggccattggcagccttctcgggtgcctgatccggcccagcatggcctcggaggagctgctgctcgaggtgcagcacgaacgcctggagctcactgtggctgtgcttgtggcagtccctggggtcgatgctgacgaccgcctcctcttggcctggcccctggaggggctggcggggaacctctggctgcaggacctgtatccagtggaggctgctaggctgcgagccctggacgaccatgacgctgggactcgccggcggctgctgctgctgctgtgtgctgtctgccgtggttgctcggctctggggcagctaggccggggtcacctgacccaggtggtcctgcgtctgggggaggacaacgtggattggacggaggaggccttgggtgagcgcttcctgcaagccctggagctgctcatcggcagcctggagcaggccagcctgccctgccacttcaaccccagcgtgaacctcttcagcagcttgcgtgaggaggagattgacgacattggctatgcgctatacagtggcctacaggagcccgaggggctgctctaggtgggtggaaacgggtggttgccatgttttctaatgctggggagctgcacccacctcccttccagggatttgaatagtggtttttctctagctttttgccagaacaaaggagggtacattacttaaacccagggcatcaggatgtgcttgggctatggtggccataaaccctgagcccagagagcttgggtcactgtcacctgagtgcagctgggctgcctcaggcagcttggagtgccagccattcctgcaagcaccgtttcagctcttggggccaaccccaggacctttggctctgtccatcaccagcaaccaatccaccaacagaatgtggtttctgccatcctgggcagaagctgaaggccagcttcacatttctgctgagagaaggtgacttaacgccttttccggccctagctccaggcgttttgaggcgtctggtgcctgatggtaggtatggtgtgtttgttctgtcccccaggggctggagtcacctggtgcccctgaaggacagatttttggctgttaaaggatggcattttcctgctgtcttctgtgcgtttagttttcttgctgagcgggagctcagtatgacttgccacccacctgatacctcagggcaaggccctttttccctccagccaggtgagtgttttcttcaggcagctgagggtcctgggggagctgaggctctgtgctgcacccccagcccacagctggggcatctcactggagctgttccaggccccactggagagcagaggacctgatcccccactagagaggtccggtgtgcacagccggcctcccagtgtgccaaaatgaactgctctcagctgatggctgtattctgactttgaagcctgttaagaggtagcaagggggctagaggagggagattccacctcccctcccaagtgaccctcctcctgcctctggtatccttccttttgaaacgaagctcagcttcgaagatgtgaacaagaataaaaggaaaaaattctaatgtatatataactcaggctggataagggagtcttggtgctttcatacgcagctgttgagggttttctgtaagtcctgtggcttgtcctggcactttggcaagagtgcttgaggtcaattggaggtggtagagtttactttaaaaagtagcatcttggccgggtgtggtggctcgcatctgtaatcccagcacatcgggaggccgaggcgggcggatcacgaggtcaagagatcgagaccatcctgaccaacatgatgaaaccccaactctactaaaaagacaaaaattagctgggcgtggtggcacgcacctatagtcccagctactcgggaggccgaggcaggagaattgcttgaacccgggaggtagaggttgcaatgagctgaaattgcaccactgcactccagactggcgacagagcaagactctgtctc

SEQ ID NO: 1566 - DNA, 2721 bp, Homo sapiens
acaacgcatgctgaaaaaacaaaaagggagaataggggaccaattaccacttcaaacaaaattacatttagccttgtttactttaaattgtttgactcctggtacggatggcaagaccccagcagaacgacactggcaactgctagaggaaaagaggcaagtttatccaaaagtgttatggaaatccccagaagaaggacaatggaaaggtccggtggatttgctgacgtggggacgagggtatgcttgtgtttttacaggagatggacaaaccgtgtgggtgccctccaggtgtgtgtgaccatggaacgggagaccggagggatccatggtattcaaccgtgggcctgttacctccagtacgagccatgagccagcggaatctgaatgcaaagacagaacaagggccgaccggagtcacaatgacatccaaccccataacatggggacagatcaagaaaacgacacaagaagctgagaaactactggagcgccagggtcaggcaaaaacccctgactccatgttcttggccatgctagctgtagtgtcctgtgcggtatgtttcccctgtgtagaggcaaaaacatattgggcatatgttcctaacccactggtagtacgactggtactctggagcgacactcctcctgagatatattatgatcagggagcgtgggcaccaggacccctaactccgtctgacacagagcaatagcatcaattacaccggcccattggaaggactccctttatgtatcaccatggatacgtcactcaactgcagctgtcttgcagtccaatctcaggcatggttaagtcaccatggaaaaattatgtatttattaggcctcagctttattaatgttactggcgtgttcaccaatcactcctagccccatcactcaaattgtatggattatatggaatgggctccctttgatatttctcacccccctccttggacccagtgtcttggccccttggccagacaacagtctatgttaatgggaaacattgactggggtccccgtggccatttagaggggagagatgaaaatcagacctcttggcacaaacttcactggcactggtggtggaccttcaacacctcttcatcacatcacactgggattcagtcccccagttggctgcacaacttgcttggtataggacaggctttaacccgcccttacctcagtgacgtcatctaggaaacagaggcccaattcaggaatcgatatggaaggcaacactcccatttatgaataacagcatctgggtcagaacattatccaacaatagtaatattactcaacacagttttaatatcacctttgtaaaaaatattaccactcaatttacggtttgtgggttttttgttgttgttgttaactgtttgagatggagtctcgctctgtcgcccaggctggagtgcagtggcgcagtctcgggtcgctgcaacctttgcctcccgggttcaagcaattgtctgcctcagcctcccgagtagctgggattgcaggcgcccgccaccgtgccaggctattttttgttttttgtatttttgatggagacgggatttcaccttcttggccaggctgctcttgaattcctgacctcgtgatccgcccgccttggcttcccagagtgctgggattgcgggcgtgagccaccatgcccggccagtttgtgtttttaatccctatgtttttctagcatctaagaaggaccaactccacgtaaacatcacccagttgacttgtgactcttgtcaactgtatcactgcctcaatcatagcacaatacaaacacacaacatatccactctaataattctgggtcgtatccctggattatggatccctgtcaatttgtgcaaaccttgggctgccacccctgctttacattttgtaaaactccttcttacccagctcactcatcgtgcacgtaaagccttaaacatagtaatttttactgtaatctccttagtcacactaataacctcggttgtagtgtcctcagtagcactacatagttctattcaaacagcccaatatgtagaaaattggacatgtacagccaaccaggcatggatgcttcaaaataaaattaataccgaattacaaacaaaggtagcaatgttaaaggctactgttctgtggctgggaaagcaggtacaaagtttgcaattgtagcagcaattgcactgtcatttcaatcatattcatatttgtgtgaccaatttggaatagaaccaaagtgaatatccatggaaccttgtaaaagctcatttgcagggagcttttacatccaatattacttttgatatcagtaacttacagagtaaaattcttaacttgaataagcaaactcaaaaataacagccctttttagaagcttaaacagaattccagcagggcttagaaagcctcaaccctggccgggtgcggtggctcacgcctgtagtcccagcactttgggaggccgaggcgggcggatcacgaggtcagaagatcgagaccatcctggctaaggcggtgagaccccgtctctactaaaaatacaaaaaaattagctgggtgtggtggcgggcgcctgtggtcccagctaatcgggaggctgaggtgggagaatgacgtgaacccgggaggcagagcttgcggtgagccgagatggcgccactgcactccagcctgggtgacagagcgagactccatctc

SEQ ID NO: 1567 - DNA, 2962 bp, Homo sapiens
cgtatgatctgaaggcctgcaagactgtgggatgtggtcagagttgattcctgtgaagccgtgcagcatgtgggttcagcacttgggctttgttatcagaaaaacttaaggccaaatcctagctgctctattcaccagctgtatcttcaagtgtcagccttgccttttctgagcctgttagctcatctctcaagaaggaatggcactgtagtacctcccttgcctggtgtgtgtccttaaatgggtcacataacctctcctcttttctcatctctcagtaggtggtggtctctgtccctttcacctctcagaaatgggcagccatgtcaggggggtggggcagggcagtgagaatgctcatgtatggatctttggatgttccctgtgagtgtaaactcttggtctgtttctccctcgtatgctataaggagaagctaaggcaagcatgcatggcctttggcctgtgtgaaattagaaagtaaaaagatctcaggccatgcttcttccccagttgccaggagagacttcaggattgttgatggtagtacaggaatccagtctcagctccatgttcttagtgctgctgcaggagtgatttgacttttctttgccccagagcctactgcttccatctctcacatttcactcccaccgatctgctttccctagagtcctgtctatctccccccatacttacctcaggactgtcatttatcctcagacatccctctgctcccacaagccctgggtacaagtcattgagccgttgggattgggttcacttcagctgcctctgacagatttccagggagggactgtccagggatcggtttcttgagggcagatttggagcaagattagtaggcatggatggtcttagtatttaggtgtatgggaatgtgagggctcttctcatgtaagtctgtgacccctagagagggccctccagggacccattgggggaacactatgtgagtacctgaactttgagtccagagtccatgggcctcttctattaaaggcccttggggatgtcacacagcctcatgtggagtcatgctttgataagcctgagttgtgcgcacttgtttcccttcttgacttgtaatttcagggtaaggaaagaagaggggctttcatctgtgatcagagcctacagaggccaagagaggaatggggaatagaatcagaacacagatctttctggaaaagccagcaccctttcagctgtttacctggaaaccacagtgactgaaggtgtagctaaagccctagaggtttccagtggggaaccctggcttcaacccagcagacagtgggttcttccagggcaatagcttcctcctaagatgcgtcatgtctaggcctcaaggctggggccttttttttcttttctttttttttttttttagacacggtctcgctctgttgcccaggctggagtgcagtggtgcagtctggctcactgtgacctctgcctcccgggatcaagtgattctcctgccttcggcctcccgggtggctgggattacaggcatatgccaccatgtccagtgaatttttatattttcagtagagacagggttttgccatgttggccaggctggtctcgaactcctgacctgcctcggcctcccaaagtgctgggattacagccaaggctgaggactttcaacagctgcagcgtgctgccagatttcaggggcctccttactgttaggtataagacttcatgcctcagcttgctcttcctgaggagtggaagcagagagctgctggggcaaattccctcctgcttagctaccctccttcccagtgatcgcaaagatagttattttcacaacaggtcaggtcaggccaggcacagttgctcacgcctgtggtcccagtactgtgggacgccaaggcaggcggatcagttgagtccaggagtttgaggccagcctgggcaacatggtaaaaccctatcatggtggcatgtgcctgtggtcccagctacttgaggggctgaggtgggaggatggcttgaggctacagtgagcgctgattgtgtcactgcattccagcctgggcaatagagtgagaccttgtctcaagaaaaaaaaaaaaaaaggttagtgtcccagtaaaagctcctgctctaggtgggaacagtagcctgagggcttagaggaatggtttaagggaaaacagggccagatatttggggcctgaaccacaaggatagcatggccgtaggacagacactggccttgtacagtcagaagaagcacaaggacaggtggtatggagggaggatgaggatactgggtcctgtcccagggtaatgtctttgttctttctcttgacctccccataggcttgcagccctgagtgatcgagagactcggctgcaggaggtgcgctcagccttcttggctgcgtacagcagcacagtggggcttcgggcagtagcccccagtccttccggtgccatcgggggcctgctggagcaatttgcccgtggtgttggactccggagcatcagcagcaatgccttgtgaagaagccagcccatgacattttcctgctcctctctcagctgagcccttagcagagaatcaaagccatgcctggccgaaggggtacttccaggtcaggggaaatttcagtcccccatctccatcatgaacatggcagccccaaagctgagcaaggccaaagacagggttttccaacccccagcctcttgactggtgaccaccaccccttcttgtcactgtctcccacccaccccatctttgctgggattcccatcaactctcagaactgtgtggggtttccctggggccttgtggaagccatgacttcacaaagaccctacctgtcagttcttgtttctggggaggagggatcacctgcactgagaatgaggcagtttgacacagatcacaaaataaaatcaaagtctttttgaatagcc

SEQ ID NO: 1568 - DNA, 1639 bp, Homo sapiens
agctctgggagaggagcccagcactagaagtcggcggtgtttctattcggtgatcagcactgaacacagaggactcaccatggagtttgggctgagctgggttttcctcgttgctcttttaagaggtgtcgagtgtcagggactactggaggagtctgggggagacgtggtccagcctgggaggtccctgagactctcctgtgcagcgtctggattccccttcggaatctatgccatgcactgggtccgccaggctccaggcaaggcgctggagtgggtggcagctatatggcataatggaagtaacgaatactatgcagactccgtgaagggccgattcaccatctccagagacaattccaagagcacactctatctgcaaatgaacagcctgagaggcgatgacacggctgtatattactgtgcgagggacccaaaatttggatattgtagtagcaccagttgccttacgaattactttgactcctggggccagggaaccctggtcaccgtctcctcggcctccaccaagggcccatcggtcttccccctggcaccctcctccaagagcacctctgggggcacagcggccctgggctgcctggtcaaggactacttccccgaaccggtgacggtgtcgtggaactcaggcgccctgaccagcggcgtgcacaccttcccggctgtcctacagtcctcaggactctactccctcagcagcgtggtgaccgtgccctccagcagcttgggcacccagacctacatctgcaacgtgaatcacaagcccagcaacaccaaggtggacaagaaagttgagcccaaatcttgtgacaaaactcacacatgcccaccgtgcccagcacctgaactcctggggggaccgtcagtcttcctcttccccccaaaacccaaggacaccctcatgatctcccggacccctgaggtcacatgcgtggtggtggacgtgagccacgaagaccctgaggtcaagttcaactggtacgtggacggcgtggaggtgcataatgccaagacaaagccgcgggaggagcagtacaacagcacgtaccgtgtggtcagcgtcctcaccgtcctgcaccaggactggctgaatggcaaggagtacaagtgcaaggtctccaacaaagccctcccagcccccatcgagaaaaccatctccaaagccaaagggcagccccgagaaccacaggtgtacaccctgcccccatcccgggatgagctgaccaagaaccaggtcagcctgacctgcctggtcaaaggcttctatcccagcgacatcgccgtggagtgggagagcaatgggcagccggagaacaactacaagaccacgcctcccgtgctggactccgacggctccttcttcctctacagcaagctcaccgtggacaagagcaggtggcagcaggggaacgtcttctcatgctccgtgatgcatgaggctctgcacaaccactacacgcagaagagcctctccctgtctccgggtaaatgagtgcgacggccggcaagccccggctccccgggctctcgcggtcgcacgaggatgcttggcacgtaccccgtgtacatacttcccgggcgcccagcatggaaataaagcacccagcgctgccctggg

SEQ ID NO: 1569 - DNA, 3862 bp, Homo sapiens
cacactacggagtcgatggttcagtttcatgaacccttggaccaaggaagtagaatatattgtctcaactaacactgttgttttagccaacgtcctggaaggcggggacccaaccttcccacagctcacagcatccccccacagcatggacagcatgctgccctctggagaaggtggcccaaagaggacccaccccactgttccagggattccagggggaacccgggctggggcaggaaaaataggccgaatgattgctgaggaaatcatggaaatccacaggcaagtaacaccttctagttcctctgttaaaccagtggttctcaacccagggaaatttattcccccaggcaatattttgcaatgtcaggagacatttttggtcttcacaactgggtgggaggttgctacttaaacatcctgtggatagagaccagggatgctgcttgttaaacatcctacagtaaacaggacagttccctcctccccacccaacaaagaattatccaatccaaaatgttagtagtgcctagattaagaaatcctgccttaaataaagaagctaaaccaaaatagcccagcgctaaagagaattcttgagaagacttaactttcttatggctcaaggagcttctcagtgcggatagatgtacctttactttacaggaatgcaggagtagagctgtgaactatcagagtgatctggaccttaacaaaacattcactttttttcaatcaaagagctgcccaggattagtactagaaaccaagcagatcagctagttattactagctgtcttgggagagacttcctttccatatgaaagagaaggagcttagaagcagtccacctgggtctgagtcctgggcctgtctctctacctggctatgctgagacttacttaacctcttgctctctgttgatttaaaccataaaaagaaagcactatttcccaagaattgtgttaggattgtgagggcactcaggaaagttccaggaacacagcctgacatatagtgagtgcttaaaaattaattaaatctgtctttaagagcagtcgagagggaagcagttatcataagtctgtccaaatttggggaatagagaaggtggtaaccagattcttcagaacgaaacttaatgtaacataagaaaaggaagaaaacactgctgccgctggattctctcaggagaattagaggctggcctgttttccaattggccataaaggggctgttatccccctataggtaacacagctcttttccaaccccacaggattagtgggtgtgacttctgcatcaggaaggagacatgagggtagtgtgcagtgtaatcaggttcaaaacctatactttgcatttgcataccctatattttgcttgagaccatccaagaacagtatcaaacagtccttgacctcaagaattttaaaatcttttataagtctattttctttatgataacaggaaaaagggagggtgcatgggccaaagcaagcaaaggaggaaagatttgaacttggccttagccagggtttgcaataagagtggatgttccctctagaaaagccagggctattcttgagtgggcatgtgagtggcaaattcagggtcaagaaacaagctacctaactgggcaggctttgtgtaggaaggagacacagagctatgataggcgattaagaaacacaagaaatgatactgtgcagtttggaagaaacctgtaagaccccatttgttgtaggatgctgaacaagcatccaaagtcttgtgttacgctttgtggaagttgcattggaatagggagagatgaaggtgggcatgtttgacaactcaggaatgaggccttatcctacagagatgacactgccaaaagagaaatcaatcatctaaggtctagcgtttgaagatgaaatcaggaatgatgaaacagcaattccaagatgagaaacctgggaaaatagtggtttcatagacataagtagagaaaggtgggggacactcagcaatttttccgtaagcaattagcagccgtttgtgcatgctgagaatacatgatatgtagttgtaaactgccgttaagaagcttataatccagaaagaaaacttgttcactcataaatctagagaactaggcagtacaagaaccaaaagacttctgggtggtggaggagtggtctctgggtcacccaaaagctacattcatccatgtaggagctgagagtcctgtggttacacaactgccatcacactctccctaaactgtagctgcaatgccaagtgatggattctttcctgaggtccttcagcctgacaagtatttaggtggatttacagttctaagtcttcccttctataaatcttctgagagatatgctagataagaaaggcctggacccatttttcatcaaccactgccttcgaaggctgcttttcctgtcactactactaggctaccttttagaccctggtgccgtccatgtcctaagagtattcactagctaaacagtgtttgtggagaaggggacaaattgttttctgtggatcaaagatggaggttgatcttagaagttctcctccaattcacctggattctgtgaggaaataaaactggccacttacttgaaattcaccaactgaatgcaaactccaatccaagggctttgtcagtgagatgcttgactctagggactgcattctagatcaggtgcctgtagaacaaatccagcttgtcatctgtttttgtaaataaagttttattggaacacagccacaccgattcgtatctgtggctgctttcaagctgcagaggcagagttgagcatttgtgacaagacaccatatggcctagagagcctactatctggccccttacagaaaaagcttgccaaaccctaatctagatcttcatcccctttctcacctttaccccttaacaaagcacatacactccactgaaaaaagaaaaggcagtgtaattctcttttctgacaggataagagggtcatcgccttctagctgtggctccagcccattgaacatcacgagtacgcctccccctgatgcctcttctccaggaggcaagaagattttaaatggagggactccagacattccttccagtggcctactatcaggccaggctcaggagaacccaggttatccatattctgatagttcttctattcttggtgagaacccccacataggtatagacatgattgacaacgaccaaggatcaagtagtcccagtaatgatgaggcagcaatggctgtcatcatgagcctcttggaagcagatgctggactgggtggccctgttgactttagtgacttgccatggccgctgtaaacactacatgttgctttggcaacagctatagtatcaaagtgcattactggtggagttttacagtctgtgaagcttactggataaggagagaatagcttttatgtactgacttcataaaagccatctcagagccattgatacaagtcaatcttactatatgtaacttcagacaaagtggaactaagcctgctccagtgtttcctcatcattgattattgggctagctgtggatagcttgcattaattgtatattttggattctgtttgtgttgaattttttaatcattgtgcacagaagcatcattggtagcttttatatgcaaatggtcatttcagatgtatggtgtttttacactacaaagaagtcccccatgtggatatttcttatactaattgtatcataaagccgtttattcttccttgtaagaatcctttactataaatatgggttaaagtataatgtactagacagttaaatatttttaataaatgtttcccttgttctat

SEQ ID NO: 1570 - DNA, 3259 bp, Homo sapiens
aataattagatcaatttatcttctacaatagtgcaaaatattcagttcatgtaatttattttctgtaaaccacgtcaattaagacaggcagagaaggaaacagtcaggagcatgaggaattgtcaggttgccaatattaagacagttgtgcctagaaggaaaaaaaacacagaatatctgagcctgtcagtactgcttgcaccctgggacctccgcctgtgtctgcagagcctgagaagagagggcttgcacaagccggtctctaatttgtttcccaggcccagctgccgccaggctccagggcagaactgtggtgggttcaggagactccagggcccacagggtcagttctgggctttgcttttttgtgcagctcttgccccgagcgctctccaggtgacatgtcctctcatcccggggctcttcagagaatcgcaggaatgtgttccacccgctccaaaataagaaatgtgcatgcatctgccccgcctcgcaccaatattgggtacagctttgaaggggtcagaaattcctcaaaacttattcaacaggatactgtggtgcagtgagttccctaccaggttacttagggctttggtccactgcgtgaatcctgaaggctgagagcgagccaaggtcacagtgcctggcggaggagcaggtatcccaggaacccggagctagcctgagaaccgcccaggacccagcggaggagcaggtatcccaggaacccggagcctgcccgagaaccacccaggagagcagtcccatatagctcatggccggcaacgagacagggagcacaggtggaagcagctcgaaagctgcggatcttagcgctgtcctgaggctgcccaggcaggctgtgtcccagccattctttcatctcttgctccctcccagtttgggccagggccagggatggaggaaactgaattccaaaatttttattgtaaaaaaaattaattttcttcttctgcataacaaatgaccacaggcatagtggcttgaaacgacaccatttgccgcctcgcagtgtctttgggtggggattcagtacagcccgggctgggacctctgtgtggggactcacgggccgccagcagaatgctgttcgtgtggccgcaggacagaggctccatgtccttgctggctgatgctgtggccgctgccacacctcaaggcaccaagtcccagccccgtggcccctccaacctggcagccgacctcagggtggcagaagaatcttctggtatggagaacctctttttaaagatgtcatttgactccatcaggcctgcccaggtaatctgcctgttgttaaaagtcaaatattacaataacaactgccaagcctcatcacaggtgatggccccaggtgtgtgtgaacatgagcacatgctggaggggaggccatgacactgggcaggggccagggggagagtcggggaaggccctgccttcgggagctcagccatgaccccgggcaggggccagggggagagtcggggaaggccctgccttcgggagctcagccccacctcgttgcctcagcacaggcctctgttccactgcagctgtatctggcacagtgagttgatgaggggctgcccccttcccttggggggcttgaggccaggatccttgtaagggattgaatgaggacacaaaggaagggagacggacagacagggagcagcctgccagtggaagcctcgatggtcaccccctccccaggatggtcagtgcacaccggagatctcgatggtcaccccctccccaggatggtcagtgcacaccggagatctcgatggtcaccccctccccaggatggtcagtgcacaccggagatctcgatggtcaccccctccccaggatggtcagtgcacaccggagatctcgatggtcaccccctccccaggatggtcagtgcacaccggagatctcgatggtcaccccctccccaggatgctcagtgcacaccggagatctcgatggtcaccccctccccaggatgctcagtgcacaccggagatctcgatggtcaccccctccccaggatgctcagtgcacaccggagatctcgatggtcaccccctccccaggatgctcagtgcacaccggagatctcgatggtcaccccctccccaggatggtcagtgcacaccggagatctcgatggtcaccccctccccaggatggtcagtgcacaccggagatctcgatggtcaccccctcctgttcctgtggtgagggtgggtgaggaagtccaggaaccacagtccagctgcagccgaagccctggaagccaaagactggggcccagccagaggccacttgggcacgaagaagggcagcagcagccggagctaagaatggcctctagaaaggggccgtgccagcctctctctcaaacgtggtccgtggggatcaggtggggcccctcctggatgccccttgggggctggtgggcccagccttgtatttggacattaaaggcaaaggaaacgccagccagtcaaaccacctctgccattcttcctcttctgggagtggctggggttgaaggcagtgctcgtgttcatggccctttcactacgtctgatttgtcgcagatccaacagcatctgggatcttcctctgaaaatccctctcattatcgcaaggaattcctgcacattactcagtcctttaatttaacatggcatgacatttatatcattctaatctccaccctcactcctgatgaaaagggcgcccctggcgttcagctgaaacccacgcagatgaactccataatcaagcccctgtacaaaatccagtggccaatgatgcatttccccacagagacccatactagatttaccatcagggagacaatggcaccagtctggactggcggagcaggagcatcatcatcttagacaagcatcgcccctgtgagttctacttgattcaaaactgcctaaatccagccccaaaacatcagcctaatggctaatgtcagtgtgaccttaaatcacaaatgaaacctctgaccagagacatgccaaccccgagataacctcccctccgaccagagacactccagtcctgcaataagactctcctccacacagaaacattcctagcctgcaataagctccccttcccggaactcttaaatacccttagtctccaagagaaaaggctcctgaccgaaatcgggcagaagcccctctcaggtttattctccaaaataaacctgtcttagactgtt

SEQ ID NO: 1571 - DNA, 3952 bp, Homo sapiens
gagagtggctgcctgagacagctgccacaggctgctgcagagcgtgcagcttttgcaagggactgaattcccagccagacaccccttggactcttttttggaggggtggggagcagagagaggagggagttgtcttatcttggaagatccgagctgggtttcatctcctttttgattttgagtagttccctccacgagaactgacttccaggtgttcaccaagggaaacaaggtggttctcacactggaaatgaggaaggatgacagtttttgagactgactgttaacggctcagaggtgcccctcattcaaaatgccttttaaagcatttgataccttcaaagaaaaaattctgaaacctgggaaggaaggagtgaagaacgccgtgggagattctttgggaattttacaaagaaaaatcgatgggacaactgaggaagaagataacattgagctgaatgaagaaggaaggccggtgcagacgtccaggccaagccccccactctgcgactgccactgctgcggcctccccaagcgttacatcattgctatcatgagtgggctgggattctgcatttcctttgggatccggtgcaatcttggagttgccattgtggaaatggtcaacaatagcaccgtatatgttgatggaaaaccggaaattcagacagcacagtttaactgggatccagaaacagtgggccttatccatggatcttttttctggggctatattatgacacaaattccaggtggtttcatttcaaacaagtttgctgctaacagggtctttggagctgccatcttcttaacatcgactctgaacatgtttattccctctgcagccagagtgcattacggatgcgtcatgtgtgtcagaattctgcaaggtttagtggagggtgtgacctacccagcctgccatgggatgtggagtaagtgggcaccacctttggagagaagccgactggccacaacctctttttgtggttcctatgcaggggcagtggttgccatgcccctggctggggtgttggtgcagtacattggatggtcctctgtcttttatatttatggcatgtttgggattatttggtacatgttttggctgttgcaggcctatgagtgcccagcagctcatccaacaatatccaatgaggagaagacctatatagagacaagcataggagagggggccaacgtggttagtctaagtaaatttagtaccccatggaaaagatttttcacatctttgccggtttatgcaatcattgtggcaaatttttgcagaagctggaccttttatttgctcctcataagtcagcctgcttattttgaagaggtctttggatttgcaataagtaaggtgggtctcttgtcagcagtcccacacatggttatgacaatcgttgtacctattggaggacaattggctgattatttaagaagcagacaaattttaaccacaactgctgtcagaaaaatcatgaactgtggaggttttggcatggaggcaaccttactcctggtggttggcttttcgcataccaaaggggtggctatctcctttctggtacttgctgtaggatttagtggcttcgctatttcaggttttaatgtcaaccacctggacattgccccacgctatgccagcattctcatggggatctcaaacggagtgggaaccctctctggaatggtctgtcccctcattgtcggtgcaatgaccaggcacaagacccgtgaagaatggcagaatgtgttcctcatagctgccctggtgcattacagtggtgtgatcttctatggggtctttgcttctggggagaaacaggagtgggctgacccagagaatctctctgaggagaaatgtggaatcattgaccaggacgaattagctgaggagatagaactcaaccatgagagttttgcgagtcccaaaaagaagatgtcttatggagccacctcccagaattgtgaagtccagaagaaggaatggaaaggacagagaggagcgacccttgatgaggaagagctgacatcctaccagaatgaagagagaaacttctcaactatatcctaatgtctgagaggcacttctgtcttctccttactttagaaacagaaagtatccatacctattgcctttcttgtagcccagcttgccagaggtccaaatattgggaggggagaagatctaaccagcaacagggaaaagagaaatattatctttcaatgacatgtataggtaaggagctgcgctcagttgataacatagttgataatacatattttttgaattgacagttgacccttctctcaaagagctaaacttattcagaaaggaatgactagaagaaaaaggagacaataccatgttgttcaaagaaacattgaaggaaattgggatgtttggccagaaggaatgtaaacagtagtagtagctgccaccacatctctagggtagccatgcagaggagggcttcatattcccaataaaccccacgttgtggcaggtgctttataaacactcttatttaatctccacacctttatgacacacatttcttatccccattttacaaccaaggcatctaaagcaacaagaaatgaacttgcccaaggtcatctgccagggtcagtgctgagactgttgaagctctcaataggtggcagttttagggaagatttccattcagtgtagggaagacatttgtaataatgaaaactgaaaatggagtaattgtgagtaactcaccactttagcaggtgttggggaagggaaacatttgggttgatgaggcagaggggattcaaatgtgtgagaggctagattcaaagaccctcagtgttctatgttatctgaagagtcaaatggttttgtgactccatagtttttaaagtaataagggtcaaagactacatcagagattcaaataggtttttaaagaaaagctaagcaagagagccaaatttttagaaatctgatggtcaaaatagctgaaagcagtaaacaagagattggctattaaatttcaactttccataatattaagaatgtagctaaatgatgtcccaaactacttacaaacttttaagacatttaataatttaagaagtaggttcatgtgttttcttaggtaaagttcttctgaaagaattttctatttttaaaaaatgtatctctttagccttttctgctggagattatattaggaagtttcatcagattgtataaaattatgattttgtatcaaaagtattcatgatgactctatttggaatgatattcagggaaatcacaataatatagcagtagttatacagagaaatactacaatgaaaacatttggggcaattagacctacagttactgttgaaaaattcacctttgattgcataaggcaattacatggatacttttagatatatttaaaattttaacattggcatctaaagtgttatttgaaaataaaattattttcctgttcattgattttaaacattttattcctactttcagaagaaaaatataatacggaaaaaattatagatttacttgtagcttattattgtaaagtgttttttttttttttttttttctaatttctcccacatgtatttctggtccccagtgatactagctgagttgtagtgtattttataaatggaataatcttggggaaaaattgcgattcttcattaaataatattctttatgtcactagcatacaatttatgttagtagacatctttaaatctctttaatgagtgaatccatgcaagccccataaaacagttcctagcatgcagaaaatgcccacgtaaatagctgtcatcatcattatcttttaacattttgggggactttccagttgaaaagaaaacatgctatgtcatttttatccattatccctggaacttattgtgaaagttgtgctgttttctaagt

SEQ ID NO: 1572 - DNA, 3696 bp, Homo sapiens
gttactagcagtcctggtgtgcttgttgccggggtaggcgcaacctcgcactggaggcctggcttgaagccagtgcatttgcatcagagcccaggcagggactgtccataggaagccacatggggcaatgactcatccaaggccagtcggtgatagagacctgaagagcaggttgaaagtgggagagggaggtctgtgtctgcagccccatgctttatttctgcaggaagccctcccgggaacacccagcagccgctgcctggcctgccactggcttccccgccaggggtcccgcccgtctccttgcacacccaggtccagagtgtggtcccccagcagctactgacagtcacagctgcccccacggcagcccctgtaacgaccactgtgacctcgcagatccagcaggtcccggtcctgctgcagccccacttcatcaaggcagactcgctgcttctgacagccatgaagacagacggagccactgtgaaggcggcaggtctcagtcccctggtctctggcaccactgtgcagacagggcctttgccgaccctggtgagtggcggaaccatcttggcaacagtcccactggtcgtagatgcggagaagctgcctatcaaccggctcgcagctggcagcaaggccccggcctctgcccagagccgtggagagaagcgcacagcccacaacgccattgagaagcgctaccgctcctccatcaatgacaaaatcattgagctcaaggatctggtggtgggcactgaggcaaagctgaataaatctgctgtcttgcgcaaggccatcgactacattcgctttctgcaacacagcaaccagaaactcaagcaggagaacctaagtctgcgcactgctgtccacaaaagcaaatctctgaaggatctggtgtcggcctgtggcagtggagggaacacagacgtgctcatggagggcgtgaagactgaggtggaggacacactgaccccacccccctcggatgctggctcacctttccagagcagccccttgtcccttggcagcaggggcagtggcagcggtggcagtggcagtgactcggagcctgacagcccagtctttgaggacagcaaggcaaagccagagcagcggccgtctctgcacagccggggcatgctggaccgctcccgcctggccctgtgcacgctcgtcttcctctgcctgtcctgcaaccccttggcctccttgctgggggcccgggggcttcccagcccctcagataccaccagcgtctaccatagccctgggcgcaacgtgctgggcaccgagagcagagatggccctggctgggcccagtggctgctgcccccagtggtctggctgctcaatgggctgttggtgctcgtctccttggtgcttctctttgtctacggtgagccagtcacacggccccactcaggccccgccgtgtacttctggaggcatcgcaagcaggctgacctggacctggcccggggagactttgcccaggctgcccagcagctgtggctggccctgcgggcactgggccggcccctgcccacctcccacctggacctggcttgtagcctcctctggaacctcatccgtcacctgctgcagcgtctctgggtgggccgctggctggcaggccgggcagggggcctgcagcaggactgtgctctgcgagtggatgctagcgccagcgcccgagacgcagccctggtctaccataagctgcaccagctgcacaccatggggaagcacacaggcgggcacctcactgccaccaacctggcgctgagtgccctgaacctggcagagtgtgcaggggatgccgtgtctgtggcgacgctggccgagatctatgtggcggctgcattgagagtgaagaccagtctcccacgggccttgcattttctgacacgcttcttcctgagcagtgcccgccaggcctgcctggcacagagtggctcagtgcctcctgccatgcagtggctctgccaccccgtgggccaccgtttcttcgtggatggggactggtccgtgctcagtaccccatgggagagcctgtacagcttggccgggaacccagtggaccccctggcccaggtgactcagctattccgggaacatctcttagagcgagcactgaactgtgtgacccagcccaaccccagccctgggtcagctgatggggacaaggaattctcggatgccctcgggtacctgcagctgctgaacagctgttctgatgctgcgggggctcctgcctacagcttctccatcagttccagcatggccaccaccaccggcgtagacccggtggccaagtggtgggcctctctgacagctgtggtgatccactggctgcggcgggatgaggaggcggctgagcggctgtgcccgctggtggagcacctgccccgggtgctgcaggagtctgagagacccctgcccagggcagctctgcactccttcaaggctgcccgggccctgctgggctgtgccaaggcagagtctggtccagccagcctgaccatctgtgaggaggccagtgggtacctgcaggacagcctggctaccacaccagccagcagctccattgacaaggccgtgcagctgttcctgtgtgacctgcttcttgtggtgcgcaccagcctgtggcggcagcagcagcccccggccccggccccagcagcccagggcaccagcagcaggccccaggcttccgcccttgagctgcgtggcttccaacgggacctgagcagcctgaggcggctggcacagagcttccggcccgccatgcggagggtgttcctacatgaggccacggcccggctgatggcgggggccagccccacacggacacaccagctcctcgaccgcagtctgaggcggcgggcaggccccggtggcaaaggaggcgcggtggcggagctggagccgcggcccacgcggcgggagcacgcggaggccttgctgctggcctcctgctacctgccccccggcttcctgtcggcgcccgggcagcgcgtgggcatgctggctgaggcggcgcgcacactcgagaagcttggcgatcgccggctgctgcacgactgtcagcagatgctcatgcgcctgggcggtgggaccactgtcacttccagctagaccccgtgtccccggcctcagcacccctgtctctagccactttggtcccgtgcagcttctgtcctgcgtcgaagctttgaaggccgaaggcagtgcaagagactctggcctccacagttcgacctgcggctgctgtgtgccttcgcggtggaaggcccgaggggcgcgatcttgaccctaagaccggcggccatgatggtgctgacctctggtggccgatcggggcactgcaggggccgagccattttggggggcccccctccttgctctgcaggcaccttagtggcttttttcctcctgtgtacagggaagagaggggtacatttccctgtgctgacggaagccaacttggctttcccggactgcaagcagggctctgccccagaggcctctctctccgtcgtgggagagagacgtgtacatagtgtaggtcagcgtgcttagcctcctgacctgaggctcctgtgctactttgccttttgcaaactttattttcatagattgagaagttttgtacagagaattaaaaatgaaattatttataatctg

SEQ ID NO: 1573 - DNA, 3381 bp, Homo sapiens
aggtgcagcgggtcccgccgtgtccccagcctgctgcgggcccgggaactcccggcggacctgcagaggggcgccccggcttctctgcgtctcagcccgccccgggggtgcggtctttgcggccaggctttcagcgcggaaaaagattggagggtcctagtcaccccaaagaggacaggcattagcagagccgcgggcggcgggtgcatggaaccggaatgtgctgcgcgccagcctggagcgctcggagcccggaggcctgccccggaggggaaaacgcggcggggcggccatgggccccggggtcctgccccaggtttgcttctcatttgtgctccatccaacaagagctcgtattccgtgtgccatgaactgtgtcaagggctccaagtgccagggctgctataacaaagtaccacaaactgggtggctccaagcatgtttattgtctcacagtgctgaagaaatctacaaggccatgctccctgtgagagaccagatgaagaggctgtggtggatcagggtgggaccagtacaattctcaacattcactatgaaaaagaagagctggaagtcttcacaagatccctgtgaagtttgcaggcatgtgcaggacaaaggaagagaccctcaactccaaaatctctatatctttactcctggaagtctttgaagttttgttgttccagagctgtgaccagaccaaagaactgtgatatttttttctcttaactatgctaggctttttgttgttgttgttttttaaaactaaaggagttctctccacagaccttctgcttctttccaggtcacagaactctgtatgtgggagttcggatgccgcttggccggcagagccatcggcatcaccgcactcatggccagaagcaccggagacgagggcggggcaaaggagccagccagggggaggaaggcctggaagccctggcccacgacacaccatctcagcgtgttcagttcattcttggcaccgaggaagatgaagagcatgtgcctcatgagctgtttacagagctggatgagatctgtatgaaagagggagaagatgctgagtggaaggaaacagccaggtggctgaagtttgaagaagatgttgaagatgggggagaacgctggagcaagccttatgtggcaaccctttcattgcacagcctgtttgagctaaggagctgccttattaatggaacagtcctcctggatatgcatgcaaatagcatagaagaaatttcagacctgatcctggatcagcaagaactgtccagtgacctgaatgacagcatgggggttaaagtgcgggaagcccttctcaaaaagcatcatcatcagaatgaaaagaagagaaacaacctcattcccattgttcgctcctttgctgaggttggcaagaagcagtctgatcctcatttgatggataaacatggtcaaaccgtgtctcctcagtctgttccaactacaaatcttgaagtaaaaaatggagtgaattgtgaacatagtcctgtggatttaagcaaggtagaccttcatttcatgaaaaaaattcctactggggccgaggcctccaatgtcctggttggagaggtggatattttggaccgtcccattgttgcctttgtgaggctgtctccagctgttcttctctcaggcctaacagaagtgccaatcccaacaagatttttgtttatcttattgggtccagtagggaaaggtcagcagtaccatgagattggcagatccatggccaccatcatgacagatgaggtatgtgcaacttttgcttcagtcttccatctcataaatatttattgaatatttactctgtgccaggcaatatgctagttattggggataaaatactttccattgcaatatctgctgggaagtagttcagggtacttctctgagagcccagtgtggaaggaccaagctctagaggatttttcttcctatgttatctctccttttttgagtaatcaagaatgcagagaaatctttttctggggaaactattattgccaagtaggatatatagagaaatatattaaggttggcttaactttcaagagaagatggttaattaaatacattcaagctatttacataaagaaacctcactcctgttccactaaatgagaccagtttgtataaggtcatgggtgtgacctcaggcagtgtagtgtgaatgtcttgactagtctgtaccaaaacaaccagatattttgacattttgacattgaacccacagtgcatactctggtaaggactgcactgctcggtaagctgcaaagtagggctttcaaggcatatgccttaggcggcagagggaggtgtggcctgttttttatcagctttctttgattgagaggcttaattcaggaaggaccttcattagtaattccatccagtgtttccgacctttaagatcaagaaaatttccctctcaacgtgggaaagctgattaaaaattttttttttcatatatcttgcctttccttccatcctttgtggagataacataattgtacaactttagactcatgtcttatctcttcttatactagcagacatgtatttagttcttttaatgcatctcatttccacgcttgttttttaaatccttttatccttgcacttctctaagtgctaaagttttctgcatctcagatccccatgacagagataaaaatcaacaggttgtattcatttttcaccatatccattggtgattgtttcatgtaaagttacttttaactttcctgagggttttctcttctctgtagatttttcatgacgtagcatataaggcaaaagagcgagatgatctcctggcggggattgatgagtttctagaccaggtgacggtgctccctccaggagagtgggatccctccattagaattgagccacccaaaaatgtcccttcccaggtaatgtatgcacatcagccaatgtggctattgtcacttactgactgcccaccatggacaaagcaaagaccatgtgggtatatgctaaatatatcaagatgcagctctgttttggtgcacctagaatatcaaaacaataataaaaatgaatctgggctgggtgtggtggctcacacctgtaatctcagcactttgggacgccgaggcaggtagatcacctgaggtcaggagtttgagaacagcctggccaacatggtgaaaccccatctctactaaaaatacaaaaattagctgggcgtggtggtgggtgcctataatcccagctacttgggaggctgaggcaggagaatcgcttgaacccgggaggcggaggatgtagtaagctgagatggtgccactgcattccagcttgggtgacagagcgagactccacctc

SEQ ID NO: 1574 - DNA, 3133 bp, Homo sapiens
ctgtatcttttcctcctgtgtttaatgtttcactagggagaggaaataaagcagaaggaacgtgtgaagctctgtgtctcagacggggccctcccgtcgagaagctggtagtcagtgagtgagaacaagagaacaagaacaccctgaacagtcctggttgggatggtgtccacattcatgttctgcggttcttgaacacacggatgcctctgggccacctgtccttttccgagggtgtgggtgggagtggatcctccgggcgcaggtgccaggcaggtgcaggcgggcggtcggccactgctgctgctcgtccctgccagtgtctgggcctgaaggggctccctccaagcggtgccttcctgcggcttagaagggaaagcgccagagagggcaggctacagtgcttcacacccttcgccacggctgtgaaactggagatgggtgggttttgtatgttaatttttttttttgagacggagtcttgctctgtcacccaggctggagagcagtggcgtgatctcggctcactgcaagctccgcctcccgggttcacgccattctcctgcctcagcccccccgagtagctgggactacaggcgcccgccaccacgcctggctaattttttatatttttagtagagacagggtttcaccatgttaaccaggatggtctcgatctcctgacctcacgatttgcccgcctcggcttcccagagtgctgggattacaggcgtgagccaccgcgcctggccacccagctaagtttgtatttttgttggagacggggtttcaccatattggccagactggtctcaaactcctggggtcaaatgatccgcctgcgtcggcttcccagagtgctgggattacaggtgtcagccactgcgctcagctgggagatgaattttcatttaatgacttaactttttgttagcacaggttttgtgtgtgtgtgtgtgtgtgtgttttgttttttgttttgtgtttttgaaacggagttttgctctgtcacccaggctggaatgcaatggcaccatcttggctcactgcaacctctgcttcctgggttcaagtgattctcttgccttagcctcccgagcagctgggattataggcgtccaccaccacgcccagctaatttttgtatttttagtagaaatggggtttcaccatgtgtggccaggctggtctcgaactcctgacctgaagtgatccacccgcctcgacctcccaaagtgctgggatgacaggcatgagccaccgcacccggccaacacagatgtttattgatcgtggaggatacattgtggaaaatgtttttctctcttttaccatttttgggaagagggataggtaagtgcagggagtttgtgctgaaacagcgcctggcaatttttcagaaatgaatttgatattgcgctccacctttgagctgttcacacctgtggctacccctggaaagcgctggggttgttgatgcttttggctgcccggcttcctgaggtctcgctgctttttggggaaagatgactggcttccctgtgggacgcttttgtctgacacgtgatgatgtggtcctgcctgccactgtgcaccatcccaggtattgaattttgaccttttcttttcaagtttctgtgcttagtgtttttaatgtttacttttgccacttacaataatatcaccaaaataatatgcatagagttttggaagaaacatagaaaacatgagcagaatgagacaattccttgggctgtagtttggacccaactgaatcctgagtgctctgtggctgacgctgtctacccgtgggagagacacactcaggagtggccgtttggccagaaaagaaggtcatggcccctggcctggcccccgccctgcagggacacagaagccacaccatttgcaccatccacgccttgctccagaaggcctggccgccttctccctgggggtgattcaaggatttggtctcggaccagacccccctccacagctgcccggccccagacccatctcttggattgagggtgtgtgggctggaaccagtgggtcactgtggcagcttcatctgagccgaaggtgtgggtcctctgtggctgtgcgattgacctcgatgggaaggagcgttctacccattctccttgttttcagtgctgcggtatcagtcagtgatctgaggaaatcctgtaggggaaggcaggctgcagtgaaaacaggagctggtgaaaccgagccctctgcatctgcgaatgtgccctaggtgctgctgctggggacatggatgccaagcggaggcctgcgtggcctcctgagcagcagctgaccgcccgtctcatgctggacgggacccctgggcgggtggacatgagaccactgttggccagggacgccgtgcggaggcctacgtggctgcctgagcagcagctgaccgcccgtctcactgttggccagggctttgtggcgtgggtgttttccagtctgcctggagcagcgagaagcagctgtgcagactggtggcggtgggagggtttgctgggactgatggggacaccggccagcttgtctggtgtccagcagccctgccggacttggcctcctgtcctgtcgttgggagccctggctggggctgctttgagcaatgacgctggcccagagcagcttcccacatgaccccagagccgagggtctgccctgtcctaggttaggtcttcatggtttagagtaaaaccgtgagggatgttaattatgggcattgaagacttaaggttttcttaaatttttagtgagcagtgattggccttcaatacttgtgctgagaggaattttaagccaggggaagtgtaagaaaatgttcccattcaggagagattgtgttggagtttctttcttcctctgtatgtattttgtggtgtccacctttaaccacgtttcatccaaaacgatgatgcagctttaacatgaatgttacatttttattttcaaggaattattatctatgttccctttgtaaaggaaagataatgttgtaaatctttttattagataatgtaaagatgtatatcagtatttttggatcatgttatagattatggatatattgtttaataaataaagtattttttggaac

SEQ ID NO: 1575 - DNA, 3582 bp, Homo sapiens
tgctcacctcagccctccaaaatttaagttttgatatgtgttacatccatgaaatcatcaccacaatcatgataatgtgtcttgaattctcagtatttatttatttttatttttttgaggtggagtcttgttctgtccccagactggagtgcagtggcgcgatcttggctcactgcggcctccgcctcccgagtttaagcgattctcctgcctcggcctcccgggtggatcggattgcaggcgtgcatcaccatacctggataatttttgtatttttggtggggacggggtttcgccatgttggccaggctggtcttgaactcctgacctcaagtgatccacccgccttggcccctcaaggtgctgggattacaggcatgaaccactgcgcctggccaaattatcagtatttaaatttaaataaaatgtaaaaattcattcctcagctgcactggctggacagccacacgcagccagtggctactggatgggacaacacattcaaaaccattatcctgttttatcttcaaagcatttaccactgtctgactagcttctccaacgtgcgcccttcttgctctcatatcatgtgtcttattttcttcttattccttctgattggaaatgatctcatttgtgtgtgtgtgtttttccctggtgactggttgtcttccctggcagaatatgagcccacccaagctggtgcttcactggtcgtgttcacagtgtgtctccaggggcaggttcataagggcactaggaggaggttgtgaatgaagggaggtgatgttcacactaagacctgaaaaatgtgtccagttaataagtggacagggacaaaggtcgttagacaaagaggagtgtaggtggcatcagttaccaggggaggaaatgttgattcaggactgagaggcaaagggacctggctagaggacggggtcccagaaggtggtttaaggactggtgtggacacacacagttctgttgtctgcccagcggaggggcctcacggggggctgttgggagccagattgtcagcttttggatttaccagctgtgggtggcagtgggcgtgtaactcagcatcttgctgcctcagtttctctcatctgtaaagtggggataataacatttacctcataaagttcctgtgaggattcgatgacttgatacatcagttgcttagcgcagggctcagcactcagtacatgttccctgtcaggaaggcagggaggcctcactggcagcatcaggacatgggacatcaggacatacaccatggctctcagggaaaggaaagagaccctctcccaggtgtacaagctcgattctaaacctcatgggaccctgcattgtttgctcccccattcattcactagtccgtgcgtgtactcagtagtggcataagcagactgctcgggtcggacctgaattagcctcacccactctcctcctacactgtccctccccagggcacattcgcctcccaggtgatgctggagggggacaagttgaaagtggagcgggagatcgatgggggcctggagaccctgcgcctgaagctgccagctgtggtgacagctgacctgaggctcaacgagccccgctacgccacgctgcccaacatcatggtgagcccctggccagcgggcactgagggcctgggggtggcaagcacattgccagcccagtgccccccggtggtcgcacgtggggagggaaggatccaaaggaggtctcgtgcacaggaagccgtcacctggagtttggctgatagagagagtttgctgggtcatctctgccaatactgagagttcatggaggctgctttggctagcagggagggcttgctggtatctaggccagtagaaagccttcgctgggcagcagaaggtgttccctttgtcattccagccagtggaacaagttcactgggtcatctaggttcattagggagggtccccttggtaatttttgccaatgtgaagttaccatgtagatcatcttagttaactaggaagggtgcacggggtctcttggctaacaggtagagttcactaatcatcatggccagtaggatgggttcgctgggtcatcttggccaatattaacagtttagtgggtcatctccgccaatagagaatattcatctcagccaacagggagggttcactggatcatctcaactaatggggagggttcaatgagtcatttcagccattacagagtgttcactacatcatctcagcctatagggagagttcagcgcatcatctcagtctataggcagggttcagcgcatcatctcagcctatagggagggttcagcgcatcatctcagcctatagggagggttcagcgcatcatctcaacctatagggagggttctgcgcatcatctcagtctatagggagggttcagcgcatcatctcagtctatagggagggttcagcgcatcatctcaacctatagggagggttctgcgcatcatctcagcctatagggagggttcagcgcatcatctcagtctataggcagggttcagcgcatcatctcagcctatagggagggttcagcgcatcatctcagcctatagggagggttcagcgcatcatctcagtctataggcagggttcagcgcatcatctcagcctatagggagggttcagcgcatcatctcagcctatagggagggttcagcgcatcatctcagcctatagggagggttctgcgcatcatctcagcctatagggagggttcagcgcatcatctcagcctatagggagggttcagcgcatcatctcagcctatagggagggttctgcgcatcatctcagcctatagggagggttcagcgcatcatctcagcctataggggagggttcagcgcatcatctcagcctatagggagggttcagggcatcatctcagcctatagggagggttcagcgcatcatctcagcctatagggagggttcagcgcatcatctcagcctatagggagggttcagcgcatcatctcagcctatagggagggttcagcgcatcatctcagcctatagggagggttcagcgcatcatctcagcctatagggagggttcagcgcatcatctcagcctatagggagggttcagcgcatcatctcagcctatagggagggttcagcgcatcatctcagtctatagggagggttcagtgcatcatctcagcctattgggagccttcagcatgccatctcaaccaaaagtccagagggttcagcccatgggactggtctgcaggcctggcacccatgggaagggcttcctgatttggttacctaaaggaggactgctgcagtagttgggcctcccagggcctcctagccagcaggagttgtccacaccaggtgtggccctgtgagaagtttcgcgtgtcctggccagtgggtgggtccaagctctctgtgatcagtgtggaggacccgccccagcgcacggccggcgtcaaggtggagaccactgaggacctggtggccaagctgaaggagattgggcggatttgagcccctcccagagatggcaataaaactgactctcaac

SEQ ID NO: 1576 - DNA, 3280 bp, Homo sapiens
tttcatctgcagagtgggtatattgttttctactttgaaggatggattgtggggaccaaaggaggtaacgacataaggctcaggtcagagtctagcacaataggtgctccacgaacatgattttctctagtccttaaattcatgctctctctgttgtggagcatgtgaattcattctttcatacctctttcatcatgtaacttttaatccctaatgaatggaattacttactgtagtgtttctgtgggaaaatgttcaaatgccagaaagccatctcttctccccacattcccagcctcacactgataataaaggggtacctccctctctcctcaaaacattgcacccccttggggaatggagagggaagggcaagtgagagcgctccagtggacagatgggggaaggcagcagctctgtgtttacagaaattgttaaattatttacacaattttggtgtccctaccagatccagagttggggatactgcaagaatggccttttttatgttacaaactggaattagatgagtcatttaattgaagcttaagtttttgtagaagagtaatactcttttcatataaactggtggtaataaaagctttattatctagcagtaggcataaagttttcttttggtttagcccaattattagtgtatttaatccacccccttgctaccccctgttagttatcttagattaaaaggtcaattctagcctggaacatacgtcttcttttaaataatttggcatatttaaattaggaggacatgaagtggcagaatttgagttaaacatttaaatatattttgtgcccttgattatattagacacctgctgctttggaaagtcacatgtttagcgaaaacgtactttggttgaaatgttaaaataaaaagacctagcaaaggtaaccttgtagttcagatatgacagtttgattttggctaggactggaatgagtggtttctgtgtagccatttcttcctccctgtgtagagagccttgctgatttctaaatcttcgtaaaaggaaacacccttgctgtggaggcttgctcaggggagctgggagtggaggcgggctcacacatgagcgcatgtgcaggaacgtttcacggtgcaaaggttaaaggcgggtgtgggcagaggggaacctaccacaggtcccattctggacagacgtgcgcagttgtggtgatgtgcaaacagctgtactggaactggatatccactttcacatcgggcatccgcctagaagagcagcgggcagctgatgggaagaccctcaaacaacagacagtgccgcagcagaaagttggagtgactggtccccctgatccacaagtccgctgtccctctgtcattgagtttgggaagtatgaaattcacacctggtactcctccccatatcctcaagaatactcaaggctgcccaaattgtatctttgtgaattttgtctaaaatatatgaaaagtagaactattctgcagcagcacatgaagaaatgtggttggttccatcctcctgccaatgagatttacagaaagaataatatttctgtctttgaggttgatgggaatgtgagtaccatttattgtcaaaacctgtgtcttttggcaaagttgtttcttgaccacaaaaccctctattacgatgtggagccatttcttttttatgtactaacacagaatgatgtcaagggctgccaccttgttggctacttttctaaggaaaagcactgccaacagaagtacaatgtttcctgtataatgattcttcctcaataccagcgtaagggctatggcaggtttctcatcgatttcagttatttgttatcaaagcgtgaaggccaagcagggtctccagagaaaccgttatctgatctgggtcgtctttcctacatggcatattggaaaagtgtaatattggagtgcctttatcaccaaaatgacaagcagatcagcattaagaagttaagcaagttgactggaatctgccctcaagacatcacttccacactccaccacctacgaatgctggacttccgtagtgaccaatttgtgattatccgccgggaaaaacttatccaggatcacatggcaaagcttcagctgaatttgcgacctgtagatgtagatccagaatgtttgcgctggactccagtcatagtgtccaactctgtggtctcagaggaggaagaagaggaggctgaggaaggagaaaacgaagagccacagtgccaggaaagagaattagagatcagtgtgggaaagtctgtgtctcatgagaacaaagaacaagattcttattcagtagaaagtgaaaagaaaccagaagttatggctccagtcagttctacacgtttgagcaaacaagtccttcctcatgatagtcttcctgcaaatagccagccatctcggaggggccgctgggggaggaagaacagaaaaacccaggaacgttttggtgataaagattctaaactgctcttggaagagacgtcttcagctcctcaggaacaatatggagaatgtggggagaaatcagaagccacccaggaacaatacactgaaagtgaagaacagctggtggcttctgaggagcagccaagccaggacgggaaacctgaccttcccaagagaagactcagtgagggggttgagccctggcgaggacagctcaagaaaagccctgaggctctgaagtgcagattaacagaaggaagtgagaggctgccccgtcgctacagtgagggtgacagggctgtcctcaggggcttcagtgagagcagcgaggaggaggaggagccggaaagccctcggtcaagctcgccaccaattctcacaaagcccacgctgaagcgaaagaaaccatttctccaccgaaggaggagagtccgaaagcgcaaacaccacaatagcagtgtagtcacagaaactatttctgagaccactgaagtgttagatgaaccttttgaagattctgactccgagaggccaatgccaagattagaacccacgtttgagatcgatgaagaagaggaggaagaggatgaaaatgaacttttccctagagaatacttccgtcgtttgtcttcgcaggatgtactcaggtgtcagtcctcttctaagaggaagtctaaagatgaagaagaagatgaagagtcagatgatgctgatgacactcctatcttaaagccagtatctcttttgcgaaaacgtgatgtgaagaattctcctcttgagccagatacatccacacctttgaaaaaaaag

SEQ ID NO: 1577 - DNA, 3103 bp, Homo sapiens
tttatttcatcaggtttgtgtagtttttcctgtagagatctttcactttggtaaaatttattcctagattattttttcctttggtaggtattgcaagtgagattgctttcttgatgcctttttcagattgataactgttggataaaaatgctactgatttctgtatgttgatgttatatcctaaaactttactgaatttgttcatcagttctaagaatgttttggtggactctttaggtttttttaagtgtaagatcatgttgtctgcacacaaagataatttgacttcttcctttccaatttggacacgccttatttctttctcttgcctaattgctctggcttggaattccagtactatgttggatagaagtgatgagagtgaacattcttatcttgttccagatcttagtggaaagtctttcagttgttccgcattaagtatgatattagctgtgggtttgttatgtatggcctttatcatgttgatgtatgttccttctaatccagtttgttgagagtttttatcatgaagggatgctgaattttattgaatgctttttcagcatctgttgaaattatcatatggattttgtccttgattctgttgatcatgtatcatgtttattgatttgcatgtattgaaccattattgcatatctgggatgaatcccacttgatcatgatggaatggtcttttttttaatgtgctgtggaattcagtttgctagtattttgtggaggatttcttcatttatgttcatcagagatattggcctttagattttttatgtgtgtgtgtggtggccttgtctggttttgttatcagggtaatgctagcctcatagatgaatttggaagtattccctccttcagttttttgaaatagtttgagtagacttggtattagttctttaaatgtttggcagaattcagtagtgaatccatcaggtcctgagcttttctttgatgggagattttttactactattttgatcttgttactcattattggtctgtttagattttctgtttctttctggttcaatgatggtaggttgtatgtgtccaggattttatatgtttcttctagattttccagttttttcggcatgtacttgttcacgatattgtctaaggagcttttgtatttctgtggtatcagttgaaatgttttcttttttatccctgattttatttatttgggctcttaatcttttttcttagtctaactacaggtttgtcaattttatattttcaaaaaactaacagtttgctttgttgatcttttatatactttttagtctcaatttctttttctttctttctttctttttttttttttttgagattgagtcttgctctgttgctcaagctagtctggaactcctgggctcaagcgatccttttgcctcagcctcccacataactgggactacagacatgcaccaccacaccaggctaatttctttttattttttgtagagatgggggtctccgtatgttgcctaggctggtcttgaactcctgggctcaaacgatcctcccaccttggcctcccaaagtgctggggttacaagtgtaagccactgcgcccagtctgatccttatttcttttcttctactaattttggatttgttttgctcttgatttttgagttctttaagttgcatagttaagttgtttatttgaaatctttctttttgatgtaggcgtttattgctataaactttccttttaatactacttttactgtatcccatattctgatatgttgtgtttgtattttcatttgtttcaagacatttttaaattttcttcttaatttctccattgacccatttgttattcaggagaatgttatttccatgtatttgtatagttttccaaaggtcctcttgttattgacttttaggttttttttttatagtcagaaaaagatacttgaaatgatttcagcttttttgaatttgttgagacttgttttgtgacctaacatatggtctatcctggataatgttttatgtgctgatgaggaaaatgtataatctgcagcagcagactgaaatgttctataaatgtctattaggtccatttggtctagagtatagactccaatccttctttgtagattttctgcttggatgatctgtctgttgttgaaagtggggtgttgaagtgctatactattattgtattacagtttgcctcttcctttagatctaatcatatttgctttatatttgggtaatactgcaatgggtatatacatatttactattattatattctcttgctaaattgactcctttatcattatatgatgaccttctttgtttctttttatggtttttgacttaaagtctgttttatctgatataagcattgctactcatgctcttttttggttttcatttacataaaatatctttttctatttgttcattttttgtctgtatctttataggtgaagtgagtttcttgtaggcaacatataggtgggtcttgttttttaatccagttagtcatgtcttttaattatgatgtcttttaattggagaatttagtcaatttatattcagtattattattggtaggtaagggcttactgtagccattttgttatttgttttctagttattttgtaactcctctcttcctttttttctattttcctttgcgattaaatgattttccctggtagtatgttttaattcattgctttttgcttttagtgtatctattataggtttttgctttgtggttaccattaggttcattaaaaatcgtatagttctaataagttatttaaaactgatatggctgggcgtggtggctcacgcctgtaatcccagcactttgggaggccaaggtgggcagatcactaggtcaggagatcaacaccattctggccaacatggtgaaaccccatctctactaaaaatacaaaaaaattagctgagcgtggcagtgcgcacctgtagtcccagctacttaagagggtgaggcaggataattgcttgaacccaggaggcgggggctgcagtaagccgagatcgcgccactgcactccagcttggcgacagagcaagactctgtctc

SEQ ID NO: 1578 - DNA, 2863 bp, Homo sapiens
ggttctgccacaaacaaactgcagtttgtgccctcagcaatgcccgtgagtatgtggtagttttcttcttctgtaagtcctgtgtttcatgtctggattgggcaccgtgtgcacatttgtactgtctcaacaaatggcttcttggaacaaagctgttagcctgggcctcactcttgaggcaccgtaacagtggtgcagaccccagatgagaaagttaggaaacagagccagtggtggtgtcccaatgcaccaccccgggtctgtgtggatggaaggtgcccaggtgctggagtgtgggcttctgctttccacccctgccagacttaggtgagctcccaaaaacttcccgtatgtcccgtggcaggggtaatggggcgctggggagaggggaaaggtcgactgggttctgggctggtgggaggctggggcacagcttggtctgagcagttcggtgggtgggccctcgtggtgggggttctgccaggcaggtggaacaggcaacaccaacacctgagcttgcccagtactcagggcttgatttgtcatactgatgcagggctggattggggctgacagcccctgggcactcctgatgcccgaagtgcccaggggctgtgagcccccatctagcactggctccttctaaggcaaagttatattcctgtagctgctttctctctgtgccttctgaaggctaagttgaacagaggaaactacagaaattgctccgaaacacattaccgtgtgcttttaaaacttaaaagctgtgtggttagcaaacttttaattgcaaaatgaggataactgaaaatggaaagtactggagttttaaaatcaagcagcgacttttgtcatggggatctggatataaaatgcgaagattagaaatggaaatcacctttgcagtagaagaaaaattgaagtcagaagtgctaagtggaaactataatcacttgttctaaattgccagttccttatttgcaaatgaataacctaggatcagtggtgaaagacatgactttttttcttatttaggtgtcgatcttaaatcagctcatgctgatttttggctcctgtttgccaaacttccctttctgagcccctgctgacccatgaacaccccctttgatgcatgagggtgaaaatgaaagcaggaaccatgggccttctgcttccttctcggggcctatttgctgtactgccgcaggctcccagggttccctggttgtgactcctgagactacagtggggttgtcctatgcagaaacctccaagaatgacagatcttagattaggttgcctttactttttctagaaagtggtgattgggaagtagccattccttccgtcccaccagcctccctgttttttcagagagcacaattgcattccatcctgtagttgggaattcccccccctccttttttttttaattgagacagagtcttgctctgtcacccaggctggaatgcagtggcatgatctcggctcactgcaacctctgcctcccgggttcaagtgattctcctgcctcagcctctcaagtagctgggattacaggtgcctgccaccatgcccggctaatttttgtatttttagtagagatggggtttaaccatgttggccaggtgggtcttgaactcctgacttcaggtgatccacccgcctcggcctcccaaagtgctgggattacaggtgtgagccactgtgctcagcttgaattcttgtattttctccagaccagtgtcctcacctttcaggatcctgctcacatatcacctcttctgggaggtcttaccaggttgcagtttgatgtccaggctatccccttagctttgtgacttcaggtaacttgctgcattgttctgatcttcagtgtcattgtctctgaaatgctactgatgctgccctgcctgccttgcaggactgttggcaggcctgattccagaagctctctagaactgtactgtgctggacagataggcagggggcttggcagggtaatttcttggttctagggtgtgtgtttggggagtatgtttggtggtcctgagagctgcagcatttcaggttgtttttctcactgcaggtcatttcatgggcaacaacacagtgctggatgttttgcggcgtgaaggctatgaggtagaacacgcccctgctggacgacccatccacaaagggaagagtaaaaagacctccacacggcccactctgtccaccatctttgctccaaaagtccctaccctggaagtaccggcaccagaagccgtatcctcagggcactcaacgctgcctccccttgtgtcccggcctggaagtgccgacacgcccagtgaggccgaacagaggttccggaagaagcggaggcggtcacagcggaggccgcgactccggcaattcagcgatctgtgggtccgcctggaggagagtgacatagtcccgcaactccaggtccctgtcctggacaggcacatctccactgaactgcggctccctcgccgtgggcattcccaccacagccagatggtggccagcagtgcctgcctgtctctctggactcctgtgttctgggtgctggtgctggctttccaaacagagacacccctcctgtaacgactggaagcaccaggctaagaacctgacccctcggacttgaagaatggccattcctgtactccacattctggtctagccttgttgggcccaatccagaagagactgctcttgaaaaagcggcccagtgttgattcttctctttccaaggaatgtgactttgggttatccaactgtgggggcaggtgtacagttttgtaacatagtgagttgtgtgaaaataaattataaatgagttgtatgaaag

SEQ ID NO: 1579 - DNA, 3378 bp, Homo sapiens
ttacactagacaatcttcaccttttcacatccctgttttctttgaccttattaaaaactttttaaaatatgtatgttttctcagcagaatttaatctcagcaatgctcaatagaattttttttttttttttttttgaggcagagtcttactctgtcttgcccaggctggagtgcagtggcacaatcttagctcactgcaacctccacctcctgggttcaagcgattctcctgcctcagcctcctgagagagcccagctaattttttaaatttttagtagagatggggtttcaccatgttggccaggctggtctcgaactcctgacctcaaatgatccggcctcccaaagtgctgggatttcaggcatgagccatcacgcccagcccaataggatattcttaacctggggtctatggaccctgagaaattctatacaaaggtatttgtattttttttttggtatctatagcttttttttttctttgcctccgctagcagcagggagggtattagctttgattgaatgtgtaactagaccagaggcattcccacccccacccccacccctgttcatctccagcccacaaaaaaaggttaagaacctctgctacagaaggtggtggtgaggatcatttaactttgtagatacctggtatagcactgagagtaaaaggaggagcaatggagaggggaggtcccgcagagctggagaccctaaaagctgaacctctaacaagctctgtaatcttaggcaagcaaattaacctctctaagccttaactgtaaaaattaggataatgatagttctgtactcagaaggaagttgtgagcattaaacaagatgattcctgtcaagttcttagcatagtgcctggcacagggatgcatcataaatataaaattctttagctgtcagcatcaatttcttctccatcattcctcacatatgttggagtgcacagtactatgtagacgctgctttcctgtctttaagacggatccgaatgcttgcctttcgcagatgaagatgtatgttgcagaggtggatgctgtaaaaatgggactagattagaagccctttctgtaaccttgactgaagaaaatacaaggtgacattgtttaaaggctctatcacttgcctttgtctagggctgctgttctcttctgcacatagtttgcggtcatgagtgtggcctttttactcctaaaatggcacaatgtgtcttcaaatctcaacagatgcattgtatttcaactctatcatgaaaggtagcttttgccattttttcctttttgtcaccaccatcatccatttttacttactgcatgtcccactgttccaactctttaaaaacgagagggatgatgccaatcctccacatgttagactgtaaaacacatctccttccacctttttctgtgttccttgttccctggacacatcagtatatgggcttgttctcacaagagtccactgagatgtaaatgttaatttaggaactgtattattgtttctccccaaaaaggttgctgatgtgctattccagtgtgtactaaatcactttttgcctcattattttaaagtttaaataaatgaatgtattaaatagtcttagtgtaagagtgcgttttcagtcaccataagcataatagccttaaaagtgctgttgtgttctatgacactgtgatactatttgtagcttttatccaaagatggtaagctcagtgcctcaggacttgaagcaggcagcccctaagcaactgttttttgtgtgagctgtgagtcccaggatacaagcctctcatcttcaaggtccccaaagagcagcacagctggtagctgtggatttttaggctgccctcctgtaaggtaaatggtcttttccacccactcccttgttgatagagtgccttgagagaaaatgaagacactagagtgctggtctcagactgcgctgaggcatcgcctgttctgtaagaaaaagcaaatgaagattcatgtgtattacaactgtttctcctttggaatcacaggccttttttaaatagagggggaggaggggatagtcctagacctgaaaagattccttcttgtaatataaggagagctgtgagctgtggatcaaaatgaagaggagtgaggggagtatgcagcgttgcctgtggctccagctgagctgggagctggcggcttttcctgggaactgtatgtggtgcagcaccttgggacagcagtgtctcttagtgtcttccacacgcccccctgggaaataggctttctttgcagacagggactttcccatttaagtcagctaacttttctctaagatgaatcgttttcattctgggaagcatgttggtagatgtcataccaggaaaataaccatttcagttggctgtaattttgccttttggctatacacattgagcataattatttagggtcttcatctttttcctttcattgtccattctttcattttgtttttttactactgctacaaccaccaccactgccaccatcatcttcttgcaaatggctaagcagtgtctgcattattctaccttcacccagtaaactgagtagaatagatcttctgagccctgttcagaagcagctaaaaccgggacttgcccaggatctgtcagctcttaaatagtaagactggaaatcataccagatctccagtactctttctactgcccaatgaaactcccttcttccccttcactccctcttgccagcttagcctacctaggaagtaaagaaggcataatacaaatgaaaatcatggcctttattattcatctggttatgctagtacttggtgtggtgactcctttgcaggattattttaaagaatggtggcagctatgttttactcactttagaagtcaaagactcacggtaaatcttagcagaggcaaataaaaacatgataccaaaacctaacatctaaatctgtactgtccagtatgatagctgttagctacatgtggctatttgaatttaaatgcaagttgattaaaatgaaataaaatgtaaaaggtagttattagtcacaatcatatttcaagtgctgaatagccacatacgccctgagatactgaatttttaatttaattataatttattcacatttaaatgtaaacaggcacatgtacctagtagccactttaatggactgtgtagatacagaacatgtctatcactgaagacagttctattgggtggtgctgatctaagggctatatcaataacactgtggtctcctggcaagttgtaccctctctgtacaggggaggacaacacaaatacttcatgagctttgtcttccagtgaccttctcagctcataaacagcatggctttgctttt

SEQ ID NO: 1580 - DNA, 2969 bp, Homo sapiens
tttctggtccagctggagaactaccctcccaacacggaggtcaacctcactctgatctggtgcgtggtgctgaagctggccagcttggggatgttctccgtctccctgggtcagaccatactgtgcattggcagagacaagagcagctgtgagtcctacggctacaacgtttgtgactatcagtgctgggagaactccgtgggggaggagctgtacaagctgagtatcttcaacttcctcctcaccgtggccttcgccttcctggtcaccctgcctcggaggctgctggtggaccggttctcaggccggttctgggcctggctggaacgggaggagttcctggtccccaagaatgtgctggacatcgtggcggggcagacggtcacctggatgggcctcttctactgccccctgctgcccctgctgaatagcgtcttcctcttcctcaccttctacatcaagaagtacaccctcctgaagaactccagggcatcttcgcggcccttccgtgcctccagctccaccttcttcttccagctagtgctcctcctgggcctgcttctggctgcagtgcccctgggctatgtggtcagcagcatccactcctcctgggactgcggcctcttcaccaactactcagcaccctggcaagtggtcccggagctggtggcccttgggctcccgcccattggccagcgtgccctccactacctgggctcccacgccttcagcttccccctcctcatcatgctcagccttgtcctgacggtgtgcgtctcccagacccaggccaatgccagggccatccacaggctccggaagcagctggtgtggcaggttcaggagaagtggcacctggtggaggacctgtcgcgactgctgccggagccaggcccgagcgactctccgggccccaagtaccctgcctcccaagcttcgcgcccgcagtccttctgccccggatgcccatgccctggctccccgggccaccaggccccgcggccgggcccctccgtcgtggatgccgcgggactgcgttccccttgccctggacagcacggtgccccggcctccgcccgcagattccgcttccccagcggcgcggagctgtaaccccgacccctgcctccccgaagcctccctggggccccttcaggcctccttactccatcttccagacccctggcgaccaccgcccctctcagtggctccagggcctccctcagaggtccccaaagatggacacacaaccccagcggcagcaggaaaaacatatgggaattttctttctatattttaatctcatccctttaaaatgtctattttttattgtgttttttataatatacataatctattagtatagtatctcttgaatgcgattttttctagaatgtgttctgctgatttgttttagagccatgagtgcaatttatacacatacatctattgggaatgctcagaagttgtttactgatggaagtgccttcagaagagtccgggaaccacttcctaaggaaggaaagagctggccacagttagagcaagcctgcctggggccctgctctgtgttccagctgcaaactgcctgcatcatcccttcctgttactcttccttcacctgagacagtcgaggccacagcgtcagccagggccagagctgggatttgaacccaggcactcgggctccagagccacactgccccagtgtggggcttagtggcggctcctggccctgactgaggggctgactgaagcctggtgagagcgtgctgggtcagcctctccctggcgggaatcctctccgtccagtcttctaacctagcagcctcacgtccacagagctgccttgtgaaactcagcagagccctggcttcctgcagagccgtgttctcccagcctgcttcatggctccctggttgagccaagcttgcggatccgtggggtgaaggtacccgcaccgcctgggccttagtggtatgtacgggcctgcatcgtgagcagcgggcgggggcccaggcaggtgaggcagctggccacaagggcagggcccggcccccctcccaaggctgtgtctgatattcttgagcctgttcgagtttccttttccaagcctcctgttctcccacccccacccctgccatgctgcagtgactaaatctgtggttctcatccttggagaacacctgagtagctgctacaagctggccacagcccagcgactctgatgtggttgggctgggtgtggccagcagccagggcatcgggacttttcgaagctcccaggtgactcaccggcagctggggatgagaactgtcaggagggaaggtcagaagtcccaggatgcacttgaaaagcctctagctccaccagtgaccagctcctggctggactcctggtctggactcagcatcagggaggctctggcctctcgccctcagggctgggggcttcttcacatggtcatcaaagacttggccagttccgcctctcccacggccgtccttgtctcacccagcatcacgacgcatcagttcaccaacaaacacgattcagtgctgctagtgctgggtcctgttctgggggctggtgatgaggccaagagggaaagagggagctctgtgttccatcgagggggcgacaagcctggaccagatgaaagtgactcatgttgttaattagcggcttagggccaaaggtggcccctggaccagtggcctcagcatcacctgggaaaaggttagaaatgaacattcccaggccccacctcagcctcctgaatcagagcatccctttggcaaaccatactgagaaacaaccacgtgcatcaccaagcgctgtgaagaaggcaagctttgagaccttgaaggaatcatcaaactctgggcctcggtgtgctcacccagggcgagacaaagacgccatgctcctccaagtggcctccaagattaaatgagcaatgactttt

SEQ ID NO: 1581 - DNA, 3366 bp, Homo sapiens
acatgataggggagctggaggaacctgccgtctccgccatcgagcgcccctccgagctggggttggacgctgccagtttgcacagcagcagggagacaagagacacacagccacagaggacaaggccatatgagatggaggcagagactggagagatgccgccacaagccaaggatgcgtggggccaccaggagctgggggaggtgaggaacagattctccagagagcctgcggagggaaccagcctaccaacaccttggtgctgggcttctggcctcagaactcagacagtgaatctgtgttgtttgaagcctcctagtttggtccttggttacagcagccccaggacactcagtccccagccgcccctgcagcaaatctcagtgtctccccctcatctgtttgcagaggccccatcaacgaacaaatgcagacaactcttcctggagttttgcattaaagacaagaagctgggggcacagcgagggggacatgaggtcaaggcgctgctgctttgttaggtaggggagattgagcatgtttgtatcctgatgggaatggacaagcagcaggagcatctgatggcacagcaaccagggggccaccccttaaggacaggtgggccggcttgccttggagcatgggtgcttgctcacaggctcggggcaaggcacagatgcgggaggcacagacgcggcagtgggagcagctgggtccatcttctcccagctctgggcacaggtgggaggcacagtgcgtgctttccctgcaggcttcctgtgcttcgccccgaaccatctccccaggtctgagttcctctgctggtccaggagggtctcagtgcggtgggacaaactcgttccattggtggatggagacacacccagtgtggacagaggctgcaagcatcggagggcgtgtccatgcggcagtattggtgtcatggccataaggttggcacttcctatagactccggccttgcattttcagcagctggagctgttcacagcatccttctcacaggagttttgggagcacaaccaggtgtttctctgatccgtaagagcctcctgcccgttcatccatcaacagcctctggggacaccttcggcagcaggaatcactggtgttgggtactgagtttgaatttctgtgcccacctttgcgctggcacaaaggggctggctatgtggaagcagaatgtggggcccttgctttaaagacctcagaggctggttgaagggataaacctcacacccccaaaattgagagaaaacatcaagggagctgcaccgcagcaccaccttgctctctgggcttcagcaccagggaggcggacagctccattcactgtggccgccaccgcccatccaggactccagccctccccgcatcatcgctctgcttggctgtcgggggaggagagcggctactgctgtgcatgggtgcttgggggcggtggggggtggggtgcagaggaggcaccaccctacccggggccatcaccaaccaatggggatgggagcgggtagataaatgccccagcctccccagcgtcggtggacagtttggaagtgcattcattctccatggcttcccagagggcccccagcaggcctgagcagcagctcttgtgaaactgccctccatgggctgctctctcttcctgtctcactgtgtgctccgtccctcacttcagcttcctggtctcacatcccaaacacactaccttcgtccaagtccttgtctccaccagggcttacatttggggtgcctagaaaaggagagagcatataatcaatgccagggtgagtggggggacacccagagccatgaggtcccaaggagggggcgatggcagggtggcccgtgaggcaggtggtctgggcccaatccccggctcaggatggacagaaggcaggagcagcctctgtgggggctggtgacagtgtgagctggcccagcagtgggtgggcttggctccaagggtgccacagggactgtgaagcaggctggagagggtggcgagcgggcctccagtgggaaaaccaggcatggcactgaggcgggcaggtaagttcagccctacactcctcctccttccggccggactctcacgtggatctctccttctggctgtgcaggttggatctatgaacacgagacacagaaacaccagctggaggagcccaggaggcccagcagcgggaaccatcgtagtccatgggccactgagtgcccggaccagggccccggggcttcctgacagcaggaacaacaggaatcattcaaaccctggagcccagagggcaggacgggagcggccttttgtcccccgcgggcaggccagggaggtggacaggccgggagcctgaagcctgagcagctggaggctcgctcattctcccgtggtcactgtgttcccggagccccaacagagggccaattgtcccacggggcggtgcctggtgggtgtggtgtcttggcggcagccactgcctggctgttctcaggatcccaatcccaggtgaaggctgcagtcctcttgctgtgtgtggactatttagctccgtgggcggccaccttgccatggggccacagcagccattccagaggctcccccagtgccctcctcgcccggggggggggtgctcccgggtgtggtccggctgaggagtctcactcgcaggaaaggtggcgtgtgacgggctggagccggcctgcgaagtctgcctggtggccatggctcaggggcctgtgtctcccggacgcccccagcggggcctctcttgaagggactttgtgctcctgccaggagaaaacagccctaacagctgcctcctgggccatttccaaacattcgtgtgtcaggccagagagcgccagttcgttgcccttttgggtggttccaaacgtgtggagttggggccctggcagcttcggaccaccagccccccttcactgaggggttcgtcatcaccaagcctcagccagagatgttaaactggaaaaacaatcacggacccccgtgggggaagcagcttctggtctggggacagtcatgagctctgcatgcagctgccggtgtcccttctcggtgcctggcgggtatcagggctcacccttggcctggccacacctaccgcctctcaggcccacacctcttcccggaagacacctggaggcttcaacaccggctcacgccctttcctggaagaaacctggaggcttggacgccggcccatacccatttttggacaccgggggcttcaatatctgtggcatcagctcctcagctctctcttccctcagcatcccactgacccgaaattccaggagatcccgagatgggccaaacacaaaac

SEQ ID NO: 1582 - DNA, 3188 bp, Homo sapiens
acatgcaccgcatctctgggtgcgccttggagccgggacttccctttgcccttctccggctgggccgtgggggaagcgcgggggtcaccagatgaccgctcggggcctgggagggaccctgctgagtcagcgccgtttctcatctgctgcagagaatcccgcggtcagggcggagagaatggcggctccttccgcattcggccgccccgtcgggaacgcatgctcctcatcggcaaggctcctcattagctgtccacgtggacaccacaagcccagggctctcgtcccctcccttcctgaagcaccatgctcgaaaggagtctccatttgtttctataaatcccaaccaaagggtgaaaatgaaagccctccgtcagagtccctctggtgcaggctgtggcgctcgggtacctgggaccggcactgaaccctctggggacctgcaagctctggccagcagcacggggttcggccgtgctgggctgtgggatgctgtttccagccggcccccagtggtcaccgggtgggaggactgcatcgcagggacttgtctctttgtctgttaaaaaatctgattgagtgaaagaagaacctgcctcctgtccttcccttgctctgtctttgtttcttgtagtttcatttgcagacagtagatccaaaaataacctggcagccagaatttgaaatacccctcatgccccggagaatctgggcccgtgggtttctgcgaaatcgcccttgacagcttggctcagcacctttgttctggacgagcttctcacgctgttggattgagtgttcctttttcttttgcactagcattccacgcctacgggaaggcaggcaagatgctggtggagaccagcatgatcgggctgatgctgggcacctgcatcgccttctacgtcgtgatcggcgacttggggtccaacttctttgcccggctgttcgggtttcaggtgggcggcaccttccgcatgttcctgctgttcgccgtgtcgctgtgcatcgtgctcccgctcagcctgcagcggaacatgatggcctccatccagtccttcagcgccatggccctcctcttctacaccgtgtttatgttcgtgatcgtgctctcctctctcaagcacggcctcttcagtgggcagtggctgcggcgggtcagctacgtccgctgggagggcgtcttccgctgcatccccatcttcggcatgtccttcgcctgccagtcccaggtgctgcccacctacgacagcctggatgagccgtcagtgaaaaccatgagctccatatttgcttcctcccttaatgtggtcaccaccttctacgtcatggtggggtttttcggctacgtcagcttcaccgaggccacggccggcaacgtgctcatgcactttccctccaacctggtgacggagatgctccgtgtgggcttcatgatgtcagtggctgtgggcttccccatgatgatcctgccatgcaggcaggccctgagcacgctgctgtgtgagcagcagcaaaaagatggcacctttgcagcagggggctacatgccccctctccggtttaaagcacttaccctctctgtggtgtttggaaccatggttggtggcatccttatccccaacgtggagaccatcctgggcctcacgggagcgaccatgggaagcctcatctgcttcatctgcccggcgctgatctacaagaaaatccacaagaacgcactttcctcccaggtggtgctgtgggtcggcctgggcgtcctggtggtgagcactgtcaccacactgtctgtgagcgaggaggtccccgaggacttggcagaggaagcccctggcggccggcttggagaggccgagggtttgatgaaggtggaggcagcgcggctctcagcccaggatccggttgtggccgtggctgaggatggccgggagaagccgaagctgccgaaggagagagaggagctggagcaggcccagatcaaggggcccgtggatgtgcctggacgggaagatggcaaggaggcaccggaggaggcacagctcgatcgccctgggcaagggattgctgtgcctgtgggcgaggcccaccgccacgagcctcctgttcctcacgacaaggtggtggtagatgaaggccaagaccgagaggtgccagaagagaacaaacctccatccagacacgcgggcggaaaggctccaggggtccagggccagatggcgccgcctctgcccgactcagaaagagagaaacaagagccggagcagggagaggttgggaagaggcctggacaggcccaggccttggaggaggcgggtgatcttcctgaagatccccagaaagttccagaagcagatggtcagccagctgtccagcctgcaaaggaggacctggggccaggagacaggggcctgcatcctcggccccaggcagtgctgtctgagcagcagaacggcctggcggtgggtggaggggaaaaggccaaggggggaccgccgccaggcaacgccgccggggacacagggcagcccgcagaggacagcgaccacggtgggaagcctcccctcccagcggagaagccggctccagggcctgggctgccgcccgagcctcgcgagcagagggacgtggagcgagcgggtggaaaccaggcggccagccagctggaggaagctggcagggcggagatgctggaccacgccgtcctgcttcaggtgatcaaagaacagcaggtgcagcaaaagcgcttgctggaccagcaggagaagctgctggcggtgatcgaggagcagcacaaggagatccaccagcagaggcaggaggacgaggaggataaacccaggcaggtggaggtgcatcaagagcccggggcagcggtgcccagaggccaggaggcccctgaaggctcctgagtgcagccccacacgactgagccacccagaccctcacagggctggggcctgcgtccctcctcgtgacctcggccagctggacccacatgagggccacctctggaaccttcttcgaggccctggccagccatctgcccagcctcggagggtgggcaacctggtgcttcccgggtggacacacaggaccactcagtggggcctgtgtgggcgccgagacctgggtgtctgggaagtggggcacacggggcctccgaactatgaataaagctttgaaaggcc

SEQ ID NO: 1583 - DNA, 2921 bp, Homo sapiens
ttcgggatacctactggccacagttgacaagttcacaactgaatggatggagcctttcatcctggaagggtcagcggtttgttcacacaggaatggatgcacattcaagtgtggagttgttttctgccggccaggtctcagccagcattattagccaaaggcttacagagagcttgattcaccagtacaggatcccacataacactgcattggaccgggggcctactttagagaaaagcaagtgcaggagtggactcatgaccatgagactcgatggtcacatcccatacacaccacccagaagttgtcagcataatagagatttggaacgacttgttgggagcacagccagaacaccagcttggagtcaactacatgaggatgactcaggacgctggatacatatttatatgtgtagaaaggacttttatttgagtgcataactctggtcaatgttcctttccttttctggttttgggtaaggttagggattaacttaatagcataccttatagaaaagtacagagttttgccaaaaacaactgcaagtgtaacagttacagcctataaatcagtccattcattggaaatccattttttattttgttttgctttataaaaagaaagattggacaaggatccagccctgtgcaatatagctgtgaacaacatagttattttatcaatcgtttgctcttgtggactcagtggtatgtccttgtagaattggaagtgtgtctgtgggttcctggtttcctaggcttccgttgcccccctggcctttggagagtttccagatgacatattcttgactcgtgttaatggcctaaatttgtctactgtgcaatttactagctggattaaaagtaataaaggtttttttttgtcgttaagaatttaagttaaagttttgtttggaaataatacatcaacttttcttctaacactgttaagtctgagttgagaataacttatttagccaaattccctctaaagatgtaagctcttcattcactaattttattacttttgattgaactcaaagttctgtcaaaaatttcctctctgtaaaatacatttccttacccaactttcacattgggaaaataatttttcctacatgtaactcctctttaaaatgcttctttgtcatttcaaattgaaatctcagttttgccatgggaagagagttttccaaaattcctctctcccaacaggactatatgctctattcattttttttgatattcatatacaaattgttcccatactctagtggttgtctgagcatagtagaattgaaaaataaattagtgtagttatccagaacatttacatttaatgttgtgacaaaagccagagattttggcctgaacagccacagcgattttctaaactgatcaaatccagtggaaggttgctcaatttttcatatcttagaggcaaaaaaatctaatataaaaattaagatgttaaaagagaggcataactgaggttttaattggtcaaaaagtagagtgtacccagagctaggtgcagccaccttcagatcctgaactagccctcctgagtcctttattccttttctgcaggccctgggggatcaccctgctttcttctcttggcatttgccacaccctgtcttattcaaccctgtattgaagttgtttctcttcaaatctttactgatagtttctctagcttccttcttttcttaattctgctgaagagactaatatgaatcttccaatctttagtgtaacattgataattagctgtgtggccttacatgagatacttgacctttctgtagctcggtttcttcatagtcagttaaatgaagagaatgatgactacttcatagcattgttctggaaatgaaatgagatgcactgcatatcacttttaaaaggcatttagtaagtagttgtcctcaacttttccctctcattttgtttctatatgtacaatttgaaagatgcagaattattttttaagttgttaaataatatcattttgtgtcggtgtgagaactgctggtttaaaaaacgttttcatatgtctcaccttatttgctgctgccacactaatttgagttaggtaagataattatttactattcttctttcagataaggaaattaaatctcagggagataaagagaagcaagtgtctagattcataatgccttcaacagcacagtagaaatgggagggaggtagtgacacatttcctgtgttgtggtgtttagtggagacacctcctccctgggttgtggtgtttagtggagacacctcctccctgggttgtggtactgaaaactaaagggtaaattctgcaaatgtctccaagtgttgtagatcaaagccagggaaagcaatcagaagccagattgcattctaatggctggggagacttaggcaacaaaactcgatgaagaaaccacagcctggaagaattctttagaaagagcctaggtcccaagtgggtaccttgtgtggattcagaaatgaactaacaattttgaatgaaaaggaccattaaaatgtttctaccaggactaactactttcttttgtcaaattagctcaggttaattatagagtagacactgcctgaatctgtatttttctaattaacgtcaaaatccactagaaagacacgaacatttaatgttgtataatgtatatgcatatgtggaaacactattggattttatgaactgatgaatatataggattaccttattccatgccattcctttaacagatatttcttgtgtacctgggatgtaccaggtatacttcttggtataggaactataccagcaaaaattgtcatggagcttataatagaagaggtgtttatagcttagtaatataaaaaatcatacaagatctgtaattttttttacattaagag

SEQ ID NO: 1584 - DNA, 3577 bp, Homo sapiens
attgtactgctactatgcccgctactgagacaggaacaaagagaggctgtttctgcctcttggtgctctccattggacatgtctgctgggcagtgctggcttttaccataggtatttttctgctcttccttccctcctcctctccctctctcttttccagggcactcacacacacacacttgcacacatgtgcacagttgcacacacatgcattgaacacatgtgcacatatatgcgtttgcatccacttgcacacccacacacctgtgcactagcacccatttgcacgcatgtccacacacttgcacacatgtgcatttgcagaaatgcacccttgcacttgtgtgacacacctgcacacttgcatacacccatttgcatacaggcacagacacactcgcatacatttgcacacacagccacaaacttgcacaagcagcacttgtacactgacacatatccgtttgtgcctatacagtgcacacttacacatttgcacacagctgtgcttgctcacacatttgcacacacccacctacacacttgcacacatactacacacttgagcgtgcagcacacatacctatgtgcatacatgcacatttgcacatgcacacagcagtggcacacacttctctatcactctccctagtcactgttctcccctgtgattcccacccctctgaccgcccctgctcacttgctgccccctccactggaaggggcctggcctggtgccctgtctctgtctgtctccaccgtgcagggaggtttcacaaggactggctgatgtctcgcctcgagctggcctggccgcagctgctgctgagcggaagtctctgaggggtgaggctgagaggaaaccacactctcactggggttcccgcagctctggcctctggggaggggtgtggagatgtgtgggcgtgagatggctttgagggagggacagcatgaagcttttcgctgggtctgtcttttcagtctccaggacaaaactaggccactgtgctccaggagaagggaaaacccacgtccccccaggctgggcccaccggcaaatccggctcccaggcccttctcagcccatgcttctatctctgccttgtcaggcttattctttggggctttgaagcagcctttggtgggcaaacggcatctcagggaaccctggcctgtctcctccagagcttgtgccttggccctgggcaggggccaccatgggctgttgatgtaaatggcatccccagagttgtgcagtgtgggggcaaccctgaggtatcagcccagccccctgtctgcagcttttgctacccagcccagctccagctctgtctttgtcactgggggtggtgggggaggctggagctcagggacggggcactcctggcagattctccctgccccaggtggaaggggaggggggaagtacccatcctccatcctcctatcctgccagcggggtgggcgctactatgctggggagggtctggctgaataatgatgctgagctcgggacaccagccttctccgtgcacctactgtgtgccaagtaccatcccaagagcattatgggtggtaacttatacaatgactcagagaggcaccgctataatcacccccagtttctgtctggttccagtcctggccacacagctaataagcagcaaatggatttgatctgattttatctgaacccaggcaggctggcccagagcccactgtctaatcattgggccgtccagcctgtcaagactccaggctcgctggcgtcgtacccctctgtcatttcccagggaaacaagctctagcagcacctgccctgtgggtactttggccctgcttccctgcctccctgcctccctgcctccctgcctctcatgataggagccaaagaatggtctcctttgcaggaaaggagctcgacgggggtcttctcttgcaggctctgtcttgcatgtgggtcctgagctttctcattgagtaaggggagggggcagctggttcagtccagcgcagagtggatggaggccggttgaggctttcttgaaaccctaagcccagctgggatcctcggggaaggatccttcgctgggatctgactggctcttccagaggtcagtggggcatgtggctggagcccaagtaggagggaggaagaaatggtggtctgagtcctggggtgaccaggccctgaacctgccctgctgggaccccattccctgactctaggccccctttccccaccacacaggacaccaggctcttgccttaagacagtaaaggaaatgccttatggtgaacaattctccaggtccctattgtggctccaacagatgccagagggacatggcaggtgaccctggtctcctacgaccctgactttacttgctgtcatgaggccaatctcttaccttgacccacctcctgcctctgctttcagaagggcagaagagcgggcctcctctagcttcccagccgcctcccgcctcctgccgcccggcagcgctgggccccccagcagcgaggttcaggaggggaagaacctctcgcaggtgaacaaattgctgcacatcagacacattcttttcaagcctcattttctctccttttcatgctaactttcccactattaaagagcatttttaaaaagaagatgaaaaaaggcagagagaaaagaaggatgaaagtgtgagcgggtatccggaagtccttttcaattgcctgctgctgtgcagggtctgaactaagagcaagaaattggaggatgctggaggggcgaggtttcgtttcagtcctgcctattgggccaagtctggggcggggaaggagaggtgatggaggtgggcctggctgggccctgcggccctggaggctgcccctctgcctgccacccagcccctggcctgtgcctggcacaggaagcccgtcaataatttcttgttgaatgaatgaaagaaaagaaatcagtggatggagaagggctggattcttttgtggggaccttccacgccaccttctctgtggggctctagggctgagaaagaaaggacagatttggcaaaggtcaggcaggggctgggaaagcattaggtggaccaggcatgctacagcaaggccacgcctgcactgttgtcccactggtgacacccatgggtgcagccatggcgggtgggcgcagtttcacatgggattgggggtgagcctgggttgggtgggcgacccccaccccttccctacccctctccccaccagcaggtactactgggtctgcgtgaagataaaagctcaggaacatgccaggaaggtgtgaccatgatgatacctctgagatgaacccaagaagaaacagcagagtattacaaaggggaacaggactcagggtggacttcaagtatcattaaacataatcaaatatttaaaaagttattattgactgggtgcagtggctcacggctttaatcccagcacttagagaggccaaggtaggaagattgctttagcctaggagtttgagaccagcatgggcaacatagtgagaccccatctctaaaaaaaaaaaaaaaaaaaaaacaag

SEQ ID NO: 1585 - DNA, 3037 bp, Homo sapiens
tcttcagccacgctgtgcagatggtacgggacagacagacaccagtggggcaggggccaggaacttccaggcccgccgtctccactgggacgggaccttgatgcccacagcgtggtgagactttggggggtgtcacttctggaggtcttgaaatgacagcattatgcacccccagcctcctgcaggcgctcgcagctcggctgggtgcatccttgattgtacgggtgccgtggcccatgtgcatcctgcctcgccccgactcagtttccccaattgtaaaatgagagacttggtcttcaggcctcgtagtcaggtgtcagcctccagaagcagcacctggtcccggacaacctgcctggaagtgtggtgcactcaggtggtaccacgggcaaagactccctgcttgggctctgaagagctccctctgcctctgaggtggtgcccccttttcgtttattttttgttgtttttttttaagagagggtcttgcactgttgcccaggctgaagtgtagtgtagccgctaactcctgggctgaagtgatcctcttgactcagcttcccaagatgctgggtattacaggcaaaaactcatgagtgcctgagtctccttttttaagaaaatttaagcatgtagtaaaaatccagtctgaacaaacatgggaaaagtcagcctccctcctgccccccttcccgcccaggcaggccaggcagcagcagtaatgacactgactgagcggcgggcactctgttgtcctggggccgggctgagagcgctggccagggtcatctggttccaggcagtgtctccccttggccctgtgaccatcccctctgcacagcaggctgcaccagcacttatgtccccacgtcactgccctgagcgcctatctgccacccctgggccgctgccgtgggtgcagggcagcccttgctgggagggagtggggtgagctggccctgtccagcctctgtcctcgcccccaggtgcagtcggctgccctggacgagatgttccagcaccgtgagggctgcgtcccacgctaccacaaggccctgctgctcctggaggggctgcagcacatgctctcggaccaggccgacatcgagaacgtcaccaagtgtgagtgcccggctgggctgggggctggggactctgggcgtctccctcacactctcctctccctccacaggcaagctgtgcattgagcggagactctcggcgctgctgactggcatctgtgcctgacctttctggcctggctgggccccccgtcctgccgagccctgcagagtgggctctgtgtgctggctggactcctcgggacaagcccatggcgctgatcgctggtgctgagccctgccctgggccccacggacagtcagcctgccggcctccctgcagctcacggggcagaaccagcacatctggagccacacagcttggggggtgtctcccatcttttacaggtggggatcacagaatttctgcccctccagctgcctggctcagcaggcgtgggtgccaccaccctctagccccagggcagccccggaggacaggcaagggcctgagaccactgccgactcaaagccaaagcgagctcctgcttagggcaggtcagcaggcactgtgcccaggaagagcctgcggcctcggcgtcccccagtctccaggagcctctccctccgagatacccacccagctttgtcaatcacccaagcactttatgcatatagagacagaacctggacctcaccagggactgctgggcagcgattcctggcagtggcctggtgtttgtacatacacatatgcagacacatgccagggccccccaagcccgagcaccggaccacgttgctgcccaggtctggacctcagcgggagaactggctccggggggagtggggccctgcgctagaggcagaggcagttctttgttcaagcgttcctctggggaccggcagcagaggcaccgtgttctctcagccctggatacgtcttgtaatctttcacactttattcctaaaacgtgtcttatttttatgcagctcattttttctttaaaggagaaaacttgtaggtgtttaagaattggttttgggagggcgaggactgggccaggttagaggcagatggcacaggggcgtgtggcgggcgggtgaggctgctttgcacacctgtgttggtggctgtcccctgccgcccctccctgtggcagcagcaggacaggtgtgtgcccagcaccctccctacctgggcctggaagcagatgaggggaatacttcatgcaaagaaaaaagtaacatgtgcaaaagctccccgtccagctttgacagtcagtttcgatgtcagctcctcggcagggtaggcctgatgacagccctgtccctccctgcctctgccttgcccaaggccacggagggcgtctgcagagaggcctgccttccggattccaggcgggcatgccctgcaaaccccgcctgggcctcccttggtctgcccagccctcggttagccctgcctgaatcagtagatacttgaacgagtccccagtctgcgggaggcagtggtggggccatggacccatgcggggggttccagggtcacacgccacataacagacaaaaatacacacacgtgtgtttttctttgcaatacttgaaatattgccactgtgcttggacttagaagaagaaaatccccgtgacttcttcctcatcaccttgatggctttattctcaccttgtggggcatgtttgtatttattgcttcatggccgactggaatcctgagtcctgggaagctggcactgcggggatcttgcccggtgtcctggtcctcttgcttccgtcgcggccgcatgtgcgtgtgtccaagcaggtcctgggcgcctcaactgctgcccctggttgaatgttctcttgatagtgctggaccctttgtctattttaaagcgaattttgtgtgatttcctgccctttgcgttatattgtataataccaacgtaaggaaataaacctttggaattgtt

SEQ ID NO: 1586 - DNA, 2898 bp, Homo sapiens
acttggctctcgccctccggccgggaagcatggggcttcccaggctggtctgcgccttcttgctcgccgcctgctgctgctgtcctcgcgtcgcgggtgtgcccggagaggctgagcagcctgcgcctgagctggtggaggtggaagtgggcagcacagcccttctgaagtgcggcctctcccagtcccaaggcaacctcagccatgtcgactggttttctgaggagcggacgctcatcttccgtgtgcgccagggccagggccagagcgaacctggggagtacgagcagcggctcagcctccaggacagaggggctactctggccctgactcaagtcaccccccaagacgagcgcatcttcttgtgccagggcaagcgccctcggtcccaggagtaccgcatccagctccgcgtctacaaagctccggaggagccaaacatccaggtcaaccccctgggcatccctgtgaacagtaaggagcctgaggaggtcgctacctgtgtagggaggaacgggtaccccattcctcaagtcatctggtacaagaatggccggcctctgaaggaggagaagaaccgggtccacattcagtcgtcccagactgtggagtcgagtggtttgtacaccttgcagagtattctgaaggcacagctggttaaagaagacaaagatgcccagttttactgtgagctcaactaccggctgcccagtgggaaccacatgaaggagtccagggaagtcaccgtccctgttttctacccgacagaaaaagtgtggctggaagtggagcccgtgggaatgctgaaggaaggggaccgcgtggaaatcaggtgtttggctgatggcaaccctccaccacacttcagcatcagcaagcagaaccccagcaccagggaggcagaggaagagacaaccaacgacaacggggtcctggtgctggagcctgcccggaaggaacacagtgggcgctatgaatgtcagggcctggacttggacaccatgatatcgctgctgagtgaaccacaggaactactggtgaactatgtgtctgacgtccgagtgagtcccgcagcccctgagagacaggaaggcagcagcctcaccctgacctgtgaggcagagagtagccaggacctcgagttccagtggctgagagaagagacaggccaggtgctggaaagggggcctgtgcttcagttgcatgacctgaaacgggaggcaggaggcggctatcgctgcgtggcgtctgtgcccagcatacccggcctgaaccgcacacagctggtcaacgtggccatttttggccccccttggatggcattcaaggagaggaaggtgtgggtgaaagagaatatggtgttgaatctgtcttgtgaagcgtcagggcacccccggcccaccatctcctggaacgtcaacggcacggcaagtgaacaagaccaagatccacagcgagtcctgagcaccctgaatgtcctcgtgaccccggagctgttggagacaggtgttgaatgcacggcctccaacgacctgggcaaaaacaccagcatcctcttcctggagctgggtgagggctgcatccctgcaggggatggcaggggcaggcccaggcacgggcagtaacttgcgcttctcctaacacccctccctctgcctcctagtcaatttaaccaccctcacaccagactccaacacaaccactggcctcagcacttccactgccagtcctcataccagagccaacagcacctccacaggtaagccaggcctggcaagagaacagggctgtgccagggcatcctttctgccctgtccctccccagagagccctgtccagaaaggtgagtagcagccccatcttgtcggccctggactggctgggccaacgatggtgacgaagtggcctggggcagggagtgacgaggagtgtctttgtggcgcagagagaaagctgccggagccggagagccggggcgtggtcatcgtggctgtgattgtgtgcatcctggtcctggcggtgctgggcgctgtcctctatttcctctataagaagggcaagctgccgtgcaggcgctcagggaagcaggagatcacgctacccccgtctcgtaagagcgaacttgtagttgaagttaagtcagataagctcccagaagagatgggcctcctgcagggcagcagcggtgacaagagggctccgggagaccagggagagaaatacatcgatctgaggcattagccccgaatcacttcagctcccttccctgcctggaccattcccagctccctgctcactcttctctcagccaaagcctccaaagggactagagagaagcctcctgctcccctcgcctgcacaccccctttcagagggccactgggttaggacctgaggacctcacttggccctgcaaggcccgcttttcagggaccagtccaccaccatctcctccacgttgagtgaagctcatcccaagcaaggagccccagtctcctgccagcagctgagctgggtagcctctctgagctggtttcctgccccaaaggctggcttccaccatccaggtgcaccactgaagtgaggacacaccggagccaggcgcctgctcatgttgaagtgcgctgttcacacccgctccggagagcaccccagcagcatccagaagcagctgcagtgttgctgccaccaccctcctgtctgcctcttcaaagtctcctgtgacattttttctttggtcagaagccaggaactggtgtcattccttaaaagatacgtgccggggccaggtgtggtggctcacgcctgtaatcccagcactttgggaggccgaggcgggcggatcacaaagtcaggacgagaccatcctggctaacacggtgaaaccctgtctctact

SEQ ID NO: 1587 - DNA, 3395 bp, Homo sapiens
tgtaatccttgtgaaaataaatagtttaaatactagctccatttcttttcccaaatagagctcaggtttactgtcttttcattatctttccaatattttaacatgagacttagagggttatcagagggaatcatattatctgctttgctctttgtagtttttgttttactagggttatttcccatcctggaagttttagatgtgtccctgagtttcctgactgtatggggttcaacctctcttactagagatttcttgcaccctttccctggagacttaacccccctccccactggaggtttcttgcactcctttactttactccacactcgctttgcacttaattgtgcatctcattcacatactttcaacctccaggatgtcccaaccaccaaagaagtacttcactgcccctgcggcttttcttaccttggtctgtgcacagaattacttggtcaccatggcatctgtaggccttttccttccatgttgctgagagtctcggtatattcatcatgctggtgggtctcaatccctcattcttgaggctgctgcagtgagacacgtctcctcacaagagatgattggagacccttctccggaggagaatgggatcccagatgtgcccccattttgttagaaacaagtgctcagtgcctcaaagaaaagccagcacttagacagaacatttctcagcaaggcacatttacttctgcagaagggtgctgcctgcatccgtctgattgcaagagcataccaaacaaaggagagaaaagtttttatccctaacgcagctcctgttactgtgtcctctccccattggcttgagttggactgaacaatctaacccaattattggctaagacttaaacttttctacatatggtaaatatgccgtttgcaagaggaggggaggaagagactgttgctaaggtgggaaaggtagtttacagaacaagtctgggcatgtctgggcatatagaggtttgctaattacaaattaagcaaggggtggggcctgtgtacagagcaagaaagaccaagggagctttgaagagaaacttattatttctgacatagttgtgttcaccaacccagaagtgctcctacccttgtcatttaggaactttatgaaggttttgttacataggtcaatccccaccccccactctgctcccagtgtcactggtagagagtgttgactgcaagttgtccaggttcttggtgttttgaacaaagaattggacaaaatgcccagcaaagcaaagaaagcatgaagcaacaaaagaacaaaagcaggaatttattgaaaatgaaagtacactcggcagtgtggaagtggacccaagcagcggctcaagggcctggatatagaatcttcttgggtacaaataccctgcggaggtttcccattggccactttatgctcacgtcatgtgaatgaagtggtatcccacaatcagtctgatgggttgcctaaaaccaccaatcagaagcttaaatggagttacaaaggtcacactcctgtggaaacatctgattgctttttgcaaccaatcgtaggctaaggtgaagttacaaagttgcaaatgaagactccacccacaatcagtttgattggttgcagacagccaatttcccatctgccagcagaaaacgtgggagttttgcaaagggagtagcctctggtccttttgttctttaggcctggaaagttagggttttcctttgaatttagttctaggaagtgagtgtgaaactgtcttaggttccctgcctccagaccctattctcctgcctcaccaggaggtgggcatgagagttggggggtatctggaagtttcagtcctcaatcatgtggttgatttttctggtgaccagcctctagactgaagctatgtagtcctgcccactgagagtcatctcattagcatacagaagacagtaaattccaagggctttagggactctgtcccaggaaccagggacaaagaccaaatacttatttttcattataccacagatacctgttagggttttgttattgttgtttctacaaaacattcatctattcttgtgttcaggagaagtaatatcttcagtcatgattagatttcagatatgaaagaatttttgctagtcttagcccccagttgtaaaataatgtcatgaaaacatttttatttcctaatgattataacaaagggaaaagatcttaaagagttgactttggtagtacaagtttgcgcaaatgattgatgattttttatttccttgatttgtgcattagcagcttttagtgtgtcatatcaagaggaatactggggaaataatataatgattgtttatatggagttctctactttcttgttttggcagtgtttgaaagttaggactgatcctgagggagttgaattttgtaaagttaattactttcctgctgccagtagtgatttatatctgtgatattatatcagctagtcatatgagaatgagaaacaaaattactttttctgcaattaccaactcactagtagggtattcaggtgtccctgggtagcacacaatataatagagtaatgggtaaaacttttttccaatttgaacaaaaaggccttgtcaactttttttaaggtctcttgatacatatataaaagaaatcataaagagcacttggtatatagggaacataattttttaaattacttttttaaagagaggtcaaatttatctgtagcgacccagactagagttcatcctcctattttcttgtaggccaagaaggaaagaaagttatcagatttaacctatcaaaaattttgactatttattggatatcatccaagtgatcttaaaattaaaatatatatatatatgtctatgtatgtatatacgtacagacaatcctttgtatctgtgggtttcacatccgtggattcaaccaacctcagattgaaaatatctggggaggaaaatgaatggttgcatctgtacttagtatgtacagacttttttcttattattatccaaacaatacagtataacaactatttatatagcacttatattgtatttggtattataaataatctagaggtgatttaaagaatacaggaggaggccaggcacggtggctatgcctgtaatccctgcactttgggaggccgaggtgggtagatcacgagatcaggagatcaaaaccatcctggctaacacagtgaaaccccatctctactaaaaattcaaaaatttagccagacatggtggcactcgcctgtagtcccagctacccaggaggctgaggcaggagaatcgcttgaaggaagcggaggttgcagtgagctgagattgtaccgctgcactccagtctgggcaacagagcgagactccatctc

SEQ ID NO: 1588 - DNA, 3147 bp, Homo sapiens
tctaatgcacgacagattcctttcagacaggacaactgtgatatttcagttcctgattgtaaatacctcctaagcctgaagattcctctaaaaaaaaaccaataccaaagaagcctacaatgttggccttagccaaaattctgttgatttcaacgttgttttattcacttctatcggggagccatggaaaagaaaatcaagacataaacacaacacagaacattgcagaagtttttaaaacaatggaaaataaacctatttctttggaaagtgaagcaaacttaaactcagataaagaaaatataaccacctcaaatctcaaggcgagtcattcccctcctttgaatctacccaacaacagccacggaataacagatttctccagtaactcatcagcagagcattctttgggcagtctaaaacccacatctaccatttccacaagccctcccttgatccatagctttgtttctaaagtgccttggaatgcacctatagcagatgaagatcttttgcccatctcagcacatcccaatgctacacctgctctgtcttcagaaaacttcacttggtctttggtcaatgacaccgtgaaaactcctgataacagttccattacagttagcatcctctcttcagaaccaacttctccatctgtgacccccttgatagtggaaccaagtggatggcttaccacaaacagtgatagcttcactgggtttaccccttatcaagaaaaaacaactctacagcctaccttaaaattcaccaataattcaaaactctttccaaatacgtcagatccccaaaaagaaaatagaaatacaggaatagtattcggggccattttaggtgctattctgggtgtctcattgcttactcttgtgggctacttgttgtgtggaaaaaggaaaacggattcattttcccatcggcgactttatgacgacagaaatgaaccagttctgcgattagacaatgcaccggaaccttatgatgtgagttttgggaattctagctactacaatccaactttgaatgattcagccatgccagaaagtgaagaaaatgcacgtgatggcattcctatggatgacatacctccacttcgtacttctgtatagaactaacagcaaaaaggcgttaaacagcaagtgtcatctacatcctagccttttgacaaattcatctttcagaaggttacacaaaattactgtcacgtggattttgtcaaggagaatcataaaagcaggagaccagtagcagaaatgtagacaggatgtatcatccaaaggttttctttcttacaatttttggccatcctgaggcatttactaagtagccttaatttgtattttagtagtattttcttagtagaaaatatttgtggaatcagataaaactaaaagatttcaccattacagccctgcctcataactaaataataaaaattattccaccaaaaaattctaaaacaatgaagatgactctttactgctctgcctgaagccctagtaccataattcaagattgcattttcttaaatgaaaattgaaagggtgctttttaaagaaaatttgacttaaagctaaaaagaggacatagcccagagtttctgttattgggaaattgaggcaatggaaatgacagacctgtattctagtacgttataattttctagatcagcacacacatgatcagcccactgagttatgaagctgacaatgactgcattcaacggggccatggcaggaaagctgaccctacccaggaaagtaatagcttctttaaaagtcttcaaaggttttgggaattttaacttgtcttaatatatcttaggcttcaattatttgggtgccttaaaaactcaatgagaatcatggtaaaaaaaaaagttaaccaaagaatatacctgtacataatttgtacagttttaagttgttagataggaactggatttcttatgtattagacattattgctcaatcataatggaatagattctgcatccctaaatgtatgaaccataaggttaaaaaagatgaatggaaatatcaaacaacttttcactgagcatcagtttcataatcaataatataagaagattaatttggattctagtatgtttcagtttgtttttaattaccaccttcctttggtagaaaaaatatgttccttgatgtaggaaagtctaggttttagagattagaggatgagatcaagagttaaattcctaaagaagcactgaatatatgaagagagcaaacaaatcaagtaccaacctagaggctttatttttgaattgattcatggtgtgtgtgtgtgtgtgtgtgtgtgtgtgtgtaacacagaaacagcttcagaaaataagggatagaaagtaatgaagaaagtacttaccccatattgccataaaaatagcaaagaagactgtccctccattatcgaacaaatatgtcacctgagtagaaaacaaacagaaatattagtcatgcaaattgattataataagccagtgaatactgtttgcactcaggtactatgattttttctcaaatagaatcatattattttatagtacagaaatattatatatgaattcctttcatgggtcttgcaacaatttcacatgatttttctcatggggagaggtgaagaaacaacattagccctcttctctcctctcttgattccctttataccccaccatcatttctgattataaataattctaccattctatggaagtatttgtgggtcacagattgtcaaactacttaatgaaagttgtatgaaattagtttttcaggtgaggcattcctagttgcaattcctgttagcaaaacttctaggagtggggaagttggaaaatgcaggattcttccagtgagccagcatttcccatagctaaccctattctcttagtctttcaaaatgtagaatgggtccaataatggctataagatgtaataaatcccatcttaatttgttttaaaagtttcataaatcactgaacacttatgaaacaaagtgttttttaatcagatatcaactgaaacttcataaaggatgcatagttttataatgttattgaatcaaattttaaggcttgtattgtttgattttaataaagtataaattcaattt

SEQ ID NO: 1589 - DNA, 3589 bp, Homo sapiens
cattttaaaacagcagagtttgtgaaaggcagcagaatcccgctccccatgcttgccttcgggaccctcactggagcagaaccattgcttagagcgtgagaaggagaagcgagtgtccgtcaacatgctggctctgggtgagacctcgatgttcctggttcgccgggacagcagctcgaagcagctggtgctctgtgtccactttccttctctgaacgaaagctcggccgaggtgctcgaatacaccattaaggaagaaaagtcgatattgtacctggaaggctcggctcttgtgtttgaggacatcttcagattgattgcgttctactgtgtcagtagagacttactgcccttcacactgcggctaccccaggccatccttgaggccagcagcttcacggaccttgagaccatcgccaacctgggtctgggtttctgggactcctcgctgaatcctccacaagaaagagggaagccagcagagcccccaagagaccgggcccccggattccccctagtctccagcctcaggcccacagcccgtgacgcaaactgtgcctgtgaaatcgagctgtcggtaggaaatgaccgcctgtggtttgtgaatcctattttcatcgaggactgcagcagcgccctgcccaccgaccagccacctcttggaaattgccctgcacgccctttgccgcccacctctgatgccacctcacccacctccaggtgggccccacgccgcccaccaccccctcccccagtgctgcccctgcagccctgcagcccagcccagccccctgtgctccctgctcttgcccccgcccctgcctgtcctttgcccacctctcccccagtgcctgccccccacgtcacaccccatgccccaggtcccccagaccatccgaaccagccgcccatgatgacctgcgagagactcccatgccccactgcaggcctgggccccctcagggaggaagcgatgaagccaggggcagcctccagtcccttgcagcaggtccccgccccgccactgcctgcgaagaagaaccttcccactgcccctcccagacgccgcgtttccgagagggtgtccttagaagaccaaagtccggggatggcggcagagggggaccagctcagcctgcctccccaagggacctcagacggccctgaggacacgccccgggagagcacggagcaaggccaggacacagaggtgaaagccagcgatcctcacagcatgccagagctgcccaggacagccaaacaacccccagtcccgccccccaggaaaaaacggatctctcgacaactggcctcgaccctcccagctcccttagagaacgctgagctctgctcacaggcgatggccttggagacacccacgccgggtccacccagagagggccaaagccctgcttctcaggctgggactcagcaccctcctgcccaggccactgcccattcccagagctctccagagttcaagggctccctggcctccctctcagacagcttgggggtgtctgtcatggccaccgaccaggactcctactccaccagcagcacggaggaggagctggagcagttcagcagccccagcgtgaagaagaagccctccatgatcctgggcaaggctcggcaccggctgagctttgccagtttcagcagcatgttccacgctttcctctccaacaaccgcaagctgtacaagaaggtggtggagctggcgcaggacaagggctcgtactttggcagcctggtgcaggactacaaggtgtacagcctggagatgatggcgcgccagacctccagcacggagatgctgcaggagattcgcaccatgatgacccagctcaagagctacctgctgcagagcaccgagctcaaggccctggtggaccccgccctgcactccgaggaggagctcgaagcaattgtagagtctgccttgtacaaatgtgtcctgaagcccctgaaggaagccatcaactcatgcctgcatcagatccacagcaaggatggttcgctgcagcagctcaaggagaaccagttagtgatcctggccaccaccaccactgacctaggtgtgaccaccagcgtgccggaggtgcccatgatggagaagatcctgcagaagttcaccagcatgcacaaggcctactcacctgagaagaagatctccatcctgctcaagacctgcaaactcatctacgactccatggccctcggcaacccagggaagccctatggggcggatgacttcctgcctgtgctcatgtatgtgctggcccgcagcaacctcacggagatgcttctcaatgtggagtacatgatggagctcatggaccccgccctgcagctgggggagggttcctactatctgaccaccacctacggggccctggagcacatcaagagctacgacaagatcacggtgacccggcagctgagtgtggaggtgcaggactccatccaccgctgggagcgccggcgtactctcaacaaggcccgggcctcccgctcctccgtacaggacttcatctgcgtgtcgtacctggagcccgagcagcaggcgcggacgctggcgtcgcgggcggacacccaggcccaggcgctgtgcgcgcagtgcgcggagaagttcgcggtggagcggccgcaggcgcaccggctgttcgtgctggtggacgggcgctgcttccagctggcggacgacgcgctgccgcactgcatcaagggctacctgctgcgcagcgagcccaagcgcgacttccactttgtctaccggcccctggacggtggtggcggcggcggcgggagcccgccctgcctggtggtgcgggagcccaacttcctgtgaggccctcccggggcgcctcccctcacccccaggcgcacgtctggccccgcctctggctgcgcactcccgaccgcgacgtccacgcagcagagggacatgggccattccatgacgtgcccaggccaacgtcgcaggacagttgtgaaaataacatgacgctcgtccaaggccacttcctgagggcaagtcctaatagccctgagacaccgagacggcatgttcttcattagacggaaagggaaactgaggctcaggagagaggcgctccaggccgctgcagccaacaaaccggcgccctcttcacacgtagctcctcaggccattccccatgagtcccccacacccaccccatcctcggtctttgcaaagaagggcccgagcttagtttccccaggactggcctaggaaggagcaccggccacagctgctccccgtgccactcagggtggacccagcatctcaggagcacctcagggtgtcggttaagagacaggcctccacccctgcaccagagcctgctcttagctcccggtgcccccagaccccgcagctctgtgcccggcaagaagcagctagacacacgccagggcgccaagcacggccagctccgcggacccatggacaagcccagccccgcctcagggaaaacagggcctttccctacaggacacgccccagagctgtggcagattgcaggagccatcgtgtggggagaatttaataaaagcccttttg

SEQ ID NO: 1590 - DNA, 3178 bp, Homo sapiens
gtgaaagaagcacatttggagaaagaggagaagaggcccaggtgttctgtggctcaggggcaagctctgagctccctgagcaatggccccatgctccgggactcagaggccgaggttactgaggaggatcccaggctgcgggcccagcagctccatcaccgggtgctgaccctgcagtgccagctcagggaccagggcgctgcccaccaggcgtctctggacgaggccacccgcctccaggaggagctccaggccaagcttgaagaacttcagaaaaagcaacatgaagcaaagttggcagtgactcccctgaaggccaagatagcttccctcgtccggaagtgccgggagaggaaccgcctgatcacccacctgctgcaggagctgcacagacatgggctggggaacctcctgctctccgagctggcgcagaacatgctcaacgacgtggcactggctgagtacacggccaccttcctggctccgggagtcccagagacaagccaccacctggacgtcaagtctgagatgacggcagctttaagagctcagacatacctcttgaatcctgaaatggacagtgtcctccaaagctcattgtcttcagagtcctggcctattcccgagccggagtggccagcacagacagcccaactggattctctgaagctccctctgtccttggtgtccacgcttgatcctggaacgtgcctggcagcggtcactgtggaaccaggtctccccgcacaacgtctgcaagaaaaaggcggaatgccctgtcctgccctccaagtcgataacgtcccagcaccctctgagctcctgagcccagcaaggatcctggcttttcaccaagagcttagacaaagcatttgcagcaattcccaggtccataaatcaccgctggagttagaaatgtaatagggccactcattctccggagccatttcatagactccataaatatttgaagcagaaccttcagagagtgctttaagaaattggtagcaatcagagccctcatttagtggcaagtggttttgccttcggctttgggattttgtgttcattgtcagagcttgagagaaacgctggcctgtgcctggcaaattctgaggagtttggctttggcaatgtcaaggcagcataggaaatatttactgtaccaaaacctattgaatgattggtccagaggttctcaactgggcacagttttagccccccagggaaaatctggccatgtctggagacatttttggttgtcacagctgggacactgctactggcatctggtgggtagaggccagggatgctatgaaatgtcctacaatacccaggccagcctcctacagcaaagaattacagcccgagggtcgccagtgctgaggtcgagagtccaggacggatctcatagctcccaacaagatcagccatggagaattgttttgttttgttttttctctgcccccggggtccttcccatgttttaaaagattttttgtctactaagtgaaacgcctaagtcaccatatattttacatttaaaaacattaaaactaaccagaactttctaatcagtccatccactccaaaaacgtctgttgatatccactggatgccaggcaatgtggcatgaaggagaagagacaagtcaatgttgatcctggcgctggggacctcacaggacaatgggagagatactcctgtgagtaaatcagcacgcacgcaagtgtcacatgtgccctgagcaacgggatgaaggtaagggtccgttctacttggcttgggacaactggaagtcagccacaaaggaatggctgggcagtgtccggtgggtgaggtgggaagggtgctgctgtacgagggaacgcatgtgcaaaggccctgaggcataaaactgaactgtggatgtgcccctggaggggaagtgggcaaagcatgctcttgtcaagccagctgcaagcagtcactgcatcgttcccatccagcaccccttccttccaccgagaacagagactcgtgccccgaatcaggtgggcgacccaggagaagagcacttctatcctgagggcagccccccaaaaagagagtctagggagcttggacgacacacaccagaccctgacccaggctcacccaccagagatgtcacctctctctttgggaaggggctgaggaggggcttaagggaaaggccaaagccgctacctgtccaattctgtcctctcctggaagtgactgtcccttcacggaaggacaaacaaggacaaggacaaggaactgacggctccccaggaagtgtcaaagtgtatagatttattttaacgtagtttagctttttgtttgaaatgaaaattacacagagttcccgtagactcttccccgggcttcccttgatgttaacatctcatgtgacttatgttgtacaattatagaaactagtgggttttatttcgaggaaaattggggagccattgagacgtaagaaaggcagcctcagcacattgagttccaccctttaaattcgtttatggggttttctgatgggttagcacattcatccatgtattcctggattgatttacccacagatctgtctatttatttatttattcaatatgcatttagtgactgctgtgcgagtgtctggctggatgctgctggggaagaagtgaagatgatgctgtccacctaggttttcagggacccccctggagaccctgtggccccgttaccacccctcaagaatccccagattggaaaccactgcggtgatccctttgttggttcaaccaccccagggcttccctataatttccaagcaggaagtgacctgcagcactggtttggtgatccgccttctgcctccctctgtattttgggacaacgtcattagctttgagcatcaggaacatgacagagagaggacagaaacccggtgcagccgaggacagccagctgagcccttgctgagccagcgagatgcagcgtggtgccaccacatctggtctccaggagtcccaggagctcagacgtccgtcgtcttgtgacttcatgctcccctctgccgcgctcacgtgctgggcctgggcagaaaggcaacccaggaaatccattaaagcaagccaagacgacctttgcagcgtaacccaacgattccctaataaatcatgtttcc

SEQ ID NO: 1591 - DNA, 4250 bp, Homo sapiens
acttcagtggcggtcatttttgcagcgcttgggtgcatccagaccgtcagagctttgggagcgctttgtttggcgacagtcggaaggcgcgaggggaggggtcctcccgctgaacagtgggggttctaagggtcggcggcggcggggttgacggctttgcctaggtccctccgcccgtagctgtcgggtcccggccccgctctgcccacagactccgatggctgcggccgcgctgagggccccgactcagggctgtgtgacctttgaggacatcgccatttacttctcacaggacgagtggggacttcttgatgaggctcagagactcctgtaccttgaagtgatgctggagaactttgcccttgtagcctcactgggttgtggccatggaacagaggatgaagagacaccttctgaccagaatgtttctgtaggagtgtcacagtcaaaggcaggttcatccacacagaagactcaatcctgtgagatgtgtgtcccagtcctgaaagatattttgcatttagctgatctccctgggcagaaaccatacttggttggagaatgtacaaaccatcaccagcaccagaagcatcacagtgcaaagaaatccttgaagagggacatggacagagcctcatatgtgaagtgctgcctattctgtatgtcattgaagccctttcgcaaatgggaggttggaaaggaccttccagccatgttgcggcttctgaggtccctggtctttcctggaggcaagaaacccggcacaattactgaatgtggggaggacattcgcagtcaaaaaagtcattacaagtcaggtgaatgtgggaaggcttccaggcaccaacacactcctgtttaccatccaagagtctacactggaaaaaagctttatgagtgtagcaaatgtgggaaagccttccgtggcaagtactcacttgttcagcaccagagagtccatactggagaaaggccttgggagtgcaatgaatgtggaaaattctttagccaaacctcccacctgaatgatcatcggagaatccacaccggagaaaggccttatgagtgcagcgaatgtggaaaattatttagacaaaactccagccttgttgaccaccagaaaatacacactggagcaaggccttatgagtgtagccagtgtgggaagtcctttagccaaaaagccacccttgttaaacaccaaagagttcacactggagaaaggccttataagtgtggtgaatgtgggaattcctttagtcaaagtgccattcttaatcaacaccgaagaattcacactggagcaaagccttatgagtgtggccagtgtgggaaatcccttagtcaaaaagctaccctcattaaacaccagagagttcacactggagaaaggccttataagtgtggtgactgtgggaaatcctttagtcaaagctccatccttattcaacaccggagaattcatactggagcaaggccttatgagtgtggccagtgtggaaagtcctttagccaaaagtctggtctcattcaacaccaagtggttcacactggagaaaggccttatgagtgcaacaaatgtgggaattcctttagccaatgctccagcctcatacatcaccaaaaatgtcataacacatagaggcctcatgaatgcagcaaatgtggaagcgccttcaactcaagatctatcatcatttagctcctgaaagtccacacttaagtagagccttagacctacagggaaagtgctgtctctgtagtattgtagcagtagagagcctttgtgagggagccatctgcctgaagttgaacctcattcttccttgtttctctggtagaaaccatctaccctctaccaccttgcacagtgggcactggtcactcctatgtgctaagacaaggcagacatctgtgtgttctcttaagtctttggaggaaatcttgagcagtctaagcctttagagaaaattcattcttttttctgactgatcagcatacgtgtgacccagtttgggtcaggagggcccagccttggttctgctggacacttatgtgcaaggattcccttcatgtaaattcttggtctcacatgacacttggtcattcttccagcctccatgtcaccacgtggtgaatggctgcctcacattgctccagtttgtgcactaataaaagccttatatttgaatctacctgtagtcttggggttctgtttactgtgtggggtggctgggagacagacttcaactctatatgaaggaatggatggcttttgtgggcctctgcaggaaagtaagatgacagagtaattctaattctggttttggtcatacttgctttgctacctaaaatctcctaggaaaaaatgcaaggttttggttattctaatttgtggcctggatccctattctttctgtgagactagaggtcatcctgaggagaggccagctgttatgacaagcatgtgtgcttcagggaataggacaattttattccattgtttccagaggatgtcatatgatgcccagtgctgctgagaagcttttcatggggttctataaggaggcatgccctgatatcaaacattccataggccgatgtcacgcagaagacaacgcgagtcacatgtgaactgtaattggtacagaaatacctgggtatttctgtactgtgtgtactgtagcaaactagttggaatgtgcctcttataaaagtacatttacaaatcttcccgtgactgtggctttgagcagtcataggacctagaaatctgtgtatgtccaatagctgaggttattttcagcaaaaataattaaagggttttattttttaattcttgttggttttctaggttgttcacctcaagtgcattgctgtagaggcagaaaaaggaggataaagataacagaagtcctataggccagggatgtattgatagctcttgtgatttccaccagtgttgctgttgtctcaaattgccacagccttcattgcttgccaacatttcctgcatggagggactcatggttgcccttccccaggcctgaagagagagtgcagtcaacatgagattgctaggcattctggtttctgaaagttgggtgatcagatactttattgtgaaacatgttttacaaactttcttgatgtgtaagtgacatgccatagtttacatccatttatggtgtataatttgaagagtttgtcatacaagcctgtgaaaccataatcatgatcatgaacatattcatgattcacctcttgctgttttacaatctctgcgtgtactttccaggccttcaggagtcctgtcatttactttccctacaggagaatagtttgtgttttctaggattttatgtgaattgaaacgtaaaatacttactccatttttcctgatgatgcacaattttttttttttttttgagatggagtctcagtctgtcaccaggctggagtgcagtggcatgatcttggctcactccaacctcctcctgggttccagcgattctcctgcctcagcctcctgagaagctaggactacaggcatgcactaccacgcccaactaatttttgtatttttagtagagatgtggttttaccatgtttgccaggatggtcttgatctcttgacctcgtgatccgcccgcctcagcctcccgaagtgctgggattacaggcgtaagccaccacaccagctgatgcacaattacttttaagatttatcaatattgtttatgtgaatagttcatttgtattgctgagaaatagtctgtggatatgtcacaatttggataaacagttggatgctttccagttttgggctgttgcaaataatgctactatgaacataggcatataactcttaatatgcagaaatgctttatttctcctgtgtcagtagtacagtgtacgtgaatgcgtcacttttaaagacaaggccagactataacctaactgtaccatttgcattctcatcaacagtatgtgaaccttcttatttctctacattcttgccatacttggtatggttagtctttttaattttagttgttttaatagctgtataatagcatctgtctgtgattttattgcatttttctggtattttatggtattgaacatttgaacatcttgtatctagttgccacctgtatatcctctttggaagaatgtttattaatgtcttttgcttatttttaaatggatgttggtgatactttttcattaataaatagacgtataac

SEQ ID NO: 1592 - DNA, 4524 bp, Homo sapiens
attcacactgttgcaggcgtgcaggtcggtggtgttacattcatgctgttgcaggcgtgcaggtcagtggtgttacacacattcacgctgttgcaggcatgcaggtcggtggtgttacacacattcacacttgcaggcgtgcaggtcggtggtgttacacacatgctgttgcaggcgtgcaggtcggtggtgttacattcacactgttgcaggcgtgcaggtcggtggtacacacattcacactgttgcaggcgtgcaggtcggtggtgttacacacattcatggtgttgcaggcgtgcaggtcggtgttacacacatgctgttgcaggcgtgcaggtcggtggtacattcatgctgttgcaggcgtgcaggtcggtggtgttacacattttcacgctgttgcagacgtgcaggtcagtggtgttacattcatgctgttgcaggcgtgcaggtcggtggtgttacattcacgctggtgcaggcatgcaggtcggtggtgttacacacaacgctgttgcaggcgtgcaggtcagtggtacacacattcacgctattgcaggcgtgcaggccggtggtgttacattcacgctgttgcaggcgtgcaggttggtgttacacacattcacacttgcaggcgtgcgggtcggtggtgttacacacattcatgctgttgcaggcgtgcaggtcggtgttacacacattcacacttgcaggcgtgcaggtcggtggtgttacacacattcacactgttgcaggcgtgcaggtccgtggtgttacacacatgctgttgcaggcgtgcaggtcggtggtgttacattcacactgttgcaggtgtgcaggttggtgttacacacattcacactgttgcaggcttgcaggtcggtggtgttacacacattcacacttgcaggcgtgcaggtcagtggtgttacacacattcatgctgttgcaggcatgcaggtcggtagtgttacacattcatgctgttgcaggcgtgcaggtcggtggtgttgcacattcatgctgttgcaggcatgcaggtcggtggtgttacattcacgctgttgcaggagtacaggtcagtggtgttacacacattcatgctgttgtgcagctatcacttccatctccagagcccttttcatcttaaaactgaagctctcccatcacacagtgacccttcatgtccctccccagtccctgaaaaacactgttcaggtttttcttcctggacctcattgtgtggagttcctcgtgtgagtgcagtcacacacgatttgtcctttttttgttttcgtttgttgagacagagtctcattctgtcactcaggctggagtgcagtggcgtgatcccagctcactgcaacctccactcccaggttcaagtgattctcctgcctcagcctcccaagtagctgggattacaggcgcctgccaccacgcccagctaatttttgtgtttttattagagacagggtttcaccaagttggccagactggtctcaaactcctgacctcgtgatccacccgcctgggcctcccacagtgctgggatgacaggcgtgagctaccacacccggctgatttatccttttatttgggctcctttcactcagcgtctttaagcttcatacgcgaaagatgcttcagagattcctttttcaggctgaatatctgctgcgtggctaggccactttttgtttaatcctctctcctctggtggacaccaggactgtgctgttttggttgctgtaagcgcgggtgcacacgcctgcctgaggctgtgttttggccgttgtgagtgtgggtgcacacacctgcctgaggctctgctttgttgtgagtgcgggtgcacacacctgcctgaggctgtgttttgggtgttgtgagtgtgggtgcaaacacctgcctgaggctgtgttttgggtgttgtgagtgtgggtgcacacacctgcctgaggctgtggcgcgatctcggctcactgcaacctccacctcccgggttcaagcgattctcctgcctcagcctcccgagtagctgggaccacacccaccaccacaccccgttatttttttgtatttttagtagagatggggttttgccatgttggccaggatggtctggaactgacctcaggtgatccacccactggcctcccaaagtgctgggattacaggtgtgagccactgtgcccggcctctttttactttgttaatggtgtattttgatagataacagattgtcattttcatgaagcacagctggtcagtttattgttgctcatgtatttggcctcatgttcgagtccctgtttttaatcatgagctggacacagccctctttagagcaactgtgaccacttgtggtgagaagtgcagcccacaccatccacgtgaggctcccacacgccatccacgtgaggctcccatgcagacatttagaaggcgttttcactgcagctcagaaaatggccccaggcccccatgggcacccccatgtcaccagggcctctggttgctgccggtacacagggataggcagccaggcctcgaaggtgctgggcatgggtttgggtgtctgcgttgggtagagacccggagcgcccttgctgggcgtgccctaacatcccggtaccctgtgcccctctgtgggccaggacgcctggtgctgccagctgggcgtaagccctgaggagctgagggtggctgtgacttggaggatgagtaggagctcaccaggagggcgtggagccgaggcgtttaatatcatcaggagcaacactgggctcagaaggcaggcacacttgccgtccctccagagccatggctgacggccaggcctggtgggctctcgtgaggacagtgcctgtggttgtcagatgctgtcccttcgagtaagggatgagagccatcctgaagatgggtcagctctgtggtgaccacccgttgggagcagtgacattcaggtgcgttgcactggtggctgtgtggctgtgtggtacggccaccaggagccatgtgggcaaggacagctgtgggctgggcacagagctctctctgctgggagtcagtcggtgctggggcgaggggaggcagagctcacagagcccctctacagctcaccctgcagctcggccctggccagtaaacccaccatccccctttctgccgcaggaggcagtggagaaggtgacacagcacatccacggcctgtctgggaagaaggatgggctggtgcccatgttcatcaatacccacagtggcctcttcacccacctgggcgtattcacgctgggcgccagggccgacagctactatgagtacctgctgaagcagtggatccagggcgggaagcaggagacacagctgctggaagactacgtggaagccatcgagggtgtcagaacgcacctgctgcggcactccgagcccagtaagctcacctttgtgggggagcttgcccacggccgcttcagtgccaagatggaccacctggtgtgcttcctgccagggacgctggctctgggcgtctaccacggcctgcccgccagccacatggagctggcccaggagctcatggagacttgttaccagatgaaccggcagatggagacggggctgagtcccgagatcgtgcacttcaacctttacccccagccgggccgtcgggacgtggaggtcaagccagcagacaggcacaacctgctgcggccagagaccgtggagagcctgttctacctgtaccgcgtcacaggggaccgcaaataccaggactggggctgggagattctgcagagcttcagccgattcacacgggtcccctcgggtggctattcttccatcaacaatgtccaggatcctcagaagcccgagcctagggacaagatggagagcttcttcctgggggagacgctcaagtatctgttcttgctcttctccgatgacccaaacctgctcagcctggatgcctacgtgttcaacaccgaagcccaccctctgcctatctggacccctgcctagggtggatggctgctggtgtggggacttcgggtgggcagaggcaccttgctgggtctgtggcattttccaagggcccacgtagcaccggcaaccgccaagtggcccaggctctgaactggctctgggctcctcctcgtctctgctttaatcaggacaccgtgaggacaagtgaggccgtcagtcttggtgtgatgcggggtgggccgaccagaggggggcttcgaggtggtccctggtactggggtgaccgagtggacagcccagggtgcagctctgcccgggctcgtgaagcctcagatgtccccaatccaagggtctggaggggctgccgtgactccagaggcctgaggctccagggctggctctggtgtttacaagctggactcagggatcctcctggccgccccgcagggggcttggagggctggacggcaagtccgtctagctcacgggcccctccagtggaatgggtcttttcggtggagataaaagttgatttgctct

SEQ ID NO: 1593 - DNA, 3053 bp, Homo sapiens
tttgttttacctgctcagtgttctgaactccttccttttcactactaagcatcctccatgaagccacacttcattttgtcattgtgaggttgatgggcatctagggcaaatctaacttctaaagaccaattcttacgaggtgtcatggtcaagcagaggccatggccggcactggtctaggtggcccatggcccatttgggggccttggtgggcctcgaggaagggcaggtgctggtcagggagccgggtcgctaggcagcaggtgggtgtcaccccagtccacgctgctggggtgcctggcctgatgcaggctgtgcctgagggagacagaagcagcagagtaggctggccggcctccccagccccaccacaagcaggagcttcagagacagaaggagcacctgcaccccctcacctgccctccagggcctggcctggccctcccagctcaactccagggtctgtacgctctggggctggagcttagtgggagtgtggcccccctcagccctttctgcatttgagtggaagccagtgtgcgaagcagatcaaaatggatgtgcttgtttttccttcagtaagaacagggagttgagcctgtcccaacatggccagcagcccctggagggccaacagacttcacgagcaaggaaggccgggaggtgacctgctgaccagaacttacttgtgcccctcccccccgcccaaaacccccaacattctggttttcacagccccaccccagccacctggaacaaatagtgtctaggagtagccctcagggttggccgcgcagacttcctgccctgggatgaggctggcctccccaggcgaggcagcctgggccacaggggaacgtctctgcctcgcccaccctcctgatctctccatcagacaagctgaggccagccaggctccaccctggcaggttgcaacagatggtctgagtgtgtgtgaagtaactggcctctctactttcttcaataagtaattaagatcaaaagcccagagaaaaacaacagaggtttgcggcagaagtggccaatgtcgggcccagagtccatgctcaaggctggaagcccatcctggatgtgctgcactcggcagtcctagtgtaattctgcagggcccggcccctgccagggtctgagctctccagcctgtggcatctactcccctccaagcccaccccagtgtctcaattggagagacaggccctcatggtccccactctggcccagccccctctgcacacagctggccgagctctgggcctctccatgctgtggccctggtgatggcagagccttgggatgtctctgtccatgtggtcacaggacatgtgtgtggcagcagggccatggtggggtgggatgctgttccaaggcccagaaccattctgtaagaaaccagcacagcgctgcaagaaagggggtcctaggggacacaggccacacaggtgtgctttgaaaaatggcaattaaggtcaaagagcaggaagtccacaggacgggccaaggccaaggctcccgctggccatggggaagccacctccagggcagtcccagggactgaattagaagttgtcccaagtcacttcaggtccaactgggacagcagaggtaacccccctgcaccctcatggggcagcttctttgggtcctaaatgtggactcagaggtggaaacggtctgtgtccccaggtcctgcagacattcgctttgtctgggagaagaatgggcgagctctggagacctgtgtccctgtgcagacccatgcactgcctgatggcagggcccatgcactcagctggctgcaggacgccatcagggaaagcgctgagtatcgctgctctgtcctctcctcagcagggaacaagacttcgaaggtgcaggttgctgtgatgagacctggtaagtgattcccatgcccactgttacccttttatgaggtaatttttcactatttacaatggcagtgaaaaaaacagctggaaagcatgcttgcacggtggcattctgggtttgggatttattggctttccattgagaaaggtggccagtgggcatcaagggtgccataaaggcccacagagctttgacctggggaccctgcttgttttccagaagtgacccaccaggagaggtggaccagagagctctctgcctggaaggctgtggctggggagcacgaccggatgatgcagagctggaggaaggcgtgggaaagctgtagcaaggacaccctgtagccaccaggaaggagtccctgacaccgacctcaaccccaacaagaccctgctgccactgaccacagccacccccggagaaggcctggtcccccacaactgtgaactgtcttgcccaagcctgctctgaacacagccattgggccaccacctgatgggcagaggcgggacagtggagaagcctggaacccaagtgggcctgtgacaggaactaagacttaaaaaattaggtgcttacctgggacagtaagttctgtctggcacaagcaggtaaccaggatggctaacaggctttgatagctgctcgtgaactaaaacagcagggtgtgtgcaggttcctcctctacggtcaggcagcaggctctgaaggctgatcctacaccgtcccagtgactccccttgacagagtgcccccaccccctaatagccaacagggttagcatggccagcacagatcgctgcttttattgatgcaaatcaagcctgctgcttctcctccctgcagacttagccaaggaactccaagatgcatgactgggacaagaaaaggtgagactccacatggaaatgccttgccctaaaccttgaatgactgtgagatgcgatctgggagtgcatctgtcaagtctttgtgttttcttcactaacctcagaatactgggctctattttatcaagcgctgcagtttatgcctctgtcccgtcaatgctcagcttctgcaacaggacaccaaacttgatgcagaaagccaaataggtcaattatgcaaatctcctggtgccatattaaatttcttgacaatgg

SEQ ID NO: 1594 - DNA, 3248 bp, Homo sapiens
actcgttctaagagtttctgggaggcagatgaaagttggggagagcaaaagacaccacaagaagggatgggagtgctgtttatcacagtagagctttcgcagggttgggtagggcattgggcccagcaaagagggaggaagagtaggaccccagacataccattgtcctttttatggaggggggggtcagctttgttctccctgtatgtggctctgccatgcagttgggggtctggtcttctgtcttggagaggctgtctgtcaatctgtaactgggcccatctttttgcttcctggccttttctctttcttctgtgcttacagtatcatgagcctccagaggacatcaaggcactgtcttggaaccggcaagcccaacacattctgtcttctgctcaccccagtggcaaggcagttgtgtgggatctcaggaagaatgaacctatcatcaaagtcagtgatcacagcaacaggggggatcttgtcagtgtcatggagccaggctgatgctgagctgctgctcactagcgctaaggacagccagatcttgtgccggaacctggggagcagtgaggtggtatataagctaccaacacagagcagctggtgctttgatgtgcagtggtgccctcgggacccttcagtgttctctgctgcctccttcaacggctggatcagtttgtactctgtgatgggtaggagctgggaagtccagcatatgagacaggctgacaaggtttgaagggcttggtagagaatgctggagggaaggggctgtctctgtttgtgggagagagacatatggcttgagaagcggagatattggagattgggagaccagggcccggggtttgggagggctgcacctttgccctagtgcccatcttcctgaaaggatgttagtttctgccacaatgtgaagaaggccttcaccttgactcttgttattggatgggccctgcagtatttcagggaccgtgggacccctttgctgggacagttatttcaagagtatgactcttatctttctctcctctatagatccattttgtgccacactccattgtagactttgaatgtagtagtctttccaagagcctacttgcatgggagtcccaccctcgctaccactcacttccccatcccctggaatatgggagtctgacctttctaggtcaaattgggtgtctcaaggattcctcccaaaatggagtttgtaggtggagttcctgactaaactgccactttaggatggcgatgcaggtgtcttttccccccagatctcctcttccttcagcaaaggccagcctctcccaccactgcaggtgccagagcaagtggcacaagcaccactgatacctcccctgaaaaaaccccccaaatggattagaagaccaacaggtgtttcatttgcttttggagggaagctggttacttttggcctccccagcacccctgcccatctggtgccacagccttgcccccgcctagtcttcatcagtcaagtcaccacagaatctgaattcctgatgcgatcagctgagctgcaggaagccttgggatcaggaaatctactgaattactgtcagaacaagagccagcaagctttactgcaaagtgaaaagatgctgtggcagttcctgaaggtgaccttagagcaagactccagaatgaaattcctaaagcttttaggatacagtaaagatgagcttcagaagaaggtggccacatggttgaagagtgacgtggggctaggtgagagtcctcagcccaagggaaatgacctcaacagtgacagacaacaggccttctgcagccaggcctccaaacacaccacaaaggaagcctctgcttcctcagccttctttgatgagctggtccctcagaacatgactccttgggagatccccatcacaaaagatattgatggactcctaagccaggctctcctgcttggggaactgggtccggccgtggagctgtgtctgaaggaggagcgctttgctgatgccattatcctggcccaggctgggggtacagatctgctgaagcaaacacaggagcgctacttggccaagaagaaaaccaaaatctcctcgcttctagcctgtgttgtgcaaaagaattggaaggatgtggtgtgtacctgtagcctgaagaactggagagaggcactggctttgctactgacatactcaggcacagagaaatttcccgagctctgtgacatgctgggaactcgcatggaacaggagggcagcagggcactaacctccgaagccagactctgttatgtgtgctcagggagtgtggagcggctggtggagtgctgggcaaaatgccaccaggctttgtcccccatggccctgcaggacctgatggagaaggtgatggttcttaacaggagcttggagcaactgcggggtcctcatggggtgagcccaggccctgccacaacctacagggtcactcagtatgccaacctcctggcagcccagggcagcctggccactgccatgagctttctacccagggactgtgctcagccaccagttcagcagctaagagatcggctttttcatgctcaaggttctgctgtcttgggccaacagtctccccctttccccttcccccggattgttgtgggagctaccctccactctaaagagacatcatcttacagattgggatcccagccttctcaccaggtaagacctcgtttgttcattcatttgttcattcaataatacgtgccaagcatggttctgggcacttggaatatattgtgaacaaaactgatgaaaattcccaacttccatagaacatagattcagttctttttataataaataactgtttattgaactactaggctcttaggacataaaggtgcaaaaattgtgatacttgccctcaagtagctcatagtgtagtcgaaagatagatatgtaaaaaatagctacagtaggcctggcgtggtggctcacgcctgtaatcccagcgctttgggaggccagagcgggcgggtcgtgaggtttggagttcgagaccatcctggccggcatggtggagccccatctctactgaaaatacaggataatgatctgggcatggtggcgcgtgcctgtggtcccagctactcgggaggctgaggcgggattgtcgcttgaacctgggaggtggaggttgaggtgggcccgggtcgtaccactgcactccagcctggcaacggagcgagactccgtctc

SEQ ID NO: 1595 - DNA, 2780 bp, Homo sapiens
agacgtgacccagggcagactggtagcaaagcccccacgcccagccaggagcaccgccgaggactccagcacaccgagggacatgctgggcctgcgccccccactgctcgccctggtggggctgctctccctcgggtgcgtcctctctcaggagtgcacgaagttcaaggtcagcagctgccgggaatgcatcgagtcggggcccggctgcacctggtgccagaagctgaactccattcgctgcgacacccggccacagctgctcatgaggggctgtgcggctgacgacatcatggaccccacaagcctcgctgaaacccaggaagaccacaatgggggccagaagcagctgtccccacaaaaagtgacgctttacctgcgaccaggccaggcagcagcgttcaacgtgaccttccggcgggccaagggctaccccatcgacctgtactatctgatggacctctcctactccatgcttgatgacctcaggaatgtcaagaagctaggtggcgacctgctccgggccctcaacgagatcaccgagtccggccgcattggcttcgggtccttcgtggacaagaccgtgctgccgttcgtgaacacgcaccctgataagctgcgaaacccatgccccaacaaggagaaagagtgccagcccccgtttgccttcaggcacgtgctgaagctgaccaacaactccaaccagtttcagaccgaggtcgggaagcagctgatttccggaaacctggatgcacccgagggtgggctggacgccatgatgcaggtcgccgcctgcccggaggaaatcggctggcgcaacgtcacgcggctgctggtgtttgccactgatgacggcttccatttcgcgggcgacgggaagctgggcgccatcctgacccccaacgacggccgctgtcacctggaggacaacttgtacaagaggagcaacgaattcgactacccatcggtgggccagctggcgcacaagctggctgaaaacaacatccagcccatcttcgcggtgaccagtaggatggtgaagacctacgagaaactcaccgagatcatccccaagtcagccgtgggggagctgtctgaggactccagcaatgtggtccatctcattaagaatgcttacaataaactctcctccagggtcttcctggatcacaacgccctccccgacaccctgaaagtcacctacgactccttctgcagcaatggagtgacgcacaggaaccagcccagaggtgactgtgatggcgtgcagatcaatgtcccgatcaccttccaggtgaaggtcacggccacagagtgcatccaggagcagtcgtttgtcatccgggcgctgggcttcacggacatagtgaccgtgcaggtccttccccagtgtgagtgccggtgccgggaccagagcagagaccgcagcctctgccatggcaagggcttcttggagtgcggcatctgcaggtgtgacactggctacattgggaaaaactgtgagtgccagacacagggccggagcagccaggagctggaaggaagctgccggaaggacaacaactccatcatctgctcagggctgggggactgtgtctgcgggcagtgcctgtgccacaccagcgacgtccccggcaagctgatatacgggcagtactgcgagtgtgacaccatcaactgtgagcgctacaacggccaggtctgcggcggcccggggagggggctctgcttctgcgggaagtgccgctgccacccgggctttgagggctcagcgtgccagtgcgagaggaccactgagggctgcctgaacccgcggcgtgttgagtgtagtggtcgtggccggtgccgctgcaacgtatgcgagtgccattcaggctaccagctgcctctgtgccaggagtgccccggctgcccctcaccctgtggcaagtacatctcctgcgccgagtgcctgaagttcgaaaagggcccctttgggaagaactgcagcgcggcgtgtccgggcctgcagctgtcgaacaaccccgtgaagggcaggacctgcaaggagagggactcagagggctgctgggtggcctacacgctggagcagcaggacgggatggaccgctacctcatctatgtggatgagagccgagagtgtgtggcaggccccaacatcgccgccatcgtcgggggcaccgtggcaggcatcgtgctgatcggcattctcctgctggtcatctggaaggctctgatccacctgagcgacctccgggagtacaggcgctttgagaaggagaagctcaagtcccagtggaacaatgataatccccttttcaagagcgccaccacgacggtcatgaaccccaagtttgctgagagttaggagcacttggtgaagacaaggccgtcaggacccaccatgtctgccccatcacgcggccgagacatggcttgccacagctcttgaggatgtcaccaattaaccagaaatccagttattttccgccctcaaaatgacagccatggcaggccgggtgcttctgggggctcgtcggggggacagctccactctgactggcacagtctttgcatggagacttgaggagggagggcttgaggttggtgaggttaggtgcgtgtttcctgtgcaagtcaggacatcagtctgattaaaggtggtgccaatttatttacatttaaacttgtcagggtataaaatgacatcccattaattatattgttaatcaatcacgtgtatagaaaaaaaataaaacttcaatacaggctgtccatgg

SEQ ID NO: 1596 - DNA, 4272 bp, Homo sapiens
gttgcggcggctccacgtagccaggcggcccgtgggctggagcgggcggagctcggcccgcggcttgcgtgagctcaggccggtcccagcgtccagagcgccggcccttcggcttcttctaggccatggcagggccgggcccaggcccgggggacccggacgagcagtacgatttcctgttcaagctggtgctggtgggcgacgcaagcgtgggcaagacgtgcgtggtgcagcgcttcaagaccggcgccttctcggagcgccagggaagcaccatcggcgtcgacttcaccatgaagacgctggagatccaggctgcagatctgggacacggccggccaggagcggttccgcaccatcacccagagctactaccgcagtgccaatggggccatccttgcctacgacatcaccaagaggagctccttcctgtcggtgcctcactggattgaggatgtgaggaagtatgcgggctccaacattgtgcagctgctgatcgggaacaagtcagacctcagcgagcttcgggaggtctccttggctgaggcacagagcctggctgagcactatgacatcctgtgtgccattgagacgtctgccaaggactcgagcaacgtggaggaggccttcctgagggtggccacggagctcatcatgcggcacgggggccccttgttcagcgagaagagccccgaccacatccagctgaacagcaaggacatcggagaaggctggggctgcgggtgctgaccaggggccgggccggcagactgggggttccccacctccttgctctccccagcctgccaagcccagccctccagagccagccctcctgggtaccggcaactacagcagccgggtgaagctctggagctctgcatcctgtggcctggctgcgggatggaggctctccttgaggaaggggaagcaggataccctggcgggccaccctgccagccagcagctggccctccaccatcttcacattccaagactggcctgaacccgccggtgtgggccacagtgggaggggccagcagtcctccctgtcccatgcctgctggctctgaccgtttcctctcatgggtttgctttacctgtggcagcaggttgctgctttccagggatgtgtccagtgccctgggttcttcccggtcatcctggggctctgcacagagcagcagagctagagccatgagacccacagacttggtgcctgagcgcagctccagggaagccccagccccttccaggcggggaacctgcttcctgccttcactgcccccgcagcactcacagacatctccctggggtctggctcactgccttatcaggacctctgagttttctgactttctgtgtagcttctcattttcatcagcacagcatggggtcacggcccacagctaggtggggtcacggcccacagctaggtggggactgtctgctggctcagggcccagtgttttgccactcaggttgcaaaattagctaatccttcagtgccagcactcagaagtctggcaggtgggggaatgagatgagaaagtggacatttaaggtccaagtagaagcttgcatccttgaggctcagggatgagagggcaccgcaaggcacccagccttaccccacaagcaggaatcctgccagccgagcgtgggtcccagtctatggaatcgagtctcccagacaaaaaaggagaggccctggcggtccttggcctggcccattttattccctggacccttaactgcctcaccctgagctgggcaccaaagttagaaggcaaaagtggggtagggggatgtgggaagcagcattgtcctctgggcatgtggctcagaggtatcacagtgacaaaagagccagggctagggctggaggggccaggtgatcttccttagccaatcccagtccgtctgtgtcagcccagctctgcctcgcagccccctcagcatgggtgcccccagaagtaagcagctcttggacccacgagcagggctgcgtcggtttgtggtctagctcccagggccaggccaggcatggctcagtgcagtccctgggccagtgagaggcctcccccatgcctccctgccctctgcactaagcactttccaggcaggcctggccatagggcaagagcaggccttacagcagtgccacggtgacccaagaggcagggttggggcctggacaggggttcctctgctgagactgagacaagcagggcttgatgctggtggtggagccagcatctcacctgccaggcttccttttgggcagggaggctacctgtggaatggctgagcctggttctgcaggggaggaaggctgccaggagctgaggggctggcacctgcattgaggggagtctgggtgcatcagattggggggcgccagaggcgaggctgcctggctccctttctcagcagctttgcttgtggcaggggtgagagtggagctgagtggggtctgggctctgcccctgcgcctccactgcagtgcctgggctccccttgcagggcagacagtgcctggcactgaggggtgcccccagaccccgctgggactggatgtgccgtgggcagtgccttcctccagcctcacaacctttctgctggggctgaagtttctggggtcacatggtcagaaggggctgagctggtctttcactgcaggcccactctgaaagagaaatcccatgaagcctgtccttgcagagcccctctgtttttgggggaacagggagcattcacagggtcttgggaacaaaggcctgggcctccccgtttgaatttcagccccagttccagggcaagtcccagccacccaagcatacttaccagtactgcccaccaccacccactgcccacctctaagaagcccggctctcctactctgcttccaggctggggcctcacaggtggggctgttaccttcctcagggcttagggagggagggaggacatggacagggccttccaccctggctccttcacagggatggtagctgaccggtgatgggttcatttgtcaccttggactgtgagccacttccacttctcgccccccaggcaggagcaccctcactccaagggcttggcctggaaaggcaggctcacctgggactcaacgttccttcccccgccgccactgtgcccccccgtccctccaccccagaagccctgacctcatttgggcaccttgctgtcctctgggcttctcctctgcccaggtcaccctgtggcaggcctgggccctcaggatgtttcaaaggctccacagctccaccgctccacctggcttcactccagcaccctgtccctggagcacctctgtcctgtctgggccaacctggtctccctgccccatgccctcccctggctcttagcaacctgcccttttattcatgccatttggggtcacagatgcctagctggacacagctcccagaactggctccaccctggggccttgcccctagtaccccctggcaggagcaacccaccccatggtcgaggttcccctacccctggatcctggactgaagccatttcctacagagaagcgttcccaccccctctcaggcacaaaagccggtgtccagggactcaagacctgtacctggggttgcaggggctcctgccctgctgtatcccaccaggagggggccccactgcccttccggcccttaaaactgggctgggagtgaagacggggaagtgtgtgagacaaaacaaagccggcttgtttcctccccttggcaggctaagctctcccggcagcccgggctctggggcggaaggagaacagtgtcatctcttcctttgttgataaattgccaaagagtgggaacaggtggggtcaggggccagagtgcaggggagggggcaatggtggaggtggcggggggaagcagagggaggtgggctgaggcctcggtggggccagtgcgacgctggcttaaggagctggaggggttcctaatacacatttaattcagtttctcttccctaagaggctgccggagttggggcctcctccagcagagaccctcggacccctgcagggcctggacttggggtgaacagggcttcagtcagcgcaagtattccatttgcatttggtaatttttcatgccacctatttatgaatatataaatctttataccaaatctattttttaaaacatggaaaagttgcctttatggaaacttggcagagccagagtgtacacattcctaaaccattaaacagatttctataac

SEQ ID NO: 1597 - DNA, 3017 bp, Homo sapiens
gaatggtgtgtgctgtgctatccaggaacacatttattatcattatcaagtattgtgtactgtacagaatgatgtgtgctgtgctatccaggaacacatttattatcattatcaagtattgtgtactgtacagaatgatgtgcgctgtgctatccaggaacacatttattatcattatcaagtattgtgtactgtacagaatggtgtgcgctgtgctatccaggaacacatttattatcattatcaagtattgtgtactgtacagaatggtgtgcgctgtgctatccaggaacacatttattatcattatcaagtattgtgtactgtacagaatggtgtgcgctgtgctatccaggaacacatttattatcattatcaagtattgtgtactgtacagaatggtgtgcgctgtgcttttatgcaagtggcagcacagtagctttacacgagcatcactagacacatgagtagcattgcactcggcaacaggaattttttcaggcccattattataatcttatgggaccgcatcctatatgcagtttgtcattgaccaaaatgtccttatgcgatgcatgactatatttgcaaaggactagtatctagaatacatttaaaagtcttaaaatagtaacaaaacaaagaatgcaattagaacatgagcaaaagatacaaagcaacatttcactggagaagatatacagattgcaaataagcacatgaaaagatgtttgataccattagggaaacgcttctttaaaccaggagatatcaccacgtgttagaatcaacaaaataaggccaggcatggtggctcacacctgtaatcccaacactttgggaggctggggcaggcagatcacatgagatcaggaattcaagaccaacctggccaacatggcaaaaccctgtctctgctgaaaacacaaaaattagccaggtgtggtggcacacgcctgtagtcctagcaccttgggaggctgaggcaagataattgcttaaacccaggagacggaggttgcagtaagctgagatcatgccactgcgctccagcctgggcgacagagcaagattatgtctcaaaaaaaaaaaaaaaaaaaagaatcaccaaaataaaaaatagtaacaatactattgtcaaggatgcaaaggaactgtaccactcaatcactgctgtgagaatttaaagtggtgcagccactctgggaaacagcttggctgtttttttttatgactgaatgtgcaactactatatgatgcagtaatttcatttttgcacatttatcccggagaaatgaaaacatatattcacacaaaacctgtatatgaatgctaataaaagtcaattggccaggtgtggtggctcatgcctgtaatcccagcactttgggaggctgaggcagtggatcacctgaggtcaggagtttgagaccagcctggccaacgtggtgaaaactcgtctctactaaaaatacagcaattagctgggtgtaatagtagccacctgtaatcccagctactggggaggctgaagcagaagaacctcttgaacccgggaggcagaggttgcagtgagctgagatcgtaccactgcactccagcctgggcgatagagtgagactctgtctcaaaaaataaaataaaataaataaaaagattagataatctgcaaagttcctgtgagcgctgtcattttgtcactctggtttttcagattcttcccctggaggctggagtttccaggatgtcaagattacctctgcttgggtgagctatttcaagcagctgggatacctgtgtcactcctgctgtctgccagtgactgcccaggtgtctgctggttcctccccaggagtagggaggaaccaggtgggctggctgggatgggtggatatttaaagaccaggccttggacgctgcagcacttctatctctgcttgatgcctgctgccacgtggctggtcctcctcctcctgctgtggctgagccttggggtgaagacagctgctcccaaccccagaacctttgctgtcttgggacggatcaccgctgcaagaggggaagttgctactgtgatgaattctgccatgtggcaccagactgccacccagaccacagtgtcctctgcaaccccggtaactcacatacaggcccgattccacctacagcaaagctggatgcgatggctggcagaggcaaaccctttgcctgcactgcaggccaaagccgggatgtggcctagatggttcctaaggtccctgacaatcctgagatcttgcatcttgtctatttcaggtcaaaggtgcctacatgctccctctagctttgtttccctgatgttccttgccacctgctactcctctctgagctacttttccaggttccacagggagaggttcagctgtccgtggtagacatgagggtagagaatgaggtggttgggttccacttacctttctatcatcttgcagtatggatgtctcttgactggtaccgtgtagacttttgagggcacacaggagtctgcagagagatactggggacattgagcagcagcagtggggttgggaggcagaaatgaggacaggaacatttaccttgtgtttctctcagcttctcagatgaccaagatggtgctgcagatggtgctgaggatggagaacccaccaagccccgctaggagccacctagactggatgcagagcatggttcagcgagttctccaaaccagcctcccaggaatgccattcaccatggctgtgaggagaataaagaagagagcctgactcctctcctgaggccccttccccaccctgagccagcaggatccacggagcagaggtcatctgtccccagcttggcccactgaggccagcatggctgggcccaggatgcttgtctctcagctcccatcctgtgtacttccacattggtttaaccagaggaaaaccgaaatctacaattgtcataaacacatttaaatgtgcgtagaatcagccatacaaattgtgaaacat

SEQ ID NO: 1598 - DNA, 3469 bp, Homo sapiens
gcatctgcacaagttgttcaggggctccatgggacccaactacacctccaaatcaaggtgggtgatttgatatgttttatctgctgtttcagtggccagacaagagtcgggatgggctgtaaggaaaggtggtcttatgcatgtggtctttcaactccacgacttggccacataagaatgggccttaggccaggaacattttcttaccaggagacaaagagcccccacagcttttgccagggttattttcctatgtgggaaagtctttccctatttcagactcaacgtgtgctcctccttttgcttcagtgtgtgcataaatggcccaattttgtagcacactcccagctttcattatttcaggctccaaggggaaaaggaaaggttccttctgctgcagcacaagagagatgtatgcaggccaactgtgtgggctgccaggagggacccacaggccaagggggactgacacacactattgaaagtgattttgctctatctcttctctatgtaagtaaagtgtcgtcctatccaggacctgactgtgttgtgtttttcttggaaactctgatatcaagatgcattgagcagaagtgtttggacttctattcctggtggttggcatggtgatgatctttgctactctccatgtagttggagtcctcctccaacaatggtaactggtgcatagtgttctgttcaacaatgaccatctatgattaattgtaggaccactttttcacttgataattatatagataattattgctggtaaacaatctccttgtattggtttcaatatatacatttttatgattactgtgcttattatttcctctctttagtcttgcctgcttatgcaaacaaatatgcatataaataacccataatcaatagaatggcatctatatataaaaaacactactatttattaaaatgataaaaattaaacatactataacattcaaacaaatttgcttggaaactcaatatttttatttcgtattttagaatgattgttctttatttgaagaatgtttgtaatctaaattttttcttgatacaagaaatggaacccactacctcccttgatggaatttctcttttctttaaatgtataatctgggcactggggtgcatacatatgatatacagtggtaagcaaggcacttacattaagagtgacagaaattgagaatattttttaggtattttaacaaattgagtttatgttaatcctttgcaacctgtgtaattactgctatgactcaactagctgatttggccagtcaaccaaaactgaagggaaagttgctaagagattcttcactgaaacccaagagttggatgagagtcagaatctgatgttattgtacatagaggctttaagaagacaacacaagccaagcaacttccagaactgggtatcaaaggagtcaaagaaaggaagcatagcccttaccccgtgtctctgtatggagcatccctacataaagccatctgaggactggacagaagctttggagaaataggtggtagctaccttggaatcaatatcatcttcttgccatgggcaccagcagttatgaagctgttccaagcaaccctgagaacagcagacagctggcaaagggaagcatgaactggagaggaataaacaaagcaggtgttacttggtaattgattcagaaagactgggttgtaagcacaggtgaggcatacttttagtggggacaagtttgtactcgtgaagataagcagattgggatcactgtaatttgagtgtagatatgatcatgtcccattttgtagtcacagatggcaaacccaggtgacacttgtgtttaagaactcatctccttttgttaaccacagtattaaggtagaattgacatgtaaaaagctgttaatatttaatgtatataactcaatgagtataaaggtaagtatacacccataataacatcaccactatcaaagccctaagtctcttcgcgccccctttattagtaatagtaatgttttgtgtatgttgtaagaacacttaacacaagatctctcttagcaaatgttaagaatgcaacacagcattgttagccataggtattgcgctgcatagtagatctccagaacttatttatcttacatactttgtgcccattgaccacaatctctccattgactcctccccttaggccctgacaaccactattctactctctgcttcttggaactcatctccttttacctaacaaccattatacatttatttaaaacctcaaaaattaattcaagatggattaaagacttacatgttagacctaaaaccataacaaccctagaagaaaacctaggcaataccattcagacacaggcatgggcaaggacttcatgtctaaaacaccaaaagcaatggcaacaaaagccaaaattgacaaatgggatctaattaaactaaagagcttctgcacagcaaaagaaactaccatcaaagtgaacaggcaacctacaaaatgggagaaaatttttgcaacctactcatctgacaaagggctaatatccagaatctacaatgaactcaaacaaatttacaagaaaaaaacaaccccatcaacaagtgggctaaggagatgaacagacacttctcaaaagaagacatttatgcagccaaaaaacacatgagaaaatgctcattgtcactggccatcagagaaatgcaaatcaaaaccacaatgagataccatctcacagcagttagaatggccatcattaaaaagtcaggaaacaacaggtgctggagaggatgtggagaaacaggaacacttttacactgttggtgggactgtaaactagttcaaccattgtggaagtcagtgtggcaattcttcagggatctagaactagaaataccatttgacccagccatcccattactgggtatatacccaaaggattataaatcatgctgctataaagacacatgcacacatatgtttattgaggcactattcacaatagcaaagacttggaaccaacccaaatgtccaacaatgatagactggattaagaaaatgtggcacatatacaccatggaatactatgcagccataaaaaatgatgagttcatgtcctttgtagggacatggatgaaactggaaaccatcattctcagcaaactatcgcaaggacaaaaaaaccaaacaccgcatgttctcactcataggtgggaattgaacaatgagatcacatggacacaggaaggggaacatcacacgctggggactgttgtgaggtggggggaggggggagggatagcattaggagatatacctaatgttaaatgacgagttaatgggtgcagcacaccaacatagcacatgtatacgtacgtaacaaacctgcacattgtgtacatgtaccctaaaacttgaagtataataataataaaatttaaagaaagatgttctat

SEQ ID NO: 1599 - DNA, 2907 bp, Homo sapiens
ttgcccaggctggtcttgaactcctgagctcaagtaatcctcccagctcagtctcccaaagtgctgggattacaagcgtgaaccaccatgcccagcctctctgtgtcttatgataaaaaaaatactggatgagacaagactgaggaggaagacccagggaccctttttagcagagcttaccagcgggtgtccaaggattgaatttcccttcctagacatgttttgcttcaactaaaaagatatatgtatatgtatgtattatgtatatcacacacatatgtgtatatcacacacatatgtatgtatatcacacacatatgtgtatatcaaacacatgtgtgtgtatatcacacacatatgtatgtatatcacacatatatgtatgtatatcacacacatatatgtatgtatatcacacatatatgtatgtatatcacacatatatatgtatgtatatcacacatatatatgtatgtatatcacgcgtatatgtgtatgtatatcacatatatgtgtgtatatcacacatatatgcatgtatatcacacatatatgtgtgtatatcatatatatatatatatgcatgacccatatttaaaagtaggatatttcataacgaaataccagtattaggtatcttttgaaaaagtgtcgtaactgacagcccaagtctgcattccttcatggcaccagggctagaactgagaagtagctgactttttggggtggatatgggctcccctagtcatgctatatgcctcattttatgtgactggccgggccccataggcgtttatgtttgccactcttttagaggtccctttaaggttgacatatattcattgattgatcaactcatttacacacgcatgcagtcattttttggacccctgtctatgtgctctgcacaatgcgaggtgtgggatataatggtgaccaagacagattctaaccactcactcacagatcccacagcctaccagggaagccagatatggaacaattatatacgtaattttacttgtaagtgccacaaagacaaattgtattaagtagtaccatgtggctgtggaagtttaacttgtcactaatccaccaaactctgagaagacagcatattttccgtcattcccaaaagactatcacaggcaacattgaggaatgctttgttaaactccagggatatattccacatcacacttcccccgtccaccagattagcaactgtccaaggacaaaacaaaacacacactaaaaaggaaatggggttagtccgatatgtctccatctccttatgctggttcttttgtctgcagaagccacggtttctttttctttttgaaaaaaaaaaaatgacatttgcgtacctctctgcgtttctctttctccaggattcttctgggatcctaggcagtgtggtttggtgatctcactggtgagatctcttggagccctggaatgcaattcatctgggccagaagagttgaactaataatttaaggacatctgagtgcttcactgatgtatttgttctgctctgtcccttcaaaataccactactcaaaacaatgttcagctggagaaagtggttaacactggaattttctttttttctgagacctaattgacagggaagggtggatgaaggaaacatatcctttgaaaatcctttagttagaatcctttggttgcaagtaacataaatgaactctgattaatgtaagcaaaaaagaatttgttagaaggatatgggggggagggatggacagagatgtgaaggaaaagatgaagaactaggctttagaaagtcctgaaaccaaatgaattctagggatctaggaagcagggactaatgactgtttccttcaggacaccagagatggggtgaataactctgtaaaagatgcaaatttcccacctgggtaacatagtgagaccctgtccttaaaaaaaaacagtagccaggcacagtgccttgagtcacacgaccatctctgacttgttgacccctctacaatcccatataagactccccaagagtagattctgagcaggtaaagcccatgggtgttcccaaaagtcggcctcaacctgaagccacttattcactctgagctcatcaccaatggcatgccgcactgtcaaaactctctttctgtgcatttgtctgggccactcaactcaggaaagttagttgttctgtgtgagtccccatgttctcattgatttcatttcagtctttaagctaaaaatctgtgtaaatggtaatggagaatggctacatcacacttagtatgtgtcaaagcagtatcctaagtgccttagtggtatcagcttatttaagactgacagtactctgaggtgcagtcacttctttttttttttttcctttttttcaaaacagagtctcactccgtcatccacactggagtgcagtggcatgatctcggctcaccgcaacctccgcctcccagggtcaggtgatccacccacctgggcctcccaaagtgctgtaattacaggcgtgagccaccgcacccggcctgtcacttcttgtcattcacagtagttatgttctgtaaagtcactgcaaacactgaattaataaacactgaaccattgttcctaggtgaaatacaaagttgggttcctgtgagcctttggtcacagcattttcatccactgatcaacccgtaagcttattctgtgtgtgtttctgtttaaagacaccttaatatatattgttgactcattaacatctaactcactgccaacagcactccaactcgtgcctgatcaaagcttatataacacacgcatgacacatctcggactccttgcacttaggaacaccagatagcacttcaccattaccctatgggaccattttacagcaacgtcaccctc

SEQ ID NO: 1600 - DNA, 3980 bp, Homo sapiens
caatactgatctcctttccctctctatggatgtatctattctggacatttcatataaatgggttcatacaataggtggtttcttttactttgtgtagtatttttgacgtttatccatgttttagcatgtggtggttcttccttttcttggcttagtaatattccattgtgtggatacatcatcttttgtttatccgttgcgcagtttgtagacactgggttgtttccacctttgggctgttgtgaacaatgctgctgtgaacctccgtgcacaaggattttcttggggacctgtttcttcctctcattcttgcctcctaccactctacccattaccatatttttccaaaccagacatcagcacactggctacgtgtgtgtttaggaaagcatctgtggagggaaacagcttgcctcatgctgcccctgcttcctgtctacccttctccaagcctttttcgtccgctgtcacctaggcttttggttaatcacatgttgagattaatcccattttgtctttgggtaattaacatgtgatgtccacgcattatctccacggtgaaagtcttaaggtcaacgtccctcttggggttctgtgtcccctgcagagccgggcacagcttggggcagctaagcagtcccctagttcctaggcccttgcttgccccatgccacctgtccactggtgactaaccctcctgcactctcccctgtcccccttgcagatgatgtgctgactaaagacgcgggtgagtgtgtgatctgcctggaggagctgctgcagggggacacgatagccaggctgccctgcctgtgcatctatcacaaaaggtaggaggggttggcaaggtagcttagtgcaccccacctcccagaggggcggacccccatctccagccattctgtctcctttggttatgggatgacctctcccccgacctctggctccgagcgggtaagggcagaggccgtcagacaggtgtccactgtgccggcgggaaggtgcgagcatcccaagtgcagagcagagtggagttgccagaggtgtgctctggtttgagggctcaggtggtgggagctgatggggagacccgtagagcctcacaggttggaggagcttcggatcccactgggaaggttggttctccgtctgtctccctgcctcttcttcctctacgggtccctctgctccacaggggtagaacatcaatctgtgcgaggaaggccaggcggagggtgtacccactgccttgcactggccttctccctagagggccgggaggcaggaagagccatttcctgtggggccacagcactgggcacagttaaaagtagcagggcccagatatgccttgggactccagtgtgagcctcgtccttgtttccagctggaaggaaggcaccctcttgcccaagacaggacactgtgctgcctggggccagcacctgctgaatcctcgagcccagagcttcttcctgacactcaggcctttcaaagcctgactctcagggccactgctgcacagggtgacaaccgggcatggcacgcagtgtggctggtgcagaggaggcttaaggctggcctgggagagattcttggtctagctcccagcacggagccttgcttgtgtcccagggcggcactaaccagaaccagaaaaggaaatctttggccctcggggagaattatgccaattatctgtctggttcctgtctttgaaaatgcccagatgttggtttacaaatcaggaagctgtcttggggcaatctctgttccctctttgatgcagagagcctttctctgtaaacactggagagcagggcttcactgtctggctcccctcccgcctcttgcaggaaggactagatgctgctgatcagctgatcatggctgagccgggtagagcttggggctctcctaagaggtcacccactgggagggagcttcacagctgttcttttgacccaggaaggagctctttcaggactgtggcacccagagccgtggccctcctgccatgccattgttcccacttccctgcccttgggagtcttggagacagctgactagctgccctgaggggtccaccgctctcaccttctcactggtggctgctgccattctcctgggctctgcacagaaagctttggtccttctgaaagccactctgccccttcctgcagcaccagatccccctgagccggtactgctgcctccacctgggccaagactagtcttggtgttcacccttcttcgtgcttcagaaagtagggatatctggggacatgactgtgtttccctggggtcctttcagaagagacttaggaagctcctgctcaggaatctggccctctgaaagagccccttcaaagcagcctgggcagcaggtaacgtggtttcccttgcggccccctcctcccagctgcatagactcgtggtttgaagtgaacagatcttgtccggaacaccctgcggactgacctgcgggcttgcttgctgactcctctcaaaggtgagcccgcgtttgggggtgctccgggctcaaggcttggggtcaggtcactttgggggcctgcagtttagggagccgggctgcccttatgccactgagaagaaagcaggagcagagggaaggagcacctcatcagtgagcagttagtcatccggaaatgattttccctgggaaggacaagagatacaaaccaacatggacagttatgaagaacaggctcagaagagttaggatcagttggggaagagaccagtacaatctacattcctaaagaaagttcaggaatatcccctgggaatgtgcacgggcaggaaaaggagcctgagcggtgggtttgtgcctggcttggcctcatcctcgctcacctctgagtctccgcctcttctatggtaacggggataatctcactccctgttgccataaggacattgcacttactaaacagccatgggcagtgcattgttccctgcaaagtgctggttagcgatcatttgaccactgcttcttcccatgccgcttccagatgaatctgaggcctccaggccagactcgatccctctatcccacagcactgggtgctgactccacacatccccctggcttaccgctgggtctggcctccccatttctcccccaggggtaccccacttgctgccaaccatccacccctgacccccatctcacctgtcccctccaagttctgggctggcattttcctttttctggcaaacaagtagacaaaacccccataaaaaccaaaagcccaactccatctcacagccaaaggttttgggacctttttcttcccccctccctttctctctctcttgctttcgttttcttttgttaggtttattttatttattccaagtaaactcccagaacagctgatgatgtcagacaaatcagggacatttgctctttttacctccacctcaaaaactgatgacaaggggagaagaaagagccaggggggagagtgaggcaggggagtagaacctgcccaggcacatggctgcaaattccccgtgtgctgtttggcttctggggtcctgtgtagacgccccagccccgcctgccctcttgggatgcagctgccctgggatgagcagacagccctcggcccgatggagcacgacttatttattacggtccacacagggacagagcgcccctgctccagggaggaggctcaccggaccctggggcagagctgagcttgggacaccaacgggaacagggcaccccttctgcactgacttccagatcatggttctcccttcctccctgaggacaccaaattggatgagagcaagtttgagagaagaatgaatcaactgctatccttcccctcacccctcagcccaggagggaaagggcattttctttttcatctttgaaaggcattgtgggtctgtctttaaagtgtttacaaaaaaaaattatataaaaaaaaagtctagtgtcg

SEQ ID NO: 1601 - DNA, 4074 bp, Homo sapiens
tagagacggggtttcactgtgttaaccaggatggtcttgatctcctgacttcgtgatccacccgcctcggcctcccaaagtgctggggattaccggcgtgagccaccatgctcagcctctttttttttttgagacggactctcactctgtcgcccaggctggagtacaatggtgcgatctcggcttactgcaacctccacctcccgggttcaagcaattttgcctcagcctcccgagtagctgggattacaggcgggtgccaccacacccagcttatttatgtatttttagtaaagacggggttttaccatgatggccaggctggtctcaaactcctgacctcaggtgatccgcctgcctcagcctcccaaagtgctgggattacagacgtgagccactgtgccaggccaacatctttcacagcaagacctatttccaagtctccctttgtttcagacagagacattttccttaactctaatgtttcttttaccttttcatcccaccttctgttccctcattttctccctccttccacacccaagagtcgctgcccctgatctagagtgttggctgtcatgtgagaagttagttctgaaatcttccagggtcctgtgtgatggtgcctgatggtgcctccactgcgccacctgctgtcacaaggtgtcttgtcactgaagacctcttagcccttcaccctttcactctgatctcaggtgaacttcagtgatgacagtgacttggaagaccctgtctcagctgaggcctggctggcagaggagcctaagagacggggcactgcttcccggggccgggggcgagcaaggaagggcctgagcctaatgacggatgccgtggttgccccaggtagtgcccctgggaaccctggcctgaatggcaggagccggagggccaagaaggtggcatcaagacattgtgaggagcggcgtccccagagggccagtgaccaggccaggcctggccctgagatcatgaggaccatccctgaggaagaactgactgacaactggagaaaaatgagctttgagatcctcaggggctctgacggggaagactcagcctcaggtgggaagactccagctccgggccctgaggcagcttctggagaatgggagctgctgaggctggattccagcaagaagaagctgcccagcccatgcccagacaaggagagtgacaaggaccttggtcctcggctccagctcccctcagcccccgtagccactggtgaatatgcgacccctgatgttggtcacttggagagggctgagcctctagggcttttgacccctctgtctttccaggctgggttcggatctggatccagtagcctctgaacctgtgtttgaaccccagcactctatgagctgtgtgcaggtcacttaacctctccaagcttctattccttctgtaaaaatggggtttagggagcatggtggaataagttgatgcctgttagttgcatggcaccccacttggcacattgcccttcataaatggtagttgctgtttgccatgtgggagatgagatagggactgttccttcttggaaagttcctatcaactatgaaataaggaattcagctgtaccaagtgtccttacgttcttctaggtctttctaccctggactccatctgtgactccctgagtgttgctttccggggcattagtcactgtcctcctagtgggctctatgcccacctctgccgcttcctggccttgtgtctgggccaccgggatccttatgccactgctttccttgtcaccgagtctgtctccatcacctgtcgccaccagctgctcacccacctccacagacagctcagcaaggcccagaagcaccgaggatcacttgaaatagcagaccagctgcaggggctgagccttcaggagatgcctggagatgtccccctggcccgcatccagcgcctcttttccttcagggctttggaatctggccacttcccccagcctgaaaaggagagtttccaggagcgcctggctctgatccccagtggtatgcgggcagccttctggccggctcctctgtcctcttctgcatcttcttactttggagctgggtgaaggagttttaggcattggttagtttacatagatttatgacccttatgtcataccttttcacctgttagcatcttacatcaggaaggtttgttgttttttttaaacctcaactttgaattaccagcaaattcagtgtctttcctcagaggtgagttcagatgactggggtcttctgtgctaacatgaaacatattcacatgatttgagtgcctcactttgttagttgctgtgagggacacaaagtacaagtcatggtctctgtgcacagggagctattagagcaagggagagcaccttgacctctagtgaccagggaaggcttcttgatgctggcttgagtgatggataggaattgagtgcccaagacagggaagggaattcctttaacagctgaatgagtctggctgtatcctgtgtgtcaggggtgactgtgtgtgtgttggccctggccaccctccagcccggaaccgtgggcaacaccctcctgctgacccggctggaaaaggacagtcccccagtcagtgtgcagattcccactggccagaacaaggtaggattcctgggccatggagcaaagttgggctggattgggcttcgggtcaagctgctcacattctgtgttgagggagggagagatggtgatcacgtggacaagcagagctctcacagccccatctcccaaagcttcatctgcgttcagtcctgaatgagtttgatgccatccagaaggcacagaaagagaacagcagctgtactgacaagcgagaatggtggacagggcggctggcactggaccacaggatggaggttctcatcgcttccctagagaagtctgtgctgggctgctggaaggggctgctgctgccgtccagtgaggagcccggccctgcccaggaggcctcccgcctacaggagctgctacaggactgtggctggaaatatcctgaccgcactctgctgaaaatcatgctcagtggtgccggtgccctcacccctcaggacattcaggccctggcctacgggctgtgcccaacccagccagagcgagcccaggagctcctgaatgaggcagtaggacgtctacagggcctgacagtaccaagcaatagccaccttgtcttggtcctagacaaggacttgcagaagctgccgtgggaaagcatgcccagcctccaagcactgcctgtcacccggctgccctccttccgcttcctactcagctactccatcatcaaagagtatggggcctcgccagtgctgagtcaaggggtggatccacgaagtaccttctatgtcctgaaccctcacaataacctgtcaagcacagaggagcaatttcgagccaatttcagcagtgaagctggctggagaggagtggttggggaggtgccaagacctgaacaggtgcaggaagccctgacaaagcatgatttgtatatctatgcagggcatggggctggtgcccgcttccttgatgggcaggctgtcctgcggctgagctgtcgggcagtggccctgctgtttggctgtagcagtgcggccctggctgtgcatggaaacctggagggggctggcatcgtgctcaagtacatcatggctggttgccccttgtttctgggtaatctctgggatgtgactgaccgcgacattgaccgctacacggaaactctgctgcaaggctggcttggagcaggcccaggggccccccttctctactatgtaaaccaggcccgccaagctccccgactcaagtatcttattggggctgcacctatagcctatggcttgcctgtctctctgcggtaaccccatggagctgtcttattgatgctagaagcctcataactgttctacctccaaggttagatttaatccttaggataactcttttaaagtgattttccccagtgttttatatgaaacatttccttttggtttaacctcagtataataaagatacatcattt

SEQ ID NO: 1602 - DNA, 1362 bp, Homo sapiens
ccaaggttatgcataatcattctgagttataggactggggaccaggaatttaggttcaactctaaggtctgatggtcacgtctaaggtctaaatccatgactgaagcctaggtccaaggactacaggagcaaaggaaaatttcattaccaaaatttgcaagtgaggtccaaatcttatccctgggtccagatccaggtccaagtcaaaggtccaaatccaggtacaatttccatgtttaaggtataagatccatggcccaataaaaagcaaggtctgagatccaggtccaagatccaggtagagattgaatttccagttataaagtcaaatacaagaaatgaaggtcacctccctgtttaaattccagatccaaggtccaagatgcagttccaaagacgcgggtgttgggccatgtgcaaggaccaagtccatgttccaaatcaaatcaaggcctgcatctaggtccaacatccaagaccaggtccagatccagatccaaagacgaggtccacagccagggacaaattctagtccaaggtccaagtccaaagtccaagtcaatttacaaggtccagatcatggtcctaagtccaagatacacatggaggtccaagtcccatgtccaagacccaagaatgattcagatccatttcatgaccaaggttcaggtctaaggtgagttccaaaatgcagaacaaatccaagtcagaggtttagttccaaggtgcaggttcaaagttcatatccacacacaaggtccaacatcaaagccaaagatccaggttcaggtccaggggcaggagccctgatcttggatttcccagttccagaactgtgagaaaagaaatttctgcttggtacagtggcacatgcctggagtcccagctgctcaggaggctgagacaagatgattgcttgagccctgcctggagtttaaggccagcctgagtaacatagcaagaccctgtctttaaaaaaaaaaaaaaaaggggaaaaaaaaacccagaaaagaaagaaacttctgttgttctttgtaaattatccagtttcaagtattttgttacagcagcaccccagtagagtattttgttactcttacccccgaccccagggaatgtagaccacagccacagcaccatagccaaagcataccattgctgttttataagattgactgtaatattagactagcagaaagggagactttgagtcatcaaatcccctaataaaataggttctttaggctgggtgccatggctcacacctgtaaacccagtgctttgggaggctgaagcaaaaggacactcaaggccagcagtttgagatcaacctgggcaacatagtgagaccctgtctctacc

SEQ ID NO: 1603 - DNA, 2960 bp, Homo sapiens
cctgtctgaagctaatgcctatacttgggctcttagtctcacccctgccaccttctcagggactaatggttagcagcgatcctctaactcagtcctttatttccgattccacttgctctttcccagtcacattaaaatgtgctcaaatctccttatctttgaaagaaatactctggacccctttagctgccaccttaccgcactgtgtccattcacagccaagcctcttgaaagcattaactgccctcagtgtctacttccctactcattttccagccctctgcccccaccacagctgctttcaccaaattaccaacaacctcctggttgctgaaaatcagaggatgttcttagttcttcacttgaccaccccctttttgaaaaaaagaatttgcttgacgtctgtagtttcgcattcctggtttttcccttgcctctctggctcctccttgtcagtccctgttcaaagaggcagtgctgtctggattagtggtcagccatggtacttaagaacctgggcttgggagacaggtctgggttcatatgcggcttccacttctcagagtttcagtttcttcaactaaaatggcaacatataagtctttttgtgaagccctaatattaccaagtcaatggaattacccttttaaggtcgttagtactgtgtttgacacacagtaagcaggcatgcactaaactcccctgactctccaagcttataataggtgctcctcctatgtgctaccatattatcctttatctttctcattaggctccagagaggaggggccctgtcacccttctccactgtcgtatcagtctagcacacggccaggcacacattaggcaccctggaaatacctgttgactgcttcaagtgtttaatatatggcaaaggtgatactttaaatcagtggggcaaaggattattgataaataatgatgcataattgataaatggaaaactatttgtgaaaatataaaaggtagatccttaccatttactaaagtagttttcagatggattaaatagtgacattaaaaacaaaaattgcccgggcacagcggctcaggcctataatcccagcactttgcgaggctggtcttgaactcctgacctgaagtgatccacccgcctcggcctccgaaagtgctgggattataggcatgagccaccgcactcgactgagcatcatttttatttcagactgaatgagatataattaatacattaaaaatcaacttattttatattccaaaactgtagaactcctaaaatgtatcccagagtcaataataaagttatccactcacttcattagaggaagagtttgagctttggtgtcagaaaggtagcacctggaatccaagctctgccacttaataactatgaccctgggcaagctatttatccctcaagtctcagctcctccatctgtaaaatggtgtattaatgcctatctcaaagggttgtggtgaggtttaagtgagctaacttacataaagcactggctgtaataaggtactcgataattggtagctgcattctaaaccatcaagtttactgttagccacttctctcttcagaggttcacttaagatgactgcaaggtgagaagattcacaacctgagttacgagcttaagcaccttaaaatcctttaggagcaaaggactgactttagttactcttctcccagtagttggccccattcccttgctttccatcactgtataaagaagctcaattctggcatgatatgaaacaaaccatattttacttgactcaaaaacttctcctaatggaggaataaacactattgttaggttggaaactgaatgttagtcacagatacggtctgtaattttctaatcatgagagatgttacctggatgctgaaaaatgccaaatctcaaaatcctgaggggaggattcattactaaataaagaatggctagcacaaggaatgggaaagaaaactaaggttttctgagtgtcttttccaaggactctttatagtgctgggcaggttcccattccttatttaatcttctcaacaacactataaggtagcatctttttagggtaccatgtcctgggtcttgcctgttgccctactgtcatcttactttctattatctgtattttatggttgaagaaatggaatccaaaggaaggtatttaaatattctgtgcatggttataaagccagaacactcctcctttctgcagttagatttcttctaagaatatcccatgcataccttgtccaactgcagcctggcttctctaacaaagccaccatgacctgctgtttgctgaatccatggtcgctcaggtcttcatcttacgtgacctctgtgcagcactttatactgttggccgctcccctctcttctgtgctctctctttggcttctgtggcaacatttcctgcttggcctctttcaccctctagctcttcctttgtggtgtccttttctcctccccaaacctctgtagattgcacttcgtccttaaggggatctgatccttgactggctacagctgctatctgccaataattcccacacctataactctagcccagagctgtctttcaggatccagtcctatatatccaacaagatctggacatgtgcctgcctgcccgagttacctcatacagctaactaaaaattcatcactttccttcccaaagtcctcttccagcagttcctttttctgccagtggactcaccatcctcctagtcatccaggccagacacgggtgtcatccttgactcctccctttgccttagacccctacccaaattatcaagtcctgcaattctctcttcatttcatctcaaaaacaaaacaaaacataaaacacttaactctgtacactataaaagggtgaatattatggtatgtgaattatgtctcaattaaaaaaaaataaaacttaacctggtttac

SEQ ID NO: 1604 - DNA, 4556 bp, Homo sapiens
cttttcatttcagcctgactgccggaatcagagccgcgggtgagatccccagccctgtgagcctgtaggagtagaatggctccccaaatgtatgagttccatctgccattatccccagaggagttgttgaaaagtggaggggtgaatcagtatgttgtgcaagaggtactgtccatcaaacatcttccaccacagcttagagcttttcaggctgcctttcgagctcaggggcccctggctatgctgcagcactttgatactatctacagcattttgcatcactttcgaagtatagatcctggcctcaaagaagatactctgcaattcctgatacgtctcctggaatcctttgagaccatggccagccagacaaaccttgtggacctggaccttggtgggaagggtaagaaagctcggaccaaggcagcccatggctttgactgggaagaagagaggcaaccaattcttcagcttttaacacagctacttcagttggacatccgtcacctgtggaaccactcaataattgaagaagaatttgtcagtttggttactggctgttgctaccgccttctggagaatcccaccattaatcaccagaagaaccgccccactcgggaagccataacacacctgcttggtgtagccttgacccgttataaccatatgctcagtgctacagtgaagatcatccagatgctgcagcactttgaacacctggcacctgtactggttgcagccgtgagtctatgggcaactgactatggaatgaagagcatagtgggagagattgtaagagagattggacaaaagtgtccccaagagctgagtcgagacccttcagggacaaagggctttgcagcattcctgacagaactagcagaacgtgtcccagctatcctgatgtccagcatgtgcattttgctagatcacctggatggagaaaattacatgatgcgtaatgctgtgctggcagccatggcggagatggtgctgcaggttctcagtggcgatcaactggaagcagcagcccgagacaccagagaccagttcttggatactttacaagcccatggccatgatgtcaactcctttgtgcggagccgtgttttgcagctcttcacccgaattgtccagcagaaggctctccccctgacacgtttccaggcagtggtggctttagctgtgggacgtctggcagacaagtcagtgctagtatgtaaaaatgccatccagctgctggccagttttctagccaataatcctttctcctgcaagcttagtgatgctgaccttgccggaccactgcagaaggagacccagaaattacaagagatgagggcccagaggcgaactgcagcagcttctgcagtgctggacccagaggaggagtgggaagccatgctgccagagttgaagtctaccctgcagcagcttctacagcttccccagggagaggaggagattcctgagcaaattgccaatacagagacaactgaagatgtgaaaggacgcatctatcaactgcttgccaaagctagttacaaaaaggccatcattctcactcgagaagccacaggccacttccaggagtccgaacccttcagtcatatagacccagaggagtcagaggagaccaggctcttgaatatcttaggacttatcttcaaaggcccagcagcttccacacaagaaaagaatccccgggagtctacaggaaacatggtcacaggacagactgtctgtaaaaataaacccaatatgtcggatcctgaggaatccaggggaaatgatgaactagtgaagcaggagatgctggtacagtatctgcaggatgcctacagcttctcccggaagattacagaggccattggcatcatcagcaagatgatgtatgaaaacacaactacagtggtgcaggaggtgattgaattctttgtgatggtcttccaatttggggtaccccaggccctgtttggggtgcgccgtatgctgcctctcatctggtctaaggagcctggtgtccgggaagccgtgcttaatgcctaccgccaactctacctcaaccccaaaggggactctgccagagccaaggcccaggctttgattcagaatctctctctgctgctagtggatgcctcggttgggaccattcagtgtcttgaggaaattctctgtgagtttgtgcagaaggatgagttgaaaccagcagtgacccagctgctgtgggagcgggccaccgagaaggtcgcctgctgtcctctggagcgctgttcctctgtcatgcttcttggcatgatggcacgaggaaagccagaaattgtgggaagcaatttagacacactggtgagcatagggctggatgagaattttccacaggactacaggctggcccagcaggtgtgccatgccattgccaacatctcggacaggagaaagccttctctgggcaaacgtcacccccccttccggctgcctcaggaacacaggttgtttgagcgactgcgggagacagtcacaaaaggctttgtccacccagacccactctggatcccattcaaagaggtggcagtgaccctcatttaccaactggcagagggccccgaagtgatctgtgcccagatattgcagggctgtgcaaaacaggccctggagaagctagaagagaagagaaccagtcaggaggacccgaaggagtcccccgcaatgctccccactttcctgttgatgaacctgctgtccctggctggggatgtggctctgcagcagctggtccacttggagcaggcagtgagtggagagctctgccggcgccgagttctccgggaagaacaggagcacaagaccaaagatcccaaggagaagaatacgagctctgagaccaccatggaggaggagctggggctggttggggcaacagcagatgacacagaggcagaactaatccgtggcatctgcgagatggaactgttggatggcaaacagacactggctgcctttgttccactcttgcttaaagtctgtaacaacccaggcctctatagcaacccagacctctctgcagctgcttcacttgcccttggcaagttctgcatgatcagtgccactttctgcgactcccagcttcgtcttctgttcaccatgctggaaaagtctccacttcccattgtccggtctaacctcatggttgccactggggatctggccatccgctttcccaatctggtggacccctggactcctcatctgtatgctcgtctccgggaccctgctcagcaagtgcggaaaacagcggggctggtgatgacccacctgatcctcaaggacatggtgaaggtgaaggggcaggtcagcgagatggcggtgctgctcatcgaccccgagcctcagattgctgccctggccaagaacttcttcaatgagctctcccacaagggcaacgcaatctataatctccttccagatatcatcagccgcctgtcagaccccgagctgggggtggaggaagagcctttccacaccatcatgaaacagctcctctcctacatcaccaaggacaagcagacagagagcctggtggaaaagctgtgtcagcggttccgcacatcccgaactgagcggcagcagcgagacctggcctactgtgtgtcacagctgcccctcacagagcgaggcctccgtaagatgcttgacaattttgactgttttggagacaaactgtcagatgagtccatcttcagtgcttttttgtcagttgtaggcaagctgcgacgtggggccaagcctgagggcaaggctataatagatgaatttgagcagaagcttcgggcctgtcataccagaggtttggatggaatcaaggagcttgagattggccaagcaggtagccagagagcgccatcagccaagaaaccatccgctggttctaggtaccagcctctggcttctacagcctcagacaatgactttgtcacaccagagccccgccgtactacccgtcggcatccaaacacccagcagcgagcttccaaaaagaaacccaaagttgtcttctcaagtgatgagtccagtgaggaagatctttcagcagagatgacagaagacgagacacccaagaaaacaactcccattctcagagcatcggctcgcaggcacagatcctaggaagtctgttcctgtcctccctgtgcagggtatcctgtagggtgacctggaattcgaattctgtttcccttgtaaaatatttgtctgtctcttttttttaaaaaaaaaaaaggccgggcactgtggctcacgcctgtaatcccagcactttgcgataccaaggcgggtggataacctgaggtagggagttcgagaccagcctgaccaacatggagaaaccccacctctactaaaaataaaaaattagccgggcgtattggcgtgcgcctgtaatcccagctactcaagaggctgaggcaggagaatcgcctgaacccagaggcggaggttgtagtgagccgaaatcacaccattgcactccagcttgggcaacaatagcgaacctccatctc

SEQ ID NO: 1605 - DNA, 2317 bp, Homo sapiens
ccgtctgtccacactgcagcccggccctgccctgctgggccctgtggtctttgaggggaagggcatgggggcgtgctggaccatggggaggggcggcgaggagagcctggagctccgccctgggccaggattctgccccttgtcctttaagggggaggcaggacacgctgcgcacccgggggaaggacgcgccgtggtgccccaggctggggacggagcggatggtggaagggttcttgccctccgtccatcaggccatcaggcccctgaggcacacccaccagtcctgagaagatccggtgcccacgcccggccccctcccccgcgtcccgctcctgggcctcacactctccctcctcccaccccaaactggacgtcactttgccccctgccatcccccacgctgttcctccacctcgtaggtctccctcgcaacccgttcccttctctcacagcagagcggccggctcctcccccacgctgagtcccaagcaggagacagctttgctgggagctcagagagccggcacagccctgtccgacggcaccctctgtcggcccgacagcgaatgaccgccacggccaggtcctgaggttgtgtgcacactcagacgtgaacacacagacgtgcatattcacacgcacacgcacatgcggcaactcgcacactcaggcacatgcacactcggatgcgtgcacacacgtgcatgcgcacccacactcaaacacagggtcacacaactcatacacacacacacattctcccacacacaaacacagggtcacacaactcaaatacagacacacacgctcccacacacattcaaacacagggtcacacaactcataaatacacacacagacacacatgctcccacacacagccccagctggccagagcccctgcttccagggcacaagggcgctgatgagaggtgccgtgggccctgccgcctcctcctggctttcggctgcccgcagggctccaacctagcagcagagtggtttgttgggggggttctgaaaatccagacccagaaatgggagctcctcgtgggccagcatcaggatctgaggtgggggggctttgggagccgggtctgacgtggcactgacagcacgttctgccttctagcaaggtcccaggagggcgggcaccgagctggaggaccaggagcctgtgtgcggctgggagtctcctgcccgaggctgtctgtgctggcctgcatagaggcctccaggctcagaatccacccaagcaggccctgccactcgctacctccgcaaatgaccacggggcctggacgctcctccccagccttcccaggcaggttccctctcattcccgcccacgtcccggcccctgcgccccagccgtgtcaggactgccacccaagcctggagctgacctggcagaggcagtcagcagctatggccgaacagctcctggaagaaggagccagcacacgggcgaatggacgagcatgctctgccatcagcgctcactctgcggctgaggagctccatcccgcggtgcaccttattccagactgggggggccagggggttgggctcccacagctcctgcaccacgatcctgcagagctgccccacggggtgcagatggcatctgggcctgtctgcagcagacaacaacatgcagaccccaccatcccctctgctggagctggagaacaagcagaccacccacagtctccctgactcgggctccaacatctgcctgaggaaaggccggggaggtggcacccagaagctgctgggagggaagggggtgggcctgcctgccgtgcctgggcctgcgcccccacatcccacatgacggcctccccagcccccactctgcaaggaagtgacagaaactccacagaatccagagggcctaggaatgttggtcctgcaggactgtgcagcccaaggggcagccgcactgcccacctagtcctgtatcccttctgggttctccactccagttccctgggaggggctgcctccttgctctcagagattttacagctggctgtggattttagacggtgctgactggttgggcaccgtggttcatgcctgtaatcccaacactctgggaagccatggtgacagatcacttgagcccaggagttcaaggccagcctgggcaacacagtgagagctgggcatggtggtgtgcacctgtggttccagctgctcgggaggctgaggtgggaggatcgactggagtcagggaagttgaggctgcagtgatctgtgattgtgccactgcattccagcctaggtgacggagaaagaccctgtctcc

SEQ ID NO: 1606 - DNA, 2888 bp, Homo sapiens
atctgctgcctgaggatggaggaggcggaggtgctgggattgaaggcagaagagaaagtgtgaaagcacccaggaggagaatgaatgagctgatctccagctgcatcctgccagagagcaccgagtggatctgccaaacacagactgctgggcaggcatctgattcagtaggtctgggtggggctcgagaatgtgtatttctaacaagttccaggatgacactaatgccgctggctggggatcccacacttccagatgacactggtctggaggcaggttgcgtggtagcctcaggggctcccgtggtcaccgctggtgagagcgggtggcaggtttgtgcgttccttgccaggcattcagcttgccatttagtttatctgacctgctttttcctgcatgtgggctcatcagccaccctcgagggtacacatagtgacaagctgcagaacattcgtgagtggggacaaaagctgagtggaaatgctggccggggtggctcatgtctgtgaagcatgatctggctggaccttttagaggggccctggcatcagtttctggggttggcagctcctgctgagcaggctcccagccacctgtcctacacagtggcactctgaccttcactctgggcaagagaccatccgttttactttttctagcagagggcatctgggggctgactgatatctggcctgcctttgagtcagcctcctcactgccagccagaggcatgggatctggggccacgcttccagtgactgacagcggctgggctcagggctcacctattcctccgtcctcccaccacctcactgttcagctgttggtcaacacttgcttcctctgcttttcagcttccccatttgagcggctgtctcctgccctcttgccccaggtctgcctggtctcatggaccctgggagggagcacaagcgtgtgcccggcacaggctgtccctgggcctgcacacagacctgctgcccccatagcctgctgggttcgaggaccagagacaggccggatgtatttaagcccatgagggtttgcatctcagtacttttcctgggactcttcctgagccgtactgagtatacgccgctggcacagtcgtcacacatggagcagaacatccacgcccctcactcctccttgtcctgtgccaaaaccatgttcagggatcaaagaggggcacggaacacacccggatgactctgcttttctgaaattttctcgcatggaattattttgctgatatcttcattttgtgattctatcctatatggaaagcctatattccatcttgtcaaatggaaaagttcacaaattgggaccattttctgtttctaagaccccatagcctctaggttgcttgccggcacagagccgcccgctctgcagatggctgtgtctccacagccttcctggaagaacagcctcaagggctgccagcatcagaaggacatggctggggaggagggaagggggaggaagtgggaactgccatggcctatggtacaactacaaaaccaaaaagccttgcccctctctccgatttacctcccccgacttgaaaagcatgagggcgtcacagacatcatctgctgatgcctgaaactcctgtattccacacccagagacaagcgcacagttaaaagtgcctgggcaggtgagggtgtgattcactcaccatggcaagagtggtctctggcattagaccctctgggttccaatctgggctttgccaccttcaatactgccttatggggttattgggaggattaaataatttgagtaacgcacttatcatggtacaaatgttcaatacatgccacttttagattaaattaaggattaagtaatggacatcagacagttttctaggaaaaaaagttaatcatggaactgcttgcttctgtagctgcgccccatcagagagcagtagcgcacccccaccctcaccccccaggtcattggttctttctgccagacctgccccacttccttggttcttctgggaatagcagtccctcccttcagggaactgctcttcccattcagatgaagcagcttcagcacacacatgcctcacacatggctggctcttctggggagatgtggaatttaatctaaaattagcacattttgagtcatcagtaatgttcccagtggcctactcaagggatatagcaacagggactcctcattctctttattgtaagctctgatacatttaatgcatttaattgcttgagtgcatttcatttctaatgtataataataatatcggccattattgagctgggcactgtgcaaagcacttgataagcatcattgcattcaattatcctgtttggccctattataagcctgtacataggcttctcagacacagtttatgacatgtgaggcggctgagggtgggtagaattgcccagggtcacacagctagagagttgcggggcagaggttccatcagaccttaatttatgagagtggcatccagacatttcaaagtcaaggataaaaaatggaactaatctacattctccgaagggtggaggaagacaggctatgagagtggactggagagtgacatcacagcatcaagagctctgtggacagagagcaaagcaacgccagaagacgtgctaaagtcaaagcattaaattgtgtacacaagctatatattcgtgtcttatagcctgttcaaacaagtgggttgtcagtgtctcaacctgacaaggatctgaaggaataatagaatgcaactggtactgctttgtaccccatcagttaatgagtctaggcactgatcgttggtggctctctgaagacaagcagatgtgcgtaccttctaatggaaatacacaccacttttgaagtagacc

SEQ ID NO: 1607 - DNA, 4423 bp, Homo sapiens
tgctgtgggtcacctatcgatcattctcttatttaggagggatggagtcgattagaaaaccgatggaaaatggggatttaaagaagaaaacaggaagtctgtttaaagagcccatttcttttttatgaaaataaagtttatcatttccagccctgttttatccagcaaggcagggagcggcaggcgttgccctgagtcgccagtgacattgaggagggtgtgatgtgcgcctggccgtgtgccctcgtgcagcgcctcccatccccgccgtacttgtgccccgccagagttttctttgtacaggatagatgacagccgaagcccctggcccgagagctctgcgatgggctcagcgctcctgcagcagcccaggcctttcagaatcccactgcccacccaagccctgtgctctgcctgcctgtcctgggtatcccgttgacaaagggcagacagtgaagggcacaagatggctccagaccaggggatgcacccagctccggctctcccctcctcactctcgtcctgctcaccccctcttttctctcctggtctccccttattgcctctgcccgggcaccacggggcttatggtatcttctacacacgttgttttcactaaggcatttggggctggcacttcagatcgtaaatttcttaccctctgttacagtcctgtagttttcctgctaaaaacattcagcacgctcctcctctctgcagcccatagcccaggtaccttagtgcagggtggaggaagccttgggcaacctgctctgtgatgagcaacctattctcctaacagcccgagccttccaccgccctgaggccttgaagcaccttggggatggccttcctgcctctgcctgggccctcgctgcttctgtctggaacttctcctcccagtccacgagagatggcttgaatcttgtcctgaagacagggctacaatgttgtttcgtttttacatctttccctgaatattctttcctgaatgtatggcttctttgtctctgtgtcttgtcaccttatgttgtatccaagacgttcggcaaacacatctttgttgattacttattcaatccaaggcactgtccggaagatgggacagagaagaggaaggctgagtctgtcccctcgaagcccgctgcccagttctgcagtatagactcccctctcagcccctgagtggccaggaccctgtgtctgcatgtgcccagcaccctgcagagtgccctgcatgctgccaggacacggcgactcacatggccgcacaggctgcctgcccaggttcagcacctgaaacgtcgatgttcaataaatatttgttgcattaaacttttacagcggtgtttattgatgacattttttaaaatttaatatgcaaggctttcattctttttgctgaataaacaaatataccatatataatatttggtcattaaaaaaagattttccgttgggttaggagatactactgctggctgtttgctgaactttacttagcacccgtgacggaacgcattgttacaaaagacatgatggtggttggggggaggtatccagcctccttccctgggcattggagaggcgcacacccctgcaaagagttgtattggacagctcacagggctgtggggaaatgcacacccagtattaactgtgtgtgcccttgagcctagagcctgcctgcagatgcccacggaggcctctggccctgctgaagcttgcactgtagatagctcttcagggtttggaatagggggtcgtggtgactctgctgaggcctgagcgcttctgcagaagaagtgtcttacttgtaagcctacgagtactttttccaggctctaactggtccctgtctcccttaggcattgtttccaagtcgtacgagtgccgtctaaagggacaaggagccaccttcgtggagacagacagccccttcaccgcggcggccttggcagaagagcccctcgtcaaggagaagcccctcagaagcagcaggaggccagcgccgccccctgagcaggtgcagcaggtcatcatcttccagggctacgacggggagtttgccctggacccctcggtggaggagacggccgccgccacgctgcagacgctggccatggccggccaggtggcccgggtggtgcatatcacggaggatggccaggtcatcgccacgagtcagagcggggcacatgtaggcagcgtggtgcccggacccatcctccccgagcagctggctgatggagccacccaggtggtcgtcgtggggggctccatggaaggccacggcatggatgagtccctcagtccaggtggcgctgtgatacaacaggtgaccaagcaggagattttaaacctctcggaggctggagtcgctccccccgaggcatcctcagccctggatgcattgctctgtgcggtcactgaattaggggaggtggagggcagggctgggctcgaggagcaaggcaggcccggcgccaaagacgtgctgatccagctgcccgggcaggaggtctcccatgtggctgccgaccccgaggcccccgagatccagatgttcccacaggcccaggagagcccggccgccgtggaggtgctcacccaggtggtccatccctcagcagccatggcctctcaggagcgggcacaggtggccttcaagaagatggtccagggcgtcctccagtttgctgtgtgtgacacggccgcggccggccagttggtcaaggacggtgtcacccaggtggtggtgagcgaagagggtgccgtccacatggtcgccggggagggtgcccagatcatcatgcaggaggcgcagggcgagcacatggatctggtggagtccgacggggagatctcgcagatcatcgtgacagaggagctggtccaggccatggtgcaggagtccagtggcggcttctccaagggcaccacgcactacatcctgacagagctgcccccaggggtgcaggacgagccgggcctgtactcccacaccgtgctggagactgcggactcgcaggaactcctgcaggccggggccacgctaggcacagaggccggggccccaagcagggcagagcagctggccagcgtggtcatctacacccaggagggctcctcggccgcggcggcaattcagagccaaagagaaagcagcgaactccaggaagcatgagacgcgcggcacctttactcagcacagggcaggtgtgggaaggtccagcttcggtgggggaccgtgttccctgagcttcatctgaaaccttcaaaaccatgaggacaaggctcccgtgagctctgagcatgccctcccagcgagagtcacactggccaccagccaggcgcccacagagggtaccgtgggctgggcctcggggagcaggctgccaagtgcaggggagggccgggcgcaggccgcacagggagctccggtccactgggggcccttcgatcagtggcctcccgcttcgtcctggccgctgtgctgaagagaagccaagtgttgttggtgtttttctctcccaagtgttttcccatttcagttatcagaaggtcatggccgtggggaaagtggtgaagatacccctcgtggcttggggtgcacctgcttgtgcagtcagcatgtagctgcctttccatttcattctctactgggctaaaaattgcagctacaagtgttaccatcttgaagcagtccacttccattcaatttttttttttaattttagaataacagtgtccccataccaaaggaagcctgctagctcatttcatgtataaatttcccatcttcaaacagtttaggtgtatttgttactctggtcacattctgcataaaagaaatcctcttaagcctatggttaagaaaagccttgaagtttatattcagttaaaatatatgtcggtggagatagccagtgcttctaattttgacttagtttcatacagtaaagcctaaatgtgaaacgcacacgctggaagatattgttcctatcaatattttgctttttataacaagggtttgttcatattgatgccatttttgcaggatttcttcgtgatttctgtccatatgaaaatgctgacattaaacattaacacatggagaccgtgccctgtggccctgccgtggctgccagcatggtctgtgtttccttgtggattcacctgtggccctgctgtggccaccagcatggtctgtgtcctcgtggattcactgcagctgtcggatgcgagtttctgtcataatcatttgtttcctgatacaattgttcttattcttttccaaaactgtaaaataatctcctccctcaaatgcaaaggttgtttttgttctgtttctgttttctttgaaataaaattataacgttaaaagataaaaaaaaaaaaaaaaaaaaaaaaaaaaaaaaag

SEQ ID NO: 1608 - DNA, 3315 bp, Homo sapiens
ttttagtagagacggggtttcactgtgttaaccaggatggtcttgatctcctgacctcatgatccacccgcctcagcctcccaaagtgctgggattacaggcgtgagccaccacgccctgctagaataatttttttttagagacggagttgcgctctgttgccccggctggagtgcggtggtgcgatctcggctcgctgcaagctctgcctcccaggttccagcaattctccagccttggcctccccagtagctgagatcacaggcgtgcaccaccacacccagcttttttttgtgtttttagtggagacaggatttcgccatgttggccaggttggagattttatttttcttaagtctcactctgtccagctggagtgcagcagtgtgatctgggtgactgtagcctctgcctccggggttcaagccatcctcccacctgagcctcagagttgctgggattacaggcgtgaaccaccgcttcccactaggtttttgtatttttagtagaggttgggtttcaccatgttggccaggctttggtatccgtgtatcctacacctgctctccgtgccacatgcgcccgcaggttacgccaaggaggccctgaatctggcgcagatgcaggagcagacgctgcagttggagcaacagtccaagctcaaagctggagtgcaatggcgcaatctcggctcactgcaacctccgcctcccgggttcaagcgattcatctgcctcagcctctggagtagctgggattacaggcacgcgccaccacgcctggctaatgttgtattttagtagagacggggtttctccatgttggtcaggctggtctctaactcccgacctcaggtgatccacccgcctcggcctctcaaactgttgggattacaggcatgtgccaccacgcctggctaatgttgtattttagtagagacggggtttctccatgttggtcaggctggtctctaactcccgacctcaggtgatccacccgcctcggcctctcaaactgctgggattacaggcacgcgccaccacgcctggcctattttattttattttgagacagagtgtcactctgtcccccagtctggcgtgcaatggtttgatctcggctcactgcaacctccacctcccgggttcaacctcctgcctcagccttccgagcagctgggactacaggagcctgccaccacatctggcgaatttttgtatttttagtagagaagggggttcagcatgttgtccaggttggtcttgaactcctgacctcaggtgatccagccactttggcctcacaaagtgctgggattataggcaagagcgatggcgcccggcccactcagcaggattcctagaatgggcacgagctctgccctcatcacagtccaaaagtgagcacctgcctggagctgcccagaaacagccttgtggggtggggttggtgtctgacctccctccccgggggccttcgcaggcttctctgctggtgcttctgtgcctgtgggtctggattcctccagggcctgatcctgggtgcagatgcagctggaagccctgaacctgctgcacacactagtctgggcacggagtctctgccgtgccggagctgtgcagacacaggagcggctgtcaggcagtgccagccctgagcaagtgccagctggtgagtgctgtgctctgcaggagtatgaggccgccgtggagcagctcaagagcgagcagatccgggcgcaggctgaggagaggaggaagaccctgagcgaggagacccggcagcaccaggccgtaagagcgcaagaggccgcgagggaggccgcccggctgcggggagcggcctggggcaggactgggagctgggtgtggtcccggggcactctggagtcagccattagagctgccctcggaacggccttgcacaaacgcctaagacctgtaaggtccctcactgctgagccggacgggaggtccccgcgcctccccacgtttgtgtgaggctgatggcgcgtcggagtccccggcgctccgcccagtcggcccagactgcagctcccggctgagatgtgtctttgccgccctcttctcccccagagggcccagtatcaagacaagctggcccggcagcgctacgaggaccaactgaagcagcagcaacttctcaatgtggagaatttacggaagcaggaggagtccgtgcagaagcaggaagccatgcggcgagccaccgtggagcgggagatggagctgcggcacaagaatgagatgctgcgagtggagaccgaggcccgggcgcgcgccaaggccgagcgggagaatgcagacatcatccgcgagcagatccgcctgaaggcgtccgagcaccgtcagaccgtcttggagtccatcaggacggctggcaccttgtttggggaaggattccgtgcctttgtgacagaccgggacaaagtgacagccacggtaaacatattcataaaacagggctggcaggtggctgagaggcagcatgtgggggcctcctggagccccaggtcctgtccctgccggctctgcacagccctgtagctctcccagcacagagcaaacccacgttgtacctgctgggctcggctgctcctccctccttgagctgggagaaaaaaatgcagttgccagcctgggccacacggtgagaccccatctctacggagaataaaacattagctgggtgtgatggtggcgcctgtggtcctgctactcgagaggctgaggtaggaggatcacttaagcccaggaggtttgggctgcagtgagccaacattgcaccactgcactccattcttggcgagagaataagaccttgtctcaagaaaaaaatggccaggcggtagtggctcaggcctgtaatcccagcattttcggaggcggaggtgggcggatcgcgaggtccggagatcgagatcatcctggtaagggtgaaaccctgtctctactagaaaaaagaaaaaaaaagaaaaaaattggctgggtgtggtgacatgtgcctgtaatctcgggaggctgaggcaggagaatcacttgaacccgggtggtggaggttgcaatgagtcgagatcccgccactgcaccccaagaccagcatgaccaacatggtgaaaccccatctctgctaaaaatacaaaaattagcaggccaaggtggcgtgcgcctggggtcccagctgcttgggaggctgaggtaggaaaattggttgaacccaggaggcggaagttgcagtgagctgaaaccgcacaattgcactccaacctgtggaagaagagcgaaactctgtctc

SEQ ID NO: 1609 - DNA, 3129 bp, Homo sapiens
aaacccgtcaatatggcggcgatcggccgcggccgctctctgaagaacctccgagtacgagaaccttctgataacttaagagagattctccaaaatgtggccagattgcagggagtatcaaatatgagaaagctaggccatctgaataactttactaagcttctttgtgatattggccacagtgaagaaaaattgggctttcactatgaggatatcataatttgtttgcggttagctttattaaatgaagcaaaagaagtgcgagcagcagggctacgagcgcttcgatatctcatccaagactccagtattctccagaaggtgctaaaattgaaagtggactatttaatagctaggtgcattgacatacaacagagcaacgaggtagagaggacacaagcacttcgattagtcagaaagatgattactgtgaatgcttccttgtttcctagttctgtgaccaactcattaattgcagttggaaatgatggacttcaagaaagagacagaatggtccgagcatgcattgccattatctgtgaactagcacttcagaatccagaggtggtggcccttcgaggtggactaaacaccatcttgaaaaatgtgatcgattgccaattaagtcgaataaatgaggccctaattactacaattttgcaccttcttaatcatccaaagactcgacagtatgtgcgagctgatgtagaattagagagaattttagcaccctatactgattttcactacagacatagtccagatacagctgaaggacagctcaaagaagacagagaagcacgatttctagccagtaaaatgggaatcatagcaacattccgatcatgggcaggtattattaatttatgtaaacctggaaattctgggatccagtctctaataggagtactttgcataccaaatatggaaataagggtaggtaaaagttattaggattgtttcattcctggacctttaacagtgggaattaattataaaaaataaattatttcaggtgatgtgttttcctcattagttgttaatctagaccatatttttaaaatacagaagtaaatatttactacttagttaaaccctaaatataataggaatcatttaaaatattgctgttgtctgggcacggtggctcatgcgtgtaatcccagaactttgggaggccgaagtgggtggatcacgaggtcaggagttcaggaccagcctgaccaacatggtgaaaccccatctctacttaaaaaaaaaaaaaaaagtgcaaaaattagctgggcatggtggcacacgcctgtagtcccagctactcggggggctgaggcaggagaatcgcttgggcccaggaggcagaggttgcagtgagctgagatagcgccattgcactccagcctgggtgacagagcgagactccatctcaaaaaaaaaaaaaaaattgctgttgttaggaataatggctgtattaaaaattgagttgaggccggacatggtggctcacgcctgtaatcccagcactttgggaggccaaggcaggtaggtggatcacctgaggtcaggagttcgagaccagcctcctcaatatggtgaaaccccgtctctactaaaaatacaaaaagttagccaggcacctgtaatcccagctacttaggtggtgggcacctgtaatcccaagtactcaggatgctgaggcaggagaatcacttaaacctgggaggtggaggttgcagtgagccaagatcgcaccattgcactccagcctgggcaacaagagtgaaactccatctcaaaaaaacaaaaaaaagttgagttgaaaatatgaactttattatgctttattcattaaaacaatataaacaacacacaagggcattctcactataaaaggttcaagcactacagactacgtttaacaaaaggtaaatgtatttatgccttctaacttatgttttgtaatatgtggtgagattttattttaacgatggtggttttgattaaaatggaattgttaatatttctatatttattaggtatatttctaaattatttgtaagaatttgtattatacagttaaatcgaatttgaaggaaaagagaattcttaaagtgatttttttcctttctccttaaatgtttttatttgttttaattttgtttctttcttttgcccttccttatatgaaccaaacctggaggtgaaaaatattattagaaaatattagccaggtgtgccttgtttaaatgtgaaataaaaagtatttagataatggaaatggaaggatataattataaatggaaagatctgtaagcaggtaacaaacttgagataattcacttcttactgtaataggtggaaaaagaacatggtctttggagagtctgaccaactggagtttaacctctggttttatttacttttttgttagctccatgaccttgggacaattgcttttttgcacaattaggttaatgaaaaatttaatgactagattaagtgatgtatgtagtagtaagcatttagttatcccttctctaatataggccttatacagtttcaaaatatggtataatcatgcattggttaatgataggaatgtgttctaagaaactcactgttagatgatttcatcctgtgaacatcccagagtacttacacagacctagatggtacagcctactacacacctaggttatgtggtatagcctgttgcttctaagctacaaacctgtatagcatgttactgtactgagtactgtaggcagttgtaacacaatggaattcgtgtatctaaacatctaaacatagaaaaggtacaataaaaatacagtataaaagattaaaaatactggccgggcacagtggctcacacctgtaattgcagcattttgggaggccgaggcgggcggatcatgagatcaggagatcgagaccatcctggctaacacggtgaggcctgtctctactaaaaatagaaaaaacagccgggcatggtggcaggcacctgtagtcccggctactcgggaggctgaggcaggagaatggtgtgaacccgggaggcggagcttgcagtgagccgagatcacgccactgcacttcagcctgggccacagagcgagactccatctc

SEQ ID NO: 1610 - DNA, 3023 bp, Homo sapiens
tgtgttcatgaggggcctggatgccgtacgggcggacgcagagtctcagaggagactgcactggaagctgacagcacggtccttagagtcaaatttcgtctgtccatttgctcagtagccctgggtcttgactcacaggtggaatgggagtgcaaactcagtacatgaaggacagaactgactgtccctggaccataatagaaactcattctagaagttcaacatgaaactcattctagaagttcaacatgaaaaagttaggaagaacagctccaagcagaaaatcctaggggcatggaattccaccaccagcattcaccttggggcatcacggtggggatccccacgcaggctgatgcacagagggagtgtggagtggctgcactccctcacatcccgtttcctggtggtattgaacagcatgttgccagctgttctggccccagagcaaccttgcagggaggtcccagggggtggcgtgtgcctctttgagcacatgcaggcctatggtggggccccgcacccggcctgtgtgtgaggaggggctgctcagcatccccactgtgcctggagacagggccgggatgtggtgacaggatggtcactcaggtgtggccagtcagtgaccaaagctgctaacagagttcactttgtcctcagctgctcccggaactgaccaaccctgatgagctactgtcctacttgggcccacccgacctccctacgaacaacaatgacgacctgctttctctgtttgagaacaactgatcctgtgtttaccccaagcccggcggggacacgctcacagatgtcaccacagccctgcccttcatgcccagccccatgggacacccggtggtctttcccaaacctcccccaaaacacacctggagccagagccttctgccgccagccctgcccctgaattggaagcagccctgtgctcgatgggaggggctcccaggccggcagcccttgccacctccctctgccaagcctgctgctgcagaacggtttttgctgaggtgcccctgcccagccctgtccagccttgtccacacacacatctcacgcccctggtctcacagcctcacaccttgtccttccacccctgcctgcccccacccagcctgcttcttgtccagcattgatccttctgtttcaacaactcctccactgggcagagctgggcatctggcagggctggctctgtcccctgggcctttggctccagtggcccctgtgcccagcagtccagctcttggaacctcgctgaatggcagcctcttgggggcctggagctctggcagcccagccgtgtgtggtgtcaggttcctctccccaccccagcttcaagcagaggcctcggggtgggggagctacaaagcacaacaatgtacatagtgtagaaacactaacagctgggagaggggagccagctgtccagccagcatgttcctgttgtacagcccggtctccctgcgcgctctgctccttcccatgtgcagacagatcagggaggaacctccaatgggtgggggacagtgagcttcggcctggccgaggtgggtgggtgggctctcagattcagctctgtgtaaagattctctagcgggctgcgctcccaagttccccttctctgtgaaagtgaagaattagtacagctgtgttttttaaagccacctctctgtctccaccccatgggcccacacccaggtgggggaggaggaagccactgcatctgttggctcagggccccagcctgtgcaagcagggcgcctgggctgttgtgtctcctgtctgtgccgatctctattaaaggactccctcttggtgggcctggccgagtccctcctttgtgctcccagggactattttctcctcgtaagccagcgacctgcctaaagcttgggctgtgcctgcaaagcttgtgcaggacctgggggccaggtcgaccctcaggtggcttttggggccccaggttgagctctggatgtttcaagccaaggctcggctattcccgccccatagtaaatttccttttccctggaattttccaagttggcttcagctgaagagctgttttgtgaagcatcccaggcttgcccaggagagacatttgccactatgtcaccttatctgggcttgccctggggcactgagacagttgtttggcagccccagcccagccaggggctcatccttctcagctcttgtccctgggaggcctctgcttgtcacttcccagagattgcagaggtgtgtcctgcctaccatctgcctgtccagcttggtgggggtccgggtcaccatttcctccagtcctgggccccatccttgagggccttcccagccagccagcaggagaggcaagaactgggggaacacaggaacctaggggaggaggggagcgctgggcatcctcaggctggcggccaaggcctgcccctggaggcactagaggagggcatctgtctgtgggagcccagaggctgcagggaggaggaggagggaggtatctggtgtgagcgttgcccctgcgacatttgggaccacacaggtgggcttccttattccctgacaaagcctctgtttccagctcttccgccctctctggatgagggaacagaagtggaggaaacaaaagaagcagcagcacgcacagtcctgtcgctgggtgcggagacagcctggcaaagtcccactcagccatggcctgatgcaggccccaggccctcctttcttgggtgtcaaatgactgtgtcctggacatctgatgcaccacctgccctgcctgttgcaaacgtgatgctcccggatggagtggagaaactaggagactgggacaagcaaaaggctgcaaacaacccagaagcccatcctcagaagactggagaaatgattgaggaatgcatgggcaccgtggccctgtgctccatcacaaacacctctcagaaacaacgtgggatgaaaaagcaagacagttcatacagtatgatgccatttttataaagctcaaaacc

SEQ ID NO: 1611 - DNA, 3691 bp, Homo sapiens
gtcgccgtcaggcactgaggaggccgagagatgaggccggagcccaccaagttctgggaagttctttctgacacaagtaagataacatctctgccatggaatccctaacactggaggatgtggctgtggacttcacctgggaggagtggcagttcctgagccctgctcagaaggacctgtaccgggacgtgatgttggagaactacagcaacctggtggcagtggggtatcaagccagcaaaccagatgcactctccaaattggaacgaggagaagaaacttgcacaacagaagatgaaatctactctcgaatctgttctgattcaggaggtgcatcaggaggtgcatatgcagaaatcaggaaaattgatgatcctctgcagcatcacttgcaaaatcaaagtattcagaagagtgtgaaacagtgccatgaacagaatatgtttggaaatattgttaatcagaacaaaggtcatttcctgctgaagcaagattgtgatatgtttgacttacatgaaaaacctttaaaatcaaatttaagttttgaaaaccagaaaaggagctctggcctaaagaactctgctgagtttaatagagatgggaaatccctttttcatgctaaccataaacaattttatactgaaatgaagtttcctgcaattgcaaaacctattaataagtcccagttcattaagcaacagagaactcacaacatagagaatgcccatgtatgcagtgaatgtgggaaagccttcctcaagttgtctcagtttattgatcatcagagagttcacactggagaaaaacctcatgtatgcagtatgtgtgggaaagctttctccagaaaatccagactaatggaccatcagagaactcatacagaactgaaacattatgaatgcactgaatgtgacaaaaccttcctcaagaaatcacagctcaatatacatcagaaaactcatatgggagggaaaccttacacatgtagccaatgtgggaaagccttcatcaagaagtgtcggctcatttatcatcaacgaactcatacaggagagaaaccccatggatgcagtgtatgtgggaaggccttctctacaaagttcagtctcactacacatcagaaaactcatacaggagaaaaaccttatatatgtagtgaatgtggaaaaggcttcattgagaagaggcgtcttattgcacatcatcgaactcatactggtgagaaaccctttatatgcaataaatgtgggaaaggcttcaccttgaagaacagtcttatcacacatcagcaaactcatacaggagagaaattatatacatgtagtgaatgtggaaaaggcttttcaatgaagcactgtctcatggtacatcaacgaactcatactggagagaaaccttataaatgcaatgagtgtggaaagggcttcgctttgaagagcccactcatcagacatcagcgaacacatactggagagaaaccctatgtatgcaccgaatgtcgaaaaggtttcaccatgaagagtgacctcattgtacatcagcgaactcatactgcagagaagccatatatatgcaatgattgtggaaaaggcttcactgtgaagagccgccttattgtgcatcagcgaactcatactggagaaaaaccctatgtatgtggtgagtgtggaaaaggctttccagcaaagatccggctaatgggacatcaacgaactcatacaggagagaaaccttatatatgcaatgaatgtggaaagggcttcaccatgaagagtactctcagtatacatcagcaaactcatactggagagaagccatacaaatgcaatgaatgtgataaaaccttcaggaagaagacatgcctcatacaacatcagcgatttcacacaggaaagacttcctttgcatgtactgaatgtggaaaattctctttgcgcaaaaatgatcttattacacatcagagaattcacacaggagagaaaccgtacaaatgcagtgactgcgggaaagccttcactacaaaatcagggctcaatgttcatcaaagaaaacatacaggagagaggccctatggatgtagtgattgtgggaaagcttttgcgcacttgtctatccttgttaaacacaagagaattcacaggtagtcattttgggaaagcctcttgccagatgtaggcccttaagatatctgcaaagaagagtaatttcatgaatgcagactacatggttgtttatttagtgatcagttacttcatgttttgtgtcagagaaaacatgtacaaaacatttgagaaaatattttaggacattatgtctaaaaattgtatactgagaaaaatcctatgaatgtggcagactataaaagcctttggtgggaagataaaccccctcagaagtgatcatagatcatgaataaactactaattcgtggaaatgtaataattataggaacgtctttgcccaaaaataaaacctcaacagattgagagagttcacactggagaaatactttcctctggcagtgaatgtggcagggttttcagtaaaatgttttgcctcatcgtgtgctaggaaataatgcagaaaaaaactaatgaaaacattcaatgtagaagacttttaggaaaacaacagagaatttaatgaaggaaagaagccttggcaaaatgatggatgagagctttctgtcacaattctaaccttaacagataatatgcctcatgtgcatttgggaacaggatagcttgagccatattcctagttgccttgtcactgattttatacattttaaattgtgacttcctctaatcacgaactaaaatttaatattgtatataataccggagtattttatgcctgcctcattttattatatgattagctcctgcatttctttagttctaagtttgtgttatttcagaataactaaagtacttcagaatgaaactggatacagtatattcaattcataagtgtaattgaccatacttgaatatgtttaagtttataagtaacaccaggtgttatgaaattaatataaataagatgtttttgtaagtttttattttgaaataagtttagattcacaaaatcttaccaaaatattccagagttcttgaatgcccttaacccagcttcttccaaagataacaacttacataagcatggttcgttaccaaatacaggaaagtgagattgttacaatactgttgactacagaatttatttggaaatcaccagttttaacatgcatttttgtttgttttttatatgtagctttaagaaatcttaacacatatattgattcatgtcaccaccaccgtaatcgagattcagaatgttgcatcaatgcaaactccctcatgctccttgtttatagtcacaacctctcctcagccctaacccttggcaatcagaaatcttttcatctttagttttgtcattagtagcatgttataaaaatggaatcatacagcatgtacccttttggtattggctatttcaactaaagcagattaacctgaaatccatccaagttgttctgcatatcattgttctgtttttattggccactaataatctatgatacgaatataccactatttgtttattcacccactgaaggacattagttttgttcccggtttttcttactgttacaaataaaaatcctatgaacatttgtacacac

SEQ ID NO: 1612 - DNA, 2851 bp, Homo sapiens
tgtctctacccttgggtttttggatcccagcacacagtcttgttttagtactcattttcttgaaccatcctctatagtccagcttgggaaagtcaagaacaggcacatgtgggggaccacctaaacagcgggttcatccacccgggctgcagagccccaggctgctgtgtctgcaccactgccaggtgctgaagcgtggagaggatgggctcaggcctgcccatgaaccctgtctgatgggtcaggagggggctttccccaggatctcagggagtaccgtcttcagcttggaccaaaatggaatcactgtttattttgactggtcagtatcagggttcagattgtccttgggttgggcgtcaggatcagggagaaaagatctgggctctggggttagtctgggtagaggaggagcaggccctccagcaggcagccctgcaccaagtgtgggattgcccagcaccactggttttgcagaggcgcccgcaccccccagccgaagggcacgaccacagcattggagtctcagttctgtttttagggccacaggcccctgggctgccaccactggagctagttagctgaatcgccaacagaagcgtttacagctaactcatccctgtgccaactcccattctcaggagtccaggagggtatgccttcccactggcccaggccactctggctctgtcaacaaaggccttctccgtcaagcagaagggaacttgcttggctgtcttctgataaagccagccatgttaggtattgagtagctggtcaagcaggatccttctggggcctgatgagaaccctctcttttccagggctcatctacagcctattgggataccagtatctcccagcatatttagagggtaatgtgtccagggcatatttagaagccctggacttctgtccctgtacctgttttatctttttggcctgtctccatctgtacttgggatttggccctggtttcccccttgcccttggccatcgctgtcctcccccagagtgtgagtggcctgctctggggtggggcacttcccctgggctctaacaggccccaagagaagtccatccccaatttgtttggtatactcacctaaggaacatcaagtgtaacggccttatttcattgcctgtttttataagaagcacagtcattcgtaaagtggcaagtaggggggtcacttacctgtgggctatgccctttgggtctggtcattcctgtgtcctctcctggctgtcctggaaactgtcgaacaaagctctaggagcagtccctctctattcttcctgacaagctgtttccagcccctggagctagaggtaaagtttcatatctccgcccttcatatgcatttgtgcagccaacatcggctattgggaaatctgtcatttcgctctgatgctagtgctgctgtctccttctccctcagcagccacagcagcagttgcttctgctccgatgtgatgtccgatccctgatgtattttcctgagcttggaagggggagggtgaggaggggaggaaggggagggccagacattacgagagtgagcaaggactgtggagccagcagcaggcagcgtggagcccaggagcctttagacaaagcattctgctgcggctctgtcagcgcgcacatccaccggcagcaggcaggaccacagctgcccggctgggggattacaagcaagaatgaatcagcacccggggacacttgacttcatgggcatagaagaacctgccacgtaggctcctggagcagacttccccattcaagggcaggggagctcaagtatcccccagactcggcatcttggagcgctgcggcagcgtgcatccagaaggccgccgggtccctgaccatcatctgttctgcaggagacagaggagagggagtggaggctggcagagttggtcaccagggtcttgtagataaccaaggaagttggcattgtcctgccccaaggggcagaaagtacctgggaacggcagaatgactttcaccgtgtcaggagttcactggaggtgatgtgtttatagttggttcttccttttccttccttgtacctctttttcctccttttcacttttttctttctttcatctgttcttgcccacaagaatcagagaagtaggttggggttcaggcatccagctcagaacatccaaggtctgccagaaagggctgaacttctgtcctccctgcaccaccaaaatccccatgctgatcgaggagcaaatagatgtcctcccttccctgctcatccttagaggagaacgccaagatccagagaccctgggacgactgtggctgtctttatcactcagccaaagagagaacagcacaggacgtgaatagacttaagccgccacagctcagctgacagaggaccacttcctttttctctcttttatctggttgggttttgtcttctttacccaagaactgaatttgcctgcctgctttctacctgagcaggcaggtgagtcactggaacagctgttatcagaagaggaaaatgaatgcccagcccctgaaaaccagcctggcccaagaaggcaacacttcagacggcgtgctggcccaggagacgccctgcttgccagctgccagagtctagctgtggatcgggctcctggcccactggccgcgcagcccggcggaatgcgatgctgccgtcccagcagagccacacctgagcctgacccccgagccccggcccatgtgccccattcagccccttgctgccttgagcctctgagcacaaagggccggtggccatggtttgcttattccgggactgctgggggaaaacaagtaaaagtctcttttctcccc

SEQ ID NO: 1613 - DNA, 3842 bp, Homo sapiens
actcgcctggagcgcgcgggcaaggcgggcggagcgcactggaactcaagggggcgcacagcggcgcgctcgcaccgctcggctccgcgcggctctaggaggtggcggcggtggcggtggtggcggcggtggcggcggcggcggcggcggggcgcagggctgagcgagcgtccgggctccggggctccggggaaggcggttgcagctcctgagtgcagcgcggcttcctgccactgtcccggcccggccacctctctgtcatggctctggcggacagcacacgtggattacccaacgggggcggcggcgggggcggcagtggctcctcgtcgtcctccgcggagccaccgctcttccccgacatcgtggagctgaacgtggggagccaggtgtacgtgacccggcgctgcacggtggtgtcggtgcccgactcgctgctctggcgcatgttcacgcagcagcagccgcaggagctggcccgggacagcaaaggccgcttctttctggaccgggacggcttcctcttccgctacatcctggattacctgcgggacttgcagctcgtgctgcccgactacttccccgagcgcagccggctgcagcgcgaggccgagtacttcgagctgccagagctcgtgcgccgcctcggggcgccccagcagcccggcccggggccgccgccctcgcggcgcggggtgcacaaggagggctcgctgggtgacgagctgctgccgcttggctactcggagcccgaacagcaggagggcgcctctgccggggcgccgtcgcccacgctggagctggctagccgcagtccgtccgggggcgcggcgggcccgctgctcacgccgtcccagtcgctggacggcagccggcgctcgggctacatcaccatcggctaccgcggctcctacaccatcgggcgggacgcgcaggcggacgccaagttccggcgagtggcgcgcatcaccgtttgcggaaagacgtcgctggccaaggaggtgtttggggacaccctgaacgaaagccgggaccccgaccgtcccccggagcgctacacctcgcgctattacctcaagttcaacttcctggagcaggccttcgacaagctgtccgagtcgggcttccacatggtggcgtgcagctccacgggcacctgcgcctttgccagcagcaccgaccagagcgaggacaagatctggaccagctacaccgagtacgtcttctgcagggagtgagctccccagaccccctcgccactccagcgcccttttcagctgctgctcgccagaagcccttgattccactggttgacatggcagcagttactggcaagagggagaaaggacgctgccgcctaagagtgcaaggctgctcaggtctccaagcgccgtaggaggtcacctggcagtgactgtagggagctgggtcatagtgcacgtcgtgggtattaggaaagcctgtattctttcaatgaatgtcagtaggaccttcctttagctgtaagacttggtgggcggggtggggtggggagggaggaaagggtaggaagggtgggaagggagaagcagacatagtcatttatgatttgaaagttggaaatttgtaccatctgtttgagtatatgcacatttaaaaaatatcatatagtaaatgcaaacatgccaagtattttataaagattaataacagacctactcttacctggcagtttacttaacttactgttttgagtcctaaacttagagttgttaatgcttatatataatctaaccaaagagttacccagtagggttttagtttttgaacttttattttcttgttgattataaatcctgattttggaatctattgcgcaaaagaagtttcattttggttacttagacctaagatcacttattaaaaatccttattttctccaagcccagcaaacgttgacttctgggcaaacctgaaaacctgaaaatgccactttcatgcagtttgtttgaagttaagtggaatcctttcaaatgacgagctgcagagaactcagcaccaagggctgcctatctgtagatagctgtaaaatggaatatttttaaatgaaggcaaataagtacttaaaagtgagctgagcaataaaatggtccaataataggtaaatgcaacagaaacagaaggagacctggttgccttatgcctttactcttacatggaataaattcccaatgcatatcctatgtaaaccataagtgaagggaaataaacctcgtcatgctccatgctgtgaggtgtcctttggatattctgtgatgacagagaagcctattttgttttgttttcagcatctttctctgatgtacgtttttaaggattttgtaagagctgttttcagtgtttaaattagtgctatttttccttgtttttaaaaatgaatctcgtactgtatcttactatgtccatacagatgttacaaatcgacagttttattcttagactcatgtgatccaagctgtatataccatatataaacattttacatgaatcatttagttttttaattcatttactaatgctataaaatttcctatattaccccagtaatttgcatcagctggtttatatactaaagcaacatgttttgatgagtttcttacatccttatcgaggaattgggttaggaaaaaatacataattgtaaaactgagtttgctgtattatactttttttcttgagtattagttgtattactaatcatatgttgattaactgtctacttaaagtcaaggtacctgtatttttaatccactaatttttttttagttgggaaatagatttcaggtcttttattagactaacattttttgagaagtaaaattgacttcatatacaaagcctgtaattttaggcgaaatggaagcagaaatctaggaagttgtgcttgcttgtatgttgagtttggtctcagactaagtaatgcatcagaattcatctgtttgaagcctgaaataatttaggactctgattcactgaccaaaagtcagtgttgcagagatttctctaccccgtatggtattttgttagattgttcaacaggaagcacatgattgagaacatcttgggacagaccaaaaccactgacagatggcaaggctcggcgattctgatttcccttctcaaatctgctcaactccaagagtcttgagaaactgctaaaattttgcctctgtcactcaagtcttacaaatgttatcttgtaaacctttgaggtgaactattccactgtcttgtacataggcatcttattcactgcaccctgtcacacccagcaccccccgccccgcacattatttgaaagactgggaatttaatggttagggacagtaaatctacttctttttccagggacgactgtcccctctaaagttaaagtcaatacaagaaaactgtctatttttagcctaaagtaaaggctgtgaagaaaattcattttacattgggtagacagtaaaaaacaagtaaaataacttgacatgagcacctttagatcccttcccctccatgggctttgggccacagaatgaacctttgaggcctgtaaagtggattgtaatttcctataagctgtaatagtggaggtattgtgggttcatttgagtaagccctccaaagataccattcaaataacctgggagaatgtcataaattattcagataattaacactgcatgaatctgattcagaggcatgcatttacatatgttgccctaattaccatttgatgatcataaatacaagtgaatgacattggacttttagtaacaaacttaatttttaaaaaggtgtagacaatggtggtt

SEQ ID NO: 1614 - DNA, 2999 bp, Homo sapiens
cacactgactgggggagttcaaaagcagaggtgcattcagcagggctgggtatgactaaggagactatcagggcaggagcagaggccacagcatcaacagcggtacatctgggcccttggcattcctggcacacccctgcccagaggcaggagtccctgaccagccagcttcctccatagcatgacctgtgccaaatgtaaccatggattctgctggcgctgcctcaagtcctggaagccaaatcacaaagactattacaactgctctgccatggtaaggcgctgggcactaggggagggcagaggcccagagccgtcggggaggggtgctgctaccaggtcctgggcagacagggctccttgtgcagtgcagcattctagctgttgggatagaggctcactgtggggaagacagagccacctgggcctgcagatgctggaaagtctgttcacagggaccttcagctccagaacaggacttctcataccgaggtggctacagaaaggctggggagggctgggcactctcagaaggcagcagggcagagcaggaaagagcagggaccctgcatttagagcctggctctgctgcttagcatgtggctttgagcaagttcatttacttctccaagcctcaacagcctctgcaaaaggggtgaataatatgacctactccacacagtcatgaggactgaatgaagataatcgggggaggtgtagaaaggcctccgtgaatgttggcttttccacttattaactccctcctgtccaaacaaaacacccaatagccctcccaacgtatccttgctaggtaagcaaggcagctcgccaggagaagcggtttcaggactataatgagaggtgcactttccatcaccaggcgcgggtgagtcgggaggaaacagcgggtagatgcctgcagaagcaggttggggtggtggggtggaggggggtgggctgaaggtctgaccgggcaggtggtgctgcgccacctgtgctggtactgatacaccttcctccacacaggagtttgctgtgaacttgcggaaccgggtgtctgccatccatgaagtgcccccgcccagatccttcaccttcctcaatgatgcctgccagggactggagcaggctcggaaggtggtagcgggtgggggaagagagcaggggaggggtgtgccaaatgggtctggggggcttggctgctttcatcggacttgcctgggtgaagggaatgaggagagggcaggcgggagagctgatgggagcccctgcaggtgctggcctacgcctgcgtgtacagcttctacagccaggacgcagagtacatggatgtggtggagcagcagacagagaacctggagctgcacaccaatgccctgcagatcctcctgggtgagccacccctgccagccaggccctcctcctgcctcctcccctctgttgcacagcccggcccctcccagacaggtcaagcggcacccttaccttccctctctcctcttcctcttcattcttcatggccttctcactgcctggctgttaaagctcaggtcgaaagcctacattgtaaggtgcccaagggcgcagatgttcgtggatgtttcttggtttctggtctttaccctgctcccctagggagcttcatgagaatgtctagagctgcacctggtgcttggtagacgttccataggtgtttgttggaggaaggaatggatgagaatgagaagggagggagcctctgtgcctgccccctctgcagaggaaaccctgctgcggtgcagagacctggcctcctccctgcgcctcctgcgggccgactgcctcagcacgggcatggagctgctccggcggatccaggagaggctgcttgccatcctgcagcattctgcccaggtactgcccggcccagaccccttctgctcctgcattctgcgggagttgaggtcctcctgtcccagcacagcccctgccctggggcgagtccagaaggaaaggcagcaaagcgggtgaatggatgttagacctgggcgcacatcccggcttttgggccaacctgcctgatgctgctggaccctatcacttcacctcctggggattcctacaaaataaaggggttggctagcccacatcaagggtatttggtcaggtgcctatcagaatcacttggggaacttttccagactgtacttcccagatagggatttgaaatcctaagagtgggcatcaggggattggggtcactggagcaagggctctcccaggctctctccagctctaatgcactgatgctgagtctaaactgtgagtcctgtcctcaggttgcttactgactggtaagtcacatgggcagaaaagacatagattctgtaagctctttaagcacagggtcgtgtgcctcacctggtaccccgtatccctggagaccatctgtgggtgaactcacaaaggcagtgtttcatgaagtgctgtgctgggaggggagcagtcctagcaggagcttggccctcccagagcatcagtggaaggaatgctgggtccaaaggccccatgccctctacctccttctcaaatccttctgtctgctcaccaggatttccgggttggtcttcagagtccatcagtagaggcctgggaggcaaaaggacccaacatgcctggcagtcagccccaggcctcctcagggccagaggcagaagaggaggaggaagacgatgaggatgatgtgcccgagtggcagcaggatgagtttgatgaggagctggacaatgacagcttctcctacgatgagtctgagaacctggaccaagagactttcttctttggtgatgaggaagaggatgaagatgaggcctatgactgagggggcagatgcaggaaacacctagagcagccccagagtcacggggctgagggggcgggagctgcccctgtcatagggagggggattcccagcgtctgtagtgcttcctgtttgctgaataaaggtctctttctcacac

SEQ ID NO: 1615 - DNA, 3140 bp, Homo sapiens
attggccaaaacaaaggggctgcaggccccatgcaagtccgaaatctagcagagcggtaaaatcttaaagttctaaaatgatctcctttgactccatgtctcacatctgggtcacgctgatgcaagaggtgggatcccatggtcttgaacagctccaccccagtggctttgcagggtatagcctccttcctggctgctttcacaggctggcgttgagtatctgcagcttttccaggtgcacagtgcaagctgttggtggatccactattctggggtttggaagatggtggtcttcttcttacagctccactaggcagtgctgcattagggactctgtgtgggggctcctaccccacacttcccttctgcactgccctagcacaggtactccatgagggccctgcccctgcagcaaacttcttcctggacatctaggtgtttccacacatcctctgaaatctaggcagaggttcccaaactcccaattcttgacttctgtgcactcgcaggctcaacaccttgtggaaactgccaaggcttggggcttgcaccctctgaagccacagcccaagctctacattggcccctttcagccacagctggagtggctgggacacggggcgccaagtccctaggctgcacacagcacagggaccctgggcctagcccatgaaactactttttcctcctaggcctccagacctgtgatgggagggctgccatgaagacctctgacatgccctggagacattttccccattgtcttgcagattaacatttggctcttcattatgtaaatttctgaagcgggcttcaacttctcctcagaaaatgggattttcttttctaacgcattgtcaggctgcaaattttccaaacttttgtgcactgcttcccttataaaattgaatgactttaacaatgcccaagtcacctcttgaatgctttgctgcttagaaatttcttccaccagacactctaaatcatctctctccatttcagagttccacaaatctctaggacaggggcaaaatgctgccagtctctttgctaaaacataagagtcacctttgctccagttcccaacaagttcctcatctccatctgagaccacctcagcctggatttcattgtccatatcattatcagcattttggtcaaagccattcaacaagtctctaggaggttccaaactttcccacattttcctatcttcttccaagccctccaaactgttccaatctctgtatgttacccagttccaaagtcacttccacattttcaggtatcttttcagcaatgcccccactctactggtaccaatttaatgtattagttcattttcacactgctgataaagacatagctgagactgggcaatttacaaaagaaagaggtttagtggacttacagtcccacatggctggggaggcctcacaatcatggctaaaggcaaggaggaacaagtcacatcttacatgaatggcagcaggcaaagagagagcttgtgcagggaaactccccttataatatcatcagatctcatgagacttttttcactatcatgagaacagcatggaaagacctgcccccataattctattacctcccaccaggtcttttccacagcacatgggaattcaagatgagatttgggtaaggacacagccaaaccatatcacaggtaattacatagtcagaaacacaattggacaaccaacatatgacagcattttcaacattactagtattcaaaaaaatactaaataaagtagcagtaagatgtttattttcacaaagcatattatcagatagttaaagagtaatagggttattgaaggtatttctgagatcaagtctttttgttgagtttaatgttgatgtgcatgtaaattggtacagcatttgtggtaggcaatttggcccccttatcaacattaaaatgcttgtgatcactttgaggtagtagggagctggggaagagtgggaggggctaggggagtggacacaatgggaggtactaaaggactggaatgtaaagggggggatgtgtggggccaggagggatttggaagaaccaggattgattggaggagggggagaggagataaaaggcacttagagggactggtggaaaaaaaacaagagagattggaaacaactgaagaaacttagagggacaggaagagaaggggtgggactggcagggactacacatgtaaaatggaaacaactggcattcagcaaattgacctacagccactggcaaatgggacctgttcacattgaccagggtccttcaggagaatgagatttgttagcaaacaggaaacagtgattttcagagtggtactaactgtgctttgcagagttcttttacttcctgttatcttgactctattattaccttgtattttgcttctacaaagcagcctgagctctttgaagactccttagtctaaagcctctgatggccaatggtctgcatctttcccatgtgctcctgaggtacaaaatggacatttcagctgcttttaatagaaactcactgtgtcactcataaaactcaggaagctgtcccaaatcctgggaggacatgaaaagaggctcactctgtagtcaagcacaggtatgcctaaggtgtgcaggtcccaagactctcccacttctctcttagtttggagtgggcattcttttaagaagtggaggaccctgtggtcactggcttccttagtggtgaatcatagggcaatcagagagcaggaatctgcaaaggggcgctgtcatgtgctgaattgtatctcctcaacatttatagattgaagccctagcctccagtatctcaggatgtgacagtatttggaggtggggcttttaaagaggtggttaagttaaaatgaagccattagagtggtccttaatccaatatgactggtctccttataagaagaaacttgtacacagaagagatacacaagggacatggaggcacagagaaaagcccatgtgaagaggcagcaaaagagtggccatgtgcaatccaagaagagaggcctcagaggaagccagccctgccaacactttgatcttgaactttcgggttccagactgtgagaaaataaatttttattgtttaagcc

SEQ ID NO: 1616 - DNA, 3268 bp, Homo sapiens
ggaccatgaggttcaccaccctgtcataccaggaaatgagcttgacaaagtcattgttgagggcaatgccagccccagcattgaagatggaagaatgggtgtcactgtcaaagtcagaggagacgaccttgtgctcagtacagcccaggatgcccttgaggatctccctcaatgcctgcttcaccatcctcttgatgtcactgtatttggcaggtttctccagatggcaggtcaggtccatgaccaacatgttggtggtggggacatggaaggccacgccagtgagcttcccattcagctcggggatgactttgcccacaggcttggcaggaatgatgttctagagagccctgcagccatcacactacaatttcccagaggtaccatcagtagtcttctaggtggcactgaaggcatgaactgtggtcatgagtccttccatggtgccaaagttgtcatggatgaccttggccaggggggttaagcaactggtggtgcaggaggcattgctgataatcttgaggctgtttccatacttctcatgattcacacccatcacaaacatgggggcatcagaaggggcagagatggtgactcttttggctcccccatctaagtaagtcccagccttctccatggtagtgaagacactggtgggctctataacataatcagcaccagcatcacctcctttgattttggtgggatctcattcctggaagatggtgatgggatttccactggtgacaagcttcgcgttttcagcctgatggtgctgtggaacttgccatgggtggaatcatactcgaacatgtagaccatttagctgaggtcaatgaaggggtcattgatggcaacaatatccattgtgctagagttaaaagcagccctggtaaccaggcatccaatatgtccaaatctgtttactccagccttcgcttttcccttggtgcctcagggacgcaattggtgctgcatgagaagatgcagctgtcagtcgaacaggaggagcagagagcctgccattgcttcagactcaataactggggcaggtctcagtgttatagcttgggatgggaaatacagcttctgcttttggagaaaatacttcacccatgaggaccaggaccagctaataaggactgggagaaataaagggactatgtgtgggagtggatctttttttttttttttgagagagggtcttgctttgtcacctatgctgaagtgccattgtgcaaacacttctctctacagcctcaatctcctgggctcaagcaatcctcctgcctcagactcccaagtagctgggactatagtcgcatgtcaccatgcctggctaatttttaattttttgtagagagggcctcgctgtgttgcccaggctggtcttgaactcctgggctcaagcgattctctcacctctacctcccacagtgctgggttacaggtgagagccaccccatctggccagaagtggatcttgagggtgctagatgatgcaaatataaggttgaaaggagagagttttggccaggcgtggtggcttatgcttataatcccagcacctcgagaggccgaggcagtaggatcccttgagctcaggagttcaagaccagcctgggcaacacagcaacaccctgtctctacaaaaaattttaaaaaccaaaattagttgggcgttgtggcttgtgcctacagtaccagctactcaggaggctgaggtaggaggatcacttgaaccggggagtcagaagttgcagtgagctgaaatctcaccactgcaccccagcctgggtgacagagtgagcccctgtctcaaataaaatgagtaggccaggtgtggtggctcacgcctgtaatcccagtattttgggaggctgaggctggtggatcactggaggccaggagtttaagaccagcctgggcaacacagtgagactccatctctgctaaaattagccgggcatggtggcacatgcctgtaaccccagctactctggaggctgaagccagagaatcacttgaaccaggaggcagaggtttcagtgggctgagatcataccactgcactccagcctgggcgacagagcaagactctgtctcaaatgaaaaaatacatacataaattaattaattaaaaaagaaaggagatagtttattgacaggggagaactctcctgcaacacaggatgtagctggagccagtcctaacatgcttctggggtagctccatgaaatggtttacaataataaggtggggatgctgggatggccattgcagagttttgggattttttgtgcatagtaaaatacacataaaatttgcctcttcactttatatattgtggtaggatatacgtaacataaaatttaccattttaaccacttttaagtgtccaatttagtggcattaagtacgttcacaatgttgtgcagccattatcactgtccatttctagaacttttttttttttaagatggattttcgctattgttgcccaggctggagggtaatggcacaatctcagctcactgcaaccctcacctcccgggttcaagcaattctcctgcctcagcctcctgagtagctgggactacaggcacatgccaccatgcccagctaatttttgtatgcttagtagaggcagggtttcaccatgccagccaggctggtttcaagctcctgacctcaggtgatccgcctgccttggcctcccaaagtgctgggattagaggcaagagtcaccacacctggccagctacacacttttaaacaacaagatctcatgagcactcactcattatcacaaaaacaggaagggggaaatctgttcccatggtccaatcacctcccaccaaacatgcttcctcacttccttaaggacttttctggaagtgcttctcagtgaggccttcctctactgcaaaaagcttcccctgccacaaagagcttcttttttttttttgagacagagtctcgttctgtcacccaggctggagtgcagtggcgtgatctcagcactttgggaggccgaggcaggcggatcatgatgtcaagagatcgagacaatcctggccaacaaggtgaaaccccctctctattaaaaatataaaaattagctgggcgtggtggcgggcgcctgtagtcccagctacttgggaggctgaggcaggagaatcgcttgaacccgggaggtggagattgcagtgagccgagatcatgccattgcactccagcctgggtgacagagtgagacgccgtctc

SEQ ID NO: 1617 - DNA, 3051 bp, Homo sapiens
cgctgatgcgcatcctggtcatcgggctgtcccgggagctcccgctcgggcctgcggacgccatggagcttgctgaccacctggtgaagcgggcggctgccgtgcaggcggatgatgtggaggtgctgaaggtggggaggacccagctgatcgacgccgttctgaatctgtgcacctaccatcaccctgaaaacatccagctcccaccggggtaccagcctccgaacctcgccatctctaccctctactggaaggcctggcccctcctgctggtcgtcgccgcattcaacccagagaacatcggcctggctgcgtgggaggagtacccgaccctgaagatgctcatggagatggtgatgaccaacaactactcctacccaccgtgcaccctgacggatgaggagacccggacggagatgctgaaccgtgagctgcagaccgcccagcgggagaagcaggagatcctggccttcgaggggcacctggcggccgcgtccaccaagcagaccatcactgagagcagcagcctcctcctgtcgcagctcaccagcctggacccccaggggcccccccggaggcctccccctcacatcctggatcaagtgaaaagcctcaaccagtccctccgcctcgggcacctcttgtgccgcagccgaaaccctgactttctcctccacatcatccagcggcaggcctcctcgcagtccatgccctggctggcggacctggtacagtccagcgagggctccctggacgtgctgcccgtgcagtgtctgtgcgagttcctgctgcacgatgctgtggacgatgctgcttccggggaggaggacgacgagggcgagagcaaggagcagaaggccaagaagcggcagaggcaacagaagcagcggcagctgctgggccgcctgcaggacctgctactgggcccgaaggctgatgagcagaccacgtgtgaggtgctggactacttcttgcggcgcctcggctcctcccaggtggcctcccgcgtgctggccatgaagggtttgtcgctggtgctttcggagggcagcctgcgggacggggaggagaaggagccccccatggaggaggatgtgggggacacagatgtgctgcagggctatcagtggctgctgcgggacctgcctcgcctgcctctgttcgacagcgtcaggagcaccacagccctggccctgcagcaggcaatccacatggagactgatccccataccatcagcgcctacctgatctacttgtcccagcacacgcctgtggaggagcaggcccagcacagcgacctggccctggacgtggcccggctggtcgtggagcgctccaccatcatgtcccacctcttctcgaagctctccccgagtgccgcgtcggacgccgtgctgagcgctctgttgtccatcttctcacgctacgtgaggcgcatgcggcagagcaaggagggcgaggaggtctacagctggtcggagtctcaggaccaggtcttcctacgctggagcagcggggagacagccaccatgcacatcctcgtggtccatgccatggtgatcctgctgacgctgggcccgcctcgaggtgagccgccacaggccccgggaggggcagcttcgtgccaggtgggccacagccctgaccacacccagcggcttccgcatccttgccttgcttctgggcgggaagccccccagcccttcaaccctgtgtcctggcttctctcctaaagaggaggctgcagtccgtcccgcgtgtctctgagcacttggtggacgtgtgggagatccccacgtggtgggacctcccagcctgtagagccctgagctggagggcctggtacagcctggggtcagagtcctcactgccccagcctaaccgtgtaggcctgcggtgcctgggaggcggcaaactcgggatttcaccgtgtggaggtgcgacatgaggctgccaggcaagtgggtcctctccccggggcccaggcgagtgaccctgaggacgctctggccagcgcagtgtctggaacccagcgcctacccagccgtgccctctgcggccgcagccttcccctttactcctggctgacaccatgaactgctcccacgttcaccccgttgtgtctgtcagtgggggaagggggcggaaccctcatgctggggttcgggtggacgtgggtgggtggtgacccctgttgggaggcagacacagtcacaggcgtcgcccttgggaagggcagccggagaagccggccctgtgtgggcctgggcctgtggggtttcccagtggctttgcggagccagagagctggatgggacctggtccagccaagcaaagccccgagggcaggggctggatggggacacgcacatgtccccttggccacgacaaaatggcagtgatgctgcttgccttcctgcagcatctgtgaggatcaaatgcgtgcacctacgcaaagcatccgcacatagcaagtgctcacctagcacaggagccccgtgctcctcccaagtctcagtttccttctcgggagaggaggtgcctctagccttggcaccagcggtgcttggggctgggccccggtgggtctgaaggctgctcacccgttgtccttcctgaagccgacgacagcgagttccaggcgctgctggacatctggtttccggaggagaagccactgcccaccgccttcctggtggacacatcggaggaggcgctgctgcttcctgactggctgaagctgcgcatgatccgttctgaggtgctccgcctggtggacgccggtacggtccaggctgggcttgggcaggggctgctgactcaggggtcccgggccccttgcctgctccttgtgggcctgggcagcctccggctgtggcagaggagaagactggccgggtagcctcaggggatcctgcagaccatatgtcctgcccacagcaggctgtgctggaccctgggaggagacctagggcagcctgtgctggccccgtccgagagggtcttactgtcaggctcaggggtctagagtgagaaacaggtcctcgatgg

SEQ ID NO: 1618 - DNA, 2923 bp, Homo sapiens
gtttggtccggccaggtcccgggatccgggccgcccgctgcgatgccaagtccccggaggagcatggagggacggccgctgggcgtctccgcttcgagcagcagcagcagccccggcagcccagcccatggcggcggtggcggcggcagcaggtttgagttccagtccctgctcagcagccgcgccacggccgtggaccccacctgcgcccggctccgtgcatcggagagcccagttcaccgccgcggctccttccccctggccgcggcgggcccctcgcagtcgcccgcgcctccgctgcccgaggaggaccgcatggacttgaacccgtccttcctgggcatcgccctgcgctccctgctggccatcgacctgtggctgtccaagaagctgggggtgtgcgcgggagagagctcgtcgtggggcagcgtgcgaccccttatgaagctgctggagatctcgggacacggcatcccctggctgctgggcaccctctactgcctgtgcaggagcgacagctgggccgggcgcgaggtgctgatgaacctgctcttcgccctgctgttggacctgctgctggtggccttgatcaaagggctggtccgcaggcgccgcccggcccacaaccagatggacatgtttgtcactctctcggtggacaagtactccttcccctcgggccatgccacaagggccgccctgatgtcgaggttcatcctgaaccacctggtgctggccattccactgagggtgctggtggttctgtgggccttcgtcttgggcctatccagggtcatgctggggcggcacaatgtcaccgacgtagcttttggcttttttctgggctacatgcagtacagcatcgtggactattgctggctctcaccccataatgctccggtcctctttttactgtggagtcaacgatgacaccatctcattgattatggcaccaggaagtctgaaggtttccacattcgatgatgtcaacctaaaccagcagccatcccgcttgtccctcttaggcatttcaggcttcctttgggatttcaggtgtcccatgatcttgatgtgctgctaggctggagcacacactggccattactgaacacagccatattagggaaagcaaaaaaacccaaaaaatcctctattgtatatttattcaacaactgtttatgtttccaggacaactgcaaagaaaacaagctgaggtggttatactgttgctgttaaaagttggtatcagtaagatttgtgttttgtgataatccctaaatcaacataccacttgtaaactgaacttcgagaaagaaacatgatgttcattctgtaaatatacatgcagacaggtcatgtactaatcctagtccttttcctgaggtagattttaaacagtatttttaaagtccaagacataggtttttctagtttattccctgaagatctgttgccacagttgggagatttcttcttaatcctgattttcttggtaagcttttttactttattatctctataatttattatctctatccatatttgtggatcgggtagtgggaaaagagattataatacttgtctttctctcctctccctccatccctcaaaagatctttatgcatttcccactactcccttactgtcttttagcattcagagaaaaagccaacttgcttaaagaggaatcacttaaaaggtaggcatatctaagatgctcatagaagaggaagaatgggacatggccccatgcttatttttgtttacaacgtaacatggcatgagagagggcagagaaactaagttgctggggaaagttagaggaactgaaagtttgggaataggctgaccacatattatgccagtgaccagtatgacaggagatggggccctgctgccagtcatctccactgaataaagaataatgctcctctttcagggtaataaagtggggaaaaggaacgtcttctcaatgcaagaacataagctttctcgtatatacctgtatgctacagtttttcacatggaattccgttttctgaggtacagcacattttaggtaacagtatttaacttgaaattcatcatgggagtctgctgctataccaggcacaagataaaactccaaaatttctgtttacattgacctttacatttaaagctgttcatccatggtgcctccccaaatcataagaccaaagaccaccaaacgcagggtggactctgctcattattctttgacccagaaagactggagaaggtatgtgctttaagtgctgctctacctgaaaagaaatcctttaaattacctatggaagtgatgtcctcagataatcttaatgactattttggcatttatagatagaaatgattatggactttgatctgccatacggaggttcggaacctggagaatggctgtgataagtaggttttgattgagtgaaagcatgagcttgttcagagtgaggggcatagtgaaaaaggaacagccatgcctcaaaatcaaatcatttgcattcccacagcatcctgaataccgactacctcttcacttgctaaagcagctaaactgtgaagctctaagtggtttgggtttgttgtttaaccttagcgagatcctttaactgcagcaatattcaagccagatatttggaagcaaatgatatttcctcttgcagtgtccacaaatctgaatattaggggcatgaaattaggcttaccatctgatttgtaattacaattttggaattctctgttttagttgctgaggcctgagttttctggctcttaaagcatagatcatttcacctgatgtttttgaagcatcctaagtacagtagagtagaaaactgatttctttgttaattgtacactgaataatgccttttaaaaatcaaaataaaattaacaaataatggtg

SEQ ID NO: 1619 - DNA, 3389 bp, Homo sapiens
aacaagatgcaaggacaatctgaggactgagagccatttcaacgtgagcccccagtctgagaacaagaaagaagaacttctgtctcgagactgaagccaaggataccagcagagccaacatttgcttcaagttcctgggcctgctgacagcgtgcaggatgctgttggaacccggcagaggctgctgtgccctggccatcctgctggcaattgtggacatccagtctggtgagacagggaactacacagtgacgggattgaaacaaagacaacaccttgagttcagccataatgaaggcactctcagttcaggcttcctacaagaaaaggtctgggtaatgctggtcaccagccttgtggcccttcaaggtatgtccaaaagagccgtaagcaccccaagcaatgagggtgctattatatttctgccaccttggttattctccaggaggagaaggttggaaaggatgtccagggggagagaaaaatgttactcaagccctggctatccacaggaaagttcaaaccagtttcactgatccaaaggcactaaggaggaagacagataaatcagacttttcaatgggtaggaggtaagactcattaggaatgaaggcctgtgagagaggcaagttagtacaactacctctactcactgcatgaacagagggctacaagttgaagcaacagattttcagctattagaggaagaaaaggcaagagacagacttggtttggagatgggttttgaacaatgcggctcctcagcaaaggctgatggccagattgagtatattaaacacatgtagctgagtcctctgaaaaccatttaccaatatagattagcgttttccctattagataacaaaaagtgaaacttccaataatttgtcataacgtttttgcataacaagcaactgattcaggtttttgcctggccttggcattcttaactccattttatttaggcattcctcaaatcaataactaccactgttttgaatggcatcagaatgtaagctctatatatatgtaaggactttgtcttctttaccccaacgaaaagtcccacacatatggcaggctcttaataaatttgttaaaaaacctgtatgatgaatcagatgctttacacatgatgattctaaccttatacaacccttgcaagcaaacatcccctggttactcatcaggaaacagacacaaggaagttaaatagggcctggtgcggtggctcacgcctgtaatcccagcactttgggaggccaaggcaggcagatcctttgagcctaggagtttgaggccagtctgggcaacatggcaaaaccccaactatacaaaaaaatacaaaaattaggcatggtggcacacaactgtagtcccaagctaaggcatgaggatcacctgagcccaggctggttgaggttgcagtgagccatgatcatgccactgtactccagcctgggtgacagggtgagacactttctcaaaggaaaaaaaaaaaaaaaagagttaattgttgcccgtcacagcaattaatacagatccttctcactctaaaaccttacactcagtaatgatctactatatgcaaagcacctcttacatccttcaccaccccattcattctgagattgactcctcccctttccagaaacaggaccacctaaacattccctattccagtcccttatttgcaagtcatcaaaagaaaacagagatttcaaaaagaaaacagagaccttatctgtaatccttggtaaggatcttccaaatttaagcctatgccagttttcaggaggaaacatgaatatgaaacagtctgacctttagacataattttttgttgactttaaattcccttggttaggccactgtaaccagtaaaataaattttattttagaataaaaattataaaggggaaattgagtctagccatacaacctactactagttactatctttgattcccaagtcatcctagagcaaaaaaaaaaaaaaaaaaaaatcatctctggcctttttttccttttccactcaggtgaagagaatgagcttttgaatccaattttttgttttctcctatattcaattcaagtagctttaaagttaaccaaaggaaaaaaccaaagctcaatatttgattaaacgagaaaatatacactacttagaagctttcttttctttatccttcttccccaactcaaggcttagtagaattattgaaagaggtagtattcagtagaatagtacacatgctttttcaggtccagaaacaccacataggtcaagttatcatgcttacatgtggggaaaaggaggagggagtttcctggacctctgtgcctctctcagctcatgaactagtttcagtgaatatccttgtcttaccactgtgccaacaattcagagctatacgtggaaaacctaccttcaactttttgagtggcatctattgcttctttgattgttccttccagcaaggagcgatcaaaggctagcccccttcccactcccaccagaatcagatttgctcaagattacaaccctaatttagtaataagatgcaatacataaaatagttcccactttccttttccaatccctttacagtcatgagggcctatcacgcacgcatctcaggacaggtgagacttcattatatcaggtattttgttgctattctaagttataaggcagtaatacaaactttctttccacagctttgtaagccttgtgccaaaagaaacttttaaaacagctacagcaagatgagtctgactatggcttagtatctttctcattacaataggcacagagaagaatgcaacagggcacaggggaagagatgctaaatataccaagaatctgtggaaatataagctggggcaaatcagtgtaatccttgactttgctcctcaccatcagggcaaacttgccttcttccctcctaagctccagtaaataaacagaacagctttcaccaaagtgggtagtatagtcctcaaatatcggataaatatatgcgtttttgtaccccagaaaaacttttcctccctcttcatcaacatagtaaaataagtcaaacaaaatgagaacaccaaattttgggggaataaatttttatttaacactgcaaaggaaagagagagaaaacaagcaaagataggtaggacagaaaggaagacagccagatccagtgattgacttggcatgaaaatgagaaaatgcagacagacctcaacattcaacaacatccatacagcactgctggaggaagaggaagatttgtgcagaccaagagcaccacagactacaactgcccagcttcatctaaatacttgttaacctctttggtcatttctctttttaaataaatgcccatagcagt

SEQ ID NO: 1620 - DNA, 3058 bp, Homo sapiens
ctctgtgaactcattgtaatggcgggctctcttgatcctctccctgacctggattccaggcctctcggaaaagggggccaggagggggcagggagaggctgcaatcgctgcagattctcactcaggcagcaggacctcgctgacctgccgtcggtggaagtcaaaagcatccccttgcctgaagcaggcactgaaatgttggcctccagctctgggaggtgggcaggacaggcaaggtgtcaggaggggaagatccatatggccagggtttcggtgagaaggagctggagacccaggaaacagtggcttgtgtctagcttagggagcttttcttcaagtttctgaagaatggggaggacagctctggaacaacagtccactctccttttattccagcaaggatggaacattactgtggacctggtcattggccctaaagggatccgccagctgactagtcaggacgcaaagcccacctgcctggccgagttcaagcagatcaggtccatcaggtgcctcccgctggaggagggccaggcagtacttcagctgggcattgaaggtgccccccaggccttgtccatcaaaacctcatccctagcagaggctgagaacatggctgacctcatagacggctactgccggctgcagggtgagcaccaaggctctctcatcatccatcctaggaaagatggtgagaagcggaacagcctgccccagatccccatgctaaacctggaggcccggcggtcccacctctcagagagctgcagcatagagtcagacatctacgcagagattcccgacgaaaccctgcgaaggcccggaggtccacagtatggcattgcccgtgaagatgtggtcctgaatcgtattcttggggaaggcttttttggggaggtctatgaaggtgtctacacaaatcacaaaggggagaaaatcaatgtagctgtcaagacctgcaagaaagactgcactctggacaacaaggagaagttcatgagcgaggcagtgatcatgaagaacctcgaccacccgcacatcgtgaagctgatcggcatcattgaagaggagcccacctggatcatcatggaattgtatccctatggggagctgggccactacctggagcggaacaagaactccctgaaggtgctcaccctcgtgctgtactcactgcagatatgcaaagccatggcctacctggagagcatcaactgcgtgcacagggacattgctgtccggaacatcctggtggcctcccctgagtgtgtgaagctgggggactttggtctttcccggtacattgaggacgaggactattacaaagcctctgtgactcgtctccccatcaaatggatgtccccagagtccattaacttccgacgcttcacgacagccagtgacgtctggatgttcgccgtgtgcatgtgggagatcctgagctttgggaagcagcccttcttctggctggagaacaaggatgtcatcggggtgctggagaaaggagaccggctgcccaagcctgatctctgtccaccggtcctttataccctcatgacccgctgctgggactacgaccccagtgaccggccccgcttcaccgagctggtgtgcagcctcagtgacgtttatcagatggagaaggacattgccatggagcaagagaggaatgctcgctaccgaacccccaaaatcttggagcccacagccttccaggaacccccacccaagcccagccgacctaagtacagaccccctccgcaaaccaacctcctggctccaaagctgcagtcccaggaggaggacttcatccaacccagcagccgagaagaggcccagcagctgtgggaggctgaaaaggtcaaaatgcggcaaatcctggacaaacagcagaagcagatggtggaggactaccagtggctcaggcaggaggagaagtccctggaccccatggtttatatgaatgatacgtccccattgacgccagagaaggaggtcggctaccgtgagtgttcccgcccttcttcggggggtttcctcttggcaccttgtgcagagccaccatccttgcccaccgcccagggcagggagcagcggagtctgtctgcattccctgcagcatcggccatgatttaattcagagcatgtggggcaggccagcttcccctccgctccctccaccccattcctctccctgcctagcaccctgcccttctctctctcagtggccacatccttaggcccctcctcagatcatccccctcctgcattagtttggaggagctggaaattctctcttcctcatttcctgctctgttggaagctcccgtgggaaaagttaagcagtgccacctgcccgtcccagttcagattcatcttctgtaggcctgagggacagaggagagaaagtgagaggggcagctgagccctcaggccctctccagaagaccctgttgcaggcagggagggaagagccagcagtaagcccggggcctggaggggtggcattgaggaggaggatgatgacagccatcacagagaactggacacaagtcaggcatgggcctgggaccatttattatcttctgaggcacagggtgattaggtaacttgtccaaattcacacagctaataactggcaaagttcagatttgaacccaagccttctgactttagggtcccttctgagctcaccctcttatcttacaaatgaaaattaaggctcggaatgtgagctgcctagagtggtcacagagctctttggcggcagaggtgagaatagaaggccaggtgtggtggctcacacctgtaatcccagcactttgggaggctgaggtgggagggtcacttgatcccaggagtttgagactggcttgggcaacatagcaagaccccatctctacaaaagattaagaaaattaggcctggtgatgcatgcctgcaagcccagcggctcaggaggccgaggcaggaggattgcctgagcctagaaggtgaggctacagtgagctgtgatcacgccactgtgctccagcctcggtgcaagccctgcctc

SEQ ID NO: 1621 - DNA, 3058 bp, Homo sapiens
acgctagctgggtgacttcccccaaccgcagagacagcggcgacccggggcctcagacctgcccccgcatctcgccggcgccaggcagtgggaagtcaggttcttccgccacctcccagccaggactctgccaccctccctcaggatgcctgagggccccgagctgcacctggccagccagtttgtgaatgaggcctgcagggcgctggtgttcggcggctgcgtggagaagtcctctgtcagccgcaaccctgaggtgccctttgagagcagtgcctaccgcatctcagcttcagcccgcggcaaggagctgcgcctgatactgagccctctgcctggggcccagccccaacaggagccactggccccgcgaggagctgccacgccatgcccacctgcgcttttacacggccccgcctggcccccggctcgccctatgtttcgtggacatccgccggttcggccgctgggaccttgggggaaagtggcagccgggccgcgggccctgtgtcttgcaggagtaccagcagttcagggagaatgtgctacgaaacctagcggataaggcctttgaccggcccatctgcgaggccctcctggaccagaggttcttcaatggcattggcaactatctgcgggcagagatcctgtaccggctgaagatccccccctttgagaaggcccgctcggtcctggaggccctgcagcagcacaggccgagcccggagctgaccctgagccagaagataaggaccaagctgcagaatccagacctgctggagctatgtcactcagtgcccaaggaagtggtccagttgggtgaggccaaagatggcagcaacctctgcttcagcaaatgattgtgtaaccctggggcacttgtccctctctggacctgattcaccgatttggaagtttgtagccctagctgatactcaatggactaggcctcctcacttgtcaatagtgtttccaggctgggcgcagtggctcatgcctgtaatcccagcacttcgggaggccgagtggggtggctcacctgaggtcaggagttcgagaccatcctggccagcatggtgaaaccccgtctctactaaaaatgcaaaaaattagccaggtgtggtggtgggcacctgtagtctcagctactcgggaggatgaggcaggaaaatcgcttaaacccaggaggtggaggttgcagttgagctgagatcgtgccattgcactccagcctgggcaacaagagcaaaactccatctcaaaaaaaaaaaagacaaaaaaacagtgtttcctccaagctgcccatgagacaggcaggacaaggattcttttatatatttatacacacacacacacacacacacacacgcacgtttatatatatttttggtagagatgggatcttgccatgttgcctggactagcctcaaactgggctcaagtgatcctcccacatctgcctctaagtggctgggactgcaggctcacaccaccacaccgggctaattgttaaaaattttttttgtagagacggggtctccctatgttgcccaggctggtattgaactcctggcccctagggattctcccatctaagcttcccaaagtgtcgggattgcaggtgtggccactgcacagggccaggacaaggattcttaatcccactccaggatgggaaacccatggccgagtgggaagaaaccagctgaggtcacatcaccagaggagggagagtgtggcccctgactcagtccatcagcttgtgtagctgaggtctgggccaggtctaaccaggctccccactcctcccaacctgagcctgccctctgatctctgcctgttcctctgtcccacagggggcaggggctacgggtcagagagcggggaggaggactttgctgcctttcgagcctggctgcgctgctatggcatgccaggcatgagctccctgcaggaccggcatggccgtaccatctggttccaggttgggccctactgttcacacaggcagagaccccaggaggctgatgggtggaaacgtggggtcacaataactggggtggtgatgctcagggtctgtctagaccctccaaggaccacactgttcctgagggtcacacccctcccctcccatgcgtcccagggttgcagctagtggaagtagcccaaggcaggtagcccaagtgaaagtagccaagggcagagcagctttgctgatgtggactctaacatgggggatgtcctagaggcttcctaagggagaagctacactgatctggatgggtgtgtgtgagtcctgcctctccaaggaataccgcccctgtgccaacccaggctgattcctgaattatccccatcccattttagggggatcctggaccgttggcacccaaaggtaagctactcctaatgtaataggctaagagagcagaaaggacttcacgcctgcaagggctacagcacccttctccaccctatccccctgcaaccctgggagtcacccctgggcaggataggaccctccaactccaacaccagtgtcctgcagggcgcaagtcccgcaaaaagaaatccaaggccacacagctgagtcctgaggacagagtggaggacgctttgcctccaagcaaggccccttccaggacacgaagggcaaagagagaccttcctaagaggactgcaacccagcggcctgaggggaccagcctccagcaggacccagaagctcccacagtgcccaagaaggggaggaggaaggggcgacaggcagcctctggccactgcagaccccggaaggtcaaggctgacatcccatccttggaaccagaggggacctcagcctcttagcaggaggctctccttgcttgcactcaccctttcttattgtcttgccctgcatctgggggtctgaatttttgggagcaggcaatatctgaaggtgcaaacaggccctacggctgttccctgcacaactctcatggttttaattgtaccccatcttccacatctttaaagctcatgtgaaaaatgctgcatttttaataaactgatacatttg

SEQ ID NO: 1622 - DNA, 3030 bp, Homo sapiens
atggtatgtttccctccgcccaaacatctgtggagtaaagcataacaaggcagcattgctgccaacatgtctcgcctcccgccatagggtggtttttctcctatctcagaattgaacaaatgtacaatcgggttttataccgagacattcagttcccaggggcaggcaggagacagtgcccttcctctatctcaactgcaaggctttcctcttttactaatccacctcagcacagaccctttacgggtgtcaggctggggcacagcctctcatcccatgaggctatatttcagactatcacatggggagaaccttggacaatacctggctttccagggcagaggtccctgcagcttttcacagtacattgtgcctctggtttattgagactagagaacggcgaagacttttaccaagcatactgcttgtaaacgttttattaacaaggcatgtcctgcacagccctagatcctttaaaccttgattccatacaacacatgtttttgtgagctcaaatttggggcaaagtcacaaattaacagcatctcagccaaccaattgttcaaggtacaggtcaaaatggaatttcttatgtcttccctttctacacagacacagtaacagtctgatctctctttcttttccctacaggattgcagacatgcagcaccatgcctggctaattttgtatttttagtagagacgggatttctccatgttggccaggctggtctcaaactcctgacctcaggtgatctgcccaccttggcctcccaaaatgctgggattacaggcatgaaccaccgcgcccggccatgctaagtcctttcttggctccattgtgctgtccctcctgcttcctctccaggtccatctgccacagtgctacgtgcaccagcgtgacagcaacagtggctggtctctgccccgtgcctcctccactgggctcacacctgtcttattttgtcctttggtggctctgagaagcagcctctgcccctctccctttcccttactctttgtaagatcctcttccctctgccctaccatgttgcttggacaccagggtggaatagcagagaacggctgcttgtgtttgaattccagctctgccacttcgatagatttctgaactgagacatgtgactctctaggcctatttctgcatgggtcggagagtgggcgggactgctttactgagttatagtgaatgtagttttaacctaagcgcctcacatgactaactcctcatccatcaagaatgagctcagctctcacttccccactcctcacccccctgtaaagtaacctttctccaaggttatgcttcaacaggaatagctaacatttattaaattgtggcacgtaagtatcttggatatattggctcattgaatcctcacacctactattttacagagatgccagtggggcttgagattgaatcacttgcccaggctcccactgctggtaaacagtagagggggctcctgacccatcagtctggcttgacaacccattccctcaactgcggatcccggattcccttatcaccctgttgatttctccatagctgtggtaacatttgttgcatgaatggaccgttgaaatagggcctggcagggagaaattcaggaaatgaatgaatggttcttccctggcggccttgatgacttacaagccctcaaggggaagcattttctcctggactccttgatgccggagctgctggtgtttcccgcccagacagatctgcatgaactcccactgtaccgggccggacacctcattctgcaggacagggccagctgtctcccagccatgctgctggacccccgccaggctcccatgtcatcgatgcctgtgccgccccaggcaataagaccagtcacttggctgctcttctgaagaaccaagggaagatctttgcctttgacctggatgccaagcggctggcatccatggccacgctgctggcctgggttggcgtctcctgctgtgagctggctgaggaggacttcctggcggtctcccccttagatccgcgctatcgtgaggtccactatgtcctgctggatccttcctgcagtggctcgggtgagatggtgagaaggcgtggctgagggactcggaggtccacagcagcttagacctggagtcatctgttttggtcttagttctgacactttaatgggcttgggaccctggagcaaaagttctcctctgtgaggcaaggatttcaggagcgaggatttcaggactgaggcagcctgtgaagctgtgtaaccgagacacgcttttccttaggtatgccgagcagacagctggaggatcccggggcagggacacctagcccggtgcgtctgcatgccctggcagggttccagcagcgagccctgtgccacgcgctcactttcccttccctgcagcggctcgtctactccatgtgctccctctgccaggaggagaatgaagacatggtaccagatgcgctgcagcagaacccgggcgccttcaggctagctcccgccctgcctgcccggccccaccgaggcctgagcacgttcccgggtgccgagcactgcctccgggcttcccccaagaccacgcttagcggtggcttcttcgttgctgtaattgaacgggtcgagatgccgacgtgagtgagtgggggcatgcttgggaggcgcaggatggtactggcacatctaacatctacacttctctagctcagcctcacaggccaaagcatcagcaccagaacgcacacccagcccagccccaaagagaaagaagagacagcaaagagccgcagccggtgcttgcacaccgccttgcacatagcagaggctccaggctgactccttcctggtgggaaaggaagatgcctgtcctctccgtggaggaccctgggccctcaccgcaggcagcagtttgcattttgaaaggttattgggtcccttcctcgggctgtgttcttgctggtgagcaaaagtgttgcctgcagaaataaaatgcagaacgtactct

SEQ ID NO: 1623 - DNA, 3227 bp, Homo sapiens
aaagaatggcagagcaaggggttgagcatttgaaaagcgtcttctgccaatgtcccagccatggttgtgcttcagggcccaggcactcgctcttcccttggcccagaatgcccttcctccagaatctgcacagcctccacttccttcaggtgctagtcagatatcaccttatccgtgaagtcttccttgaccaccttatatacaatcatacctctttcccttcttcatcccatacatgttggccactgcactctaccttattttccttcagtggcagttgttacctcctgagatactatgtttatttacataacataacatttgttcctggtctgactaccctcacctcccagaatatgagcttcccaaaggctggggctgcattgctcactgctttcttagcacacacagggtctgacacattgtaggccctcagtgagtatttgttgaatgaatggatatttcatgtttgatgggatgctgacattccttgcctaaagagcctgctcagagtaggtggcattcaaatctgattaaaccaaagaatcaatgatggcttgccaggccttaaagcacggaaagggtacctagatgagaggtcagcacatgcaaaggcatggcgcagttagaaagtacacaatgtccctgtctctctaaaacacacgaaccatggcggccctctctcaccagcacttagcaagcagcactcacctcatgcagggatgtattcagtcagtattcactgctctctacatgccaggactcactggtcctggggatacaaagaaatgtaagacaggcctgttcctactaacatctgtccagtcctcactgatgtattctctcagtgtgagcccatggtgatacaacaataaacaacatggcctccagttcccacccccatgaggtttgtgcttccactgggctggctaggggtggaggggaggcgtggcagatgctcatcaccagcctccagagaggctcttctgtcttgagctggagatgatgtctgtagggaatgcggggacaagcagggctcattgccttgggcaggagtctgagtcctcttctcaaccttggagactccatcggtcctgaggccactcggtatttccgctacgctcatggatggcatcagaggggactttaggatcccaggcagggcagatagtgtgatggggctgttaagacttgaggcagctcaggagagtggatagcccagaggttcaaagtcctgtttggtgtgagctctttctccctttgcctacttctccctctagtacagaatacgccatcaataaattgcggcaagaaggaagcgaggaggggatgtacgtgctgaggtggagctgcaccgactttgacaacatcctcatgaccgtcacctgctttgagaagtctgaggtcagtcaggacactggcttggaccaggccatacagccatgaggtgtccagtgtagcctggttcaggagctgctgcagacagaaccacccttggcagggtggaactgaaaagcctgggtctctgagaagatccctgggaggtcaggcaagggcccctgctctcaaaaggagactgctccccagtagccagacccctgcatcctccccctgtagggcccttcttccttcatgggacccatggtgggggtccaccatggctctggaagacagaacatgaccagaaaaccaattcacacccaacacttggaaagtatagtgtcattatttagagtggtttatttagactcagtgccaccatcatctcagacccagagctatgcctgtctacagcattcactggtacaaaccagcgcccaaatgccacttcatccacatggcctaacacagttttttccaaatggtagcttcagacactttaacaaattgccaccccatcttagaacaatgaatagagatgtcttttagtgattgaagcgtagctgaagctggggatgatgtgagatacattctgagggctaagatattcaccagaattactgactttgcctcactagaccacaaatgcctttgttattcatgtaattaaaaaaactacaaagtggaatattttcaaagacagtgagttttacaaaacactttacatcagtacactttaatcagtactggttaggctccacatgcatggggagacctgggacacggaggggcctttggcacggagggtagacgcaggaaggacagcttattggcgaacccctggggctggactcagtcaagagtgggaggaggaaacggcagaaggaaccagcgctgccaagtgtcctgggtgatgcaatgcaggaacaccaccacctgcccaggctcttgctgaacagctgggcctcggggctccgtggctcagagcctgtcaggttcattgccttcccagaatgcttgccgtctattcatcagtcattggaggaagtttaatgtgtttacgatggaggggtgcatgagacagcccagcctcctcctgaagtggaattggcctgtgcagtaccaagagtgtccgtgactccctaacaatgtcacatcacccggggaaaacagcagtcatagaaatgattacttccaccgcacactgtggcccaccagaccctgtgccaagcgttgtacctacttgtgcttttttaagccttgtaatagccatattaggtaggtgatattatcccattgtacagatgaagtaactgagattttgaatatcatctcctagtttacagcttatgtaagtctttctggccctcattgtttaccactaaaatagtttagtttgtacaaaaagagcccatgagggaaaactgcttatacctcctatctggcaccacagtgtcccaaacctgggtcagacactgaacaccagctcccagtgtggttttcctcaagtggagacatggcctggaagggctcagtttgaggctgttccttgagaagttgtgccatcataattattacctcatatataatatctgctggactttataaagggcttactaagtttttcaatacaccatgttagataattgtagcaacaatcctatgaggttggattttcatgaactttatcttacaggtgaaaaaccaagtgacgcttttgtagaaatagctactgtgtctgctgtagtattaactcccttttatcaatgccttctcctggaccttgttttattatttagttagttgttggttggattatttattgataataaactttatttttgaat

SEQ ID NO: 1624 - DNA, 3008 bp, Homo sapiens
aaaaaaaaaaaaaaaaccgtcccggccaccgctgcctcagcctctgcctcccagcctctttctgagggaaaggacaagatgaagtggaaggcgcttttcaccgcggccatcctgcaggcacagttgccgattacagaggcacagagctttggcctgctggatcccaaactctgctacctgctggatggaatcctcttcatctatggtgtcattctcactgccttgttcctgagagtgaagttcagcaggagcgcagacgcccccgcgtaccagcagggccagaaccagctctataacgagctcaatctaggacgaagagaggagtacgatgttttggacaagagacgtggccgggaccctgagatggggggaaagccgcagagaaggaagaaccctcaggaaggcctgtacaatgtgagtagaggagacctcacatttgaccttggaaagttggaggaagggctggaggagggctccagaggaagggctggaggaagggctggaggagggctccagaggaagggctggaggaagggctggaggagggctccggaggaagggctggaggaagggctggaggagggctccggaggaagggctggaggaagggctggaggagggctccggaggaagggctggaggaagggctggaggagggctccggaggaagggctggaggaagggctggaggagggctccggaggaagggctggaggaagggctggaggagggctccggaggagggctggaggaagggctggaggagggctccggaggaagggctggaggaagggctggaggagggctccggaggaagggctggaggaagggctggaggagggctccggaggaagggctggaggaagggctggaggagggctccggaggaagggctggaggaagggctggaggagggctccggaggaagggctggaggagggcttcggaggaagggctggaggaagggctggaggagggctccagaggaaggcggttgctcctcactctgtggtctttgtctgtccagaccttcccttcttggattgagtaatgtctcacctgcttgcggcctgcagcagcacctgcttctagaaagtctccttagctgaaaagtgccgagtaatctcccttccctccccaaaccctgctgctggagttcccaggttgatcagcctggggtgtagggggacacagcaaggtcaagctaggcaaggacgaggtggctggccccttcgaggggctcctgtcctgggtgctgaagtcttctgagtgtcccccgctataggaaggtcaacctcaccctcctgggtgtgaccctgaaccctgattgtcgatctgggttgccatgcaggagacccttgcaggtggcagccttctgtgaaggagatgcctccccgcccctcctgtggggagggagggttgatctacagcccgtttggctgtgtaaagagacaacttgctcagataaatgattctggggctccaggtgagcccttgctttgcccagtctccgtgtctttgtctagaactccacctcctatctttttgagcctaacttgagcccctcagctcagtgcaaagagctggcagctcggaggagactccaaagggctgaggacgaggggggtgggctggagctggttgtgggcagagaagtttgtgtgcataaggtttggagccttgattgtgggagccctccctgtctgccactgctgccaacttggggatcaagaagcttcctgttgtaggggaacctgctgctttctgcattagttggtaaaaatcagtgttccacgccctcttctgcaggaactgcagaaagataagatggcggaggcctacagtgagattgggatgaaaggcgagcgccggaggggcaaggggcacgatggcctttaccagggtctcagtacagccaccaaggacacctacgacgcccttcacatgcaggccctgccccctcgctaacagccaggggatttcaccactcaaaggccagacctgcagacgcccagattatgagacacaggatgaagcatttacaacccggttcactcttctcagccactgaagtattcccctttatgtacaggatgctttggttatatttagctccaaaccttcacacacagactgttgtccctgcactctttaagggagtgtactcccagggcttacggccctggccttgggccctctggtttgccggtggtgcaggtagacctgtctcctggcggttcctcgttctccctgggaggcgggcgcactgcctctcacagctgagttgttgagtctgttttgtaaagtccccagagaaagcgcagatgctagcacatgccctaatgtctgtatcactctgtgtctgagtggcttcactcctgctgtaaatttggcttctgttgtcaccttcacctcctttcaaggtaactgtactgggccatgttgtgcctccctggtgagagggccgggcagaggggcagatggaaaggagcctaggccaggtgcaaccagggagctgcaggggcatgggaaggtgggcgggcaggggagggtcagccagggcctgcgagggcagcgggagcctccctgcctcaggcctctgtgccgcaccattgaactgtaccatgtgctacaggggccagaagatgaacagactgaccttgatgagctgtgcacaaagtggcataaaaaacatgtggttacacagtgtgaataaagtgctgcggagcaagaggaggccgttgattcacttcacgctttcagcgaatgacaaaatcatctttgtgaaggcctcgcaggaagacccaacacttgggacctataactgcccagcggacagtggcaggacaggaaaaacccgtcaatgtactaggatactgctgcgtcattacagggcacaggccatggatggaaaacgctctctgctctgctttttttctactgttttaatttatactggcatgctaaagccttcctattttgcataataaatgcttcagtgaaaatgc

SEQ ID NO: 1625 - DNA, 3857 bp, Homo sapiens
tctcaaagttaagaagatcatatctgaaatttgtgagcagattgaaggttgtgagtctctacagccatttgaactgcctatgaattttccagacagtccccgacgtatgatgacatgattataatttttcaactttaccatgatgcaaaagcaatatgcattccatagaaagcatacatcaaattttgaattttgcttttactaactgcaggctaatggacttttgttaaaagaagcaaggaatgtaagtcagaagttgctactgtttttccatctggatgttatgataaaacatgactcagagcagccctaaatagagctcctgccttttagataattcgctatccaaggaatcaggggctatttttccaaattttctgggtcaacttctcttaaggtctttttaagattgtggctgataaaactccataccttactatggaagaaatcacaaggaccattcatattggaccaagtagactagggcatccttgcttctatcatcagaaggatataaaactagagaacctcatcataaagcagggtgagcaaatcatgctcaactcagttgaagagattgatggagaaataatggtgagctgtgcagtagcaaggaatcatcaaactcactcatttaatttgcctttgtcacaagaaggagaattctacgagtgtgaagatgaacgtatttacactctaaaggagattgttgaatggaagattcctaagaacagaacaagaactgtaaaccttacagatttttcaaataagtgggactcaacgaatccatttcctaaagacttttatggtaccctgattctcaagcctgtttatgaaattcaaggtgtgatgaaatttcgaaaagatataatccgcatcctccccagtctagatgtcgaagtcaaagacatcactgattcttacgatgctaactggtttcttcagctgttatcaacagaagatctttttgaaatgactagtaaagagttccccatagtgactgaagtcatagaagcacctgaaggaaaccacctgccccaaagcattttacagcctgggaaaaccattgtgatccacaaaaagtaccaggcatcaagaatcttagcttcagaaattagaagcaattttcctaaaagacacttcttgatccccactagctataaaggcaagttcaagcggcgaccgagggagttcccaacggcctatgacctagagatcgctaagagtgaaaaggagcctcttcacgtggtggccaccaaagcgtttcattcccctcatgacaagctgtcatccgtatctgttggggaccagtttctggtgcatcagtcagagacgactgaagtcctctgtgagggaataaaaaaagtggtgaatgttctggcctgtgaaaaaatcctcaaaaagtcctatgaggctgcgctgctccctttgtacatggaaggaggttttgtagaggtgattcatgataagaaacagtacccgatttctgagctctgtaaacagttccgtttgcccttcaatgtgaaggtgtctgtcagggatctttccattgaagaggacgtgttggctgccacaccaggactgcagttggaggaggacattacagactcttacctactcataagtgactttgccaaccccacggagtgctgggaaattcctgtgggccgcttgaatatgactgttcagttagttagtaatttctctagggatgcagaaccatttctagtcaggactctggtagaagagatcactgaagagcaatattacatgatgcggagatatgaaagctcagcctcacatcccccacctcgccctccgaaacacccctcagtagaggaaacaaagttaaccctgctaaccttagcagaagaaaggacggtagacctgcccaagtctcccaagcgtcatcacgtagacataaccaagaaacttcacccaaatcaagctggcctggattcaaaagtactgattggtagtcagaatgatttggtggatgaagagaaagaaaggagcaaccgtggggccacagcagtagcagaaacattcaaaaatgaaaaacatcaaaaataacaagatgtgacagaagccacttaggcagcaaacataaatgttgcagtgaaaaaagaagctagccttctagctgaaaaacgagtattccccaatggactccagaagaaacttgattcatcgctgcaaaggaaagaacaaccttaaaacttttaacagataaaacttacagaaaactatgatatagaattcatatagtctattctgttgtgtctaaatctgtaggcattgtgttgttgttctttaggacgtatttatttaacttgcacattttttcagattcttatttctactaccaacaactaagtaattgggaaataattctgtatttcagtttctgagtaaaaccagtctgaaataggataaaagccaccaaatattttcttttttttccagaaattgttttgccattttttagtgctatcatcattcctaacaagactaacttacagaaaaataattatatctgactgatttaaaatgttcaggtttcttatccaaatcccttggaactatggaaaggagtttgatttcacattcacagtgtatttacaaaatacgctgtgtcataaatatgtttgaattccaacagccaaagccattgagagtcataggagttttccataaccttctcttctatgacccaacaacaagctcatgactgaaatttcaccagatttctgagacgatgtcttaatattctatgtgctatgtaccagataattctttagatgaatgtttcttaggattgtaggaaaattatctagttaatcataatatttgatggaaagaaaaagacaataaaattgtaatataataaatttggctgacaagaaaccaaagtgattcttaattagtatacatcagaatgatgctcttatagttgtaccatctataaaaattactttaagggctctcacattttaataatttatcttattatgtattaagtatacaggaacaatattatttttcctttaacaaaatgaagagacaggctatctggttaatgttacataggaatttaatagtaatgcttgaacttcatccatagatcatactctgtacaaaatttgttagctaacatcctatctcataattattttatgttttgtggagaaatttgttgattttgtaccaaagtgtttctgaagacaataaattgtgagtcaactttagaacaaaaaaaattagagttttttcaatgtttatattctgattaagcttactttaccttacattttttctaagtaacaatgaatcctgatttctagtgtcctaaaaattgcttagtgatttgattgtggtaatatcatttcttatctacaatgtctaaagttttatgggacagtttttcttttatttattttgcctgtttgtgcagataagaacagaaacttttctaagacccacatttggttattgaaggccacagcgaatcttaacctaacagccttgacaaactgcaccataggtgtttttagactcatataatttgttatttttcaaacaatagtgaataattaatatttttgtttggaatttgagaacaattaaatttgtacttttagtaactaccattctttgattagaaaattaagagaatgcatatcttactttggttgtaaattatcaagggctttctaatagaaatcatatataacatttctaaatataagtcctttcacatactgtgtttccagttgtcttgatattgaaaagtgtaataaacttcatgctcacctattggagatttgggaaggttgaaaataaacttcctaattttt

SEQ ID NO: 1626 - DNA, 2907 bp, Homo sapiens
aagcggtggccgccgatcgggatctgtgcggggagccggaaatggttgtggactacgtctgtgcggctgcgtggggctcggccgcgcggactgaaggagactgaaggccctcggatgcccagaacctgtaggccgcaccgtggacttgttcttaatcgagggggtgctggggggaccctgatgtggcaccaaatgaaatgaacaaagctccacagtccacaggccccccacccgccccatcccccggactcccacagccagcgtttcccccggggcagacagcgccggtggtgttcagtacgccacaagcgacacaaatgaacacgccttctcagccccgccaggggcgttccacatacgttgtcccgacacagcagtaccctgtgcagccaggagccccaggcttctatccaggtgcaagccctacagaatttgggacctacgctggcgcctactatccagcccaaggggtgcagcagtttcccactggcgtggcccccgccccagttttgatgaaccagccaccccagattgctcccaagagggagcgtaagacgatccgaattcgagatccaaaccaaggaggaaaggatatcacagaggagatcatgtctggggcccgcactgcctccacacccacccctccccagacgggaggcggtctggagcctcaagctaatggggagacgccccaggttgctgtcattgtccggccagatgaccggtcacagggggcaatcattgctgaccggccagggctgcctggcccagagcatagcccttcagaatcccagccttcgtcgccttctccgaccccatcaccatccccagtcttggaaccggggtctgagcctaatctcgcagtcctctctattcctggggacactatgacaactatacaaatgtctgtagaagaatcaacccccatctcccgtgaaactggggagccatatcgcctctctccagaacccactcctctcgccgaacccatactggaagtagaagtgacacttagcaaaccggttccagaatctgagttttcttccagtcctctccaggctcccacccctttggcatctcacacagtggaaattcatgagcctaatggcatggtcccatctgaagatctggaaccagaggtggagtcaagcccagagcttgctcctcccccagcttgcccctccgaatcccctgtgcccattgctccaactgcccaacctgaggaactgctcaacggagccccctcgccaccagctgtggacttaagcccagtcagtgagccagaggagcaggccaaggaggtgacagcatcagtggcgccccccaccatcccctctgctactccagctacggctccttcagctacttccccagctcaggaggaggaaatggaagaagaagaagaagaggaagaaggagaagcaggagaagcaggagaagctgagagtgagaaaggaggagaggaactgctccccccagagagtacccctattccagccaacttgtctcagaatttggaggcagcagcagccactcaagtggcagtatctgtgccaaagaggagacggaaaattaaggagctaaataagaaggaggctgttggagaccttctggatgccttcaaggaggcgaacccggcagtaccagaggtggaaaatcagcctcctgcaggcagcaatccaggcccagagtctgagggcagtggtgtgcccccacgtcctgaggaagcagatgagacctgggactcaaaggaagacaaaattcacaatgctgagaacatccagcccggggaacagaagtatgaatataagtcagatcagtggaagcctctaaacctagaggagaaaaaacgttacgaccgtgagttcctgcttggttttcagttcatctttgccagtatgcagaagccagagggattgccacatatcagtgacgtggtgctggacaaggccaataaaacaccactgcggccactggatcccactagactacaaggcataaattgtggcccagacttcactccatcctttgccaaccttggccggacaacccttagcacccgtgggcccccaaggggtgggccaggtggggagctgccccgtgggccggctggcctgggaccccggcgctctcagcagggaccccgaaaagaaccacgcaagatcattgccacagtgttaatgaccgaagatataaaactgaacaaagcagagaaagcctggaaacccagcagcaagcggacggcggctgataaggatcgaggggaagaagatgctgatggcagcaaaacccaggacctattccgcagggtgcgctccatcctgaataaactgacaccccagatgttccagcagctgatgaagcaagtgacgcagctggccatcgacaccgaggaacgcctcaaaggggtcattgacctcatttttgagaaggccatttcagagcccaacttctctgtggcctatgccaacatgtgccgctgcctcatggcgctgaaagtgcccactacggaaaagccaacagtgactgtgaacttccgaaagctgttgttgaatcgatgtcagaaggagtttgagaaagacaaagatgatgatgaggtttttgagaagaagcaaaaagagatggatgaagctgctacggcagaggaacgaggacgcctgaaggaagagctggaagaggctcgggacatagcccggcggcgctctttagggaatatcaagtttattggagagttgttcaaactgaagatgttaacagaggcaataatgcatgactgtgtggtcaaactgcttgagaaccatgatgaagagtcccttgagtgcctttgtcgtctgctcaccaccattggcaaagacctggactttgaaaaagccaagccccgaatggatcagtatttcaaccagatgg

SEQ ID NO: 1627 - DNA, 2963 bp, Homo sapiens
cacaagcacatgtgtgcccacacagacccaggcatacgcaggcacacacaggcaggtgtgtgaacacaggcacatacagacaagcgggtatttgcacacatggacacacatggatgcactcaggcatgtacacacgtgtgcactcatacatgacatgcactctcacacatgcgggtgcacaccttccccgggttctctctccaccccacgtctcaccgagcaagggcttgtctctcccttgtggcttttgctgtgtggctccccgcacctgaggctgcgctggtcaggacaggttgggccatgctgcggaaacagccaggcctgaaccccaacgactcagaacagcacgggcgtttcttgcccctgttgcgtgtctgttggtgggggccctacccggaggcgtggctgagggctgcgccttccccagtgtgccggctgctgggtgaggaaacgagcacggtggagccacacggggcacctgcagctttgctgggcagagactcctcgcgctactgctgctcccacttccttggccagggccagcctgtggccacgcctgaggtcatggcaggtggggatggatgagcctccagaggcgctgggtgggcagcccccgcccctcaacgcctgtcacctcagggcctctcaggtgtggctgcagcatcctctccaggaagtcttcctgttcaccccagccaggtacatgtggtcaaggaccaggtggcggggcagggtgagcacatagcccaggtccctgctgtaaggaccaggtggcgggagcagggtgagtgtacagcccaggtttctgctgtaaggacccggtggcggggacagggtaagcgcacagcccacgtccccgctgtaaggaccaggtggcagggacagggtgagcacacagtccaggtccccgctgtaaggaccaggtggcggggacagggtgagcgcacagtccaggtccccgctgtaaggaccaggtggcggggacagggtgagcgcacagtccgggtccccgctgtaaggacccggtggcggggacagggtgagcgcacagcccgggtccccgctgtaaggacccggtggcggggacagggtgagcgcacagcccacgtccccgctgtaaggaccaggtggcggggacagggtgagcgcacagtccgggtccccgctgtaaggaccaggtggcggggacagggtgagcgcacagtccgggtccccgctgtaaggaccaggtggcggggacagggtgagcgcacagtccgggtccccgctgtaaggacccggtggcggggacagggtgagcgcacagtccgggtccccgctgtaaggacccggtggcggggacagggtgagcgcacagtccgggtccccgctgtaaggacccggtggcggggacagggtgagcgtacagcccaggtttccgctgtaaggaccaggtggcggggacagggtgagcacacagtccgggtccccgctgtaaggaccaggtggcggggacagggtgagcacacagtccgggtccccgctgtaaggaccaggtggcggggacagggtgagcgtacagcccaggtttccgctgtaaggaccaggtggcggggacagggtgagcacacagtccaggtccccgctgtaaggaccaggtggcggggacagggtgagcgcatagcccaggtccccgctgtaaggaccaggtggtggggatggtggggacagggtgagcacacagtccgggtccccgctgtaaggacccggtggcggggacagggtgagcacacagtccaggtccccgctgtaaggacccggtggcggggacagggtaagcgcacagcccacgtccccgctgtaaggaccaggtggcggggacagggtgagcgcatagcccaggtccccgctgtaaggaccaggtggtggggatggtggggacaggttgagcatgcagcccaggtccctgctgtaagggaaggtcgcgcagctgggctggaattctgggctcagcccctcccttactcacaggccccccttcctggatggtggaggtgcccaggcaccacccttgttgtctgctcatggccttggggtgggtcctaccgagctggggaagcctgggggccgtagggagcccagagtcagcctggaggaggtggcgctttggtgagtttggaaggcaagcaggggtgagctgcagggggccaggaaagggtgactgtgactctgggagcagccgtgccaaggccctgggactggaggggcttggccagcctcaaggccttactccagcccactgcactctcagattccagctccctggggcaggtgagatggccgagccaggtccttggatgatctctgttcctgttcccctcttcccaggaagcgccgcggagccatcaacagcaagcagctcacctacctggagaaataccggcccaaacagaggctgcggttcaaagacccacacacgcacaagacccggtgctgcgttatgtagctcaggaccttggctgggcctggtcgtcatgtaggtcaggaccttggctggacctggaggccctgcccagccctgctctgcccagcccagcaggggctccaggccttggctggccccacatcgccttttcctccccgacacctccgtgcacttgtgtccgaggagcgaggagcccctcgggccctgggtggcctctgggccctttctcctgtctccgccactccctctggcggcgctggccgtggctctgtctctctgaggtgggtcgggcgccctctgcccgccccctcccacaccagccaggctggtctcctctagcctgtttgttgtggggtgggggtatattttgtaaccactgggcccccagcccctcttttgcgaccccttgtcctgacctgttctcggcaccttaaattattagaccccggggcagtcaggtgctccggacacccgaaggcaataaaacaggagccgtggc

SEQ ID NO: 1628 - DNA, 3342 bp, Homo sapiens
aataagctaacttcatggccttaaagagcgtttattctccgggtgaatatattattgcaaagttacctctcctcacccttcactctactgccatctgcattccacccaccactgtactccaaggtcataacttgcacggtaatccagtcggatactttgcaattttattttccttgacccctattagcttttgataccattcctttaccactggcttcttttggcttcattcattcagcaaatatgtattgagtgccttcttaaggacttgagtctttatcccaaatgagacaggaagccattgtaaagtggtaagctggacagtgttgtggctggtgcatttttaaagcatcgctatggcagctaagaggcggatggatggagggtggcagaaaggatatagggagcgattaggaggctggagcagcatccaagaaagaagtggtggcaagatggactggtgggtaagagtgggaagagagagcagtgggctgatgtgcttctctacatttgcctcgtttgctttcttcctctctggtcctacctttctgtggacctttgcagccttgccgccacctgtctctgctgataattctcatggttctgtcactgggctgcttctcttgaagttgttgaacgcactcttgccgaatgacctcatctacttccacagctatgataaccatttatatgccagcaagtctcagatttataactgccaatccgatctcttctcttgagcttcagatgtgtggatatctcagtttatatatcccagatccccaaaactcagcaaaaatgagttatgttcccttccagacatgttccttctcccatattgcctatcttggtaaatggaacccccatcctactggtgttctggcatcattcttaatacctcctgcccctgcctcccacagtcattcccaaatcctgccaggtataccttgcagagagctcgcaaatctttccacttctctacttcccctactgccagtaccctcgtttgggctattgtcaactctcattcagaggattacaaaagtctcctaagttgccttcttacttggactcttgcttgcctctgatcctttctccagttgttacctgagtcatcttttcgcagatctgatattgcttaaaatccaccaaaaactcctcttttgcctacagaataaagcacagatttatttttttcttcttaaagcagatgtttaaacatggtttaacaaggcccttcacaacttaaccctagcctacctttctagccttctcttttgtaactctctacccaagacacactgaaatgtttcatttctctaagcattgctctcccttgcttccagccagacctttgctttggaggatgtgctaggatcttagtcataggacttgtgcccatgaggtttttagcctaggcaagaagctgatttgtgggcttgatatttcattgagaacaactgcttctcagtgtaggaaatagtgaagactaggttgaaagcacgtgctcacaacatttctgagacccctagggtgcccatgtccttggacagatgagtgattaggttttggggatgcttcagatactgagtcaggaactgactgacaaactacgtaattgtttcctgctcaggtccgggcagctccccctccacctacacagaatcaccgaaggccagcagagaagattgaagatgtggaaatcacactggtgtgatgatgggcttgcccatccattactgctacaatcaaggccaggcttggagtttggccagtcttgttttttaggcacctttgcatgatgatgactcttgaacagagcaaaaaacaaggaggattatgtgtgactgggtggcctggtagactcctcccacgttttgaatatttcgtgccttttttttgttgtcattttctatgtcatttctcctaccatagcacaaatcctagcggaccctaggagcaaagaggggggcagccctcatgcctaacagtggtctgtttttatatgagactcaagaacaggcctcattccagggcacagtccctaaattactgatcatgtgcactcgtacagtatattactgtgaccacaaggatgtggcaaagattctcatctttcttcaagtggcttttgctcatctgattgagaattaatcagatcatgttggctacataaggaaacagaaggagggatttcaggagaggctggctcctccccaaggttagtccccagactgagaaagtgaaaccttattgggaaaaattggactgccctgaatttagcaccaattgcattaacgcacatctcttccacaactaacagacttaaaataacagtgtccttcgtattaatatctgtgccattcatttagaattagcagagctaatatggaggggctgaactagtagccacatcttgttcatcacatagactaatagaaaggaggctgtggctaaagcagaaatggaacttccggatctgaaattagccaatataatgttcttttgtatttgggtatttttcatcttaatttttacagcatatactcttcttaccagtatccttagaatccaaatgtctagataagttgaggacacatacctgcattgttgagcttctctactggggacgccccggcattattttattcccaagccagcagaccggcccagacagccaggctgtggctggtccagaccaactgctatggtggaaaatgcagcttccaggtcccactaccctgacatttccgtggaaggaagaacctggtggctcgtggaggaaaccagctttctatgagaaaggactgaaggattgcgcaccctgcacaagtacagattgaccaggaaaagacaagtgtcttctgtgtgtcacagggaaagccaggagtggccttctctgcaggccagcaagcctgcagcagcaggtgcccccacgtcaggtgctgactgtccgctgtccgctcctgtagaaggtagggagcacaatacctagggactaagggatgttcgccggttgtggtttgttttttttttttttccttggttaagaaatcaaatttgcagaatttaatctacaagtcgtattatgctttgaaaactccatccctcctaagaatcttaaaaaacttgaaatgctcgccaaatgtccccatgggatttttgaccaaaagtaaggtgataactgaagaaattttttagttctttgatcacttcagtgacaatacccattaatgaatcttctccatgatttggggttttttttcgttgttgttttttacacttcttaacctgttgatctatttgaggtcttttgtgtttatcaaacttattcttaagttt

SEQ ID NO: 1629 - DNA, 3469 bp, Homo sapiens
ttaccatggggattacatgaaatatgctaaagttagaacgatttattttaaacttaaaacaacctcaattgcatataaaaactcaactcctttacagcaccaccctcttttcctgtgttactgatatcacacattatgtgtttatatattatgtatccattaacatggacctatatagttacttcttatgcttttgtcttttaaatcctataaaagaattaaaaatgaatttacaaaccaattttttttttttttttaagagatggagtcttactctgtcacccaggctggaatgtagtgatgcaatctcggctcactgcaacttccgcctcgtgggttcaagcaattctcatgcctcagcctcccgagtagcttgaattacagatgcaccccactgtgctcagctaatttttatatttttagtagagatgggatttcaccgtgttggccagactggtcttgaactcctgacctcaagtgatttgcctgcctgggcctcccaaagtcctgggataacaggcatgagccactgtacctggcacaaaccaaattttaatataagcttctatgttctttgccagagaactttatattttcacatggctttgagttactgactagtgtcctttttgtttcaacttgaaggattccctttagcatttctgtagggcaaatctaattggtaaaactcctttgacttttttatctgggaatttctccttcatttttgaaggactgttttgtgggatgtattattctcaattgacaggtgttttgtttgtttttttaagctctctgccctttttctcttctgggactcggtaatacctatattggtctgcttggtatagtcagatatcttaagctagttacttttttttttctcttcagacttttaaaatttaatttaattttatagagatggggtctcaccatgttgcctgggctggtcttgaactcctaggcttaggtgatcctactgccttggcctcccagattacaggcatgagccaccatgtccggcctgctcttcagacttgataacttcaaatgatctgtcttgaagtttcctgattctttcctctgcctgagtctgctgttaaatccctctagtgattccgaccccttctccccccattcagttactacatttttcagctccacagtgtgtttggtttttagaaataattttctctttgtttatattctcacttgtttatatattgtttatctaattttgcttagttgtccacactctcctttagctcactgagcattttttagatagttgttcttaaggttttatagagtaagtcagcagcctctgtttctttagggttggtttgtggagatttctttctttcaatcgtccgtgtttccctatttctttatgtgccttgtgatcttttgtgaaattcaggcatttgcaaaaccagctacctgtccctttgcagactggctccatgcatggaaaggccttcactgattagcgcaccataaaggcttggtgtcctctcaaacttttcctggggatgccatcttccctgggcctgtgcatatgcattagttttagtttcctcctatacacagctgcctttcagtttttcttagttttcctgagtttgcctccagcttcctcttggagtcttagctgttctgttattcttttgtctctgatctcttgcccacaggtttctgtaggtctgtgttcccctgcagctcactcatgccatggtacccatcattgctttcagctctttccaacctcctatccaaactatgccattgttcccattagcactctgattcaggcaagacagaaagcagtcccttgggcagctccacacaaaccagaacattgtaggtcagtttcattctttaccttatgtcctgagggaagagccagggtagttttcttctgactattgtactgaggagggcatttggcaagagtgagcaaaaatgccatgaaatttcctgctactttgagtgtggctttttcttggataggtggttcctttggttgctgctcaactggtttctagagttctcataaagctaaacatttttaaatttttggtccatatgtttattcattattttttgtgggggtttgggggcctggagcttcacagtctatcttgctgacatgaaactactttttatgttcaaaatcatttttataggttatgctattaattgctagattggcattacgaatgttacacttttagaagtcacttttttaaaaaaaagtatttgggacagtatagtttgttaggtgggtgtccacgagtgactagctgtctttccataggtctggtttggtctgttgtattcacaaggtccttatgcctcatggacagtgtgaattaaagttctattatctagaaaaggactgactggtgtgctgatggaaagtcatctaaactgatttgatagcatgtatgaagtaccttgatgagacttcctactctggaatcttatgtgtatatttaacaaaaaagaacaatgtagtttctttttgccacttcagtctgggtttatgccttgtaaatgagtttgctgtgacacagagaatgtgaaactgctattttgtcaggcagtgttcctaaataagcatttcagttgcactacatatatgtgggttacattccaataaaccttatcatatgttgagaatatcgtaagtcaaaaatgcatttaagaccctggaaaacccattagaaagtcaaaaaaattgtaagtcaaaccatcataagttgggtaccatgtgtattaaggaaaaaaaatcaagaaaatattaatggttgtttataatcttaacatatctgctttaactttgaaattttcaaaatttacagtgagcatgcattttataatcagaagatgttaataggctaatttaaatttgttagatttttaccatttttaagattatgtttaaaaacctgtatgagagaacatatttggagacaggaacaaaaatatggcttggaacagaaacagtatgtggctataagggttaatggcaggggggtgggggcggtggtgggcatagaattgagaaggaaaaaagcagaatttgttcaatgcacacaagcaatgagagtaaggtgtggtatgcccaaaatggaaaagaggctattcagagtggtcagggagcttagaggagcgtaaaggagagtgaaacttggagtccaggtagcctgaactgtgctttttctgtggctgagggtgagtgatcaaggtgtgaagtctactagtaggaatagacctcagttgatcctcaaagatggtgagtattgagagagtgtttatctctaacttagcctttgtgtttctcttcacagaatttcttcaggttgaattacctagaagtttgtcactgacttgtgttcctgaactatgacacatgaatatgtgggctaagaaatagttcctcttgataaataaacaattaacaaat

SEQ ID NO: 1630 - DNA, 3127 bp, Homo sapiens
cagcccattctcctcctggacccctcaggctctcatgccccgctgctgactgtgcccgggcttgggcccttgcccttccactttgcccagtccttaatgaccaccgagcggctctctgggtcaggcctccactggccactgagccggactcgctcagagcccctgccccccagtgccaccgctcccccaccgccgggccccatgcagccccgcctggagcagctcaaaactcacgtccaggtgatcaagaggtcagccaagccgagtgagaagccccggctgcggcagataccctcggctgaagacctggagacagatggcgggggaccgggccaggtggtggacgatggcctggagcacagggagctgggccatgggcagcctgaggccagaggccccgctcctctccagcagcaccggggacactgtgctgcttcctctggcccagggtgggcaccggcctctgtcccgggctcagtcttccccagccgcacctgcctcactgtcagccccagagcctgccagccaggcccgagtcctctccagctcagagacccctgccaggaccctgcccttcaccacaggttcactctaaagaagtagcattcctgggtcacatggtgtgagcattttgagagtcgttggtgtcctagacgcacagaaattgaccctcccacccgcaatgagcaggaccctcctctgaagacttcccacggggctgatctatgactcggtcatgctgaagcaccagtgctcctgcggtgacaacagcaggcacccggagcacgccggccgcatccagagcatctggtcccggctgcaggagcgggggctccggagccagtgtgagtgtctccgaggccggaaggcctccctggaagagctgcagtcggtccactctgagcggcacgtgctcctctacggcaccaacccgctcagccgcctcaaactggacaacgggaagctggcagggctcctggcacagcggatgtttgtgatgctgccctgtggtggggttggggtggacactgacaccatctggaatgagcttcattcctccaatgcagcccgctgggccgctggcagtgtcactgacctcgccttcaaagtggcttctcgtgagctaaagaatggtttcgctgtggtgcggcccccaggacaccatgcagatcattcaacagccatgggcttctgcttcttcaactcagtggccatcgcctgccggcagctgcaacagcagagcaaggccagcaagatcctcattgtagactgggacgtgcaccatggcaacggcacccagcaaaccttctaccaagaccccagtgtgctctacatctccctgcatcgccatgacgacggcaacttcttcccggggagtggggctgtggatgaggtaggggctggcagcggtgagggcttcaatgtcaatgtggcctgggctggaggtctggacccccccatgggggatcctgagtacctggctgctttcaggatagtcgtgatgcccatcgcccgagagttctctccagacctagtcctggtgtctgctggatttgatgctgctgagggtcacccggccccactgggtggctaccatgtttctgccaaatgttttggatacatgacgcagcaactgatgaacctggcaggaggcgcagtggtgctggccttggagggtggccatgacctcacagccatctgtgacgcctctgaggcctgtgtggctgctcttctgggtaacagggtggatcccctttcagaagaaggctggaaacagaaacccaacctcaatgccatccgctctctggaggccgtgatccgggtgcacagtaaatactggggctgcatgcagcgcctggcctcctgtccagactcctgggtgcctagagtgccaggggctgacaaagaagaagtggaggcagtgaccgcactggcgtccctctctgtgggcatcctggctgaagataggccctcggagcagctggtggaggaggaagaacctatgaatctctaaggctctggaaccatctgcccgcccaccatgcccttgggacctggttctcttctaacccctggcaatagcccccattcctgggtctttagagatcctgtgggcaagtagttggaaccagagaacagcctgcctgctttgacagttatcccagggagcgtgagaaaatccctgggtctagaatgggaactggagaggaccctgagaggagacgggctgggcggcgacccccacagggctctcgagaacagattctcccctccagtatgggccctggctgtggcccccattcctcaggactgcacagaggaggactggctccggctccgtcgggctcacccttaaccactattcctggctctgcaaaccccagactttgcacacagccccaggctccacacagaaatgtgaacttggcctcagacaggctggcccttcctaggctctaggggctaggggggagtggggagccaagaggtcccatattcctgagtgcaggggtagtccctctcacctgcttcctcagacgactctggaagcttccctctaccaccgggcactgagacgaagctccctgacagccgagactggcagccctccatctggtccgtaccctcgccagaggcccccctacatcaacctcctggcgatgccctggtggagcagatgggtgctctgggagtcctgtgcttcctgatccaatggtgccaaacccttcatctcccccagaagcgcagcatacccctgggacccctcggccactgcccactcggggagccttctctgtttctggggcctcccccaccatagctctgattcccaccccacataggaatagcctgactgagggggaaggggtgggagagaagatacagacatggaggaggggaggctgctctggcaaagtcttcaaggcttttgggggtccaggcctggggtcaagaaggaaaatgtgtgtgagcatgtgtgagtgaggcgtgtgtgtgagcgtgtgtgtgagtgaggcgtgtgtgtgtgtctttcctaggacccaccataccctgtgtatgtatgcatgtttttgtaaaaaggaagaaaatggaaaaaaatctgaacaataaatgttttatttgcttt

SEQ ID NO: 1631 - DNA, 2948 bp, Homo sapiens
acaaaaaagacatccagctctaaggagctcaaaacatcctgaggacagtgcctggaggtgagaaggaagcccccggcctggtccataccccaccaccaacttgcataatggggggtgatgtcacccaccctccactcccctcaaaggagcagctgctctggtggtctctcccaggctctgggggcggacccatgggaggggctgtttttgtacaaagctgtaacattgtggggacaggggactgctggggccaacgtcctgactttcggggccggcagcaggctgaccgtgctgggtgagttttcgcgggaccacccgggcggcgggattcaggtggaaggcggcggctgcttcgcggcacccggtccggccctgtgctgggagacctgggctgggtccccagggtgggcaggagctcggggagccttagaggtttgcatgcgggattgcacctccgtgctcctacgagcagtacttcgggccgggcaccaggctcacggtcacaggtgagattcgggcgtctccccaccttccagcccctcggtccccggagtcggagggtggaccggagctggaggagctgggtgtccggggtcagctctgcaaggtcacctccccgctcctgggaaaagactggggaagagggagggggtggggaggtgctcagagtccggaaagctgagcagagggcgaggccacttttaatcttttttctggggtgtttagagagaaggtgaacgatggaggagaggatttgttaggactctgggagaggcgagactggagaggacgaagggaaatcctggtttggggaatgggtaggagtgggggtaactgctattcgtaggcaaaaagagctgagcaggctgggaacagcgcgggtgggcaagggtcagcactgcgggcaggcgggtgggtgttagggggcagaaatcctgcagccgagggtgcagtagaacacagaagaaaaagcctgccaaacaaaagtggaacagagaagccaaaaagggagatgaacatgagtcagtgaagaaaagaatgaaagtttactgtttagcagtgtggatctctaatccgacttaaaactccttgttcccgattcctattcctcctaagccagagatccctgggtccagggtgagggcacggcattcatgcttacccacgggctggtcaacaaagaggtgctgacctgagagtagggcacataacctcagccactggggtacacttaccacccccgcccccgtgtagctccctcccctatcctgaaatctcccttagcacactaagtattctaggttaaacagcccagatgttcagggagttcattcgccacaaacacacattaaaatgcagacaatttgcctgtgagatgaggaaaattctctggaagatttaggccctgagagctgaaaagggaccctaaacattacctggtgacaactgccctgaggccagagaagagaactcacaatattggcatattaaccggtaccatttgtagttaggctgtcattaatctgggtgtaatggggctcagctacagtgaagcgtatccagaggaaatgtggggttcctgcagtcagctggggcaccgaaaagacccagaatttagaaccagataaaggctgagttcgaacctctggttcttttgtgatgtggtgaccttgggcaaattaatgtgtgaacctcagtttcctcaactataaaatgtaatgaacaatacctaccacttactattgctgtgaggaagaaaagagagtcaacatgtaccgtgtacagattattgatgtaattcaatggttcttttccccatcctcctaggaggtcactggggagacagggggcagggtcagcccagtgccaaaggatgggcaggatctgaagtgtggaaatggagtaaggctgtgtctgtgtcagaggtgggttgggaagatgtgagacaaacatcacaattttgcctaaggtgaatccaacccacaagtagagcacaggccaacagcagctcactagtacacatacttacaccagcagctcactagtacacacacttacaccagacgctcactggtacacactcacaccagaagctcattagaacacacacaccgtcagcttgctagtacacacacttacaccagaagctcactagtatacacttacaccagaagctcactagtacacacacttactccagaagctcactagtacacacacttacacccacagagacaagccccacaccacacggactcacaaatgcagaagaagagttgaccctgccctcatgtacagatagtatgctggtgtgtagtgagaggcggctagtgttcgccacgcctgttgcatcaataactattccacagaacagcatacatggtcaaggaatatttttaatttttacaatgaggactgagtgtttgctaaatgaagaaatcaaaggagtacattctggagggctggtagactcccagagccagggtttttgagatgagagtgaaaataagcaggctgagagcagaaagaaagaaagttctgcagatagaagttaggatattaccacttcggccccagcccagccagtaaatgtttagaagcatagtagtaattagcaggtaggagttgtggggaggaaaggaaactgacatgatgggaagcaggaccagctacaaaatcttcaggaccagctcagaatgaaaatgccggggctcgtgttaaatcttaggatttcaacatggtgacagcagagcactaaaccaagcagggggcccttctagcaggaggccccatggggacctaggaaggaggtcacatccatacaaatgtaaagaaatgtcagagtaaatttcctccattgtccaggagattcggaataggttctcctaagactgatatttcttcattttaatagagttgctcagaaatgaaaaacaatcaatgggaag

SEQ ID NO: 1632 - DNA, 3055 bp, Homo sapiens
tttctcacttccattacctcatcacccattctccacattactattggattcgtatttccaaacactgctttgactgtagtgtttgatgagaaacctactatactgggttattcgttggatcagaaaccccggggatgcccagtgcatattaaaataacacacaggctccttattctgtcatccaaggccccacaggcttggagcccaacctccttctagtctcatctgcgactgggccctctgggacacaccacccctcatcttcaccttaaccagatctactttcatggcttcagctcacctggaccgcattttgctggtatcctgcccactccctgagtcccagctcatgcaggacccctcccagtcaagtgaaacaaaacaaacgacagtgaccacgtcctcgcttatggctcataacactttaattgtgctcctttataagagtgcatatgtgtacaagagtgcaaatgtgcacctttcccctatgttgttatgtgtgtacctacccccttcttcacttgtaagtttcttgagggcagggactgggttttacaaatctttgccgccaccacccagtatgactgaagtatttgcacacaatagaatagccacttgatcaatgtctggaggagcagatgggacaactgcagaataacccaggagggttggctcctctggcaatactaaggatgctccctttaactccagtgtgtcagagacttaaggcctagtaggggttttgtactgggcagtctcaacacagtgaattcaatggtattgaaaaggaggcaattttaatcttgaggagtgcaaaaatactacgtaatgagttttaattcgatgcaagaaacccacctttaagtatagggcagtaaataaatgcctttctaacaaggaggtgtgatatttgtgtaatacaacagtgtaaagcaacaggtgtattactgcaccagaggtgacacatgcctagtggccagctttgcctgcctcctagtgcagaattcaagctcctcgaggcaaggcaaactcagggtgaaggccaggggcgtacttttcaaccagcacctcctctgtgggacatgacacactgctgcctggctactcagacatagactgagaatacggtcagttttttcaagtttggctccaagggagatttctggctgtagttaccactagatgtccctgtcttatgtctactactccgagtggtatgtttaaatcacagacaactacagactttcagctatcaaaaataaaaccactgagggagaggcctttctaagtacaaccttctgacaatgctaatgttattcaaaaatccttacttttaaagttgtttaagcctatcatttcttttaaaattctagtgaaggaataattgaaaacggaaattactatggaagtttatacgaaagggcttatagctgtagtaaaactatattcatctttttcctacatgaaagtatgtcaaccagcctggccaacatggtgaaaccccatctctactaaaaatagaaaaattagccgggcatcgtggcgtgcacccgtaatcccagctactcgggagactgaggcaggagaattgcttgaacccgggaggcggaggttgcagtaagccgagatcgtgtcactgcactccagcctgggcaacaagagtgaaactccatttcaaaacaaaaaaaaaatgttatgtcaaacatatctggaaactacttagatgtaagtatattgtagagaactatgtcctttccaaaggactgggaaaagaccaaagtctggcgcatagtgagctgagtgattgacagaggtcaagctgcctggaaataaaagcagtcagggatggagatggctgaaatgtacattaaggaactttgaaaaattctacctgtttttttgtttgtttgtttgtttgttttgagatggagtctcgctcttgtcgcccaggctggagtgcgatcccagtagctggggttacagctgcgcaccaccacgcccggctaatttttgtatttttaatagagacagggttttgccatgttggccaggctggtcttgaacacctggccccaggtgatccacccacctcggcctcccaaagtgctgggattataggcattagccactgcgcccggcccccacctgttttttaagtgtatgtgtgcacatgtgcttctgctttaaaaaaaaaaatttttttttaaggctgcgtgcagtggttcacgcctgtaatcccaatgctgtaatcccaaggctgaggcaggaggatttcttgagcccaggagttcaagaccaacctgggcaagatggtgaggccctgtctctataaaagtttaaaaattagctgggtgtagtggcatgtgcctatagtctgagctactcaggaggctgaggctgcagtcagctatgatcatgccactgcactccagcctgggcctacagagcaagaccccctctctcaaaaaaaattgtttttaatcaaaataaattggtgtttggagacctccttgggccctcgcatccctggctgtaaaccccagggactcgccgctttcttttccctggccccttggagtcctccctccaggcctgcctaaagtgtgggccaaggtgtccccagctgtgtcccttttttgccatctgagactgtacatagttctttcaaatttgagaggcttaccgttgagtcaccattcataagtgatagataagacagcctatccaacaatgaatgagaaaagaattacaaaatttacaccaaagtcagccaggcgcggtggttcatgcctgtaatcctagcactttgggaggccgagatgggcagatcacttgaggtcaggagttcgagaccagcctggccggcacagtgaaatcctgtctctactaaaaaaagtgcaaagattggctgggcctggtggcgggcgcctgtagtcccaatttgggaggcgaagcagaagaatcacttgggcctgggaggcggagattgcagtgagccaaaatcatgccactgcactccagcctgggcagcagagcaggacttcgtctcaaaatt

SEQ ID NO: 1633 - DNA, 3190 bp, Homo sapiens
aagagtaagagggctgtccgggactacctcttccgagtgaacgaggccacagctgtcctgtacgcccgccacgtgcttgcatccctgctcgccgagtggcctagccacgtgccagtgagcgaggacatcctggagctcagtggccctgcccatatgacctacattttggatatgttcatgcagctggaagaaaagcatgagtgggagaaggtagttatgcagactgagcttgtgctcacccaccaggttcttcctctgccccacaggcttcctccagtgagtgcttcctggagcgaggctacctgtgtggctgtgcagctccctgacaggtgtgaatgcagcaaaggtagggtcactgtatcctctcccaaggattgggctagtgaggaactcaggggccctgagcgcgatttccagctgaaccagaaagctttgtcgccatcttcccagtttccaagtgcagaaatcttgaggcacattcggtagctcctttttgatcctgtccctcacccaccttcacacacacacacgcagtccatgaggaagttcatttggcctctcagccttgctttgtccatctgagaacaccaccagacctcgaggtcttttcccggccttgcagccctgcaggtgctggcaggcttgctctagcatatctatctttcggaagggacagagggagccaccctgcctctactaggcccttgcataggcgtgtcctcccacagttcttgccacctagagctcccaaccctgcacctcactccaggcatcgattacattgtgtggtcattatttatccataggccaatccacctgcttggctggggactccttcaaggaccaggaccctttatgattggttcagttagttctttcagaccacctctaagtagcatcattctgaaaggactgcagtgtcctgattgacaccaagagcctgatcaagtgagaggtggctggtggagttggttttgggtggtggagtcacagaggctcgtcctaggtctaagatgatgccagcacctttgggtggagcttgggttgaagtaaactgtcccttcttcctgatgccacttgcaggccctgaccttatctgtctgcttcccaccagatcctgcagaaagtgctccagggctgccgagaggacatgctggggaccatggccctggctgcatgccagttcatggaggagccaggaatggaggtgcaagtgagggagtcgaaacacccgtataacaacaacaccaacttcgaggataaagttcacattcctggtgccatctacctctcaatcaaattcgactctcagtgcaacacagaggagggctgtgacgagttagccatgtccagcagcagtgacttccagcaagaccgacacagcttcagcgggtctcagcagaagtggaaagattttgaacttccaggagacactctgtattaccgcttcacctccgacatgagcaacaccgagtggggctacagattcaccgtgacggccggacacctggggcggttccagacaggattcgagattttgaagcagatgttgtcagaagaaagggtcgtgcctcatctcccattggcaaaaatttgggaatggctggtgggcgtggcctgtcgccagactggccatcaacgattaaaagccatccacttacttctgaggattgtgcgatgctgcggccacagtgacctgtgtgaccttgcgctgttgaagcccctgtggcagctctttacccacatggagtacggcctgtttgaggacgtgacgcagcccggcatcctccttcccctgcatcgtgccctcactgagctcttcttcgtcaccgagaaccgtgcccaggtgaggcctgaggtctgggcagggagcccggtgcctccatgtgcgtttgctccctctgctacccagggcagaagctgctgcctcatccgagcctgagtggccagggtctcgacaggccacacaggacaggcatggctgagagtctgaggctctcgcctctcccaggcctgggaaaccctcaggtcagctctgagattgcttattttgtcaggcctagagccaatgggggagaaactgcccgggatcagcccttgacaacagtgagttttggaaaataaaacgatgggttatttctgcttccttctctttttttcctcccctcagcacaatagactgattgaatgtgggagctgaaagggcctttcagagttctttagcttccctctcctttcacacatgaggaaactggcttgaggaggggtcccggcctggtcacccaagggcaggtggaggcaaaggtgaccccggcaccgggcacctggctcccgccagggttctgagcaaggcagtgccacgcggtgctgggcggcgtgagtagcgtccgcccatgagaggcttctgctttcgcaagcaggtgtcccaggtggtctgggagagctgcactgcgcatctggcgctgtcactcacagcccctgctctctctctgcaggagcttggcgtgctgcaggattacctgctggccctaaccacggacgaccaccttctccgctgtgcggcacaggtactctctccaccccaacagagctggcccccaggctggggcgccaccatctcaccattgccagggcagagaaggtctgtacattgcgtctgagtaggacagaatccacccggagcttacacagagcttgttccagttcagtcacttcctcctggtgctcagagagcatgcacgagccccatttatcagagtcattcactctaaactgtggggtcagaagaatttgtgtctttaaaaccaaaacaaccgatgccttaaatttagtttggctgattcttgaagtttccgtggagttagatttcacatatttttagatgtgagttgcttctctggtagcggaactcctcttctgacagctgtttggtctcaggacgcttcacacttttcactgactgaggagctcagaaagcttttggatatgtctattatgcatatatccatatgtgccattagaaacgagattttcaatttaaaaattaagcaaaagtgtaaacctttatcaatttatttttttaaagtagtgaacccatttcatgttaacatgaataacacgtcttgtgaaaaacgactctaacttttcaaaacaaagtaattactgagtgctctgggacaaataggtgacc

SEQ ID NO: 1634 - DNA, 3924 bp, Homo sapiens
aaagagcccgctccgccgagcgccgggcgacggcaggaagcccctccgcttggccagaatggagcagccgaagggagttgattggacagtcatcatcctgacctgccagtacaaggacagtgtccaggtctttcagagagaactggaagtgcggcagaagcgggagcagatccctgctgggacgctgttactggccgtggaggacccagagaagcgtgtgggcagcggaggagccaccctcaacgccctgctggtggctgctgaacacctgagtgcccgggcaggcttcacttggatttgtgttggagtctctctctggattcgagggtgccatcctccagggcgtctgcctgaggcctctgttcacagggctttcccactcctgcaggtggtcacatccgatgtcctgcactcggcctggatcctcattctgcacatgggtcgagacttcccctttgatgactgtggcagggctttcacctgcctccccgtggagaaccccgaggcccccgtggaagccttggtctgcaacctggactgcctgctggacatcatgacctatcggctgggcccgggctccccgccaggcgtgtgggtctgcagcaccgacatgctgctgtctgttcctgcaaatcctggtatcagctgggacagcttccggggagccagagtgatcgccctcccagggagcccggcctacgctcagaatcatggcgtctacctaactgacccccagggccttgttttggacatttactaccagggcactgaggcagagattcagcggtgtgtcaggcctgatgggcgggtgccactggtctctggggttgtcttcttctctgtggagactgccgagcgcctcctagccacccacgtgagcccgcccctggatgcctgcacctacctaggcttggactccggagcccggcctgtccagctgtctctgttttttgacattctccactgcatggctgagaacgtgaccagggaggacttcctggtggggaggcccccagagttggggcaaggcgatgcagatgtagcgggttatctgcagagcgcccgggcccagctgtggagggagcttcgcgatcagccccttaccatggcctatgtctccagcggcagctacagctacatgacctcctcagccagtgagttcctgctcagcctcacactccccggggctcctggggcccagattgtgcactcccaggtggaggagcagcagcttctggcggccgggagctctgtggtcagctgcctgctggagggccctgtccagctgggtcctgggagcgtcctgcagcactgccacctgcagggccccattcacataggcgctggctgcttggtgactggcctggatacagcccactccaaggccctgcatggccgggagctgcgtgaccttgtcctgcagggacaccacacgcggctacacggctccccgggccacgccttcaccctcgttggccgtctggacagctgggagagacagggggcaggcacatatctcaacgtgccctggagtgaattcttcaagaggacaggtgttcgagcctgggacctgtgggaccccgagacgctgcccgcagagtactgccttcccagcgcccgcctctttcctgtgctccacccctcgagggagctgggaccccaggacctgctgtggatgctggaccaccaggaggatgggggcgaggccctgcgagcctggcgggcctcctggcgcctgtcctgggagcagctgcagccgtgcctggatcgggctgccacgctggcctctcgccgggacctgttcttccgccaggccctgcataaggcgcggcacgtgctggaggcccggcaggacctcagcctgcgcccgctgatctgggctgctgtccgcgagggctgccccgggcccctgctggccacgctggaccaggttgcagctggggcaggagaccctggtgtggcggcacgggcactggcctgtgtggcggacgtcctgggctgcatggcagagggccgtgggggcttgcggagcgggccagctgccaaccctgagtggatgcggcccttctcatacctggagtgtggagacctggcagcgggcgtggaggcgcttgcccaggagagggacaagtggctaagcaggccagccttgctggtgcgagcggcccgccactatgagggggctggtcagatcctgatccgccaggctgtgatgtcagcccagcactttgtctccacagagcaggtggaactgccgggacctgggcagtgggtggtggctgagtgcccggcccgtgtggatttctctgggggctggagtgacacgccaccccttgcctatgagcttggcggggctgtgctgggcctggctgtgcgagtggacggccgccggcccatcggagccagggcacgccgcatcccggagcctgagctgtggctggcggtggggcctcggcaggatgagatgactgtgaagatagtgtgccggtgcctggctgacctgcgggactactgccagcctcatgccccaggggccctgctgaaggcggccttcatctgtgcagggatcgtgcatgtccactcggaactccagctgagcaccagcagcatcctggcaggcactgccctggctgccttgcagcgagccgcaggccgggtggtgggcacggaagccctgatccacgcagtgctgcacctggagcaggtgctcaccactggaggtggctggcaggaccaagtaggtggcctaatgcctggcatcaaggtggggcgctcccgggctcagctgccactgaaggtggaggtagaagaggtcacggtgcctgagggctttgtccagaagctcaatgaccacctgctcttggtgtacactggcaagacccgcctggctcggaacctgctgcaggatgtgctgaggagctggtatgcccgacttcctgctgtggtgcagaatgcccacagcctggtacggcaaactgaggagtgtgctgaaggcttccgccaaggaagcctgcctctgctgggccagtgcctgacctcgtactgggagcagaagaagctcatggctccaggctgtgagcccctgactgtgcggcgtatgatggatgtcctggccccccacgtgcatggccagagcctggctggggcaggcggtggaggctttctctatctgttgaccaaggagccacagcaaaaggaggccttggaggcggtgctggccaagaccgagggccttgggaattacagcatccacctggttgaagtggacactcagggcctgagcctgaagctgctggggaccgaggcctcaacctgttgccctttcccatgaagctggcttctctctgcaacaggagaaaacctggagctacagtgtcccccaccttccttgccccatgggaacctccacctcctactccccacccacctctgcgaatctgctcccaaaggaagctgaccagagcaagatctgggcaagcagagagtgcctgggacaggactgtgacctggtggacaggggcctagatgtagcctctgttcctcctggacataggaaggtcccaagcttagtatcccacgtggcctttacaaatcctatggctggccttctcattccacaagggccctggaaagggttgacagccagccttggcatatggctgggagtcccttagcaaggccaaccctgaagaggccctttgaggcattccctatggcttagagttgtagacttacactcaaccctcatgtgagcgtgggagtgagggtggcggtcccttgccaagttggtagcagtgacccagtgattcactgccatcccaggccttaactagcaaaactacggagcgtgccaagtgacctggtgcctgtgggaagtgggttctcaggactggcattcttggaataaattcactctgtccttgc

SEQ ID NO: 1635 - DNA, 3004 bp, Homo sapiens
cttgtgccttagcctcccgagtagctggaactacagacatgcgccatgatgtccatctaattttcatatatatatatatgtattttttttttaacagacatgagggtttcaccatgttggccaggctggtctcgaacttctgacctcaggtgatccacccagctcggccacccaaagtactgggattacaggtgtgagccacacctggtttccttattattttcacttgtcaaatgtgtatgtacgtatatttgtgtgtgtatgttttttaatgttgtacatacatactttttttttttctttttcactctgttgtccaggctggagtgcagtggtgtgatctcagcttactgcaacctctgcctcccaggttcaagcaattctcctgtctcagcctccagagtagctgggattacaggtgcacgccaccatgcctggctagtttttatatttttagtagaggtgcggtttcaacatattggtcaggctggtctcgaactcctgacctcaggtgatccacccacctcagcctcccaaagtgcttggattacaggtgtgagccaccatgcccagctgaaacatacatttttatgttgtaggttttcttcaaaggactccaaattctacaacagcaggaatcatatacccagcacttaccatagtctggcttatatgggcaggcaattatttatggatgaatgaatttctattgccacagtgcaggttttaattcttttcaacaaagattataagctccttaaaagcagagattgtctaattaaagtttgatcttccacagctcagtaggcagtgtcttggacacagaaggtaggtgttctataaatatttattctatgaatcttgaattactaacctagactctctttctcttctaattcacatagcatatgtgattgattaaagttcacaactcattgttggtaatgtcatataaattattaggcttgttgtccagttttgaaaaatctccaataagctatttatttatttagacacaggatctctttctgttgcccaggctggagtgcagtggtgagaccacggcttgctgcatcctatatcctgatcctctagcctcagcctcctgaatagctgggactacagacacatatcaccacacccagctaattaaaaaaactttttttgtagaggtaaggtctcaccatcttgccctggctggtctcaaacttctggcctaggtgggaggattgcttgaacccaggagttcaagaccagcctggacacatggtgagacctgtctctgcaaacaaaacaaaatcctacagaaaacccggacatggtcgtgcgggcctgtggtcccagctacttgggaggtgggaggatcgctggagcgcagtggttggaggttgcggtgagctgtggtcatgcagctccactccagcctgggtgacagagtgaaaccctgtctctaaaaaaaaaacaacacttttttggctaggtattgatgaatgctaaatctttacaattttacacatccaataattggaataatttcccacagattagcttcaggttcccaaaatttcaaccctgcttctcttctactattcacatagtttttgatgctagaacattggacacattaaaataacttcaagagttctggccctgcacctttgttttgcaatgctgggtggatcagcacaacgggcaattggagtattcttggaagccactgggacagctggcaatatcttaactacacatggaagtgactgtgggttataaaaatatatcccagtaaattcaaaccaaatgtattcctaactcaacttccctttagctaaatttcaaaaatgtttgcttgccactccaacactagacaaagggaaacatggtggagggaagtcactaaggactaaagattgcagtttaaaatacattacttttataaattttacagaagcatagggcagtgtgaacatattactagggacccttccagggacttggaaagggctagtgtaaatgagggcacctgaagctgaagcctccttagcttcacagtaaatctgcttcagagtctacggccattttaattactgagtaaactgtcaactttcagagtcagctctatgtagggctagtgaatatgttgattacagctccatttgaggaagttttttttttttttttgggatggagtctggctctgtccccaggctggagtgcagtggtgtgatctcagctcactgcaacctctgcctcctgggtccaaatgattctcatgcctccgcctcctgagtggctgggattacaggtgtttgccaccatgcccagctaatttttgcatttttagtagagacagggtttcaccatgttggccgggatggtcttgatctcctgaccttgtgatccgtctgccttggcctcgcaaagtgcagggattacaggtgtgagccaccgcacgccctgcctctttggtcttataattactttatactcctaaaaagtattgaggactccaaaaagcttttatgtggatcatatttatcaacatttactatattaggaattaaaacaaacatataaaatatttattcatttaaaacaacaataataaacctgttacatgttaacataacataaataactttttttttgagagagggtctggccatgttgcccaggctgatttcgaactcctgggctcaggtgatcttcccgcctcggcctcccaaagtgctgggattacaggtgtgagccacttcatttggcctaataacatatttttaatgaaaaataactattttccaaagcaaaataatttagtgagaagagtggcattattttacatttctgcaaatctcttcagtgtctgggctaatagaagattctcatatctgtgtctgcgttccatctgtatcacaggcatgtagtctctggaagacctcactgtattgttattagagtgaaaaaggcagtaagtcttagtatgaaaataaagtcttagtatgaaaat

SEQ ID NO: 1636 - DNA, 3440 bp, Homo sapiens
ctctacctagaaaaatagtaaatcaaaaacagtatcacatccctggaaggattgcagggagtagtgccaccattaaggacttgaaagatgcaggggtggtgattcccaccacatccccactcagctctcctgtttggcctatgcagaaggcagatggatcttggagaatgacagtggattattgtaagcctaaccaagtggtgactgcaattgcagctgctataccagatgtggtttcattgcttgagcaaattaatacatctcctgatacctggtatgcagccattgacttggcaaatgcccttttctccattcctgtccataaggtccaccagaagcaatttgctttcagcttcctgttctacctcaggggtatatcaactctctggctttgtgtcataatgttatttggagagaacttgattgcttttcacttccacgagataccacactggtccattacattgatgacattatgctgattggatccagtgtgcaagaagtagaaaacaaactggacttactggtgagacatttgcatgccagagaatggaaaaaaatctgactaaaattcaggaaccttccacctcagtaaaatttctaggcgtccagtggtgtggggcctgttgagatattccttctaaggtgaaggataaattgctgcatttggctcctcctacaaccaaggaagaggtacaacacatggtgggcctgtttggattttggaggcagcacattcctcatttgggtgttttacaccagcccatttatcgagtgatccgaaaggctgccagtttgagtggggtccagaacaggagaaggctctgcaacaggtccaggctgctgtgtaagctgctttgccacttgggccatatgacccagcagatccaattgtgcttaatgtatcggtggcagatagggatgctatttggagcctttggcaggcccccataagtgaatcacagtggaggcctctaagattttggagcaaggccatgccatcttttgcagataactactctccttttgagagacagctcttggcctgttactgggctttggtggaaactgaacgtttgactatggatcatcaagtcaccatatgacctgaactgcctatcatgaactgggtgctttctgacccatctagccataaagtgggtcatgcacagcagcattccatcatcaaatggaagtggtatatatgtgatcgggcttgagcaggtgaaggcacaagttacatgaggaagtggctcaaatgcccatggtctccactcctgccaccctgccttctcttccccagactgcaccaatggccttttggggagttccctatgatcagttgacgtaggaagagaagactagggtctggttcacagatggttctgcatgatatgcaggcaccacctgaaagtggacagctgcagtactacagcctcttcttaggacatccctgaaggacagtggtgaagggaaatcttcccaatgggcagaactttgagcattgcacctggttgtgcactttgcatggaaggagagatggccaaatgtatgattatgtactgattcatgggctgtagccagtggtttggctggatggtcagggacttggaagaagcatgattggaaaattggtgacaaagaaaattggggaagagatatgtggatggacctgtctggtcaaaaactgtgaagatatttgtatcccatgtgagtgctcactaacgggtgacctcagcaatgcttctgccaagactatcatccatggactcatggaataccttatccaccatcatggtattccacacagcattgcctctgaccaaggcactcactttacagctaaagaagtgcagcagtgagctcatgctcatggaattcactggtcttaccatgttccccatcatcctgaagtagctggattgatagaataatggaatggccttttgaaggcataattacaacgccaattaggtgacaacactttacagggctgacgcaaagttctccagaaggccgtgtatgctctgaatcagtgtccaatatatggtactgtttctcccatatccaggattcacaggtccaggaatcaaggggtggaagtggaaatggcaccattcaccctcacccctagtgacccactagcaaaattttgcttccttttcctgtgacattacgttctgctggcctagagctgttagttccagatagagatgttagttccagagggagaaatgctgccaggagacacaacaacgattccattaaactggaagttaagattgccagctgtaccctttgggcacctcccacctttaagtcaacagtctaaggagggagatacagtgttggctggggtgattgacctggactatcaagatgaaatcagcctaatacttcacaacagagataaggaagagtatgcatggaatagaggagatccatagggtgtctgttagtattaccctgccctgtggttcaggtcagcgggaaactacaacagcccactccaggcaggactacaaatggccaagacccttcaataatgaaagtttgggtcactccatctggaaaaaaacccatgacctgttgaggtgtgtgctgaaggcaaagggaatacagaatgggtaggataaaaaggtagtcatcaataccagctacaaccacatgaccagttgcagaaatgaggactgtaattctcaatgagtatttcttcctctttttgttaaaaacatgcttgttcatgtatacactgtgttaagaaaatgccttcattttcctttttactttatcatgagacataagatttattggcttcatatcaacccttaagtattgttaactttatgtaatagcatttgggttggggattggtgtgttttcggttgtacatagcatagttgaattatgttaggcataattatgaccttattattgtctttatttgaaaattatatatgatctcaggaaatgtgtatgagttcaagttgacaaggagtggatttgggatggttgatactgagtgtcaacttgattggattgaagcatgcagagtaataatcctgggtgtgtctgtgagcatgtttccaaaggagaataacatttgagtcagtgggctgggaaaggcagacccacccttaatctgggtgaacaccctctaatcaactgtttgcttggccaggatataaagcaggcaggaaaacgtgaaaaggctagacaggcttagcctcccagcctacatctttctcccgtgctggatgcttcctgtcctcaaacatcagacttcaagttcttcagctttgggacttgaactggcttccttgctcctcagtttgtagatggcttattgtgggacctttgtgtgagtttaatactccttaataaactctctttatatatgattgtgtgatttaatgctccttaataaactttttttatat

SEQ ID NO: 1637 - DNA, 3132 bp, Homo sapiens
ctggagaacccatggccggcgtggaaaccgctgcgaggcggcgccacgacggaggctgaggtcgccggcagtatccatggcgtcccagagcggcagctccctggggctcctggcctggttcttgcttcttcagccatggctcgaagaggcccgggcaggcagggtgggtgcgcagggaggcgtagcactgctcttcccctccgcgctcccctcagggccaggcggccaggaccccggagcgagcggatgggagccgccacctgtaggggctccaggatccccagcggccccccagtccagggggaacgcagtgcgccccgcttcggtgttacttccctcagcctgtggccagcggacttcaaggataactggaggattgccggctccagacaggaagtggccctggcaggtgagcctgcagaccagcaacagacacatctgcggaggctcccttatcgccagacactgggtactcactgccgctcactgcatctctgggtgagggtttggggctcagagcttgggccctgatcaggctgtgggacctggagccagtctgtccccctccctgaacttcctcttcctcatctgtaaaagggggtgacagccccatagtttttatccagtctgggtgagacctgaggatttgcatttctaacaagtttctgggtgttgcctccgccgctgatctggggactactggctaaagtggtcaggggtcctggagggatgtggcttggagagagggaggtagctgctggctggcataggaagatggtaccaggcgggaagcacctcgaaggtgtggaagcagagtgtagaccctggaggatcttcctgcagccatctggaatacacagtgaagctgggagacacaaatgtgcatcatcgctccaaaacagcacttgtggtcccagttcgtgacgtcgttatccaccgatattttacgtctcctggaataattgaaaatgacattgcccttgccctgcttgacttccctgtgaattactccacgcacatccagcttgtgtgcctccctgaacaggcttacatggtgcaagctggtacgaactgctgggtgaccggatggggcaaagtaaatgaaacaggtgagccataccgacccgaggaggattccagaatgaccccggcaagcccagaagcccggacgtctcctgtgcacccgaaattccccaaaattccagaaacttctgtagctccagggtctccagcgaccgcagggcctccaggatcctgggttacttcagcatctacagtgggagaagccttggaatccgacggaatctctgaccttggaaggcagttttctcagggtattgtttctggtgctagatctgtcctggcctgcggggtaggtcaaaggggacacagcctggctcagggaggttgagggtcagaccctgacctagatgatttgagagagaggatagataacccgcctccgccctgggcagcctggtggggtggtgggaaggtagtggcttcacttccagtcccctctctttactgagcccaccagcctgtggccaccgtgtttcaaggatgattggaggattgccagccccaaacaagaagtggccctggcaggtgagcctgcagaccagcaacatacaccactgcggaggctccctcatcgacaggcgctgggtgctcactgccgcccactgtgtctttagtaatttggaatacaaggtgaagctgggagaccctgacttgcatgctggttccaaagaggcactggtgatcccagtttgagacatcatttttcctagcaattttgattttgccactttgacaagcgacattgcccttgctctgctcgcctactctgtgaattattcctcacatatccagcctgcgtgcctccccgaaaagctttttgaagtggaagctgggacagagtgctgggtgactggatggggccaagtgtcagagagtgtttcaggaccaatgccacttgttcttcaggagactgagctaaacattatgcgtcatgagaaatgttgtgagatgctcaagaacaagaatatatccaagagtaaaatggtcacgagggggaccgtctgtggctataatgaccaagggaaggatgcctgtcaggttataaagaggacacaaccaatccagtttgtggtgagccctggtggtcggaggatttggaaatgacccgccattggccctgggaggtgagcctccggatggaaaatgagcacgtgtgtggaggggccctcattgaccccagctgggtggtgactgcggcccactgcatccaaggcaccaaagagtactcagtggtgcttggcacctccaagctgcagcccatgaacttcagcagggccctctgggtccctgtgagggacatcattatgcaccccaagtactggggccgggccttcatcatgggtgacgttgcccttgtccaccttcaaacacctgtcaccttcagtgagctccacagccaactccatgctgaccccagagctgcaggaggctgaggtgtttatcatggacaacaagaggtgtgaccggcattacaagaagtccttcttccccccagttgtcccccttgtcctgggggacatgatctgtgccaccaattatggggaaaacttgtgctatggggattctggagggccattggcttgtgaagttgagggcagatggattctggctggggtgttgtcctgggaaaaggcctgcgtgaaggcacagaatccaggtgtgtacacccgcatcaccaaatacaccaaatggatcaagaagcaaatgagcaatggagccttcttaggtccctgtgcctctgcctgcctcctgttcctgtgctggctgctgcagccccagatgggctcctgacctccctaccttttcctcctcctgccttgcctctgctgaatggggccagatggtttgaccaaggtcatgtgtccatcttcaaaaagagtcagggtggggaagagtaacccctgggagaatgggtctggctttggcatcccggtgaggagaagtgtggtggatgactaggccttgggtgagcaggagaagggaagtgtggcctagaaggattctggaatctgggaccaggagagcagggattaaacatgtgcaaacttg

SEQ ID NO: 1638 - DNA, 2851 bp, Homo sapiens
aatcccaatcaagagccagcccggtttctgcaagcacacaggagcagaagagaaaccagtgaagacttcaccgctgcatatcaggccagcgacggctgctcggtgacggcgctgctctgccaccaagaaaaaccccaaacccactgatcccacaaagaggggagaaaaaggaagtcttcatgctgaagaaggagaaatacaaacgtgtatgtgccggtttgcctctggtcgttaccgtggaggcattcacacgcctgtccatttggcattattatgagcgatccccagacagaagaacttaaggtcaagttttacagagataaccaaggacatcttaaaggagacaggctgtgcgatcattggaagagggaagctgtggatcttgcattcatgcatttggatgaagatgacactggaaactgcacgttgcaggttgaggtggccaagtatcaacggaatgggaaatatgaggcttcaggaaggaagtgcgcgaaccacaggaaggctccgtctctacggcagaagcggccacgccgcagcccatccaaacgccgcgacacgagtgagttgtcctcatcgaacacatttcatcctgtggattttgaggatggccagagaagaccttcaaggagagtcaagtttggaccaactcggaggctcattgtctttgacagacacccagctggtgaacctgtgtcctggaggaatgcaggagcagctgctcattgtattcaaacctttgatggtctcattccgtcacccaaggctggagtgcagtggtgtgatctcagctcactgcaacctctgcctcccagctcgagcgattctctcacctcagcctcccaagtacctgggactgcagatgtgtgccaccacacctggctaatttttttttttttttatagggttggggtttcgccatgttgcccaggctggcctcaaactgctgaactcaagcaatctgcccatcttagcctccaaaagtgctgggattccaggtgggagccatcacgcctggctatttttaaaaagagtcttgctctgtcgcccaggctggagtgcagtggcgcaatctcggctcactgcaagctctgcttcccagcttcacgccattctcctgcctcagcctcccgggtggctgggactgcaggcgcccgccaccagacccggctaaatatttgtatttttggtagagacggggtttcactgtgttggccagggtggtctcgatccgccacctcagcactttgggaggcccaaggtgggaagattacttgaggcaaggggtttgagaccagcctgggcaacatagtgaaactctgtctctttaaaaaagaaagaaaagaaaagaaagaaagaaaagaaaatctcagtgaatgatggtcagaatagaattcaacataacaagctcattattaaaatatttgatctcactgtgtacaattctgaagacactcattcatgtacttcattaaatatttctagtttgctaaaaatagaattacccttcaacccagcaatcccattactgggtatctaccaaaaggaaaaaaaaaatcattctatgaaaagatgcctgcacttgtatgttcatcacagaactatttacagtagcaaagacatggaatcaacccaggtgcccatcaacagtggactggataaagaaagtgtggtacacggacgccatggaatactatgcagccataaaaaaacatgaaatcctgtcctttgcagtaacgtggatgcagctggaggtcattatcctaagtgaatcaacacagaaacaaaaccaaattccccatgttctaacttataagtgggaactaaacattgggtacacaggggtgaaaagacgggatcaatagatgctgggaatccaaaagcgggaaggaagggaggaaaggaagtgttgaaaaactatctattgggaactatggtcactgtttgggtgacgggatcaatagaagcccaaaccccagcgccacacaatattcccctgaaacagtactggccatgtgctccttaaagctaaaattaaaaacaaacaaaaaacagaaagaaaaaagtatccccaggtagctatgttgtaattttatttcatgacagcaccatcttctctttgcctgcgcctgggcctcctagtgtgctgcttacgtgatgcccacgtgccacagagttattgcccgaagtgccagtgggctgtgcaggggatgggctcttccttccagatggtctgcagcctctgggaccacgcagccaccatcccctttctttcttcttcggatgcaatttcaggagcaaagctgatctgaggggcaaggactttaaatccacagaagtgtaatgtgccatgctaaagccacaggggaagaaaagaactcattagaaactacacctgttacataccattcggttaaatgatttaagggggaaaatggtgtgaaacaaaccttcaaaaaatcatgaaacaaccttaatgttacaggcaactgaaagctaaacttccctatggctttaggacacagccttgcataagagccgtgaagaacttggggcagttgcaatttccaagctctatttttataactgcaattaacctacaatctttgcaactgattcagatgccaaacattatagttctgcttgattgggcaaattatggtacattcacactatagattattccagaatgaggttattctagctataatatataccatggaagtttgttcaagatatctgttaaatgaaaataacaaacaaattttaagctgtatttatgatataccattcatgtaaaagagcagtaaatgtaataaacctataataaaaattatgtatgtgagaaaat

SEQ ID NO: 1639 - DNA, 2804 bp, Homo sapiens
aatgagggggttagtcatatgggctttgggcataaaatttgggtgggtggctaagggaccttcatcaacctagcaggagagcaaagtgatcatgttaagacatctcttctgaagtagctcattgacactcttccctcaccttggtggccgctgcgtgcctgattgctaagtgcaccaccgtaacaataacagtctataatggtgatattattaactgcatcgtgcatattattgatttactctttgttctgcatcattatcctttcaccaatgagtttactgcattattctcacatacttagtcaagcaccaaattacaacgaaagggcaggctcttataatggcatctaatggaacattgcataagccatcatcactgcctcctattatgagccacctccagccaatgagctttctgccttagtggaatgtgcacagagcaattatgaagtgcaagggacatggccattctaaattttacccaggaaattaccatgctgcatgttcaccacctgcccaagtctcagagcgcagctagagactcagatgctgtcactatgagcctggggggcacagggacaggagttgagcctcttgctacatacagtctcttcactagaagccagtggttttatctccacagtcagtccctggctttttgtcttgtggctgactcttgcatcaaatgctcactcctgactgggcattatgtggcacatataagtggccatgacattgcctggtgccaaagtcagattggccaggagccccgagcggttggagggactgtcagtctcaacagttgtggggctcatctcttccgggtgagccactacttccagaaacagaagtccaaaccaccctcaaacaaggcgagcaattccagcctcatcccttcccagcatctccccatcttgaggtaaattcctttagctctcctggaaatcccgggcaccctaaggaagcagccctctggggacgcacagccagctggcatgatcttccattccataggcatcccagccccatttagccctgagtaatgctcacttactgtaaagtgttacatgcccccattgtcggaggagttatagtggaaaaatgcaaaatttcctttttactgcttatggccagcagaacctataacgtgtcaggccgcgcattagccaccctgataaaagtctgctttcttacacacaaaatcatcgtttcagcaagatttgttatctcattacctgataagctctatgtcataaaccaagactcatacagtaaatctccccggaggacgctttgtgggcagaaagggagagatatgaatctgcaagggacttgataatgcagcatttaagcacaagcataatgtcacttattgttaaatgcataaaaccacttggccaaacagttgggcttttaataggattttgtgcagcatcaggtgagaagccatatggcttttctgtctaggagtctcagcacctgctagcaccgctgctttgcctcactgccctctggggatgggagctgggcttttatggaggcggagggaggagatgaatgcttcccctgcagctgcctggcttctgctgtcttgccagggggtgggatgcagggtcctgtcgtggtgcctggcctgatctaactggcctctcctgttcaggcacattgtggtctgcggacacatcactctggagagtgtttccaacttcctgaaggactttctgcacaaggaccgggatgacgtcaatgtggagatcgtttttcttcacaacatctcccccaacctggagcttgaagctctgttcaaacgacattttactcaggtggaattttatcagggttccgtcctcaatccacatgatcttgcaagagtcaagagtcagcagatgcatgcctgatccttgccaacaagtactgcgctgacccggatgcggaggatgcctcgaatatcatgagagtaatctccataaagaactaccatccgaagataagaatcatcactcaaatgctgcagtatcacaacaaggcccatctgctaaacatcccgagctggaattggaaagaaggtgatgacgcaatctgcctcgcagagttgaagttgggcttcatagcccagagctgcctggctcaaggcctctccaccatgcttgccaacctcttctccatgaggtcattcataaagattgaggaagacacatggcagaaatactacttggaaggagtctcaaatgaaatgtacacagaatatctctccagtgccttcgtgggtctgtccttccctactgtttgtgagctgtgttttgtgaagctcaagctcctaatgatagccattgagtacaagtctgccaaccgagagagccgtatattaattaatcctggaaaccatcttaagatccaagaaggtactttaggatttttcatcgcaagtgatgccaaagaagttaaaagacctcctcaactctgtctccctttggctgcccagaaaaggtgctttcagagtgacaagcttgatatttttatttgactgagaaacgacatacttctgccccctcaaatatatatttgaccagactgtgggaattttggtgttgtatttaacttccccaccaagggcccagggctcattgcccacatgtccccacgagtagcatcaaaggctgttctcaaaaatgaaagacgaatgagcagacacagtgtgtcacatcagcaacttttttcccagtttctttgtaaatggaagtttatgaaaaggagcactaactcaaatcacagaatcctgtgtttgaaataaatggtcttgcaac

SEQ ID NO: 1640 - DNA, 3567 bp, Homo sapiens
accacaatggatcagcccccatttggccaacaggtgactctaccccaggtgggcctgagaggacccatcccccatctcaccattctgccccagcgccctggatcctgcctctaccacttcttccctgcgcagtcactagggacggattctggcagcagagccgcgctgtcgtgccccagccagccaggctctcctgggatctgggctggaaggggctgccgagaccatcagtccaatctttggtctacaggtggggaaactgaggctcaaggaaggtcagtggggggccagaagggacctcatgtgtgagatctggaagcgggaattggagcagcagtttcattctgcttcagctcaggaagcccctgcagcagcccagcctggagaaacgaggacccagcatggaaagaccccagcctcaaggaggcagagcacagccaggaagggaagccccagcccacctgggaaacccacctggcccattgctgggcacaggatctcactggtggtctcacatccatccttttgggaatgagatcaggactagggattcggcattggtgaccagcactcaggtggaccgctcagctgactgaggtggagaaggaaggaggagcgtggtgggaccctcgccctgccctccccactctggagcgctgcctctcagcccaaccaagtgacagagacgagacaaccacaggaatagcagctgcggagctccatggcctccctctgccccctggtggtgagaaggagaaaagcaagagcaggtgctgaaaacgaaaaggaaactagcagcagtcccagctaccacaatggatcagcccccatttggccaacaggtgactctaccccaggtgggcctgagaggacccatcccccatctcaccattctgccccagcgccctggatcctgcctctaccacttcttccctgcagcgtctgcggttcccccaccgctgtgagccaggttccccctccaggctgctgggctgggactgagtcacttcttcccaggctgtaaatcctgggactgctgtgcaaggcagagtcactagggacggactctggcagcagagctgcgctctcgtgccccagccagccaggctctcctgggtgagtagcagggagacccctggaacttacggggatagaaggagtgtgatgccaggagccaggggaggaaaatgcctggcagagacgagggagaggaggagacacatggagccattcatggatttcacacaggatctgggctggaaggggctgccgagaccatcagtccaatctttggtctacaggttgggaaactgaggctcaaggaaggctctgcgtcctgctttgtgtaaggagagagctgggcagtgaggccgaaagtccttcctgagctcacagtccaagttgcaaggaatcacatcatttccaagtacccatggcagaagagggagccatcctcaaggtcaccaaagacctaagagctgccgtctctgccatcctccagggctatggggatgggcaggggccagtgacggacaccagtgccgagctgcacagactctgtggctgcctggagctgctgctgcagtttgaccagaaagagcagaagagcttcctggggcctcggaaggattactgggactttctctgcactgccctacgacggcagcggggaaacatggagccaatccactttgtccgttcccaggacaagggaatggtatggaccccggagccctctgctctgcccagaacgccaagaagacatcctggactctctctatgctctcaatggggtggccttcgagttggacctccagcagccagacctggatggagcctggcccatgttctcagagtcacgctgctccagttccacccaaacccagggaaggagacccagaaaaaacaaagatgccccaaagaagatcccagccgcatatggagggcctgaaaatgtccagattgaggactcacacaccagtcaagccatctgtctgcaagatgcacccagtggacagcagctggcagggcttcccaggtcccagcaacaaaggcatcttcctttctttttggaaaagaagggggaaagttccaggaaacataggtacccccagagcatgtgggagccagaagggaaggagcttcagctagaccaggaggaaagagccccatggattgagatcttcctggggaactcaacacccagcacccagggacaggggaagggggctatgggcactcagaaggaggtgatagggatggaggctgaggtcacaggggttctgctggttgcagagggtcagagaacaacagaggggactcacaaaaaggaagcagagtggagtcacgtccagaggctgctgatgcctagccccagaggggctgtagagggagcagtatcagggagcaggcaggggtcggggggctctagcatcctgggggagccctgggtccttcagggacacgcaacaaaggaagactctaccgtggagaatccacaagtgcaaacagaagtgacccttgtggccagaagggaggagcaagccgaggtgtccctgcaggacgagatcaagagcctcagacttgggctccggaaggctgaggagcaggcccagcgccaggagcagctgctgagggagcaggagggggagctgcaggcacttcgggagcagctcagcaggtgtcaggaagagagagccgagctgcaggcacagctggagcagaagcaacaggaggctgagaggagggatgccatgtaccaggaggagcttggagggcagcgggacttggtccaggccatgaagaggcgggtgttggaactgatccaagagaaggaccgcctgtggcagaggctccagcatctctcttccatggctcccgagtgctgtgtggcctgtagcaagatctttggccgattttctcggcggtatccatgcaggctctgtggaggcctgctctgccatgcttgctccatggattacaagaagagagaccgctgctgcccaccctgcgcccagggaagagaagcccaggtcacctgaccaagaccaagaccagcccatgactggcctcccacctgcctgcccatcccactcaatccactccctgcccgtagctcttcccagccctcttgtttgtccagtcctcattctagacactgaagatctaaggcaccagcacttctgtgggcagagtagggtgtggggagtggttccagccctgcaactaccacaacgagccaggtgactttggcgaagctctcagtgctcagggcttcttctctaatgttaagagttgggccccatcctctctaaagtccctctgggctcagcaaatccatgactgtggataagaccccagcagccctgacatttctcctccacactccccactcacccagcagcggtgcccacctttcctgattcacgagaagtgaagcctgcactatcttggactctccagcagcttcctgtctggagtcagcttcagggatctgtgtttgtgttgctgtgtttctttttatgtttattgaagtactactgacatatgataaacatcacagagtgt

SEQ ID NO: 1641 - DNA, 1655 bp, Homo sapiens
acataacaaccacattcctcctctgacgaagcccctgggagctcagctcatcaccatggactggacctggaggttcctctttgtggtggcagcagctacaggtgtccagtcccaggtgcagctggtgcagtctggggctgaggtgaagaagcctgggtcctgggtgaaagtctcctgccaggcttctggagccaacttcgccacgtctgctttcacctgggtgcgccaggcccctggacaaggccttgactgggtgggaacgatcatccctctctttggctcaccaaatcacgcacagaggttggagggcagactcacactttccgcggtcaagtccacgaccacagtctacatggagctgcgcagcctgacatctgaggacacggccgtctattactgtgcgagagggacccggacatttcgaaattttgacataggtccatatcttgattcttctgatgtctggggccaagggacaatggtcaccgtctctgcagcctccaccaagggcccatcggtcttccccctggcaccctcctccaagagcacctctgggggcacagcggccctgggctgcctggtcaaggactacttccccgaaccggtgacggtgtcgtggaactcaggcgccctgaccagcggcgtgcacaccttcccggctgtcctacagtcctcaggactctactccctcagcagcgtggtgaccgtgccctccagcagcttgggcacccagacctacatctgcaacgtgaatcacaagcccagcaacaccaaggcggacaagaaagttgagcccaaatcttgtgacaaaactcacacatgcccaccgtgcccagcacctgaactcctggggggaccgtcagtcttcctcttccccccaaaacccaaggacaccctcatgatctcccggacccctgaggtcacatgcgtggtggtggacgtgagccacgaagaccctgaggtcaagttcaactggtacgtggacggcgtggaggtgcataatgccaagacaaagccgcgggaggagcagtacaacagcacgtaccgtgtggtcagcgtcctcaccgtcctgcaccaggactggctgaatggcaaggagtacaagtgcaaggtctccaacaaagccctcccagcccccatcgagaaaaccatctccaaagccaaagggcagccccgagaaccacaggtgtacaccctgcccccatcccgggatgagctgaccaagaaccaggtcagcctgacctgcctggtcaaaggcttctatcccagcgacatcgccgtggagtgggagagcaatgggcagccggagaacaactacaagaccacgcctcccgtgctggactccgacggctccttcttcctctacagcaagctcaccgtggacaagagcaggtggcagcaggggaacgtcttctcatgctccgtgatgcatgagggtctgcacaaccactacacgcagaagagcctctccctgtctccgggtaaatgagtgcgacggccggcaagcccccgctccccgggctctcgcggtcgcacgaggatgcttggcacgtaccccgtgtacatacttcccgggcgcccagcatggaaataaagcacccagcgctgccctgggcccctgcaaaaaaaaaaaaaaaaaaaaaaaaaaaaaaaag

SEQ ID NO: 1642 - DNA, 2979 bp, Homo sapiens
agccgcagcctctgcgcgtcgccctccacggttaccccggctctccgcccctccttctcgcggcgctcgagggaccatggccgatcctcgcgtgagacagatcaagatcaagaccggcgtggtgaagcggtaaggagccgggagcggcgccctgcacctcctcttcgtcacctcatggcggcccgcgaggctgagcggagcgcaggcccgaggaggcccgaggcgggctccgaactccaggccgcacccggggctccgcagttggctgggactggcagggacccagcggggcgcgctgacgcccgagcccgccagcctcgcacgccgcttcccgtccctctccgctcactggccgctctgatttgccggaagagtcggcggtggcccggtttctcggcgcccgcggtgggaaggtggtgggccgcggcctgcgagggcgggccgggccctgatcacgtgcctcctgtgtgcgcgcgccggcctctccttgctgaacttggcccggggaagcgggatcccagctgtgctctcaaatgggcttgaaagcaggctctgaagtttagggggatgcggaggatctgggcctcgtcaaaaaagaccgtagtggagccgtgtgacctaacatggctggcgtgactggcaggctttgagaactgggcctgaacttctagcacactcagcaaacttatgtggcctcactttctccagtcagattccccgaagctcgccccagaggctgtgagatgctgtttaaataacttgtgaaccagaagtatctgagacaggtcttaatttggaatgtttattttgccaaggacgtgcccatgacacagcctcaggaggtcctgatgacatgtgcccaaggcggttgggacacagcttggtgtaatacgttttagggagacctcagatattagtcaatgggtaaggtgtaccttggttccctccagaaaggcaggacaactagaaggatggggggcatccaggtcatagataagagacaaatggttgcattcttttgagtctttgatcagcttttcacttaatacacaatttacatgtgagagagggatagaagaatagtcacttatgccttagtcggctaaatgaatctgcgattttacatacacagtagggcagaggaagcagtcagttacgcatttgtctcaggtgggtagaggggtgactttgagttctgtcctttgtcccatacctgtgaagataagctatcaatttacattgccagggtgaaatacaacagaactgttttagagtgaaggtcttgaggcccacaaggaatttccttgggggcaaattgtcagggaggtatgtagctttttttttttttttttttaatctttgtagctatcttattcaggaataaaatgagaggcagttttgctcgatgcaattcccagcttgacttttctttttggcttagtgattttggggtcctgagatttatttttcctttcacaaactcatgggtagtgcagtcctgtaatttgcttaaattcctgtaaaccaagaaagtacctgagacaggtctcaatcagtttagaagtttattttgccaaggttaaggatatgcctgtgacagcctcaggaagtcctgatgacatgtgcccgaggtggtcaggctacagcttggttttatacattttggggagacagaagacatcaatcaatacatgtacgatgtacattggtttgatctggaaaggcaggacaacccaaagcgggctggggacagttccaagttataggaggttttccaattggcagttcgttgaaagagtttatcttaagacctggaatcaatacaggggagtgtgtctgggttggaataaaggggttgtggagatcaaggttcttattaggcagatgaggcctccaggtagcaggcttcggagagaatagattgtaaatgtttcttatcagacttaaaaaggtcccagactcctagttaattttctagtggatcaggaaaaagacctggacagggaagagggttctctacagaatatagattttccccttaagagacatctttgcagggccaattcaaaatatgtaaagaaatatattttagagtaaaatgcttttatttctttcagatcccgctatctgtcctgtgatgccatactagagtaaagctggaatttggtgtcttattgttacaaaaagccttaagatctgttttaatgttaatgctgctcaattgttcctgagttccaaagggaggaatgtgtaatgagacatgtctgaccccctcttcccatcatggcctgaattactttagaatgcccttagttgagaggaggggtccattcagacggttttggagcttagaattttgtttttagtttgcattcctgagtgctggtagacccttcagtgttcattagaactttattgttcagacccaagaagagcaaactttttgatgaagtgttacaagagaaaagataaacagccttctgaagaagcaagttattttgttgtagcaatgtctactaaagaaaccaactggcttcttcctgttcgcccacctttcctttgtttattgatatttccaccagaggaaggaccaggcaaaagggagaataaattcactttttaagataatgcttctgagttttagcacagcatcccatttcccgggaagctttattgccaaggcaataaggagaccatgtgagtaggagttaaatgcacagccatttgtgaagtgagactgcttgggttcagatcttgactctgccctttattctatgttgtggaatatattacattgtgctgtgcctcttttaccttatttgtaaaatagagcaagcacccaactcaagcagttgttgcaagaactgcctgctatgctgtttaatacagtatgtggcaaatagcaagtgggtagtaaatgttaataatactgtttggattcccattttacatatgagaaactgaggtttaatgaagttt

SEQ ID NO: 1643 - DNA, 3046 bp, Homo sapiens
gactcaaaagagggcagagccctgcaaagaaggtcttatcagctgctgtttgtgggtctaagaagctgtgagaagtctggttctgggaatggagaaagaaggtagagatagagtcaattgctgctgctgctggagcaacactgaaaaggaataagagacaccaagaataaagttctttttactcctcctaacttcctgtctccttcctgtcacttccattggcacaacgcaacaggaagccaaggataccgcagcctgggaaatggatttcataaagggcaactccagcaacagataacagagcagagaagtgtttccttggggctgggaaccagtgaaatctgatggcacactggagcgtgtccgtgagcggaggagggaagtgcaatgggtgtgttcacctttccttgctgcccattaatgcagcatgctcatgatgccccagatgccccatgaatgtggaattgtgagggacccgccagcatgggagttcagagaggctcaaagtgagtccaaggtaagtcatattttctatccaaaccaggatttgcatcaaatgaagaaagaaggcaccaggattctaacagacaccagggcaagggaccccctcacatccttccttactcgtgttgcttccctgcattggccaactatgcccattgaaattggtgtttaggaggaaaggggagggcagggcccagatttcccgttcctctcggtccccctcattccctgtgagaggaaggtaaagagtgcggatgaaacgtgcacgtaccaagaagtgaaaggaaaacaggtgagcttgtttcgtgcagcatttccagtgtcctggtaagaactaaattcatggacacataggaactgcaacatatgaactgtgaaatttgggtaattttatgtaagagttaattgctactatagccaaatttaaaattctcatggcacaacataaacagtaaaatccacgctaataatttaaagcttattttttagttagaaaaacatgaaaaatacaaataaaaaacactacaaaatgagagaatctgctgaaaaaaatgaaaacggcttatgctttagtccctttaataatacttttttcctgcttttcaagtaaggggttcacagttttattttgcaccaggaactaaattatacagttggttctgccattgggtttacaaaggtagctacacaccttcaagagctgcaaagataagaaatgtttgctattcatccctcaaacatcccttcgagaagtcaattctccatcatgacctcagccctcagccttctccagttcctgagatcagccttggagaatgtagaattgggaccggcctgtcactgggattagcaagtcatcattcctaccaataagtagggaccagaattgtggtagcgtgaattccaaggaggatcatcatatacagttgtgcaggttatgcactgcaccacgccaagcacaacatgaacattcttatccctggaattatgcactcacacagctgtacatactggccctggaagttggctttcctgaatggacccctaggactggcctgctcaccaaatcccttccctccttcatgccaccttatctgaagttaggagactgggcctcagtttccctgcacaacacgctggttctatgctaggactatattccatccttttcccttaggttgatcagacaggtccaaaagagcagagtttctactatgaatgaactacttagaaccagcgtctaaggtcagcagagactagaatgcactcttcatccagtagcctccataacctgggtctgtcaccaccacccccatcagtacataacctgggaagtggatctcatctccatgagaccttgaaacctctgccttctgagcagtccctgtccccgggcttctccactgcagcttactcatcgtcacccacaggagctgttagctccagaatctttactaaaggcccgcatcctgaacacagcctactacacgaggctgcggctgagcactcaggacaatcgctcaggacaaataaccctcccattgcccttaaacatccctggttccctttgttccaatcccatccttgtgggattctgacctcttggctctctcatccaacgggttaccctccccttgactcctttgattttactttttgtgggctctcttctaactatgtgaactcagatccctctgtgagagtgagttgcacatctgattcacctgtggggttgttaaaggtccatgtgcctggctctcaccctagactattctaactcagagtgccccccagggaaacaatgtaaggtagcaattaaggacattgactctggcatcacaagtttgagtctatcctgtctctgccactcgtaatctatgtgatctttggggatgctttccctttctctgaatcagtttctttgtctctaaaatgggaatgagagtgttagtacataccccccaggatgggcagaaaaattgaataagctaatgcatgcagaggattcaaatacggcctggcacatggcatgtgttcaataacaagttaactgcattgctattattgttatccaaaaagtgacagattttactttgccctccgtgtttggttctcggtgcctggttttgcttacttaagagtccctttaccttggtctcggccaagcaagaccagccccgcccctgactcatgggtttgaacatctagatcagatctagccactcatcaccaccctgggcacccatggctttagttttctactgcctcctctcctaccagtgccaggcaaacctttgcttgtgattcaaaacccaactggaatgcttggtcttttcctaagtcttcctcaatgttcctctgtattcatgtgctcctagaattctttattcagcacattttatcctaattactggttacttgtctggctcttgcttaggcacaaaacctgcaatttaactttcctctaacatgggaccttaacatgatgcatataataggtgttcaataaatgatgtttcttccaataaatatctatttcatc

SEQ ID NO: 1644 - DNA, 3114 bp, Homo sapiens
agttacgccgtcgggagtacgcagccgcttagcgactctcgcgttgccccctgggtggggcgggtaggtaggtggggtgtagagatgctgggtgtgcgggcgcggccggcctcctgcggcgggaggggagggtcagtgaaattggctctggcgcgggcgtcctcccaccctccccttccttcgggggagtcggtttacccgccgcctgcttgtcttcgacacctgattggctgtcgaagctgtgggaccgggcccttgctactggctcgagtctcacatgagcgaaaccactgcgcggggcgcgggggtggcggggaggcgggcgttggtacggtcctccccgaggccgagcgccgcagtgtctggccccgcgcccctgcgcaacgtggcaggaagcgcgcgctggaggcgggggcgggctgccggccgagacttctggatggcggcggccgcggctccgccccgggttcccaccgcctgaagggcgagacaagcccgacctgctacaggcactcgtgggggtgggggaggagcgggggtcggtccggctggtttgtgggtgggaggcgcttgttctccaaaaaccggcgcgagctgcaatcctgagggagctgcggtggaggaggtggagagaaggccgcacccttctgggcagggggaggggagtgccgcaatacctttatgggagttctctgctgcctcccgtcttgtaaggaccgccctgggcctggaagaagccctccctcctttcctcctcgcgtgatctcgtcatcgcctccatgtcgagtcgcttctcgattatgggcgggattcttttgcctaggcttaaggggctaacttggtccctgggcgttgccctgcaggggagtgagcagctgtaagatttgaggggcgactccgattagtttatcttcccacggactagagttggtgtcgaggttattgtagtaagggtggggtagggaaatggagcttagtcattcacctggggctgattttatgcaacgagactgcggattatcactaatcatttttggagcatttttctagagacagacataaagcatgatcacctgagttttataccatttgagacccttgctgcaccaccaaagtgtagcatcaggttaaatcttaatagaaaaattttagcttttgcttgagaaaccagtgcttccctccctcaccctctctccccaggctctctacccctttgcatccctaccaggcatcttagcaactctcactcatacttgatcccattttccatttgttgtacttgctcctccagtattcagacatagcactagctttctccctctcttgatcttgggtagcctggtgtctcgcgaaaccagacagattggttccaccacaaattaaggcttgagctggggcttgactcttacccagcagtgcttttattcctccctagttcacgttcttaaatgtttatcttgattttcattttatcctttttccttagctgggattctgtccctgaccgtcttcacagtccaggtgatcttgactactgctttacagagaattggatctgaggttaggcaacatctccctttttcttcctctaaatacctctcatttctgttcttaccagttagtaactgatctcagatgcctgtgtgatagcttccaaattgctgtctctgtctttagtgttatcttttgatccatcttacatcttgttaggatgattgtcctaaaggaagatagagcatgaaaatgacagatgaaactccattactggcttgtactgtttacagcaagttgtctaacccgcgggccgcatgggacccaggacagctttgaatgcgacccaacacaaattcgtaaactttcttaaagttttaggagttttttttgcggggtgttttttttgttgttgttgtctgtttttttttttgctcatcagctgtcctttatatgtggcccaagacagttcttgcagtgtggcccagggaagccgaaagattggacacccctggtttacaggatgaattctgttctcgtgaatgtgatgcataaggtccctggatagactttcctcaatttaacagctttttcatttttcactattttccacatactacacacacaaatatgacctctctcctgaagtcacatggaatgaattgcagttatccaaatcatagagacgtcatatatctttgtggggtggttctttttggaatgctacccttgctgcttttaatcctgcagattcaaatgtcatctcccctttggtcatgccttccatggtctgttgttctatgacccaaactgcccttttaaaaaagcagttttcttctgactcctgagcagtttgtactgcgtgggtcatagtaattctggggttgttgtcattgctgatttaaattaccttaactattctgagctttttgaaggaatagtgtcttgtactcctgagctcctagtatactctgatgtctagccgaccttaagtaaatggagtgagcgacatgtaaatgtctttatggtttgacattttatgaatcttgagcattggaaaagtggctggtatgactaaagaactgaatttttattttttatctaatttgaattgcaactgtggacagtgtagctgtagccccggacttgttctgtggattacagaatacgtggacattgatggttttctctttttactgagcagtaaggaaataaaagctgaagctctctggcccattacatttcatttaactgcttgttttgttttatttattatatatttagctgaaagctaagtccaacaaaccatttttaaagatgtgcctgccttggacaacagtgaaagcaagcgttaatgagtttggatttcaaaaaaaatgcataatgaattttagggaggtgagattccattaaactgttacaggagctacatagttaaatatatcagaacttgaatgaagaataggtctgtgtgatacaaatgaacccagcctaaatttctgtcctacaagttttcacttcctggaaacacttgattggaggagctctaagcatcatatcttgagttatagaaaacaatcacaaagtaagttttatcctgaggaattataataccaacatttt

SEQ ID NO: 1645 - DNA, 2621 bp, Homo sapiens
tagtttctacgatttgatgctggtcacttacatttctttgaacagattaggtagattctcactggataccttctttgtctacagtagttttttgttgttgttgttgttttggagatggagtctggctctgtctcccaagctggagtgcagtggcgtgaccccccggctcactgcatcctccacctatcaagttcaagtgattctcctgcctcagcctcccgagtagctgtgatttcaggcacctgccaccacgcccagttaatttttgtatttttagtagagacggggttttgctatgtcggccaggctggtctcagactcctgacatcaagtgatccgcccacctcggcctccctaagtgctgggattgcaggcctgagtcaccgcgcccgtccattttgtttgtttctttgtgtttttgagacagtgtctcactctgtcacccagaatggaatgcagtggtgtgatcatagctcactgcagtctcgacctcctgggttaaagcgatcctcccccctcagcctcctgagtagctgggactacaggcaagcgtcacctcacctggctaattatttttacttttttattagaggcaaggcctccctgtgttgcccaggatggtctcaaactcctgagctcaagtgatcctcccgccttggcctcccagagtgacccacagataatagttgaaatcccttgctcaagtatagagtttgtacacattgaatatccctagtccaaaaatctgaaatacaaaagactctaaaatccaaagcttgatttcagattttccaattagggatgctcaaccagtaaggataaagtgcaaatattccaaaatctgaaacacttctggtcccaggcattttggataaagaataagctatattagcaagtcattaacctcaagggagtgggaaggggaccaagtggtgtgcaatgtcaataaatgaatttattttctacattttctgttctgtatacagtggagctgctgtatcagagctatcgctcatgtctagttttcagttttttttttttcagtctctttcatataaatgatactgcagtgtcctgtcaccttcttggagctaccatgtgaagaagaaattctgtcattgggccactttccatttagtatgggaatttgccttagacctctctgaactgctaagcattgcgaatggtactgattcgtagcagtgagaaagcttccaagtggtggtctgtgtctacctcatgagctgtcgtaaccctttgtggtaggcaaagtaacacccccaccccaaagaggtttatgtcttcaatctctaaaacctgttacatgttaccttacgtgacaaaaagacctttgcagatgtcatcaaggattttttttttttttccttgagatggagtctcgctctgtcgcccacgctggagtacagtggtttagtcttggctcactgtaacctctgcctcccaggttcaagtggttctcctgcctcagcctccggagtagctgggactacgggcacgcgtcaccacgcctggctgatttttgtgtttttggtagagatggggttttgccgtgttggccaggctggtctcgaacgcctgacctcaggtgatccacctgcctcagcctcccgaagtgctgggattacaggcatgagccaccgttcccggctggttgtttttttatttgtttgtttttgttttttctttgagacggggagtctcactctcttactctgtcactcaggctggagtgcagtggcgcgatctcggcacgctgcaacctccacctcctgggttcaagtgatgatcctgcctcagtctccctagtagctgggattacaagtgcatgccaccacgcccggctaagttttgttgttgttttcattgtcattgttgttttctgagacagcgttttgctctattgcccaggctggagtgcagtagcatgatcttggctcactgcaacctctgtctcccgggtttaagcgattctcctgcctcagcctcttgagtagctgggactacaagcacctgccaccatgcccggctaatttctgtatttttagtagagatggggtttcaccatgttggccgagctggtctcaaactcctgacctcaagtgatttgcccgcctccacctcagcctcccaaagtgctgggattacaggtgtgagccactgtgcccctctctggctaagtttttatatttttgtacttttagtacaatagggtttcaccctgtcattgtcgtccttgttttctgagacggggtttttctctgtcgcccaggctggagtgcagtaacgtgatctagacccactgcaacctccgtcttcttggttcaagcgattctcctgcctcagcctcttgagtagctgggactacaagcacctgccaccacgccggctgatttttgtatttttagtggagatgaggtttcaccctgttgcccaggctggtcgcgaactcctgacctcaggtgatctgctgccctcagccttagagaataaacaactacataaccaccaagcaagcagctcaagaaacagaataagataagggcggtgagttaccagttccattcagtctgtgttggtcctagtcagtacagtaagacgtg

SEQ ID NO: 1646 - DNA, 3575 bp, Homo sapiens
tggttgagtctcataatatttagttcatggagacgtcattaagaccctgctgaggagcaagtgagttttgataacttttgatgatagccgccatcttgcaaggccaatgccaaaccttcagagaaagaattataacagctcctgctttaattaaacaatccatgtttctccactgcatttcatcctggagtaactgcgtgttggagacaaacgagagcagccagtgccaaaaacatgcatctcagtgcatctcacggatgtacagacacggcactcaacatgcagaaatgcctgatcatccagttagcgccaagttccatttcagaacagaaggagccagatgtgaagtggacagcagggctagagctgtggtgaaaggtaccaggagctggaagtcctagaaattcagatttctgggctgggcaccgtggctcacgcctgtaatcccagcactttgggaggctgaggtggggggactgcttccaggagtttgagaccagcctgggcagcaaagcaaaattacagaaatacaaattctgccaactcccaagcctccacggtcgcctccctgataccacggaggccttcctgacagcatggtcagccacaccctggaagtgggtcagggctgggggaacaatgggaggatgattgcaggtctgttgtagaattccttcagaagatgaggtttgggggggacagtaaggaaaacacgactgtctgccataagttcaagagatttaccttttcaagcacagtatcaggcatgcggtgttttctaaataatcaaagtatcttctacattaaaaataccaaaataaaccctgcttgtatcatttcgggggaaagttagattgaaagttttttcaacgacaggaaatcattgcggggcaaagtccacaaggcccaggcgcaggcctcatgtttctgggggggactgggtctccttgcaggtgcgtcccaatgcaaggaaagcgcgtctgcggtcacagctcaacgcggactccagtgccagccgagggaaaggggtcttccctgcagagagccgcacccacctccccctcaactggggccagcgaaactcaggttcactgctctgtgtggaatttgcctctgaaatcccctcaccctgactcaggcctttgataaaaatttcatttttcagaaagcaaagaggagagattacagcagtgaccagcccgtgggaggagaaggatctcattccttctggtcctgggccccgtagctcctgcctctgagagaacagacagtgtgttcgggtcccagcctcccgcaagtgctcagcatctgttgggcttgctgggaagtgggtgcagggctgagcccaaaacacacatgtaggcgttgctggtaaaccttgtcccactcaccccaggtccacttaggagccccaagacctgctgcagggagagaagtgtttggataggttggtgacacgtctgtcatagaacgggtcaggctggatgttttcctcctaagaccaacactggggcagggagggagagacgcagctgcgccctgaacaccactcacgcagctcctggaaggcgctggggtcctgttaacttgctacaggtgattctctacgtctatagcttgaggttagccttgtatcacattacgttctcattagaaacaaaatgaaaatgaaatatttaaagcatgtaccagaacagaattaggcctggaaagcagcagtcttagctgacaaatgggttgtgctatttgactctcacgggtaagtctcctctttcatagtaaaatctcactaaagaatcttccttgactttgacaatttttcagcgtcacaagcaagaaaccaccacctgtgggccccagtgagagactgaacttacaaagagacgatgaccacagcatatggaaaggaagaaggagccaccctctgcaggagccctgaagcccgaagagcaggaggccaggcactcgccttaggacggggccaggaggccaggcgcttgccttaggatggggccaggaggccaggcacttgccttaggacggggccaggaggccacacagtgatccctgtagcagtggccccatgcggccaagacttaagatagcagacaccttccccgatttgtgtctctacttaaaatgtaagatcagctggagaaagcccagtgtgcgcccccaccaagcccacaggactcctgctcctgcagagccgcccccgccccatcaggcccaccgtgctggtgctcagggggctgcatcctgctgggagcacgattccgggtgtttctccaggcgctgagtccgtgcctcctttttcggtcacacatcttatcatttgagtttagcatctacttataaacatcattttcaaatctgaatcctgcttcctcactacaataaaaaggagagacaaaaggaagttgcgcctacaaccttccagaagccctgaggagccgccccatgcctgacgccacatcccacaagctcccgaaatcgcggatggctcagtgacattccagatgctgtcccatcgctcagagtcccgagacacagacatggacaccaagtccatcctttgaggaaggcagacttggcgggaatgtggttttcttcaaaggtgagggggtagggggagctgccagggcccagccggcaggggcaggaggggcggggcttcggcccagggccctgcacgggggtgaccatcagtgccccccatcactgtgacagtcctatccccagtctgcaaaatgccccctggatggggcatcccatgagagccgggccatggagaggctggaatgtgccagactctgaggcacccagggggtcagcctttccctctggttggtccccctgtgccacaccgcagcctgcgcctggccagcttcccgtccctgcgagcacagcctgcgcctggccagcttcccgtccctgctgcgaccccattactaggtcatcgtctcatgccagagaactcgcaggaatcgcatgcaatgtttaacgagaggcagaatgtgggcaccaggtgtgaagcagtccccggctgtggacgggagactccaggctgcgccaggcagggcgccttcccctggaccttgaagggcacccgatgtcctggggccgtgaggggcggggtgcttatccatgtgacaggactcttccagtagcaacagggagggcccagcaaaacccgcagtttgtttcgggccacgttccaacaagtgactcggcggcgtctcccacctgcacactcagtcaggaggctgcagtctcccgtccagccccacagcctgagggattcctgttggttacccagaactgcctgccacaggtgccagggcaagagatgtcactcaattttccagcccccagtcctgtagacatcctgggtgtgcggcacacatcggctcactcacactgaccctctgagccggtgagaactccacaagaagagggccagcgcctcacaagatcaaggcggaacaacgcgtttgtgggatgatgaagacctcataacagacgtgccagtgggttgattactgtgaaattctcaactgtggtttctgtaactt

SEQ ID NO: 1647 - DNA, 2937 bp, Homo sapiens
atatcctcccctgggctgaaggcactcttgtcctccaagcctcccctacagcagtgttcatgggcagctggagcagggctgcctacccattgctactcccaggagctcaggactggctccagacccctggcatctggagcagaagcaacatcaaagcagggattggccaactcccacccctaatgccaaacaggccaggcactgggagcactcagaggcgtgacgaatctcagcctgtctccggctagtgttccctggccagtccgctttgggccctgcctcacaatgacgggctcatcattcagcctcgctcatctgctcatcatttcaggactgctctgttactcggcaggctgcttggcccttcccagcctggatcagaagaagcgtggtggccacaaagcatgctgcctgctgacgcctcctccaccaccactgttcccaccaccattcttcagaggtggccgaagtccgcttctctccccagacatgaagaatctcatgctggaactggagacctcgcagtccccgtgcatgcaaggctcgctaggctcccctgggcctcccggcccccagggtccaccggggcttcctggcaagacaggaccaaagggagaaaagggggagcttggccgaccaggaaggaagggtagacctggccccccaggtgttcctggcatgcctgggcccatcggttggccaggccctgaaggacccaggggtgaaaaaggtgacctgggtatgatgggcttgccagggtcaagaggaccaatgggctccaagggctaccctggatccagaggggaaaagggatccagaggtgaaaagggtgacctgggtcccaaaggagaaaagggtttcccaggatttcctggaatgttggggcagaaaggtgaaatgggtccaaaaggtgaacctgggatagcaggacaccgaggacccacaggaagaccaggaaaacgaggcaagcagggacagaaaggggatagtggagttatgggcccaccaggcaagcctgggccttctggtcaacctggccgtccggggcccccaggccccccacctgcaggacaacttataatgggacccaaaggggaaagaggatttcccgggcctccaggaagatgtctttgtggacccactatgaatgtgaataacccttcctacggggaatctgtgtatgggcccagttccccgcgagttcctgtgatttttgtggtcaacaaccaggaggagcttgagaggctgaacacccaaaacgccattgccttccgcagagaccagagatctctgtacttcaaggacagccttggctggctccccatccagctgacccctttctaccctgtggattacactgcagaccagcacggcacctgtggggatgggctcctgcagcctggggaggagtgtgacgacggtaacagcgatgtgggtgacgactgcatccgctgtcaccgtgcctactgtggagatggtcaccggcatgagggtgtggaggactgtgacggctctgactttggctacctgacatgcgagacctatctccctgggtcatatggagacctgcaatgcacccagtactgctacatcgactccacgccctgccgctacttcacctgagggccgtgaggagaaggtgggctgcgccccacagaactggcagcagcttctccactgtcatcaaactggccatgtcctggccccgtctccaccaacctttgtgtgacaaaaacaaggacaaattcctgctactaagacatgctgttaactcagtctgactggaagaatttaggaccactgcatcctgtcttaatccaaggtactggaaaaccttccacatgcccaacctgagacctgttccccatcgctaccatttggccaaacaaccggctacaatgctcttcctcttctggaatgttgctgacccaggccgtggacttggctgagcactgttagacacacacagacctgcaggctgttttagaatgttttgatctctttggggaatctggagtacaggcctctccgcccctgaccaccgaaacgtgcaggcattctcactcacactgggcagcccgctgtcgggtctctctaggcctatgaaccacaaagcagggaagtgggcacgttctctcggggtggctcacagctttgaacctgccaaaggacccctcgactggccacagcccagcccagcctgacgtggatgtggctgcccaggaaaagacttaactgtgaaaaagtactgagaacccacctgacccaggcttgccccaagcagaggctagagaagaggctcctcttctcagtgtttcccaaaggggcggctcttgtggtttcaaaatctctggcaccatcttgacctcttggctctctctgcactttgccccctgtctcaaaaatgtccctcatgtccatttcctgtccaggagactcatgaggactgtgtgacctgcacaagcccacacctgggcaggctgttggtgtctccttggtccttaggcagatactcccctgagtccccgatctagggccagctgcagagggctctctctaggcagagcgttcctggccagagctctacctctttgcctcctgctgacccctgacagcgtcccgtggcatttctttcatgtctgcatattgcatagccttgtcctcctgtgtgcctgagctcctcccttttcaataagattattagtcgtgcatgtctgtgagctgcctttcatcaccatttttcctgagtagggcttagttttattctggaaagacatctccaaggtggacccggtctcccacaggtgacatcaacctgagggtggcgtctttagagacaggcacatgggcagccctgttcccttcgcctctactgcgaggcctggggagatgttgttttcatgctgcttccaccatcacactggggtttctggatgg

SEQ ID NO: 1648 - DNA, 3292 bp, Homo sapiens
gcacatttgcaacttccatccagggccccattacattttgcctccattgtcacagcctcctaactagcctctttatccccagccttgcttccctctagaccacacccccacaacatctgggtgatatcacaaagttattacctttgagataaagtctacactccttcctaaggttttcaaagccgatatgagccagcatctgcttaaataatgcccactctatccttctcccatgactccaccacacacctggtccatgatgcttcagaaacattgactgcttccctctttgttctaccttaaacacgcttctcgtttcttctggtgaatgcctgctcattttgcaggtctcagatggatcctcgctttcctggagaagtctttcctgactccccagagctggatcagatgcctctctttgtgctcccctaatacgctgtatctgccctattgcagcacacatcacattgaattgcactggcctcttttcttggctgtgtcttctccaaactggaacaccagggccacatctgttttgctcgacataatgtctccagcatctagcaacactaacgaaaacatctgttgaatgaatggtgaatgattgaagcccttcataccacaacatgcagtcttgcggcacagacaggggtcttttctgtattgtgctctcagttgcaacacagaacatcaacaggtactgggcagtgtcttctctatagagcaaaggggcccagtgataaggggatgacttcctcctgccctatagaccagtctcccaaactttctcgactgcatagcctttcctagttctttttttccctcttcctggcttcctccagctttgcaaccttcaagtcaaattagccaagttgaattttatatgagcttagttttatttttcacagtggaagctcctcatctcttcatcaataatagacatcactgtaacccaaagctctgtggcttttccaatagaatcatgttaataaatatctggtgttagtttgctgttgatagcaacatttccaactctttagtgttggccaaaaaaaaaaagaaaaagaaaaaaaaagaaaaagaaaaaaaagaaaaagaaaggagttggcaaaagcagagaagagcaggcatggtttctagcctttctctcaaaatgtgaacccttagtgcccctgaactagctggatgccattctggggatagagcaggttttacagaagcttgtgtatttataatttaggggttttctttaagaaaaagagtataaaactatagatatatggcttgcagttcttgaaagttgcttgtgcaagtgcagtgggggcccttgaaaaccatccttcattcaattaatttgctttccatctctatcataatttttataactggagaaactgaatcctagagtaatggagctgagcatgagtcagcttgagaagctctggttgcccagccctccctgctgcaggacctgcagttcgtcgtgaagctacatggactcgaaacactcacaaaatccccagctcccggtttcattcacaggccatgccagaagggtaaaaacagaaaggtaaaaaataaatatttttcaatgaactcagcctctgtgtgggcaataagctgcttggtttggtaggaagaacgctgggctgggagttgacaggggcagttgttgttcattctattaagcacttaggaaaatagacgtgctgatgctgattttgaaacagattaatattgagccagataacaagtttctactccacattaataggaaaaaaatggtggattctgagctcagtggagctaagaatttaaagaggtaaccagttttgtaagaacagggaagaaaaagccactgcaccgctaatcactgtgaccgccacagccctttgggagcagaaggtcacttctcagaacccctcccaatcactgtgaccaccacagcccttcgggagcagaaggccacttctcagaactcctcccaatcactgtgaccactgcagccatgcaggggcagaaggccacttctcagaacccctcccaatcactgtgatcaccacagctctgtgggagtagaaggtcacttctcagaacccctcccaatcactgtgaccactgcagccctgcgggagcagaaggccacttctcagaaccccacttctcagaaccccctcccagcctcgaagtcaaatctgatgccatcccaaggtcttatacctggattgcctcttcatgccttacctttttgaaggcatctttgagacatcttgatcagtctgtgcctgtttgtgacttcagttttgcctctagactctctttcacggatcagccttgcccaacccggacccctgagtccattctgcaagatcccacttgttcaggatagaggttgagaccttcatttaaggaaagtcctaccgatgataagactccagtttctaaccttgtcatcaaggttgtcatcctgcaagcaggaatgataatgtgtgggggtgggggattgtcacatgatttaaaactccggtcccagctacgtgccttggaggccattcttgctcccgtttcctaacttacaaaattaggggcttcattgactaatgagtggtatatacacaccatggaatactacttagccattaaaaggaatgaagtaatgtcttttgcagcaacttggaggaagctggaggccattagtctttttttttttttgagatggagtctcgctctgtcgcccaggctggagtgcagtggtgcaatctcagctcactgcaagctccacctcctgggttcacgccattctcctgcctcagcctcccgagttgccggggctgcaggtgcccgccaccatgcctggctgattttttgtatttttagtagggacgggttttcaccgtgttggccaggatggtctcgatctcctggcctcgttatccgcctgcctcggcctcccaaggtgctgggattgcgggcatcagccaccgcgcccggcctggaggcctttattctaagtgaagtaacaccagcgtggaaaactaaaaaccatatgttctcactgagaagtgggagctaagctctgagtatacaaaggcatgagtcatagagtggactttagagactcagaaggggaagaatgaaaggggggccagggataaaaaatgacaccttaggtacaatgtatacatacattacttgggtgatgggtgcactaaaatctcagaattcaccgctatgtaattcatccatgtcacaaaaacccacgtgcatcccaaaagctatcacaataaaaatt

SEQ ID NO: 1649 - DNA, 4161 bp, Homo sapiens
gcatttgattttctcctactcagtgtgggtgctgagagacttcccagaagatggcctgaagatatttactgaagatctcccggaagtggagtctctgccacgtgatcgagtcctcggcttcttaatagagaattttaagggtctggctattccttatctggtaaggtattttttggtctgcactaaaaagctttaaacccaggatccaggactgcgtggttctgttatcgggctgttcagatttgggatttatgtcacttggggattggaaggatgagggttatttcagcttcctctgaagaaaaagatcccagtagaccaagctggaaatgctacctaccaaatctaggtaaactacagagggataaaagaataatgttttagaaaaaaaaaattccaaagccacatttggaaaaaaaattccaaagcgaaactcaaaagtgaccacaggacaatcaaataggcttaagtaccaggatgcagatatttaaccacaattacatgagtcgctatgagagtttggaggattatgggacaaaattagtaaaatggagtttagtaattgagaagatggctcctcacgttactgggtcgcattgtgaaacttcctggtggctttagacgagctgtctcttagtcatctttgcagcccgattaggggataatctggatgggacctgttgggccttaaaaatgtgagggaggctgggagaccaggtcacagcctggagaataccagtgacaaagacctacatcttgcctcaggaacacatcatccatgtttgggaggagacaggctctcggttccacaactgcctgatccagctatactgtgagaaggtgcaaggtctgatgaaggagtatctcctgtccttccctgcaggtaccagttcttttaggaagccggttggccccaggccttagaggagagcacagacccaggtgccacgtgtggtgggggtaagcaggccaccctattctctgcccaggtgcgcagaagttctgaagaggagccaggggagctaagtgacacaagcctggcacatgagactcaggagctcttgtctaggtcctggcatctctgagtgtctcagagtcatccctcggggagggtggaaggaacagacctgtctgcaagatgacagctatactgataagaaacaggtttgcccacagagtatttctctattcagcttatttttttaaccgtaagctgatgttttggggccacatggagactatgaactaaaagaagttagcatggaagccaccctggaggccctttctggtcatgtggtgacatccttgaaccccattcccttcatttttcttgatgaccctacattgccacctggcagtgtcctttcattttgagcttggtttcccttaaaggcaaaaccccagtcccagctggagaggaagagggtgagctgggagaataccggcaaaagctcctcatgttcttggagatttccagctactatgatccaggccggctcatctgtgattttccctttgatggcctcttagaagaacgagctctcctgttggggcgcatggggaaacatgaacaagctcttttcatttatgtccacatcttgaaggatacaaggatggctgaggagtactgccacaaacactatgaccgaaacaaagatggcagcaaagatgtgtatctgtccctgcttcggatgtacctgtcgccccccagcattcactgcctggggccaatcaagctggaactactggagccaaaagccaacctccaggccgctctgcaggtcctcgagctacaccacagcaaactggacaccaccaaggccctcaaccttctgccagcaaacactcagatcaatgacatacgcatcttcctggaaaaggtcttggaagaaaatgcacaaaagaaacggttcaatcaagtgctcaagaaccttctccatgcagaattcctgagggtccaggaagagcggattttacaccagcaggtgaagtgcatcatcacagaggagaaggtgtgcatggtgtgtaagaagaagattgggaacagtgcatttgcaagataccccaatggagtggtcgtccattacttctgttccaaagaggtaaacccagctgacacttgagcccagcatcctggggatccagcggatggacagcttggctctcccagagaggtgaaggagcacctggccttaggaatcctggctgccaccaccacaaggctccccatttggacattactggctatcttgtgccctggaacaactctgaattaattagactcatggtctggcattgccagctttttaatgggaaaagagattagttataccttataccattatgttgtgggcaattccagagaattcagtacctgcttggtcaggaggatgtgcaccatcttgcctttgcacaccagtcacctgaacaaggaaacttgtcacaagtgtttgtaaccatggggttgttcatcaagggcttttctattaagtacatgacttcacaaggaccgctcagcatggctcactggagagttccatgagagaacagcactcaagcttctggccgcatggacccgatggctcgcattctgtgtagtgttttacgtctccatggtaactgtgccctgcacccctcggtagccgccctgttagttttcagtctccttttctttctcaccatttatcacttccctcactgccctacccaggctttctctcccacttccctgactctgggaataactaatatttaagcaaggtaagatgagaagcaaggggtctcagttctaggaatacagtgctagttgattgtcaggtatgttgtaaatagaccctctttggccatacactccatgcctagatgcctcggagagcatcattctctgcctaggcaaggccctgcatcccttgcctcaggccgggctgagtgtgactgcagctcctgaggatgggcctgccctgtctggggtatgcgtgatccctagatacatgttcccacagaggtgcctgctccgtcttcgctcaccagacactcaggcaggctggcttagtctttgtgcgtggcgattttgtgctctgggccctttctctttttccagccagtttccattcacttgccttacagcctgccctggccgtcactccccagctttgttcagcaatggtgtggttggagagttgtgctgggatagcgcaggaaggtgggtcccggcaacacgcaggggatgagtggacctggaactgacaatggcgtgctgccaagtgttcctgagaggtgtttaggcacagcagaggggacgcggggggcaagaacagcaggacgctggtttaaaaataactcaccgccaaacctgtggagcagtgtggggcatcctgccagaggtgcacaggctggagtttcaggcactgcaggctgatgacacacagggagagtggccctgcctcctgtcctccccggggtttttgcagactcgaagtctcactgcaccagtgtctttgatggtggtgagggtgggtgatggtgcccagcaccaacagttttagtggcctgtccttgacctgccgtggtcctttgtaaactatggctccatgctgtgtgacagatcaacgtgctgatggtaagtagactaggcttccccaggcatgccgtccgtgggggcctgaagagacagtgagtgccattggccccattcgcagatgtgggagactctgctcaggcctgtgaggctgggcagcccttcaccagagttcggaggagcagtgtgtggcgccacgtcccgactggccatacccacacagaagcagtgctgcccggggcctcatctgggccagcttggactctgcttcctccaggagcagcagggaagctctgggccacctccctggatagcaggaacttgacctgccatgtgtgccctgccttcctggccagctgtgcttgttatcttccattctcacaaactgtctttgaagcaatagaataaagaatgtgtgttttctttcctggtatacatacatgatcccatgctcccaagctccattcttccttccctcaactctctgccctccacagagctatggagaaggctggagatgaaagctttgtagtgaggactgataaagatctcatcactgctccttatagtaaacctaataaagc

SEQ ID NO: 1650 - DNA, 3326 bp, Homo sapiens
gaggaaattcagatctttgtgagagcaaatacagacctgaaatttgatggagttgaatcaggtacttattttttatttccacaagaaagaagagggatttttatttttaaatttttattattattattttttgagacggagtctcattctgtcacccaggctggagtacagtcgtgcgatcttggctcactgcaacctctgcctcccaggtttaggcaattctcatgcctcagcctcccaagtggttgggactgcaaggctcatgccaccacgcctggctggtttttttgtatttttagtggagacagggtttcgccgtggtggtccggctggtctcggaactcctggcctcaggtgacccgcccacgttgggattactggcatgagccactgcgcctggccagaaaggggacttcttatttgaagatagtgtctagctaattaataagcagacatctagggaaaaggtagatactaaggagggaaaagtattaagtagagggaagggtttagagctgcactgtccaaaagtggaatccagaagccactagctacacgtggatatttcaatttaaattaaactgaaattaaaaattcagttattcagttgcattgacaacattccaaggtttagtagccacatgtggatactgactatattttcttttcaacagatgatgtcagagcaactggatatccgtaggcaagaaaataagccttgacataaaccttatatcttataaaattaatacaaaatgatcatggattttttttttaaattggagatattttacccaaaagtctgttgaaataaaaaaaaggagtattttagtgactgcagaaagttatcttggacagtgctggtttagaagcccataagacagagagactatagtatgttaatgaattatttatatattttatttcagtagcttttggggtacaagtggttttttgttaaacggatgaattgtgtagtggtgaagtctgagatttcagtgcacctctcacccaagtagtgtacattgtacctaatatgtagttttctgtccttcaccccctcctatcctaccctcttctgagtctacaatatccattataccactctttatgcctttgtgtacccatagctttgctcccacttataagtgaaaacatactgactttccagtggtatttggttttccattcctgagttacttcactttgaataatggccttcagtaccatccaagttgctgcaaaagacattatctcattttttttatggctgagtagcattccgtggtgtagatataccacattttcttcatctactcatggctgatgggcatttaggttggttccatgtctttgcagttgttaattgtgctgtgaataatgtatgtatgcaggtgtctttttgacataatgacttcttttcctttgtatagatacctggtagtgggatggtcggattgaatggtagatctacttttagttttttgagaaatctccatactgttttccataattgttttaatttataatttacattcccatcagcagtggacaagtgttcccttttcatcacatcgatgccaacatctattgttttcttggctttttaataacggccattctggctggaggaaggcggtatctcattgtggttttaatttgcatttacctgatggttagtgatgttgagcatttttttcatacgtttgtgggccatttgtatttcttcttttgagaagtgtctgttcatgtcatttgcctactttttgatgggattatttgtttttttcttgctgatttgagttccttgtagattctgggtattagtcctttattggatgtatagtttgctaatattttctcccattctgtgggttgtctgtttattgcgatgattatttcttccacagtgcagaatctttttagtttaattaggccccatttatttatttttggttttgttacatttgtttttggggtcttaatcataaattctttgcctagggtgatgtccagaagtttttcctaggttttcctgtaggatttttatggtttcaggtcttttaagtctttaatccatcttgagttgatttttatatgtggtgagagacagggatccagtttcattcttctacgtgtggctgtcctgttttcccagaaccatttattgaatagggtatccttttttcaatttatgtttttgtatgctttgtcaaagatcagctggttgtaagtagttggcttttttcctaggttgtctactctgttctattaatctttgggtagtgtggtcattttcacgatactgagtcgtccagtctgtgagcatgggatgtttccatttgtttgtgtcatctatgatttttttcagcagtgttttgtagttcttcttgtaaagatcttttacctccttgtgtaagtacacttctaggtattttattacttttgttgtagctattgtaaaagggattgagttcttgatttgattcttagcttggttgttgttggtggcggtgtgtagcagtgctaccaatttgtgtacattgcttttgtaacctgaggctgctgattcatttatcaaatctaggagtcggcctggcatggtgactcacgcctgtaatcccagcactgggaggcgaggtgggtggatcacttgaggtcgggaggagttagagaccagcctggccaacatggtgaagccctgtctctactaaaaatacaaaaattagctgggcgtggtggtgggtgcctgtggtctcagctgcttgggaggctgaggcatgagactcatttgaacctggaagccagaggttgcagtgagctgagatcatgccattgcacttcagcctgggtgacagagtgagactgtctccagaaaagaaaaaaaaaaatctaggagtcttttgggtaagtctttagggtttcctaggtatatgatcgtatctttggcaaatagagatagtttgacttcttcttttccaacttaaatgccctttacttctttctcttgtctgattgttctggctaggatttcctgtattaataaattacaagaaatatgtagtagccgcatgaagtggctcacgcctgcaatcccagtaccttgtgggggctgaggagggaggatcgcttgaggccaggagttggagaccagcgtgagcaatagtgcgagaacctgtctctaccaaaaaataaaaataaaaaatttaaccaggcatggtggtacccaccttgagtctcagctacttgggaggattgcttgagcccaggaggttgaggctgcagtgagttatgcactgtagcctgggaaacagcaagaccatgct

SEQ ID NO: 1651 - DNA, 4212 bp, Homo sapiens
ggttttgatttttaagagctgcctcaggaggagcaggggccatttggagaattcctccttgaacctcttggggtcctgcttagtcctcattaaactcaggccaggaaacagcagcacattgccaactggccaaggagaagctacccgggccctgcccagggtctattgggtaaacgtctgtccctagagacagacactcactcattcagtccttttttttttttttccagagatggggtcttgtccaggctggggtgcagtggtgcattcatggctcgctgcgactgctacctcctggattcaagcgatcctcccacttttagcctcttaagcagctgggactgcaggcatatgccatcgtacctacctgatttttctctttttttgtagagatgggggtctcactatgttgcccaggctggtctagaactcctggcctctgggggtcctcccatctcagccttctgatgtgctgggattacaagtgtgagccaccactcctggccccattcattcattcattcattcactcagtcactcatacattcaactgccatttcctgagcacctactgtgtgcccagcactgtgctagatgctgaaggtacaacagtgagccatgcaagcacagcaggggacactaggggaagttctgcaggggacccacacacaagcagcgtcccagccactctgggacacagagacaggctttccctaggaagtggcatctgaggaggcctggaggttgagtagacatcatacaggttggggcgtgagggaagggtgctcctggcagcaggaacagtgtgcacaaaggggctggggagagtggggctgaagggagcacagacaggccagcacttggagggaagttgggggcaggtgcaggccaagctgggtggttggcagagccagatctggagggtacctgactggagctggcgggccaacggggagcctatcactgtacctaggagatggtgaagaggaagggggtggtgctggcagaaaagagaggagtggggggattccagagaatccaggaatggcatttccagggctccacgactgggcactgggggaaaggtctgtttctgatgtctggtcggtctctggcttggatggatagtggcgccatggatggatggtgagctgagaggagggcactcccggggaggatggcgatgggcatcaggtaaacccaggcaggcgtcccaggcaggacttgcctttgcgctcccaggtccccctgcctccctctggctccgtccttctgccctctactcccctctgccctgaggacacctgagagctgaggaaccccactgccctctggaacccacacccggggagggcacaggcgaggtggcacctcccctggccaccaggctgcgcagccaaggccgtttctgatcagcctgcatgcctccctctgggcagatgcagctgccctactgctcttagggggcatctgctggggtccttgccctttcctctgccctggacccctctcaaaaaggggcctacgtgcctcctggagcctccagcctgggctcaactgtggggacctgggagactcagttcccctctctgtcccccgctcgctcccccaggccaccttgaacaaagaatcctgcaggtgctgacagaggctggctccccggtgaaacttgcccagctggtgaaggaatgccaagcacccaagagggagctcaaccaagtcctctaccgaatgaaaaaggagttgaaagtctccctcacatcccctgccacctggtgcttgggcgggactgatcctgaaggcgagggtcctgcagagctggccttgtccagccctggtaactgccaccccggggaggcgggtctgaccctgcagggagcatcctggcaatggacaagcacagatttgagcctgggttcgaatctgaactctgccacatgggagctcacaggtttcctctctctgtgccttggtttctttttctggttgatggagctcacagcagggctgcttggtaggggttgctgagaggaggccctgcgtcaggctcagcccagccctgcacacaggaggtactctgcagaacactaacaattataatagaaaatcatcatgatggagacagcaatgacgccatggtcccaatcacagaacatatgcagtcccaccagccccccttttctagctttacagcccacagccagaaggagctgccatttatcatgcacttaagattagccaggcactgttttggggttcacccagccctcacacaaccccaggaggcaaaggaggctgagccccggagaagttaatcggcaggaagccgcagctgccagggcgcaggcaggatttgaagtcaagtgtgttgaactctggagtctgagtttgcaactaccggcattgccacttacccctagggagctgcccacctttgtggggtggaggcccggtgctgtcttctgtcccccacccctctgacccatctttctttctgcagccgagaggccccagcaacatgcagctacaattccagagacccctggccctcagttcagccaacaacgggaggaagacatctacaggtttctcaaagacaatggtccccagagggccctggtcatcgcccaagcactgggaatgaggacagcaaaagatgtgaaccgagacttgtacaggatgaagagcaggcaccttctggacatggatgagcagtccaaagcatggacgatttaccgcccagaagattctggaagaagagcaaagtcagcctcaattatttaccagcacaatccaatcaacatgatctgccagaatggacccaacagctggatttccattgcaaactccgaagccatccagattggacacgggaacatcattacaagacagacagtctccagggaggacggttccgccggtccacgccacctcccttcaatggcaccaggtgattcctcaacttgggggaccctagttgatccctgggggccccaggacatccacatggagcggtccatactgagacgggtgcagctgggacacagcaatgagatgaggctccacggcgtcccgtccgagggccctgcccacatcccccctggcagccccccagtgttccagtgcagtgggaagcaggcagcagaggagagaggagctgaatcccagaggaagacactgacgtccagatcagccgggcgggatcagtggggcagacccactgcgggatcagtggagcagaaagacgcttcccagacagcacaacagcacgagcggagtctctgccactgctgccggcccagaagcttcgtttgaagcaagaattcccagtccaggaactcaccctgagggggaagccgcccagagaatccacatgaaatcgtgctttctcgaggacgccaccatcggcaacagcaacaaaatgtctatcagcccaggggtggctggcccaggaggagtcgcagggtctggagagggggagccaggggaggacgcaggtcgtcgtcccgcagacacacaatccagaagtcactttcctcgagacattggtcagcccatcactcccagccactcgaagctcacccccaagctggaaactatgactcttggaaacaggagtcacaaagctgcagaaggcagccactatgtggatgaagcctcacacgaggggagctggtggggaggtgggatttagtgcacagcctcacgtggggcttggacacaggctgggggtgggcgcatgctagggagactagcctgctgctctctgcattccttagcgtcttgtttgacctgcttgcttccagacataacctgcatgaatcagttttgggggaatggacctggcatggggatgggttcaggccaggtcttttgatggccaggagtagatgacagggagttgccttggggaacctttggtgtgccaagaggaggtgggtagatgggagtggggctcggtcccccaggcccaggggactctctccactctttcctgggctcggggcatctgcctggagttaccttccatcatggctacctgctgtggtttgaatgtttgagtcccaacaaaattcatatcaaaacataatcccaactgggtgcagtggctcacgcctgtaatcccagcactttgggaggccgaggcgggcggatcaataggtcaggaaatccagaccgtcctggctaacatggtgaaaccccgtctctact

SEQ ID NO: 1652 - DNA, 3418 bp, Homo sapiens
gatataaaaattagctgggcgtgctggcacatgcctgtagtctgagctcctcggacgctgaggctcaagaatcacttgggccttggaggcggaggttgctgtgaactgaagtcatgctactgtactccagcctgggcgacagagggagactctatccaccccccacccccccgcaaaaaaaaaagctaagaaatgggttttattgctcagtgtcaacggttttgtgtgtatattcatcttaagtacaaaacagatattaattccatgccacaactcaggtatacaaaagaatgtaacttaaaaaagttagtaattgaacttaatatctattttaagcccctatttattctactgaattatagacaccaaatttcacctaattcaaggtttctttattcccttttctctggggttatatgtaatgtagaggggactaatggtatgccagtactggtgatatggggtgacgtgattctcatccatctgtgctacaatctgctgaggtgttttcatttgcatctggtctttgtcagatttgtgcaagttcctgctgcaacttttgaccctgttcaggccactggctctcttgtttcctgtccatgctgcactgagcgctttggaatatcattatgtatctcaagctgccttgggtgttggagaagagctttgtgggactgaagacccatttctgcttaaacataatcatgcagacattctgattgcttcattgtaataccttgtacagaaagaactctgtgaaggtctacctcttcagacaatcagggtttagggcaagaggtctcttctgctgtttgattttcaaacctgccttggagtttcttttgttcttcctgctagggaggattcaacttgcatgaaacagaatgcagggtggttttttagggatcccattaatcctgagcgctgttagctttcattctggcttttcttttccctaatgcatcctattgagactttgtctagtgtaggatgtaaaaaagcctgatgcatatagtattccaaatctttagtcttaaacactaatttcagcttttaaaacttggtaccagcactcagaaattttctgttttgctgggcatgccatctgtgatacaatgagtattcctgactaaatgggagggtagtactttgatttttcaaagtattttcccatcatagatataagtacataggaaaatataattccttatttggttttcctttttaatacagagggtttgtaatatagtgtgtttaataacctttaatactagattataaattttttgacagcaagtactaagtcttacttgtttctatatttatcgaagtgatcaactagagggtgcccagtgacttgatttattgtgacattaacaatacaaggttaaacttgctatcatcaggtaaatagggtagtttattaaggctggctggtccagcttccctggtcaactaacactggcctgaaaaataaaataatttgtggttgtcagatactaaattaaatgatctgagtactactgcaacttattaaaggactttattcaatttctagaagaaagaaaacactggattaccaaaggcttttctggtctccccttctattctttaggtcttcccaaaagttatcttctgggaagatgccaatacatgatcacgactctggtgttgaagatgaagatttttctccaagaccaattcctagtcctcatccagtgagtcagaagatttctaagatccaaccatcagttcctgaactttcacttgtgttggatggcaatttcatagaatcaaaccctctgcctactccattggaaatggtgaataatgaaaatcctcctttgattaaccacttggaacacttgaagccattgcaaccccagctttatgatgagaaacacagtccagaagttgaagctggagagccttccttgagaggaataccaaatcagttaaaccaggataaaccagctcttttgagacactgcaaagtaagacagccacctgcctataagaaagggaacccccataccaggaacagtattaaaccatcttctcataatgggccatttcatgatatatttgaaaagctccaaacagtttctgctggaaatgtacaaaacgaagagtatcctataagaccctccacacttaattctaggcagtcttctcttgccccgcagtcccaaccacacgattttgttttttcaccccataattcaggaagaccaatggaacttcagatacctactcccccactgccatcttactgttccacaaacgtttgcaggtgttgtcagcatcatagtcatattcaatatagtccgctaaattcttggcaaggagcaaacacagttggatccattcaagatgtccagtctgaagcccttcaaaagcattcattatttcacccaagtggatgtccagccctgtactgtaatgcattctgttcttcaagtagtcctatagccttgagacctcagggagatatgggcagttgttctccccacagcaatattgaaccatcgcctgtggcaagaccgccttcacatatggacttatgtaacccacagccttgcacagtgtgcatgcacacacccaagactgagtcagataatggaatgatgggactatctccagatgcatatcggttcctcacagaacaagacagacagctaagactacttcaggcacagattcagcgtttgttggaagcacagtctctgatgccctgttcccctaagacaactgctgttgaagacacagtgcaagctggaagacaaatggagttggtttctgtggaagcacagtcttcccctggcttgcacatgagaaaaggtgtaagcattgctgtgagcacaggtgctagcttgttttggaatgcagcaggtgaggatcaagagcctgactctcaaatgaagcaagatgataccaaaatttccagtgaggacatgaatttttctgtcgatattaataatgaagtcacaagtcttccaggtagtgcatcttcattaaaagcagttgatattcccagttttgaagagagcaacattgctgtggaagaagaatttaaccagccactttctgtatccaactcttctctagttgtgagaaaagaacctgatgtacctgtgttctttccaagtggccagctggcagaaagtgtaagcatgtgtttacagactggaccaacagggggtgccagtaacaattctgaaacatcagaggaaccaaaaattgagcatgtaatgcaacccttgcttcatcaaccatcagataaccagaaaatttaccaggatttattgggtcaagtaaaccacctattaaatagttcctccagggaaactgagcagccgtctaccaaagcagtaattatcagtcatgaatgcaccagaacccaaaacgtttaccatac

SEQ ID NO: 1653 - DNA, 3717 bp, Homo sapiens
ataagcggggtttgggaaattttacataacccccaacctgctcatttcttccatggctatattaatgggtttttttgttggtttttagtttttttgtagagatgaggtctcaccatgttgcccaggctggtctcaaactcctgggctcaagcgattcacccgcctcagcctcccaaggtgctgggattacaggtgtgggccactgcgcctggccctatgaatggctttatttatttatttgtttttgagacagagcttctctcttgttgcccaggctggagttcagtggcgccatctcggctcactgcaacctctgcctcctgggttcaggcgattctcccgcctcagcctcctgactagctgggattgcaggtgcccgccacggtgcctggctaatttttttgtatttttagtagagatggggtttcaccgtgttggccaggctggtctcaaactcctgaccaggggtcatccgctcgcctcggcctcccaaagtgctgggattgcgggcgtgagccaccgcgcccagccctatgaatagttttaatgccgcactattgagaggttatgagagctgacgtgccgggcagctgcttgggagaaaggcccagtgtctgggtgacgtcgcgtctccatactgtctcattgaggcttttcctcttttctcatcacagcatcctaatgtcctatgatcacgtggaactcacattcaatgacatgaagaacgtgccagaagccttcaaagggaccaagaaaggcactgtctaccttaccccttaccgggtcatctttctgtccaagggcaaggatgccatgcagtccttcatgatgccattttatctcatgaaagactgtgagatcaagcagcccgtatttggtgcaaactacatcaagggaacagtgaaggcggaagcgggaggtggctgggaaggctctgcttcctacaagttgactttcacggcagggggcgccattgagttcggacagcggatgctccaggtggcatctcaaggtatccaggctccgaagattaggggctaaagacacactaaacatgtgggggtttggtatgagtttgcttccttttcgttttgctttttcaagaactcaagaggtaagtgtttgggcaccaggctgaccaggcctaggagttgggaaggaaagctgtcattggcatcagctctgtcctgtacctcagagactgcgtttccctgcctggggcaggtggatgacgttttgacaaagctgtttggactcaaggacactttactatggcctcataaaacaaacactaaaccaaccattcgactgcggttccgcagccattgaaaatgaccgagggatgggccagcagacatcctccgccagctcactcctaccccagccctgagcctccctcccggcctctgtccaccctccagccttgcccttgacctcccttgccttcccctggctctgacctctcccgtcctctctcatccctgaccaaggtggccccccgagtatgggtggagggtggagtgggatggacagaggatgtctgcggggcacattcctgagacccagtagctcccatctgcaggcagcggggctgccctctccccgccccaaggcaggccacgctcatttctccttcccttgtactcgtagcctccagaggtgaagtccccagtggagcctatggctactcttacatgcccagcggggcctatgtctatcccccgccagtcgccaatggaatgtacccctgccctcctggctacccctatccaccgcccccacctggtgagtgtgtcctttgctgcccccactcccctcatgagcccacctacccaggctccccccaggccagggagactttattccttgagctgcttcaggaccaacgaaggagctggagaggcccccctcacccgggagggggccgcagccgggtgctcaccatgtccttgttactctctcaccgagcagagttctatccaggaccccccatgatggacggggccatgggatacgtgcagcccccaccaccgccctaccctgggcccatggaacctccggtcagcggccccgatgtcccctccactcctgcaggtgagggcccttgggtgctggcagcccttcgggaccagccctctcctccccgatgtcgcacagagagcctcagaatggccagagactgctgagagccgcagatgatggatgacccctggactaccccaggggcccagcagggctgtggcctggtggagcggagctagattctggccccacccccatcccttagctatccatgtgccctgggcggggaaggtcaccctgtgtgcctctcgatcctctcatctacactcagctggtcggtcacagtggcacctggggcattggctcaaggattagatgaggtgagacatgcgatgggcctggaaaggaccgtgccagcgcgtggcatgtgctcaggaaacctcacctgctgctctcattggtggaactggacccccagcaccagctgccccgagccatgggggcccggggtctcttagctgagctcagggggaggagaacttgtcaccgacaccaggtgtgtttgctctcacagccgaagccaaggccgcagaagcagccgccagcgcctattacaacccaggcaatcctcacaacgtctacatgcccacgagccagccgccgccacctccctactacccaccggaagataagaagacccagtaggccctcctgcctccctgcctcccaccctcatctctctaccctacccctcccatcggggctgtgctggggcttggggaggggagggggcgccttgttctccctccaggtctgatcataaacaattaccaggaactagcattgtgggacattagggcccccggcctcgggagaggtgccgcccagcttcccatgccagcccggagcccacagtgctgcccagcgtacctccctcaccgtctggggctcttctgggagcacggagcatcccctgttcctgtttcactctcagcttctcccctcgaagggactctctggccacctcctccaccgcagtccagctccctcagtctggcacccactgctacactcagcctcatgagccacttcagaccagccaggtgtcttcccgggccctgccagaccctgctcacattccctctgctggtctgtgctggtctcagaaggccaccgcgcccgcattccactcagccagggtccagctgcagcccccgccacccttccttcccttccctgtcctgggtcatgttgttgccaccctgtgtgacttttgaagctgtaaaatgagcttccagggcttgggtggcgtcggggcagggccgccgaggctgggaggaagcccttctgccttttgctggtgtttctggaatttgctttccctcacctctcacttccttctagaaggagcttcctgactggaaccagagaatgcatgtctgtccactttgtggctgctgggtggggccgggaacaagggcccctgaccctgtgtgctggccgggacctgccaccagccccccagcctgcttcttccccttaagctttgtgcccctggatgcgctaacattcactcttgtttgtccctggactggccatgaagtgaggagatggttatttaaagagaattccctatttatttgacaaaaaatccagttaatatattaatgtgaaataaaccctgtttgcacctcg

SEQ ID NO: 1654 - DNA, 2795 bp, Homo sapiens
cttccctcccggaaggggcgtggctcttcagaggcggcaaattgcaaggagacgccgccgccttcatgctgccggcgggctgctcgcgccggctggtggccgagctgcagggcgccctggacgcctgcgcacagcgacaattgcaattggagcagagcctgcgcgtttgccgtcggctgctgcatgcctgggaaccaactgggacccgggctttgaagccacctccagggccagaaactaatggagaggacccccttccagcatgcacacccagtccacaagacctcaaagagttggagtttctgacccagacacgagacccacggtgcctgccaagggccaccctgagcgccggctgctgtcagtgggggatgggacccgtgttgggatgggagcccgaacccccaggcctggggcgggcctcagggaccagcaaatggccccatccgctgctcctcaggccccagaagccttcacactcaaggagaaggggtaggtttcccggaccctcactggagggacttctgtctctgcctcctcagaccctggctagcaaggagcctgggatttggggtgacagggaaggcagggcatcgagccctgtggcatacccctgaggctcatgctcagaagctggcagaatgaagcagctgtgtggtggtgtccaggttggcaccatcaggtcagggaagtactggagcctgtcctcctctcttctctgtggctgtccccttatttgcccaggccagaggctccagatgggctctggagggcgtgggatctgctcacagggccccgctcacagggccccctcttctctctaatggggcagcactggacgatgcttctcctatggccactctggaagccctatccaagggggctcatccttggtggggtcgggtgtgggagaggggcaagaagcctcatccctgattgggctctgagcaggaagtgggacttgtagaccccagagcaaggcgatgctcctctgaacacgggcttctccgacaggcacctgctgcggctgcctgcggcattcaggaaagcagcttcccagaactcgaggtgaggctgaggtctttggctggacgggggtaggggagaaccgggaggcatcaccagctcggggacaggttcgagatactttccagtgggtctctttgtcctctttgctgagtgggatcactgtcgatgttaaaaatctgccagccggtcagctttgtccccttgtcctagtcagtgtcctcttggttccctgcggcctctggaggcccctcctggcattcagcagagccagacgcccagcctggggtccccaccctggcccttgcctacctcccaaggcccagcttactggctggaataaccgtgtccctctgtggttcctctgtgcaccccacgtgtgcaccccagcctgtgggcccagctcagttccacacagaccagtgattccacggatgccgccgctgccaaaacccagttcctccagaacatgcagacagcttcaggcgggccccagcccaggctcagtgctgtggaggtggaggcggaggcggggcgcctgcggaaggcctgctcgctgctgagactgcgcatgagggaggagctctcggcaggtcagtgggtcctgggtctgtatcaggaggagtgtggagggccagtgcagggagggtttccagactgccacgggccccacctgctctccctgactcttctgcagcccccatggactggatgcaggagtaccgctgcctgctcacgctggaggggctgcaggccatggtgggccagtgtctgcacaggctgcaggagctgcgtgcagcggtggcggaacagccaccaagaccatgtcctgtggggaggccccccggagcctcgccgtcctgtgggggtagagcggagcctgcatggagcccccagctgcttgtctactccagcacccaggagctgcagaccctggcggccctcaagctgcgagtggctgtgctggaccagcagatccacttggaaaaggtgcttctggaagaggaggtgggggtgcaacagaggtccgcagccttgaggacccgagggtaggggcttgactgctccaccccccaggacccaggaggatgggggcaagcctggggtctgtgtgtgtgggttgggaagtgcatgggtcagacggggctgggacggcaggagggagcctggagcctcagaaggagggaggagggctgaagcatgggggcctcgaagcctgtcccaggattgccccccgcctaggtgcccctgagaccttggccctgccctgccctgcccccaggtcctgatggctgaactcctccccctggtaagcgctgcacagccgcaggggccgccctggctggccctgtgccgggctgtgcacagcctgctctgcgagggaggagcacgtgtccttaccatcctgcgggatgaacctgcagtctgagcctttcccatgctgccctcggcctgttcagatggggattgggggtgtcttccctggcactgtgctcggggacccagagatgcctgtgcttccctgggaaacctggtgaactggaccaggtggcctcactggctcttctcaggacaactaagcctgctggtcagggctggctttcagccttcctaaggctcctggactccagaggccagcggggagcctttcctggctccctctgttttctctcactgtagaccaaagagccgcttgtgtgatattaaagccactttagaaagcaaaaaaaaaaaaaaaaaaaaaaaaaaaaaaaaaaaaaaaaaaaacc

SEQ ID NO: 1655 - DNA, 3473 bp, Homo sapiens
gttattactcgcgactggacctcgcgccgtgttgctctcctcgggccccgagcccgcccagcggtctgcacggcccaggcctgagctgcgggcttctcctgtggggcgcgctgggagtgagctcttccccaaagcccatttcaacgtcccaggtatgactacgacggcagaggccggccgcccaccctcgcccccttccccggccagagcgcctttgccgggagccgacgaccgcggcctgaccccgggccccaccgcctactcccggctcccgcccttcctccacggtcaggggtcacacacagcggacgccccgttctcagccgcccctctgatctctgaatttgggagccagcgtgtccgctggggcgtgcactgccacgggcactgggacccctttgctgctgcggggaggagccccgacggcaggtgggaagacctagcctgcccgcgtccccgctccccagctcctgcgacccgggccgaggctctcagcccctgggcttccccgctccgggtttgagggaggggccgggccttcgggcctgcagacccgccaccgcgcgtgcgcatgcgtcggccgcgagcccccgggtgcaggcctgggcggctccggcccgcgcacttgtccaggcgctgcggctcagcgcgccccaacctccagctcgggcggagagcgggggcgggactgaagcaccgtgttcctcaaagtatcctctcgccgtcggcagccctggcctcgcaaatgctccagcgcgctcaggcgcacgcagagactggcgcggcagcctccgggccaacggcacgcgagcaaagctggttggcgacctgggacacgcagtagaagttggggctgcaccgactcccgccgcttcgggggaggcatgggcccgggcaggcctaggaggaagctgcacagcccgaggcccgggcgggagtggcgggccgcgggcaagggaacgtatatttggaaggggtcaggacctcggctggagtctggctttttatggcgaggaagccgactgggaagggccctctggcgaggctttcctgttgtgccacttttccccggcagcgccgggcgcggggaacgcggggctgcaccggggcgggggagggggctttacccggcggctccgaggactcgactctggggtcgggcccggcgggtaggcctgcccaggagccagctggcaaatgcagcggactgtcacgttattccactgtcaccacttactgtaaatcactgtcctaagcctccgggagaatccgtcgaacctgagaggggggagggggatgggggtgggcgcgcaggaagccccacaggcaccagggactggtgacccaggacatcagcccctcgagttctctctgggaatttctagcacccagactgtccctgactgtagggaccacggtggggcgtcttccttctaagctctccccgggacaccgggcgcgcccccctcgcccctgggttagcgcacactcctccacgcgatgaccagcacagccactgtgaggcccggccttggccgcgtttgtcctttgcgagtgataataataaaaatcattggaattgcaaggaagcccctggccccggctccccagccgctgctgtcctgggtgtcccggctgcggaaagaccccgcagccgggcccgacccacgagtggaacaccgggctgcggacccagccgggcctacaggactggcgcggggctccggggacaggcctcgcagggccctcctgcgcaccgtctgggacgccgattttgccaacttggaggacaatttttgttttcactctaccagcagatttttaaaaatccagtcgccgctgaaacgtgcttcccacccgtccggtttgtttgtagcctttgacgagccccggcacagcctccgggaccaatgacctgcttttataccgaaggaaatgtggaggccttaagagttaatggcgctaaatgtgttggttttcctgctttttccccggggtagctaatgggaggggggatgtccctctctccacttcttccctccccctctctttccatctccctctcccccatctcgggatctaagtcgtcctcaaagctctccaaaaaactccttcctttcccaaccttgagtacagggaaccacataaccaccccgctggagcccctccctggagcctcctccgcctctctaggccctgcctggggtcccaccacttgggtcaagccagaggcctcactgcctggtcctggctcccgctctgatgctcacttgctgggctcacaaattgctctcccatgcccacccaagtagcaccaagctgtgttgacttagggggccaaggagcagcccactgagtcccctcagtaggagcggcctgcagtggcagctgcaggagagggtgggcccgtcaagtcctaatgacacccatggggaccagtgggcttggaggggcccacggacacgccagagaaagaagatgctctttggagaaagggaggcatcctctggaccaggagggggcccgggagaagccccattgaggcttgccaggtcaccctcccaaccccaggcagggagattctgagctgggagcaattccaagccctccccgaggaccacacagacccagcctcttctctctggctgtgtctccctgtgtgagctccagccttctccaagacagggccaggtctatgtgcaaggaaattccagatcctactgcatctcccgtaatacgctcaatatgctgcaaatttgaaatcagtgagggaaaaaatcaagtaaacaaccaaaaaagtaatataaaccagagggtctctttggggccagggtaagatgggaaaggagcacaacaaaggtcttaaattgagccgtacgctccccgcgtcgtactttggtttccaataaggtagatatggtacattttgctcaattttccagtcgtaatcacgttgagaaggttcgtggagaagctgctttcattttcctaaatgggttttggagctggaattcatttacttaagtattgtttctttcccagccgactaggacctggaacctgcctgtccggctgcagtgtggccccaagtctgttgaggcctgggcgcaagctccgcatcagggctgcatccggcccatcccccagatggtgcagtggagggcaggcatgcaggcccctgagctgggctcggagtggggacatcccagagaaactttggggccccacagccttctgtgggggcaggaagggaaaaggatggggaaaagtgacagagacgaagagacagacacaaagacgcacagagcctaatggttatgatgcattcccaccgaaaagggggagatgggataaaagagggtgggaaatcaaggcctcggaagcttcagacaagaagacagagcccccctgcaaaggaagacattcggttaaggtgggagggaaagcatcaataataaaagctctttgcaggg

SEQ ID NO: 1656 - DNA, 1066 bp, Homo sapiens
cccaaggacctgttgtgtgcccagcttggaagacagtggccactcacatccaggtctctgcctggctatttgctccatgaacccatctcagatgcccctgcccccagggagccaggtgacagggtgaggtcaagtgacaagcagtaggtgtgggagaggtttggtggggtcaggcccacatgggcccagccatccactccccttccatctggagttgggggagtctgagctgctcctggccaccccatctgccccaccccatcttttcctggccaccccagctcccaccccatcttctcctggccaccccatctcccaccccatcttctcttgacaccccatctcccaccccatcttctcctggccaccccatctcccaccccatcttctcctggccaccccatcttctcctggccaccccatctcccccaccccatcttctcctggacacccccatctcccaccccatcttttgctacagccagggttagctcagcaggtgaaaaccccgagggtgggtgaaacccctctggggctcagacatgcaaaccttgggcatctctctgtcccagctggccccgccagccggtaggaagtttcccctgagttctcagttttttcttctgaaaaatgaggggttgtatgcaaggttctcctcctggcctgtggtccccagagaagggcaggaaggaaccttagataattctcatatgcatttaacagacgaggaaactgagacccagagccgtcacatcaatacctcatttgatcttcataagagcacctggaggaggggggtggggtgtttgtgtttgtttaaatttttttttgtgaaaaaaatgaagataggcattttgtagacaatctggaagttctggaccggaatccatgatgtagtcagggaagaaatgacccgtgtccagtaaccccaggcctcgagtgtgtggtgtatttttctacataattgtaatcattctatacatacaaattcatgtcttgaccatcatattaatatttggtaagtttctctctctttagagactccacaataaagttttcaacatgg

SEQ ID NO: 1657 - DNA, 2864 bp, Homo sapiens
gattgacttgctgggatctgagtgactagctggatacttctgtgtcacctgagaggataactgtgggggctgtgtggctgagctgtgtctttctggctctgtgtcagcccttgtaccatctctacccgcctgcccgtggtctttgctgtgtatctaacctacttgttcctttgtccatcccatcatgtctctgcaaatgtccagattcctccagcttgtccttaccccagtccaggtgcccacagagtgagcatgtggactcgggcctggtgtgtgtatggtaggagagggcagaagagccccactgtctccctctggtcattcctgatccagctgtacccccccttcttaccccttccttccctagaggaccacaagctggtgttcctacaacagggcccactgttgctcgtggccatgtcacggacttctcagtcagcagcccagctgcggggggagctgctagctgtgcacgcacagatcgtgagcacacttacacgtgcaagtgtcgcccgcatcttcgcacacaagcagaactatgacctccgccgcctgctggctggttcagagcgcacactggaccgacttctggacagtatggagcaggacccaggagccctgctcctgggtgccgtgcgctgtgtgccccttgcccgcccgctgcgagacgcactaggtgcgctcctccgacgttgcacagcgcctggcctggcgctgtcagtgctggcagtaggcggtcgacttataacagcagcccaggagcggaatgtgctggccgagtgccggctggacccagctgacctgcagttgctgctcgactgggtgggtgcaccagcctttgcggcgggtgaggcttgggcacctgtgtgcctgccccgcttcaaccctgatggttttttctacgcctacgtggcccgcctggatgctatgcccgtctgcctgctgctgcttggcacccaacgtgaagccttccatgccatggccgcctgccggcgcctggtcgaagatgggatgcatgcccttggtgccatgcgtgcccttggggaggctgccagcttctctaatgcctcatcagccagtgctcctgcctacagcgtgcaggctgttggggcgccgggcctccggcacttcctgtataagccgctggacatccctgaccaccaccgccaactgccccagtttaccagccctgagctagaggccccctacagcagagaggaggagcggcagcggctgtcggacctgtaccaccgcctgcatgctcgtctccacagcacctcccgacccctgcgcctcatttaccacgtggctgagaaggagacactactggcctgggtgacctccaaattcgagctctatacctgcctcagccctctggtgaccaaggcaggtgcaatcttggtagtgaccaaactcctgcgctgggtgaagaaagaggaggaccggctcttcattcgttacccacccaagtactccacaccaccagccacctctacggaccaagctgcccataatggcttgttcactggactctgatagttggagctcccagaccaggcagtgctgggagcaaccacctttgttttttaccttctgtctaccctggaaatgtgtgtgggggtgtgtctgtggccagtcattgtctccctaagcaatggggcaaggtctgagggcccaccgatgagagagatggtggcagccgccaggcgagcaggctgctttccctgcccagtcatgcacctccccctctggggaaatccttaggcctccctctcccttccctctgtctcatctcctccacttggatgatgctctagcctctgtcagggactgtcccctccaaacttgcttccgtggtctgcctcctagttgaatctcagccctgagtgtccagatctggccaaggtgtctagggtggcccacgggggtgctggaattggcacttcagggccaggctatgcttgggactggcctgagggtattttaaagaaaaaaactacataaaaggcctaaaagtaagacccacaaggatattcctttgcccttcttgtacttttttcatctttaccctgccagaaatgacccgccctcaatgctggctgctgctaacattaatgagaaggtggccttcagtgtccacctgtggaacccaggacacagcacctgactgcacacagtggctgaaatccagcatttttacataggagatgcacttagcctctaagcctcgttttactcatctgtgaaacagagataagtaaccctctctcatgaactctttgatgaggatttgtaaacgaaaacagactcgaactattgtgtaccaccacatagcacatgcacgtctgtcccagactttgacaacctgcacaagacaagcagcctaaagcaggagagacctccctagggttttgtgtgtgtgcacactaccctcactccccaactggccattaccctagttctgcccttgtttgtggagttacagcctcaaggttgtagcatgtgtgctggcaatcagggccgcagtgtgttctgcgcctgcccagagctgactcctgatttaaccgctggcgtaaccgcgggttgcacgcatgcgtgctgaaaagcctttcaccctcacgtggtttcttttttaaccagtcatcaagcgaggctcgcgcgcaggccccgcgttggaaaatggcggggaagctgaaacctctgaatgtggaggcgccagaagctgctgaggaggctgaaggtagtgagggcaagtgggctgcactcctttctctccaaccagggcagaaaggagggaggattcgtcccattacaataatgaaataatgatattctaatttttttaaataaaatgttaagccttt

SEQ ID NO: 1658 - DNA, 2885 bp, Homo sapiens
ttagaggattctgtttggtagttaaaaccgtattaaaatagagagggaagaaattaagcctccttgatggtgaagagattgggaaccaccactccagtgttagaaaatgtcaaatgacagaaggtgggctatattaagtgggaatttccaaaccccaccccctggaaggaaggaatgcttggtgacaagccttagaggagagagatgcttgtctagcccattgcctgtgtgcccaggaagagatgtgcataccttgagatatagagaagactctagcggggagaagccccaggccagcttgtcagcacagggcatcggaggcccccaaccagctccaagttctgaacagcacacagccttcaaaggcttgtactgctgctcatacccagcagaggccttgcaccaggcctccccatgcaaatcagtgtccccgcagcgtaggtaaaggagctctagctgtgctccctatgggggaacagatataccgtgggacactgagagactggaagattgcccaacatttatttactgatctgtgttcaccacagaacctaaggtatttattggtattgtttcaaccagtacgagtgattctttcatttagtggtcatctctgcactccaccacagacttttgggaattacaagatgaaaagggccacatcctcaccctggcatagctcagaaaatttggttggggaagtagggacatagacgtgatcactacaccataatttactaagctgtgagaactggaggtgcatcagtgaccagagtgcatttgagccagaggtagaagatactgtagacaaaaggaacaacatgcgctctaggctgtatcattaggtacaattttctgtccttgggggagtctttttaaccctaagacaaaaattatgaatatagaaagaggccacggttcatctttgcaattctttcaggagaaaatttgctgcaactcactttctaagtttaaaaaaaaaaaagagtaaatgatatgaatatcacctgaaagaatttgaggtctcaaacttgggaggatctttgaacaacaatcttggggaatgcctaacagttcatactcatttcttgatatctacagatggaaactctacagccttacatatatttcttttttcttttaactactttatactcacagaaaatcagtgttcagcacttctaatagcaggtctagtggaagcttgagatcagaacagagttccataaagggaaactgaggacacacaaggcagagcagtacccccttatccatggggacctgtctgactggaagtaagggagaagattctactccacagagaatcagggaaggttaaaactgtgtgtgtttgtgacacttttgctctcttgggcccagatacaggccggaaatcctttgggttctggtgactcaaagtgtggccaaaaggaccagcagctttagcttctctgggagaacatatgagtgcagaatttcaggcctgcaccaagtttttaaacgtctgcattttaacaagctgctcttaatttgcttacgtattaaaatttccagaagcactgttctaggaccatctttaagtgttatccaaaaacatgtaagatcttttttcaaagcaaattctcaagctctaccctagagggattgcttctggttctctggggttggtgcaggaatctacattttcggcaagtgccttagatccttgtgcacactagcatttgaggattgctgccttagatggtgggaaatctgagcaggggagggctgtgggctgaaaatgaaatgatgatgtttaggaactggcacaagcatgcttctgctcctggtgggaagcagtgggacagatccagttgattgtagagaatgcagacctcgtgtcatgctcaagtgtcaccctaatgtaatggctggagacagccacatatgaccctctcattgtccagtcagtaagctcaatcaatgacaggaaccactgactctggtaattaaaaacttattgtggccgggcacagtggctcacgcctgaaatcccagcactttgggaggcaaaggtgggcagatcacctgaggtcaggagttcaagaccagcctggccaacatggtgaaaccccatctctactaaaaatacaaaattagctgggcgtggtggggttgcctataattccagctactcaggaggctaagacaggagaaacacttgaacccaggaggtggaggttgcagtaagctgaggtcgcatcattgcactccagcctgggcaacaagagtgaaactgtctaaaaaacaaacaacaacaaaaacacttattgctgggcaggttctcataagaggccatgggaaagccatgtcctatctcagggacacagggtcatctgggcctctggctaatagaggccaaataatgggactattttccctgtgaaatcctgaaaactaaaaatggtggcgtctttatctgcattagcagaggtaatttgctccttcttgaaatccaaggtcacgtctgctgtctggggattttgatccagggtcagtgtggtttctcctttacaggagagccgagtctcagaaaggtgaggtggtttgtgttggtcattggctacctcagattttagagcagctctaccttgattgtggggttgacctaattttttttgctgtcttctttcttctccaggtgaggaaagaggacttcctgtatatctctatccttttgtttccattactcactttctgtggctgctgctgcagaagccactgctgactgatgtggatacctcaatctttggtttacaaaaagcctaggtgtcttttggcctctctccaggttgatagccatggctcctgaaagaaataaaagatgatcatctttctaaaaaaag

SEQ ID NO: 1659 - DNA, 3222 bp, Homo sapiens
agtgcagctgtgttgtcaggcccagaggctgatgacagagaagcgtgagaaaggacccacagtcagaggaaagggggagaactatggcggattctgcagacatcgaaccatctaaccatttcacgatgcaatgatgcaccagcaacagccacatggccacagtggaccccgcaggcctggccctgcatcccgcctgccccagggtctggggtccatcggatcagcaccgcccaccacaagaaggcagtcatctgccagccaggaggagaggcctcgccagaaaccaatcctgccaacaccctgatcttggacctccagcctccaggactgagaaggaaatgtctgctgttgcagcgcccggctgtgctgctttgctccagcctccccagcagaccagtgtccagtcgttcaagggaatgagcctgtcagtagaggctgggctttgtggtgagccagcagggaaacttctcggggagggaggagggcaaagagaggccagcctggtggggaagaaggggtgggagtggagaagacacagaggccgcacactgagtgaggaggaccaaggcgcaaggcccttttcaccaggctcctgtgctctcaggggagacagggagggtggcattggctagaagggcctgcccagccctggagaaaggagctcacagcagggtcgtgaagagggcagggactgggtggggggtgctaccatgtgacctgctaggaatgaatctgcgttagcgtccgtctggctggagtagagatgcttcagcacgtgtggggctgcacacaggcacgcagggtggaggcccctccactctacagccccacagccagcacctgccttctcacctcttctagtccagggcccgagaagccattagcaaccatcctcacctcagtgtgaatctgcagctctgccgctccagtgtgaaggaggagaaggagagcaggaaggggtgtccaccaccacgtgcccacaggagcaaggctcccaccctcccggggtatgaacttgaacccctgtgacctctgtgggtgcatctgcacagaatgcaggtcccctgtcccccagccaccgcaccacaccagcctagccatcctcgcgagccgccacaggcctgggaccccccagggcactggaacacagcagccccagtgagcacctggagcccgagcctggaccggaggccacggacggcttcgaacaggccagcccccaggaggggcggctcttctacagccagcccggcactgcccgcccagcctcccagatccagaggcagctgctccagagagagtgggggctccagggacttctcccaagcaagatgaaaacacaggtttttgcgtgaaagttccttcttaaatactgacagcaagtttagagcccatctcagatccctggctgtgctccatcagcccaacagccacagacccaaaatttaaagtagccatgcgccctgagagcccaacctgcctggccacgcacaggccagccatggtcccaggagtgggcgtgtgcccccgacaccacacagctgtgtccctcccttccatcccccacccacaggcagagctggaaagatcagcaccacggagagagacgagcatggccagtcccaggcccccaggccgccctgcccacctgccccatccctcccgaactgtcccctcagagctgggtcctgggctgagactccccaaactgtgaccttcaaggcttctcacacagctcacctcagcctcacggcctccagctctgccgctcactgtccccaccagactctccctggacccccacccctccagctgctggggcaggaaatcaagcctccgactgaccctcctggtgggacccctgaagagaaaggcgtgtaagggggactctgtgcacacctgcgtaagggggactctgcacacctgcagaaccgcccatacctggagcccggcctgcagtcaccgtcgagaggagaggcctggagcacagagtggatcctgtggcatggggactttgccgttggcagaacacgcaccctggggggaagggccctggctccatcgtgcccagcaagtacctggcccatatcagggacatatgagtaaaggacagaccacctggtccagtccccacttgcctgaggacagcagcccagacccccatgaatgatgaaagtccttctctgggttgagctgaaacctcccttccttatctcccacccatgtcccccgtccccctgggaaagtctgcggtatccaagggcagccctgggctccttcagctctccagtccccatggtgaaagatccgcagagaggccaaccctcccttgggtcggctatgccaggcgggcatatgagaggccccagacgtctgcaacgctggcccgatgcccatccagtgagccagccccgcgctgcttctatccagggagtctctggatttgggctcctcaggcagcagagcacacatggagacgcggagaccccagagaagaccccacaggactggagcccaaggccaggggctgtgaggggaccccagtgaggggactgcagctgccccagctccacggcgcaactgagcttcagagagcacacgcccgggccgcacacgctgggcctcctggcctcagcttgcctaccctgtgaggacgaccacgaagtccatgacgttccagccgttccgcagttccagttcctgcgtcctccccttgttcctgccagcgggggatggcatcacgcaggcatggtgaatcctggcccttgggacttccctgcgccttgcacagatcgcacagattgtggtagatggtcccttgcaagtgtcatcctgcctgatgcatcaccaccgaggaagcgaccgaagtcagagacagaggatgctgccactccccaagaatgaagccgggcttcattcccatcacctaggctgcagtacaggggcgtgatctcggctcactgcaacctccacctcctggactcaagcaaccctcccattccagcctcccaagtagcaaggactacaggcacacaccaccatgccaggctaatttttgtttgtttgtttttgttgagacggtgtttcaccatgttgcccaggctggcctcgaactcctgagttcaagtgatctgcccaccttggcctctcaaagtgctgggattacaggcacgagccaccacactcagccttcatcatctaataaaatctaaccaaatcctt

SEQ ID NO: 1660 - DNA, 3062 bp, Homo sapiens
acaaacacggcttctcctggtacgggctggttacgccctccagctgcgccccctacacgacgacagacgcgtcccccagcccttctcctgtcctaccacttgtggcggccatgaaggggacccccagctccctggacaccctgatgtggatctaccacttccacagctccaccgaggtggccctccagcccccgcttctgtcttccctggaactctccgtggccgcagcccatgaatatctggagcagaggttcagagagctgaagtccctggagccacccgaaccgaagatgcaggggatgctgcctgccccgaagcccaccctggggctggtgttgagagaagccacagccagcctcgtgagcttcggcaccaccttgttagagatctcagccctgtggctgcagcaggaggcgcggcgactagacggcagcgcgggcccagccccagacggcagggatccgggtgcagcgctgagccgggtagcccaagccgcagggcagggggttcggcaagctggggctgcggtgggcgccagcgcccggctcctagtccagggagcatggctatgcctgtgtggacggggtctgcaggggtctgcctcattcctgcgacagtcgcaacagcagctaggcctcggaatccccggagaaccggtgagctcaggacacggggtgagttaggggccagaggcggcggggctagggaggcactgagccggactgtcccccaagagagctactcgggagacctccaggtgacgtccagcagcagtgaggaggacggcggaccagggactccatccccgtaccagccccacccagcgtccgaataaagcccagggcggggcgagacagccagagcttttcccggggtctctgggttttggccacgcccccacccttcacactggccacacccccgcgggggctccggcttcacctgcccaggagcggcacgctcagagaagtctctgggattttctgggcaatgaggaacaagaagacggtctgggcgagcaggacgttgatggagaccgtgcatttctggccgccggctggagggagagccagtgagagcgggccccgcctcccgggagcgagcccgggtttgggggtaggttcggggccactgcttaccctgcgccggcaggaagtaggcgagcagcaccaggcccgagatgagcacacagggcacgatgatgttaatgacgtagaagagcggcttccggcggatgatgagcgagtagatgacgtcagtctcccctgggccgtcggtggcgccaccgtggtggcggcggatcacccccgggcagaagtcgatggcccactcgccgttctctgcgggacgggggcacggtcagctggctgtcagagcggggcgcccgccgagctgacagcgggctgaagaggaggctgcggctgtctgcaccagggtcatgggccgtcaggatgggggcaattacggacagaaaagggcattctcgttgagggtatggaaagccagaaggcaggactagagtaacaatcgagaatgatttcaggacaggggtaagctaaacccagttgtggaagtcatcctccagtgtcgttggtccggggcaagcccaccgtggaagtcccctctctggaccccgtctagaagcgggtttttctgagcaggcaggggcttcaccagtataggcctctgtgtcgatgtcgatcttgttgatggtcttgccgtcgttgtctacggcaaaagtgaactccacctcttcggcattgtacgtctgagagctgcggagccagggccgggagcccaccccagaagctctgacctgggccccggcctcaggcccggccctggaagctgggatctagcggggccgcgatcccaagcccaccccttcacccaagcccagcccgcacgcctctgttcccatctgtacctccggccgcgctggagcgtcccacccagtgcctacgcctggctccgcctccagcgcgaagccccgccccgagggcggtgcttcccggttggccccgccccataaggcccccccccaacaataatcgtccgggcctcggagtagctcttcccaccggaaaataagcgaacagttctgccaatcgaaggggaagtaggtgacctccactgcgcagacgctgcggtagatggccggaggcagccacgtcacggagccgccctcgtagacgagcacgttggcgtcgtaggccactccgaactggccatcaatactgtgggctcggggaaaccgagctttttgcacaggtctgcaccctctcagagtacccccttccccaaccaagtccagcccgcaccccaggccggcttccctccagcctggcgtctggcccggttctcacttgttttccagcacaatctctggcagccacacgagttctgaagggactcgcagggtttctatacccccaaagtcgtccttgctgtagttgagtcggtaatcctgccaatcctaaggggtgggggatggaaggccgcgtgccctgcatctcccacctggcgctgcctgggaggggtttgggggaaaaggggtgccctggacaagacctcacaccattccccagatttgactcacgattccaatccagacgctagtggtgagagtctcctctttttcattctgcagatgggagatggggatgattgaagtgagatttcagggccagaagtgagctttaggacagagctcagcggttggggccagaagtgggatttttggcttaagatgagggtgggggtagcttaccagtgagatgagattcgtcagggtgaccttgaggctgatggtgacagtatcctcaggctcccgcactggccggcttcctgggtcatagttgttgaagagatggtgataaagacgcagttcctcgttcttccccacacccctgcctgcgatggggtcaagaaggaagggtcattggcaatgaagaggctggagcacctctctcccctctgcctcccctgggtcctcacaggcctctgaggctgtgtactatcagtatctgtctcctaaaccaattatgctgtgcctgggaacg

SEQ ID NO: 1661 - DNA, 3022 bp, Homo sapiens
catatatatatacacacatatatatacacatatgtacatgtatatgtgtatgtgtgtatatgtacacatatatacatgtatatatgtatatacacacacatacatatatacatacacatgtatgtatgtgtgcatatactcacatacatatatacatacacatgtatatgtgtgtgtacacatacatatatgcatacacatgtatatgtgtgtgtacacacacatatatgcatgcacatgtgtgtgtgtgtgtgtacacacgcatacatacacatgtatatgtgtgtgtgtacacacgcatatatacatacacatgtgtgtgtgtgtgtacacacgcatatatacatacacatgtgtatgtgtgtgtacacacgcatatatacatacacatgtatgtgtgtgtgtacacacgcatatatacatacacatgtatgtgtgtgtgtacacacgcatatatacatacacatgtgtatgtgtgtgtacacacgcatatatacatacacatgtatatgtgtgtgtacacacgcatatatacatacacatgtgtgtgtgtgtgtacacacgcatatatacatacacatgtatgtgtgtgtgtgtacacacgcatatatacatacacatgtatgtgtgtgtgtgtacacatgcatatatacatacacatgtatatgtgtgtgtgtacacacgcatatatacatacacatgtatgtgtgtgtgtgtgtacacacgcatatatacatacacgtatgtgtgtgtgtgtacacacgcatatatacatacacaagtatatgtgtgtgtgtgtacacacgcatatatacatacacatgtgtgtgtgtgtgtgtacacctacacatatatgtatacattgtggtgcaggggtacaatcatagctcactgcacccttgaacttcggggcttaagtgatcctgctgcctcagcctcttgagcagctggggcaacaggcatgtgacaccacaccaatattttttttgttgtttttgagacacggtctcactctgtcacttaggttggagtgcagtggcacaatctcagctcactgcaacctctgactcctaggttcaagcaattctcgtgcctcagcctcccaagtagctgggattatagacatgtgccactatgcccagctaagttttgtatttttagttgagatagagttgtgtcgtgttggccaggctggtttcgaatccctgggctgaagtgatccacttgccttggcctcccaaagtgctgggattacatgtgtgagccaccgcgcctagctctaatttttttttttttttaatatttgtagagatgaggtctcgctaatttgcccaggctggtcctgaactcttgggttcaagtaattctcctgcctcagcctctcaaagtgctgggattacaggcatgagacaccgttcccggctggtgggagccacgatctgtcacccaggctggagtgcaatggtgtgatctcagctagctgaaacctctgccttctggattaaaccaattctcctgcctcagcctcctgggtagctgggattacaggtgtataccacaacgcccggctaattttttgtatttttaatagagacagtgtttcaccatgttggccaggctggtctcgaactcctgacctcgtgatctgccctctttggcctcccaaagtcctgggattacaggcatgagccaccatacccagccactcttgattaacttaatggaaatatttacagagattctttctcttctgggttctaacgtcttatctgtaacctctgcaggtaatacattttccttcctgatgatagcatttctatggttgctttcacttgcaaatcctctaatacttatttattccatttctgattggcattagacataattctcaatttttagtgacagcacttcttttaatttacatataaatcgactttgtcttgaaatgtgacattgactagaaggatgaaacttctaacatgctgtagaacatagtttgactggctaatttattatttagaagaagctaatattgccattatgagggacttaggtgactctgaagaaccagtttcatttgtaatatttgcaatgttaaatcacagacattgccaacgtgaaatagtttccatatgctgtgttctcaatacacaccttttccaaagatatcccaagctgtagtcttagaagactgtgatttttcttatttgttctcacgggaatttggggagctatgctggatctccataaaatgagctccagaaagacacgtgtgcacacacacacactcacacatgtaccacaccgcacttgactctgtttatttgggacccatgattatcagaaatgctatttttaacaaatacttctgagaaataatctgaacacttaattggatgcaaaagagtggctatttactattctaccctttaattagcataatcagtgtttccagcagcaaaagcaattggaaaatcgcttgttttgttaggttcattattctcccttagcatagtgtggcatcagcatggctattattcttaaattgcctctttaaaacaagagctggtgcttcttacaggcaattcctaactcttgggttttgtagagggtccaaaactctttagaacctataattcaaggaaaggctccactttggttttgcattttgtctggtctctttgggtgacagaatttatgtcacaaggtgcacatgttttggggaggctcatggacagcccatcgctcttgtgctttggtaggaaatatgtgcagttatggggaaggagttagttactcatctagggaacaattgggtagaaagagatggactccctgtatttgaaattcagaactcaagcttggctctaagtgcttccttgctttgctgtgctccacgggagtcactgagcagaaggaagcgagttgcctgagattcctcaaagcccgcagcccttttggaggttacattgttattctcagagcctttatgatacataataaagacctagcttggaccaac

SEQ ID NO: 1662 - DNA, 4210 bp, Homo sapiens
tatgtacataatgtaaaatatcaaacagcgctgcgcagcttgttataaaaatagttcttaccctcatttgccccaccttggaggcaaccactttcaactcttgtagctgtttttttcaaattctacccccaaatcttgaaataacctgcatataatgctacttcttgatttttttggttttatgaattttttattgtttccattaaggaagacaaaggtttggctctttccccttcatcccctacctcatgacccacacacttcccacatcttcccagggtcattggatcattattttggttagaccaatatttaccatttacttatattattttttgagacggggtctccccctgttgcccaggctggagtgcagtggcgtgatcgggctcactgcagccttggcctacaggctcaagcggtcctcctgcttcagcctcctaatagctgggaccgcatgcgggtaccatcacacctggctgatttttaaaattttggtagagacggggtctccctttgtttcccgggctggtctcgaactcctgggctcgggtgctcctcttgcttcagcctcccaacatgttgggattacaggtgtgagccagcacatccagccaccatttacattattagttctgatccatttagaccagcatttctcaaagggagagggttccatggaatacatttccacaagacatcagtaggggtaggtctgtggtccaatacgtttgggaaacaccaaattaaagttaaaacaatggttccttcctgtattactcatcagagcctttaataggcaaatgtgcctcaggagggacatggggatgtggaggttcaatgcttccccaactttggccatgaaacccttcttgtacagatcttcagtggaacacagtttgggaaacactgttttagactcatcatctcacaggtaaagattttgcaaagttagagactctttagcttctgtcagataatccctcatttggagaatgagaagataatgaaactgggaaggaatggaactgctcgtggggctgagagcagtggctcgcgcctgtaatcccagcacttcgggaggctgatgtgggcagatcacctgaggttgggagttcgagaccagcctggccaacatggtgaaaccccgtctctactaaaaatacaaaaagattggccaggcatggtggtgggcacctgtggtcccagctactcgggaggctggggcgggagaatcgcttgagcctgggaggcggtggttgcagtgagccaagattgcctcactgtactccagcctgggcaacagagcaaactccatctcaaaacaaaacaaaaaaaccaaaaatcaaaacttaaaaaacaaaaaactgctggtgggctgggtgtggtggctcactcctgtagtcccagcactctgggaggattgcatgagcccaggagtttgaggctgcagggagctatgatggtgccactgcactccagcttgggcatcagagtgagaccttatctcaaaaataaataaacaaagggaaggaaaggaagaagaaaatgaaaaactgctggtggatgaacaacagcctcattcagttgacttctttttccttcaccaagactgactggagctctcccgtgtcagctcgtagcacagaaggtgaagagcctgctgtggggccagggcttcccagattacgtggccccttttggaaattcccaggcccaggacatgctggactgggtgcccatccacttcatcacccagtcattcaacaggaaggtaaaggggagaaggtacaggttccatgctagtggtctctgtcttccaggtggtgtgatgaaggcagccggggaagccagctgttaaggaggcaggatggccctgagtgggagcgcgggctgaatcttggatactgatttttgccccttgttagcaatgttgcctctggccagcagttttatggctttgagcctctgttttcatctgtgaaatgggaacgctagtcaatagtgagtgaatggcctcatggggcattgagagggttaagtgaggtaacatttatgtggccctgggcatggtgcctagtggtccataaatgggaacctctgtgatcctcatcctgttgctaccatcattgtgattgctggtgtcccccgagccctctccaggcatctcatgacacgatagacgaatgttgagtcctgtatcaaagactgagactgacttccgtgcatgtggctctcccacccattgtcccctgttctacacaggcagcccacacctgagagttttcactgccacagttcctcacagagttgaatggaagttgacaatcctacagataggttcccggtcacacatgatgcttctgcccacctttttcttttgtcttagcagtcagcgtgtgggccggccctggcccaggggcgtgctctccatcttagcctgtaattgcccagcttgttcttgtcacgctttcttcagacctctcattatccgctccgaatatttctagcatgggcataacgggggtgaggactgctcacttctctgatccgccctcccaccgaggccagcagagacccgggattactcagtccctgccgttccactgcgaagtcttgactcaactctcccaccagaaccaggcacatcgcttctggcttcttggccatgggtgaagatgtgcagttattactcctcctcagaagggaagacatgggttgggaggagaggcagcagtgcgcacatggcaccgtcagggtctgtgctgatcctgggtgctcagagggcctgcagcagcaggttttgtaccaactctgccggcaacccaggtagaggcaggcacgagcacctgctaaactcagtttccaccagctgcatgctgcattgtctcctaagaacagggtattcgagaggattgttcagtctgcatggtttttaaaggcggttccaagctaaggaattccatcagtgcttttttcgcagccaccaaatttagcaggcctgtgaggttttcatatcctgaagagatgtattttaaagcttttttttttttaatgaaaaaatgtcagacacacacaaaagtagaatagtaccatggagtccccacgtacccagcctgcagcttcaacagttaccacatttgccaaccggagagactgccaaggcaggaaaaagccctggaaagcccacggcccctttttcccttgggtcagaggccttagagctggctgccaaagcagccaaccaaaggggcagctcagctccttcgtggcaccagcagtgttcctgatgcagttgaagagttgatgtctttgacaacatacggacactgcctggattacctagatgtcacatcttaattgccaattgatgaaattaggtaaatgaaaagaaagcacttaaatttccccttagagcattttaacatgacatgcaatcaggttttgtctgctaataattatttctccccctccatccctcccaccagtttctttcctgaagtctgtgaggccgctataaacaggtagatgaagttagagcagttatggccctaaatggtccacagttgggtattggcactaccgcagtttcaggtgatgtcggcatttttagaaataggaggagatggaaaaattacgcttcagctgttaaaaatatttttggggcattgagttactttaaaacacgtatattctctaagctgtttttatctgaacttgtagagtctattcattttcttgttcagaacattttgtaatatgtgaaaccttttataattaaaactctgaactgcagattaagtctgacttgcagttttgtaagattctaatggattaacagcattttgttttgcaggattcctgccagctcccaggggctttggttatagaagtgaagtggactaaatacggatccctgctgaatccacaggccaaaatagtcaatgtaactgcaaatctaatttcatcctcctttcctgaggccaactcaggaaatgaaaggacgattcttatttccactgcggttacttttgtggatgtgtctgcacctgcagaggcaggcttcagagctccaccagccatcaatgccaggctgccctttaacttcttcttcccgtttgtttgacaatgctcagatgcatcagttccttaatatacacgtgaaatttgaaaactgtacattcggtgagattaaattttatatacaact

SEQ ID NO: 1663 - DNA, 3179 bp, Homo sapiens
gttaacttaaaaacataatttataaatttagacaaagaaagaggagactttatttcttataaagggttatagccttcaaagtggctatctcacaggctgggaagctcagccttcagcagaagcccagagacaagcattttgaaggcagaggggttgggatggagctttatgctgaacaggttgactaaatatacatattcaacaggttacaggaggagctatgaatattcatgagggtggtcctgacacatgcgtattgaacaaacatacatgtaacacataacccatgttcactttgggatggagacttaacatttcaatgtattacagttaggccctacacatcaaaaggtcatttcaggacacaaaagctcacaagtacacaatctctgtaaactagtcagaaccagtccatggttggtggtcttatcaggaaaaagttactaaaattagtctctcatccaatgaaagctgtagttatggctggtggaacaggggttcagttgggcagagtctatgagcaggatgatttgcaattgtttaaatattgcttatcttgaggccagtgcttgtttagctgctggagaaaaagaaaatccttgtggcagttagagcatagtttcttccttaggtgtaggagtacatgacttcccctcacctggcatggccttaggtcctgtttataattcggtatcttattgccacaaagaatctgttctgtgagtcatgtgatctctattggaacattaatgctgctcagttgttgtgtctaaaccataaaagagaaggggagtataattaggcatgtctgacctctcatcatagctgggaactaagtctttaaatttttttctggggtcctcttggccacaagggggtccatttagtcagtgggggccttgggatttatttttagtttacattgctaagtgacagagctttgcttctttcactctgaggttagtggtctctctgctgtgccacattgtcttccccagaagctcaaactggatgcccagccctcagtgtacaaactcaagtatgcaagaaatacatctttattcttttatgaatatacctaatttatatgttggaaggtgtcagcaatgaatttgatcactttggtatttctctacctttaaagatatgtttacatttggggtgggatgaaggtttggtggaggggaaggtggtcaggttgggccaaggtattgggaaatccatttgttcctcatgtcagctgtttgaggaggcaccaacccagatgtccacagttccttctggccttcctttaccgatactgatgcacctgtgcctccttcctgtgtgcatggcccatttgtgcccagcatctccctgctattttggggccactccagggtctgggaagttctgtaggcttataacatacagtcattcttctccccagcttgctgcctccctgagacacagaggtagagaagtaggaaaggacctaccgtacccaggcctttgccctctcacttttcatccatccttcttcccaccagtggagggatgtgtttctagtcttccagggaagctcctctctcctcaaaccattttcttccaaatactttggctttattccaaatcctctctagtcctctgagatttttttataacacaaaacacaacttacagaagttgtgttgttgttttgctgtttatcttgtcacattatttctctaccttgaggcaacaggacaagggcctgctgtccagcgcacggaggcagggaggaaggggtaggggaatactaagaaaaaaaaatttctcgatcacatgtgtaccacatttaactttatcaggtccttgtgaggtgagtatctgtgtgtcattgttctgaaactaacagtgaggggacaaagcattgataggagttcttacaatatatttgggaactcgcaggtgagggcctctcctgcctgattggtctttcaatgtaccatcccaacccacccacctcaatccccatggcttgatcctgctgtctcggtgatcaagctttcagttaagaattgggtgataatgagctagttaatccaatttaaaaaaaaagaattaggatctgggctcagaagccccacagctgtgaaagcctggccgtagattactagtcttctagatgtagaaaagatttttcctttctctggctatttaagtctttatcagtcaccctgcctcagttatcaacacacaccctagagtaaatctgttccctgggggtggaaatagaaggggcatgtcattgtacatccacactgatgaaaggaaaggaaacattaagatggcttaagtggaaaggtcacatacggcttgtactagagagacaccatgctaaagcaaaacatcgtttaaaaaaattctgacttatcatgtgctcagaaatgctcaaatgggtacaaccatcaccaagggtgggatgggagggcagggggaaaaaaatatgaagcatcaaaaaaaattctgatttgtatttgtgaaattcaatagtaaccctattcattaactggattttaaaatcatttcaaagcacattcggctttcaaaagatgtttgtttaaataatacagttggcttttggtcaaaaaatgaagtttcggtaatgcatagtaacaactgtagtgtaattactggccacaaaataccaggtgccagaccaacccttttcgaaccatttaagagaaccaagccaagcaaaaatgcccagcctagccttacccagaagttcaaaagctcagcctttgtcaccaggaaaaaattaattcaaagagcaaagctgaactttctcacgtttgagtgaaagagggctgcttaaagagagtttaaaccaagccaggttcaaggtttttttcttttctttctttttagatttctgacttcatatctgtgggatccacacagtggggaggtactggccttggaatccatggttccccagctatcattttactttagaattacagtgttctctgttagtgtcaagggaatgaacctgacgagaaaagaccaaacataggactgttacagggaagaaaaatatgaaaagacctaaagatgcacgtcctcattatatgtaaggaatctatttcctagaatcctataaaaagctcaagtgaatttgcttcagttaataaatgtgatttaattataatgat

SEQ ID NO: 1664 - DNA, 3192 bp, Homo sapiens
actcacaggttgggtttgatcgcatgcgtgtcggagaggagagagcagagagagacacaggaacaagaacagcaaagggtagagcagacctgcgccaggggcgcacaacggccgtgtccacctcccggccccaagatggtgcttcccacaggcagccacgcgtagcagccagagacagctccagacatgtggctcttcttcgggatcactggattgctgacggcagccctctcaggtcatccatctccagccccacctgaccagctcaacaccagcagtgcagagagtgagctctgggagccaggggagcggcttccggtccgtctgacaaacgggagcagcagctgcagcgggacggtggaggtgcggctcgaggcgtcctgggagcccgcgtgcggggcggaggccgcctctcagctcgccccgccgacccctgagctgccgcccccgcctgcagccgggaacaccagcgtagcagctaatgccactctggccggggcgcccgccctcctgtgcagcggcgccgagtggcggctctgcgaggtggtggagcacgcgtgccgcagcgacgggaggcgggcccgtgtcacctgtgcagagaaccgcgcgctgcgcctggtggacggtggcggcgcctgcgccggccgcgtggagatgctggagcatggcgagtggggatcagtgtgcgatgacacttgggacctggaggacgcccacgtggtgtgcaggcaattgggctgcggctgggcagtccaggccctgcccggcttgcacttcacgcccggccgcgggcctatccaccgggaccaggtgaactgctcgggggccgaagcttacctgtgggactgcccggggctgccaggacaacactactgcggccacaaagaggacgcgggcgcggtgtgctcagagcaccagtcctggcgcctgacagggggcgctgaccgctgcgaggggcaggtggaggtacacttccgaggggtctggaacacagtgtgtgacagtgagtggtacccatcggaggccaaggtgctctgccagtccttgggctgtggaactgcggttgagaggcccaaggggctgccccactccttgtccggcaggatgtactactcatgcaatggggaggagctcaccctctccaactgctcctggcggttcaacaactccaacctctgcagccagtcgctggcagccagggtcctctgctcagcttcccggagtttgcacaatctgtccactcccgaagtccctgcaagtgttcagacagtcactatagaatcttctgtgacagtgaaaatagagaacaaggaatctcgggagctaatgctcctcatcccctccatcgttctgggaattctcctccttggctccctcatcttcatagccttcatcctcttgagaattaaaggaaaatatgccctccccgtaatggtgaaccaccagcacctacccaccaccatcccggcagggagcaatagctatcaaccggtccccatcaccatccccaaagaagttttcatgctgcccatccaggtccaggccccgccccctgaggactcagactctggctcggactcagactatgagcactatgacttcagcgcccagcctcctgtggccctgaccaccttctacaattcccagcggcatcgggtcacagatgaggaggtccagcaaagcaggttccagatgccacccttggaggaaggacttgaagagttgcatgcctcccacatcccaactgccaaccctggacactgcattacagacccgccatccctgggccctcagtatcacccgaggagcaacagtgagtcgagcacctcttcaggggaggattactgcaatagtcccaaaagcaagctgcctccatggaacccccaggtgttttcttcagagaggagttccttcctggagcagcccccaaacttggagctggccggcacccagccagccttttcagcagggcccccggctgatgacagctccagcacctcatccggggagtggtaccagaacttccagccaccaccccagcccccttcggaggagcagtttggctgtccagggtcccccagccctcagcctgactccaccgacaacgatgactacgatgacatcagcgcagcctaggccggggccagccgaggctcctggggtggctctgaccctctggcctcctgctctacctactccctttcccctttcccaccctcccagctcacctccccatggagctgagaggcctcccttggagagatggaaggaaacgttataccttgtacccctcggtctccatccatcaagccaaacctgctgccacagccctcccccggccccagatagcagccccagggaggatgctgcctccaagaggtgtgagccctctgtctcggggatgaacaagcagagtctgggctacctcttgacagctggtggaggggagttggggagctggactggatgactctggaggccccttccaaacctcaagtgtccggcgctttgattgcctgagtttctgacacttcagggcccagaggtcctgcgaggggcagaactggacccccatgccagtgctgctgcaggagggcccatatactagggtctgctgagctgttgtcactgatcggtgggcgctgggggggtagggtagcacaccagctgtcccaggctttgctccgggcggtaactgcacttgggcagggaatatagccttcctgggcacaactagctgacaatgacaggttgactgtgtacccccaaccaaggagctggggcccaaggccagtcctgccccagagacactccaagtccgccaggggcacagaccagttctgcagtgactgtccctggacaatgggtctttattctgagtttcctatggtttacaaagagggccccagcccagccccaccacagatcccagagataggggcccagtctccatgggggcaaggagcatagagatgttttccaggaaggggctcagaagctgcactaggccccgagtccccatgtgtctccttgaattgatgaggatgctcctgggagggatgcgtgactatgtggtgttgcacccggggctgcaaacgtctccgtgcagcccccagagagaggcccatgggctcagaccaggctttgttgtcctgctctgagtatcctgagattaaactgaattgctgaatg

SEQ ID NO: 1665 - DNA, 2922 bp, Homo sapiens
gggctaacaatggactttgtgtaattgttctaatgctaataagcaactgctgggacacttcccgtggtaaattcctttgtggtttcggtggtcttatcacacatgggcctcaccaagatgctgggctggagagaacgctcactgtgactctcccaggcttcatgaaattcccccgacttagaagcagttctgggcaaaaacacactgttagaggaggatttgctttcttcacggtgctttcgcaagtgaggcctcagatctgcgctcttcaaatcctacataaagagcccagaggttctccccatgctcagcactgggctcgctttcctgcagaggaaacgatggcaggtagagcttaagaatgacgttctcccccaggtcggccgagagtgctgtgccatgaattgatagtggcaggacgagaatagtagagacacgggtgattaaacagtgatgccagacagtgtggggacagcagcatctttccatttgaagggtctacatataccacacagaccacctatacctcagctgtcttcccaccctaccctgctctggggcttgaccacgtggtctgagccttagggtcagttccatgcactaggcgcttgcacaggccaacagcaacctcttccattggctccaactttagaatacacccgaagccttgcttctccaaacagctcattgtgaaataacagcgcctcactaggtgtcgctttacagcaatgatgtatgactgaaggctacctctatcataaatgtagcatcctcaactacattcttttcaaagtgttcttggaaacccatcatcatcccttgagggtggattttttttctttttggagaaagccaaagccactgggctcatgcctggtgcatgacatgggtaatcagtttcaggtttcaaatcatgtgttttcacacacattcgtttgtcttttccttgcgtgtttccttacttggtacaaatagtttgaacaataacagccacaattcactggttaacttaaatatattaggcaggtgttagaataaggagctgcaatgtacggactactttgaaggacaacagtatttggatgtataacgttcaacatattcattttaaagtaatgttactgctatatccttaggcacggtaagctgaggatattgtgagtgttcgcaaatatacagagaccaccctcacatgtagaaccgtagaatcctagagttggggaaaagaggtcttgggggacatctggacggctcccctccagagtagaaccttctcccccgtgggttccacattgctctgtggggggcagagcatggtacggtgtgcaagaaacaagctctccaagtcacctccccccatacctccatctccttatctggaaaaggaggggagtcatccacatgacctttgaaagcatttccagctcagttactttggccaaggccagtggggctgtgctgccgtaatggttatgggctgttggctcatctcttttgtttcatggctgctggctcctgcctctcctcctttgcaacctcatctagatattttttgatcctcttccctcatgagcccagaacttctcaaggccatgtaagcaccacttgaccattctttcccactcgttttttacttctcattctattctttcttcctgcctccatgtttttttgctggtttgttttcttttctgtctttcttcattccactagctcaaatgccttggggatggagacggggtagagaaagaaataagaataagccaactctgtcctcccaggcccagcagttctgacctctgcccagctgtcacccacccacagcattccttgactctgccccacttcctgtccaatctccacttgttctatttctcaaggtctagccctctcagctcgatgcctgaggttgggaatgagagtctctgcccttctgaatgtttcatcctgtgactcaccctgatgtaccaccgagaggcctcttgaatcttcatcaagcacaatgcccttctcactagctgtccctcttcattcagccctgaaggttaagtgacctggtgccaattcgatgtacctcttgagaatcacaagctgcttctcccaccgtcctgcaacatgcacggagtcactctgcaatccagcagcaattcagataatgccaaagttctttatagaacacagaacgttgtccagacccagttagcactgactgtacagcctcatgaccaaagccgggccagagccttgtgtgtaagtgaggagggtccagccagcatgaaaaatgaaggacaatgaactacatcggaagtatttctggggtgaggtattgtttttggacatttataagactactgagacgtatgcaatattaagtggcttgtgtctgagtagggaaagatgatgacatatttcccaaaagaaaatgtggtttagagggaggagaaaggcagcacagctctggaaaaaaaatgtttccattcctggcctttctacagcacaattgcacacctcgaggtctttctagaagtcaaacatgtttcctcctcaggaactgaaagtatttctgtccaagtgtgagagactttgagggagtttgatttcttttattattcattgtgttctaagccataatatttaattttctgtcatcttctagctatatctttgatcacttggggatttaaatagaagaactcctctcattttatcctcaagaaaatatgaaatatcatttgctttatagagcaaatatttccatgttacagatatctgttgattagattatttctctactgtatatacctagaagtaatttcattaacataaaaattttatactttaaatacatttgtggataaatttgcttttcattctattcacatgcaagaaaactaaaccgattgaataaaatcattttatcat

SEQ ID NO: 1666 - DNA, 2967 bp, Homo sapiens
aaaatactttctgagagtcctggacctcctgtgcaagaacatgaaacacctgtggttcttcctcctgctggtggcagctcccagatgggtcctgtcccaggtgcagctgcaggagtcgggcccaggactggtgaagccttcacagaccctgtccctcacctgcactgtctctggtgactccatcagcagtggtgcttactactggagctgggtccgccagtacccagggaagagcctggagtatattgggtacatctcttacagtgggaacacccactaccacccgtccctcaagagtcgacttaccatgtcagtcgacacatctaacaaccagttctccctgaagttgacgtctgtgactgccgctgacacggccgtatattattgtgcgagatctttgactatgtttgggggagttgtcgctgtaccctccttctttgactactggggccagggaaccctggtcaccgtctcctcagcctccaccaagggcccatcggtcttccccctggcgccctgctccaggagcacctccgagagcacagcggccctgggctgcctggtcaaggactacttccccgaaccggtgacggtgtcgtggaactcaggcgctctgaccagcggcgtgcacaccttcccggctgtcctacagtcctcaggactctactccctcagcagcgtggtgaccgtgacctccagcaacttcggcacccagacctacacctgcaacgtagatcacaagcccagcaacaccaaggtggacaagacagttgagcgcaaatgttgtgtcgagtgcccaccgtgcccagcaccacctgtggcaggaccgtcagtcttcctcttccccccaaaacccaaggacaccctcatgatctcccggacccctgaggtcacgtgcgtggtggtggacgtgagccacgaagaccccgaggtccagttcaactggtacgtggacggcatggaggtgcataatgccaagacaaagccacgggaggagcagttcaacagcacgttccgtgtggtcagcgtcctcaccgtcgtgcaccaggactggctgaacggcaaggagtacaagtgcaaggtctccaacaaaggcctcccagcccccatcgagaaaaccatctccaaaaccaaagggcagccccgagaaccacaggtgtacaccctgcccccatcccgggaggagatgaccaagaaccaggtcagcctgacctgcctggtcaaaggcttctaccccagcgacatcgccgtggagtgggagagcaatgggcagccggagaacaactacaagaccacacctcccatgctggactccgacggctccttcttcctctacagcaagctcaccgtggacaagagcaggtggcagcaggggaacgtcttctcatgctccgtgatgcatgaggctctgcacaaccactacacacagaagagcctctccctgtctccggagctgcaactggaggagagctgtgcggaggcgcaggacggggagctggacgggctgtggaccaccatcaccatcttcatcacactcttcctgctaagcgtgtgctacagtgccaccatcaccttcttcaaggtgaagtggatcttctcctcagtggtggacctgaagcagaccatcgtccccgactacagaaacatgatcaggcagggggcctagggccaccctctgtggggtgtccagggccgcccagaccccacacaggagccgtgggccatgctcagccatcacccaggccacacctgcccccgacctcaccgccctcaaccccatggctctctggcctcgcagtcgccctctgaccctgacacgccccccttccagaccctgtgcatagcaggtctaccccagacctccgctgcttggtgcatgcagggcgctgggggccaggtgtcccctcagcaggacgtccctgccctccggcccgccaggtgctcacacaaaaggaggtagtgaccagcatcccaggcccccactcaggcaggacctcgccctggagccaaccctgtccacgccagcctcctgaacacaggcgtggtttccagatgcccgcagccagccagcctccattccaggcactcccgtgaactcctgacatgaggaatgaggttgttctgatttcaagcaaagaacgctgctctctggctcctgggaacagtctcagtgccagcaccaccccttggctgcctgcccacactgctggattctcgggtggaactcgacccgcagggacagccagccccagagtccgcactggggagagaaggggccaggcccaggacactgccacctaccacccactcgagtccaccgagatcactcggagaagagcctgggccatgtggccgctgcaggagccccacggtgcaagggtgaggatagcccaaggaagggctgggcatctgcccagacaggcctcccacagaaggctggtgaccaggtcccaggcgggcaagactcagccttggtggggcctgaggacagaggaggcccaggagcatcggggagagaggtggagggacaccgggagagccaggagcgtggacacagccagaactcatcacagaggctggcgtccagccccgggtcacgtgcagcaggaacaagcagccactctgggggcaccaggtggagaggcaagacgacaaagagggtgcccgtgttcttgtgaaagcggggctgctggccacgagtgctggacagaggcccccacactctgctgcccccatcacgccgttccgtgactgtcacgcagaatccgcagacaggaagggagactcgagcgggagtgcggccagcgcctgcctcagctgtcagggaggactcccgggctcactcgaaggaggtgccaccatttcagctttggtagcttttcttcttcttttaaattttctaaagctcattaattgtctttgatgtttcttttgtgatgacaataaaatatcctttttaagtcttgt

SEQ ID NO: 1667 - DNA, 3582 bp, Homo sapiens
gttcaaaacttagatgtgtgtttgaattgccagcagagaatgataaaccagtaagtatatttatagttaacaataattgaatgttgtaagctgatacttatttgcataccatttcctgcaaaaccaagatttaagttggcaaattattttcctttatctgatgtctgaagaaaaaaaataagctgaagtcagcaaataagtgggcctttatgaaatcagcctttgaaaaactcacggaaagacaactgattgacagtgtttccccttgaaaagtgcagcccgatggccattgagatgtcataaatcctgaagagcttctgtggcctggcaaaggtataggttgctgttaaacagtgggtgagagtgaaagagggaacaatttgccctttatcatggtggttgatggacgtgtgggaagctttcaagttctcttgttttacaaagtgccctgtcagcctccctaccccttttaccctatctacctcttcaatcaaaggctgcttttagatgaggatttctcagcctcaacactgttgatatttggggcaaatccttggtggtggtggaggttgccctgtgtactgtagggtgttttattaatagcagcatccctggcttctgccctcttgatactggtagtacttcccagttgtgacaactaaaaatgtctccagatattgccacatgtgtcctggagggcaatatcaacccccattgagagtgatcccattccggtgttgcctgtggggagaaggaaggagccccatcctctaggctgtccactgtgagcgctttacctttcatgatcctcacttgtgaccagttgaagaaaggagactgtatctgaaatgctaatttggacttcccttcaacctagtcgaaaacattttaatttttataaaaacaccaaaactgtgaaagcatgcagcatgtgaaactatcctagccattaatagctggagttgggaaacagaagtaccctgaaatgttgtgttaacagtatctatgttggtctgcgcgagtgctgttgatttgtgtcaaaagtacctgagattttatttctgctgaatcatataccactatcattaccctgtttctttaagtggatagtggtcattttttccctcttcccagtgtacatcctgtcacaggaaggtcagtttggaagctgtgaaagcagtattctggcctcagctctgtgataggttgacttggtagcctggggccttgcttcacagggcctactcttctcatctggaaaatgatgggtagagctagattccaggccaatgatcgtcagttactctttccctgacaagctgcgtgcttccatgccctccctccactgactggctctcatcccctgtaaatctcaagaggggatcatagctgaatcttggcaggggaaataaggggagtatgtaacttcccaagattgaaacattgcagacactgagtttgtttcaccttcatcccagcttccaaatgctaagttggtaaagtaattcgccctctgtctaatgctctcccaagcctcctaaccccactaaggcaatcctagggatgttcacatctttgtggtgacagtaatttgtggctaataattcctgagcttgcacaattacagtatgctgatttttccgtggcaggaatttgatagtgcaatatacacagccctttttctctttctttgaagtattagtctcagccgaacttcattatttgcccttatccataatttctagggccctgttgctttagattattaagatatcagataaagtaatccatttttaaaataaatgtgacattttacagtgtggatgaaatgctaccacgtttggtgtttgctgagaactactttactttgcataaaaaagtccattattacatggtcggtgacacttaggctttcatttgtttttgaacagcatgatgtagaaataaataaaattatatccacaactgcatcaaagacagaaacaccaatagtgtctaagtctctgagttcttctttggatgacaccgaagttaagaaggttatggaagaatgtaagaggctgcaaggtgaagttcagaggctacgggaggagaacaagcagttcaaggaagaagatggactgcggatgaggaagacagtgcagagcaacagccccatttcagcattagccccaactgggaaggaagaaggccttagcacccggctcttggctctggtggttttgttctttatcgttggtgtaattattgggaagattgccttgtagaggtagcatgcacaggatggtaaattggattggtggatccaccatatcatgggatttaaatttatcataaccatgtgtaaaaagaaattaatgtatgatgacatctcacaggtcttgcctttaaattacccctccctgcacacacatacacagatacacacacacaaatataatgtaacgatcttttagaaagttaaaaatgtatagtaactgattgagggggaaaagaatgatctttattaatgacaagggaaaccatgagtaatgccacaatggcatattgtaaatgtcattttaaacattggtaggccttggtacatgatgctggattacctctcttaaaatgacacccttcctcgcctgttggtgctggcccttggggagctggagcccagcatgctggggagtgcggtcagctccacacagtagtccccacgtggcccactcccggcccaggctgctttccgtgtcttcagttctgtccaagccatcagctccttgggactgatgaacagagtcagaagcccaaaggaattgcactgtggcagcatcagacgtactcgtcataagtgagaggcgtgtgttgactgattgacccagcgctttggaaataaatggcagtgctttgttcacttaaagggaccaagctaaatttgtattggttcatgtagtgaagtcaaactgctattcagagatgtttaatgcatatttaacttatttaatgtatttcatctcatgttttcttattgtcacaagagtacagttaatgctgcgtgctgctgaactctgttgggtgaactggtattgctgctggagggctgtgggctcctctgtctctggagagtctggtcatgtggaggtggggtttattgggatgctggagaagagctgccaggaagtgttttttctgggtcagtaaataacaactgtcatagggagggaaattctcagtagtgacagtcaactctaggttaccttttttaatgaagagtagtcagtcttctagattgttcttataccacctctcaaccattactcacacttccagcgcccaggtccaagtctgagcctgacctccccttggggacctagcctggagtcaggacaaatggatcgggctgcagagggttagaagcgagggcaccagcagttgtgggtggggagcaagggaagagagaaactcttcagcgaatccttctagtactagttgagagtttgactgtgaattaattttatgccataaaagaccaacccagttctgtttgactatgtagcatcttggaaagaaaaattataataaagccccaaaattaag

SEQ ID NO: 1668 - DNA, 3111 bp, Homo sapiens
tcactcgcgcgttaggaggctcgggtcgttgtggtgcgctgtcttcccgcttgcgtcagggacctgcccgactcagtggccgccatggcatcagatgaaggcaaactttttgttggagggctgagttttgacaccaatgagcagtcgctggagcaggtcttctcaaagtacggacagatctctgaagtggtggttgtgaaagacagggagacccagagatctcggggatttgggtttgtcacctttgagaacattgacgacgctaaggatgccatgatggccatgaatgggaaggtgaggatcagggtgctgagcaggagtctcgtctcgaggatggggcacccacctgctaacccgtcccgccctctgtctccagtctgtagatggacggcagatccgagtagaccaggcaggaggaggggaccgaggctatggggggaaccggttcgagtccaggagtgggggctacggaggctccagagactactatagcagccggagtcagagtggtggctacagtgaccggagctcgggcgggtcctacagagacagttacgacagttacggtaagtcacactccgagggcgccacgctgctgtggcctgcggtgggagctcggttcaccttggtgccctctccaagcactttaggctggacactcagaccttgtcactgtgcttgcccagaagaggcgcatctgtcctctcagagccatttctatcgcaggacgcaaaagccaaatgagactgaccaaaaaggcaagggagagcgagggcccgctgggcagtcagctaggtgcatgtgtggccgcaggccagcctccctcggctgtggggggtggttgctccccggccgcaggccgcgccctggtctggcctctggggtgaagctgcctcttgttgcttcggtgcctttacactgtgcctgcttcttgtcctcagctacacacaacgagtaaaaacccttcctgctcaagatcgtccttccaatggctgtgtgtttaaagattgtgggagcttcgctgaacgttaatgtgtagtaaatgcacctccttgtattcccactttcgtagtcatttcggttctgatcttgtcaaacccagcctgaccgcttctgacgccgggatggcctcgttactagacttttctttttaaggaagtgctgtttttttttgagggttttcaaaacattttgaaaagcatttacttttttgaccacgagccatgagttttcaaaaaaatcgggggttgtgtgggtttttggtttttgttttagtttttggttgcgttgccttttttttttagtggggttggccccatgaagtgggtgccccactcacttctctgagatcgaacggactgtgaatccgctctttgtcggaagctgagcaagctgtggcttttttccaactccgtgtgacgtttctgagtgtagtgtggtaggaccccggcgggtgtggcagcaactgccctggagccccagcccctgcgtccatctgtgctgtgcgccccacagtagacgtgcagacgtccctgagaggttcttgaagatgtttatttatattgtccttttttactggaagacgtacgcatactccatcgatgttgtatttgcagtggctgaggaattcttgtacgcagttttctttggctttacgaagccgattaaaagaccgtgtgaaatgaaccttgctctgacaattcccttgcattgcaccacacactccttgctgcgggctcctgcagccagacctgagcagagagagaaggtggagaagcagcgggtctgcaagccttccctggggcctgcagagctagaaagggaggcccagcagactggcgctggtcagggtaggggagccaggcgggggacgggagcgggcagctcaggcctcagggcagccctgggaggcttctggcagtggtggccagagggctggactgtgcgggcagcttagcagggacagtggacgtgcacctgacgctgacctggactgcctcagtctagaagcaggccagagagcagaggcacgtggcatcccagggcgacctcagacggccagccggttagctagttctgctgttgcttcacgagttctgagcattctctgctagcctatggaagctgcagccctcggaggacagaagtgttgtgcgcccaacagaaccctctgagacgcaagctgctcccttggctagctcatatgtggaaatagccctgtaattcgaggtaactccttccgctcgtgtccacatccctcttgttgagagctcactgaaagtcatgtgcccggggaatgttcctgtgactgttttttgtttttccttttttttttaactttgtttttgtttttttcaattaagctggaactaaagtcaggcccagccattacgctccccacgtgcagccaggtgcagcctgggcccagtcatgcctggctcatagatgaaatcccttaagcaggattgaagaccagtgaacgcccccgccttttggattttttgctcaattgaccgtcttttccagacctctttaagtcacactcttaacttagctttctctgatgtctgttgccgccattagtttttttctagagcccacactggcccacatagctccatcccatacgggtagctggctccagctgcgccaaggtgcagacccgccctgggcatgctggcctgtgacggagcctgaggtcacagccccctgactagcctgagaccttcctaggggctgtggctgtttccggggaggccgggaggggcagctgtgagccctgtggaggacgttgggagtaacgctgctttgctttggcaggttgaaggggcccggccaggactcggggaagggtggcctgagagcagcgatgacctctggggtcactgtcccaggagggacttcacctggaacaagagctggaggcagccgcttgcccaggaggcttgtcccctgaggcgcttcgccagtgaggtgcgggctcagggcctcgagtctctcctggagcacgggctgcggtgcgccggcagcttacggggcggccagtccttgcccacaacgatgtggagccctgtgaaagtcggattcgaataaagggccacgtgtgcaccc

SEQ ID NO: 1669 - DNA, 2732 bp, Homo sapiens
tctgggcttcacctggggtcctgcttattcccgtgcctacctggcactgccccctgtccccccttaaacctttcaggcccctgcacttctgttgcctcctttttcaggtctgctctgtttagtcagctttcctagctgctctagtctctcacacagaaaagccagcgaagttggttcagcccgaggcattcacacaagcacctgcctgtggtgtcaaatggatgtgtgaggcttggtctccagcagctctgcctggtgaagctgcagggttggccggtctgtgtgcttatgtgttaggcaggccgcctagttgcacactcttccgaggggcaccatttacttggcgttccctgggactgctggctctcaggcatggagtctgtttcaggagtgtggcgtcaccacttccatgtgctggttctgctctcctgggagtcaagcagggccagtcgctgatcaagcctccctggtctctcctaggactactatggaattccctttgctgcacccacagcgcttgccagccgagatgggagcctagctaataatccatatccaggtgagtttgctcaatggatgaggagtagcccggggccggcctagcgcgaactccaggagctgggaagcagcaacagcaagctgagagaggcctcttagtagcctgtgctgagctggcagccagacctgttcctgtttgcagaagccagtgtggcctttctctggttggaggaagggcagtggctggagtcagtgctctttcctaggtgatgtcacaaagtttggccgtggggactctgcatcccctgcacccgctaccacaccagctcagccacagcagagccaatcacagacccaccacacagcccagcagcccttcgtgaatcctgcactgccacctggctatagctacactggtcttccctactacacaggcatgcccagtgccttccagtatggccccatcatgtttgtgagtatttcagagggtgtgactgtgtctcctggccttgggttgctggcaggtggaaacctgggacctatcttccagcagggagggagggttgtgattccactccgtcttacctggtcttcagaaactgttcaggctggggacaaggtcacttttcccctgctgtgtttagatccagcatgtgttgcactaatgaaaacacaggtcccctgtggttgtgggtatgtcacctgctgccttaggctctggcaggggtacctgaccagcctcagcttgcctcttcctacactaatacctcatctgcttgcccccccaggtccctccagcctcagccaagcaacatggggtgaacctcagcactcccacacctcccttccagcaggccagtggttatggccagcacggctacagtacaggtgaggggtacttcccagacagagacacatggggttagacaggcttgcctggctcacacttgcctcttgtaccctgccacgctaggttatgacgacctgacccaggggacagcagcaggagactactccaaaggtggctatgctggatcatcgcaggcaccaaacaagtctgcaggttctgggcctggcaaaggtagtgtttacctctcctttccaggataaggcctggagtggtgggctcctgcctgatcccctctcaggcagggcaacccctgagtgatcctggaggtggggagcctggagctgggaacaactgctgtggggaacaactgcttttcctcctaggagtatcagtgtcttcaagcaccactggtctacctgatatgactggttctgtctacaataagacacagacttttgacaagcagggatttcatgcagggacgcctccacctttcagcctgccctcggtcttgggctccactgggcccctggcctcgggagcggcccctggctatgcacccccaccattcctacacatcttgccagcccaccagcagccccactcacagctgctgcaccaccaccttccgcaggatgcacagagtggctcgggtcagcgcagccagcccagctccctgcagcccaagtctcaagcctccaaacctgcctacggcaactctccatactggacaaactaaacccagaagagaggggtgggctggggcaaggcttatcctgggcaggagagaacacacgagcacgtatttgggagcccagtgccctttcctagaattcccgacatgtgtcagccatgcctctgtggggagtctgcctcccagactggctactgtatgtaatgtatttatgtatgtatttgtaaatgtgatagaagtctgggggggagttgggggatggcggcagatgttagccaggtctgccctccccattcaagccccttctccactgtagcaaaataagcacccccaccccatctgccttcaggtcttcttcacagcctgcactgcccagtgggccactaggggcagtctctggaagggctggttcaaggctgtttgggtataggggtcaggtaccaatgaagaatcacgacttgtctcactcctttggaaattgttttctttcctgtgtaattacttcatacctctgtttttgagaaactgttccgtttgtcatctgtcatggtctccttccaccaaatcttcatctgggaatagcagcggtatccctccacccaagtatggccacctgtttgtcttcatatagaacaggggcttctggtctggtcatgtccctagagacttactagagactggctgaccatg

SEQ ID NO: 1670 - DNA, 3310 bp, Homo sapiens
gattagtgatttatgtaaaactgaagggataaccatttctactgctgtataccacttggataaccttataaagccacttaatagggaataatggggctggaaatttaatgggaatagatttaaagtgcttgtgggataagaaacatgatattgctctcttttgttctctttcagttcaaaacaggaagtgcctaggtatgcagaaatgcaaatcaagccagctatatttttggtgtgttttgtgtgtgtttagattttcacacatcagcaatactgtaagaacactatgtggccaggcacagtggctcacgcttataatcccagccctttgggaggccaaggtgggaggattgcttgagccctgggagttcaagaccagcctgggcaacatagtaagaccctgtctgtacaaaaagtgaaaaaaaaaaaaatggatgggcatgatggcatatgctgtggttccagctaatctggacgtggaggtgggaggaggatcacttaagttcaggaatttttggtggctgcagtgagctgtgaccatgccactgcactccagcttgggcaacagagccagaccctgtctccaaaaaaagaatactattatgtgaataatccaccagattcaactaaaaaatggccatgatgttttaaaagtacatatatacacacatatagatttaaagattactttcaactttctaagaaattagtagatctttagaaaatcattgtgcgtatgtgcatatgtgcattgtttgtgctggtcccaccttcaaggagaaaatatttcaagatcctgatgcttacttaagaggttgtatgtgtttaccatggaaaggaccttggaaatcatctcctaattctgacttcattatttatttattttgatgaagcaaatggtgcccagattgaaacaggagtgtaagccacagccaccaagtgccagtgcccaggctaacacttttctccattaactctggaaaccttatttcctttttgtaccacgtatttacagtgtttggtagttatgaattgagtgaattatcccaaggttggagatatcttggtactcacttgtaagtggagaaacactaataggaaaatattctgggaatctggtaaggaagtatgagtgaatttatcatatttaacctttgttcaaatacattaagccctttcttccctttgtcattctcaaactggatcgacatgataggaggagaaattttatcaactaaaaggggttgtgtcaataagtgtttatgatacctctaaacttaggccttaaaacaacacaatctgtgatctgacagttctgtaggttagatgttcaacatgagtctcatctggctaaaaccatcatgttagcaaagctgcatttgtctctgaaggttctttctaggggagaatcccccttgctttttctgacttctaaaaactgaccacattccttgacttgtggccctctttttccatcctcaaagcctgtaacatagcacctctgaccatttttttcatagtcattctgtgtctggccccagctgggaaaagttctccaattggtaaggacctacttgattagatatgacccacctgaataacctcacatactcttcctatctcaaaactcttaacttaatcctatctgcaaagtccgttttgtcatatacagtagcatgttcataggtttcaagcatttggacatggtcctctttgggaggcattacgctgcctgtgacagtgctcttctgatacattttcagtgatcttctagacataacaatcctggtcctgggaacatgcatggcggggacctaaataagtctattttttaagaggccctaccctttgcatagatcctaatcttggggtaaaggaaagtttgagatttcactccacctttttttttggtgctggtatttccactgtgggaaagatcattcggatttaacaaccacatgaagctcctggattatctggggcatgtttgctgattcccaaggaagcttgatctttttgatggagcacttgagctggtaagttattagaagctgagctataattttccttggcattggtcatttttgtctaatcttttatttttttgtttttttgttttgttttgttttgttttgagatggagtctcactgtgtcccccgggctggagtgcagtggtgcgatctcggctcactgcggcctccgcctcctgggttcaagcgattctcctccctaagccttcagagtggctgggactgcaggcgtgcaccaccatgcccgggtagctttttgtggtttcagtagagacagggtttcaccatgctggccaggctgatctcgaactcctgaccttgtgatccacccacctcggcctccaaaagtgctgggattacaggcatgagccaccgcgcctggcctgtctaatcttttatttaatgcatctaggctcctcctttcttccttcatggtttcctttttcctacttccctatctcgttttctttccttcttttcatttacagagaaatggtgttagaaatgaatgagaggagtgagcaaagaaagatgagggaaaaatagatgtgttaaggagtatacgcataaagaaaagaggccaggaggaaaagctgttcaccccgactcccatcctaatcttgcgtagtctttcgtttcctgagaatagttaggtcagaagttacagtagaaactttcatggaatacacaaaagggaattaagtaaggaaacttgtgaccgatgctatgggaaaggacatgtttgtcaaagcaataggttcttcctgagttagagaacaattatggttcccccatggaaatgtttatctgacgcaatgagaaccaggtcagacacaattcagaaatgaaatgaataaaattattctaagatctagatgggaggagacataagggattgtgttttgatagtcttaagggtgcacttacatttacatccccaaattccctcttccatgaaccactgtgcactgtacattgccacattaatgctaactgtgccaattagattaactaatattggtcaaaaaagaatatcctggccgggcgcggtggctcacgcctgtgatcccggcgctttgggaggccgaggcgggtcacggtgaaaccccgtctctactgaaaatacaacaattagctgggcgtggtggtgggcacctgtagtcccagctgcttgggaggctgagacaggagaatcgcttgaacccgtgaggcggaggttgcagtgagccaagatcgcaccactgtgttccagccctagcgacagagtgagactcttatc

SEQ ID NO: 1671 - DNA, 3092 bp, Homo sapiens
gaggggcttctctgctcaggccctgggtccctggagagccctgctactggttgggcctggggctcatctgcctgtgcctcccacagtccagccttttacacctggaagatgatctcatccccagggtttatagagggacctgcactggccagacctcctgcatcaggtcagcatacactctcagtggccaggtggctgtgcactgagaaggccttgcaggctgcaagcctctggacgctgctgataagaaacaggccgggagcccctgggaggcgtgctgacacctggcagggcattgctggtgtcagaggcatgcagggctcctccagctgctgggttcctggttctgtgcctctgcacagggctctcaatcccagccacgcttgcacagaagccctctttccatctgaggtcccataaggcctctccacgttgccacagcccagttccagtccacagcctagtccagatttatgcactgaacagcgagaggctcagtcagaagggacagagcacgactgtggggtgtgaaaatgggcacctcaagcagagggaaggcaagagacgggagggtgggcatgggaaagggccagaaatggccttactgcccagtgtggtgagataggggatggagcaagtctctgaaattgtcccattcccaaaagcagctaaagtttgggggagggtggcagagtaattgtattaaggagggcaattacactgcccagggctctgccaggccctttccgctgtcattgtgtgaagttcaccctgaaattctccagcaggagagacaatctgtattttactaatggcaaaatagaggcccagagtggcccagaaagttgcccaaggccacaagtggctgtctccagggctatcagaaatcaaccccagatctgtccctaacccagggaggcccatagctgtggcttgtagacctgggctcccttctagctcctctgccacaatctaatttgaccttgtccttcccaactgtagtcgtgaacacccgactgagtgtcttgtaggatttctgtcgggtacccaagaattcagacaggctgacaggaattcctgttctcctctttaagccttcggtgtgctggccccagggtctaacgtgaatcatgcactaaagaggacgcgtccccctgaggccttcagcccatttcagagccacagggtcagactgtaagcctagtcatgagtgtacagagccagacaccagccaggctgctggtgagctcagcagctttctgcttggagacactgggaatgtgaccttcctgcctgagccagggggtccctgagtgagaaggagccctgaggctggaggagagagagtgcatctcagtgagaacccgctggagaccaggcttggatgggtggctcggccccagccaggcagcccaactgcaactgcagggctgtggaggcatcagtgagatgtcctgccaggacaggcataggctgtctgtctcttcactgcagagtgaagaggccacctgtgtgctgcacacccctcttccaggatctcccctcagacagggattcactcaggccctcagcaggttgggggatcctgacagaacaagtgcatgcctctttctccatccatgcccggccttgtggggaggctatttccaaactcctcttcctgacttggcattgtgggctgacctggggagtgtgataagcttgggaagttgagcctgttcgactggagtgtgctgtcgaatttagaggagctgctgccttttaaaaccttgtttaatttcaattttttttttttttgttttaaattgagtgtgtctccctgctccatcaccttcagttccctgaataaattttttgatagtgtcctcttccaggccatccccactacacactcatacaaaatgaagcagcaagattcagaggctcttgagccagactctacctcccatccatgctgaggattctccttcaccttatcctgtggatgctcattatgttaatgggaaacaatattactcgatccatcaggaaagtcaggctaatagtgtgaaaccttactctctgtcaccaaatatagtgcccacaatgatataacagcctttccagtgagtttaattcgtgtgcgcaccacagcaggaggccctttagaaactggatctcatttcattctcacaacacccaggaaggctcatagctgccattcatatagatcttaaggtgggccagacactgttgcaactacattccacaaactaatatatgccataactctattgtggggaggaagctagaggccctacaaagttaggtaacctacccagggtcacacagccaggaagcaataggaccagcatccaacagcctggctccaggtccttactgtgtgcatggccacctctctgtcctgcaaggtagtcactactgtctacatttcgcagctgtggacaccgaggctctgatgtttagtgataggctcaacgtggcagggttgttgagtggtagagccgtgctatgaactgacctgaggggaggctcatgtctgagtcaggttccgctccatatcctgctgtcagagtgatctatggaaacacctgcaagtgcatctctctacagtgcaaaatgtcacacagcaggtccttgaataacgtcatttcattcaacgtcatctgaacactgagtgagaaatgacgatgctgatcagaaaaaaatccattcccggctgaggtcactgtctgtgtggagttggtgtgtgaaaaatggcattggtattttttttagtaattgcatcgaatctgcagatggctttgggtagtacaatcactttagcaatattaactcatccagtttgtgtaaatgggatgtctttccatttgtttgtgtcctcttcaatttctttcatcagtgttttatagttttccttgttgagatctttcacctccttggataaatttatttctaggtatttcttttgtagttattgttaatgggattgcctttttgatttcttttccagctgttattattggtgctactgaattttgtatgttgatttaacaatttttttaaattataataaagatgagcatctcact

SEQ ID NO: 1672 - DNA, 3196 bp, Homo sapiens
atctccgcgaccaggaaacgggaaagatggcgacggctccgcgacgttgaggccgcgttgggcggttcagactcagggtgatggcaggagagctggctgacaaaaaggaccgtgatgcatcaccttccaaggaggaaaggaagcgatcacggactcctgacagagagcgggatagagaccgggaccggaagtcttccccatctaaagatagaaagcggcatcgttcaagggatagacgtcgaggaggcagccgttctcgctctcgttcccgttccaaatctgcagaaagagaacgacggcacaaagaacgagaacgagataaggagcgggatcggaataagaaggaccgagatcgaggaaaagactttaaatctcggaaggacagagactctaagaaggatgaagaggatgaacatggtgataagaagcctaaggcccagccattatccctggaggagcttctggccaagaaaaaggctgaggaagaagctgaggctaagcccaagttcctctctaaagcagaacgagaggctgaagctctaaagcgacggcagcaggaggtggaagagcggcagaggatgcttgaagaagagaggaagaaaaggaaacagttccaagacttgggcaggaagatgttggaagatcctcaggaacgggaacgtcgggaacgcagggagaggatggaacgggagaccaatggaaatgaggatgaggaagggcggcagaagatccgggaagagaaggataagagcaaggaactgcatgccattaaggagcgttacctgggtggcatcaaaaagcggcgccgaacgagacatctcaatgaccggaaatttgtttttgagtgggatgcatctgaggacacatccattgactacaaccccctgtacaaagaacggcaccaggtgcagttgttagggcgaggcttcattgcaggcattgacctcaagcagcagaagcgagagcagtcacgtttctatggagacctaatggagaagaggcgaaccctggaagaaaaggagcaggaggaggcaagactccgcaaacttcgtaagaaggaagccaagcagcgctgggatgatcgtcattggtctcagaaaaagttagatgagatgacggacagggactggcggatcttccgtgaggactacagcatcaccaccaaaggtggcaagatccccaatcccatccgatcctggaaagactcttctctgcccccacacatcttggaggtcattgataagtgtggctacaaggaaccaacacctatccagcgtcaggcaattcccattgggctacagaatcgtgacatcattggtgtggctgagactggcagtggcaagacagcagccttcctcatccctctgctggtctggatcaccacacttcccaaaattgacaggatcgaagagtcagaccaaggcccttatgccatcatcctggctcccacccgtgagttggctcaacagattgaggaagagaccatcaagtttgggaaaccgctaggtatccgcactgtggctgtcattggtggcatctccagagaagaccagggcttcaggctgcgcatgggttgtgagattgtgattgctacccctgggcgtttgattgatgtgctggagaaccgctacctggtgctgagccgctgtacctatgtggttctggatgaggcagataggatgattgacatgggctttgagccagatgtccagaagatcctggagcacatgcctgtcagcaaccagaagccagacacggatgaggctgaggaccctgagaagatgctggccaactttgagtcgggaaaacataagtaccgccaaacagtcatgttcacggccaccatgcccccagcggtggagcgtctggccaggagctatcttcggcgacctgctgtggtgtacattggctccgcaggcaagccccatgagcgtgtggaacagaaggtcttcctcatgtcagagtcagaaaagaggaaaaagctgctggcaatcttggagcaaggctttgacccacccatcattatttttgtcaaccagaagaagggctgcgacgtgttggccaaatccctggagaagatggggtacaatgcttgcacactgcacggtggaaaaggccaggagcagcgagagtttgcgttgtccaacctcaaggctggggccaaggatattttggtggctacagatgtggctggtcgtggtattgacatccaagatgtgtctatggttgtcaactatgatatggccaaaaatattgaagattacatccaccgcattggccgcacgggacgagcaggcaagagtggggtggccatcaccttcctcacaaaagaggactctgctgtgttctacgagctgaagcaagctatcctggaaagcccagtgtcttcctgtccccccgaactagccaaccacccagatgcccagcataagccaggcaccatcctcaccaagaagcgccgggaagagaccatctttgcctgacacagcactcttcctgtgggctgagggcatctccaaagctgcctgatgcctgtttttcagaaccctcacatccctctttccaggtcctcactcttgggatatgggggcttaggaaaacaatccaactccctagcccagaccctcaggtcaggaggcctgcgtgtggggctgcaaaaggagaggacgacgctgtcggaggcagggagagcaaattaccacagcttcttggcccagttctgcccttctttgctttgggattgcactgggccatcagctcatgccaggctatgggggcagccagttggcattgctccccagactgaacagaaacctggccgccggatgggacctcctttggcacagacttgactgtgtaactgcataaactgcagtagcatcattgccctagatgccccaggagacctggcaccatgaggattacagacagtggaatcttactgtcatctggacagctgttttcctgtttggatggtaaaggaagttgagagtctttagacctgtgcacagccccacaccaaggggtgctgtatgctcctaggcatcccctcccccaggggattttctaagtagatggggggacacggtgaactggctgtgtccatctttgtcactgagtgaaatctctgttttctattctctgagaagataagtttgtatgttctgagaataaatacatgaatattaagactgtt

SEQ ID NO: 1673 - DNA, 2940 bp, Homo sapiens
gatggataagtatgctggtgccttgtcgaatgattgttcagtgcgagttggcctggggaaagacgcgggtgcctcggggatatctagatgttagtgcccgtaaaatatacccgacagactactaacgaactaccagtagggtggtggtggtggtccttgccttgccacgccacgctacaaaactggtggccgccgcatccatgcatctcacctcagcgcgcccactgcagaaccctaccaagtacccaagcaacagggctacggtcgcctccgccagctggtaagccgccgcaaaggtcacctcgtctggaatcgtcgcgagtcaaaacgtccgtcctctcagcacgacacaaggcgaagcacctccgggccgtcgccacgcttcccaaagcggaggaaggcttcacgtgccgccacgcgccgcacgcagtacgcagtacgagcactttcgtacaccgcacaggcaacggcgagctgatcgggtgggcggcgacgacgcacggtcttcactcgcctcctgctgcagacggccgacctcagctccgcggtgctcgtactcggtaccccggcatcccggtcgccctcgctatcgcccatcgccacatcgcgggcatgtcgccatgtgtgcgacgtgaagctctcctcttcccctcgtgtgaacaccaggctggcccgagggccctctgcgttgtatcaattgggaggtgccgaaccaaagtagccccgtcgttgagacggacgacgacgcacgtcaccttgagctgcgcgacgctgcagcagccactgcaaacctgccacgatgccgacttacctttgccacggcttccggtggcatcgccgcgagatccgcatctttgtcatcctcaacgacatcgacgatgccgccccggactggatcgtcggccgcacaagctcggcttccctgctgtcccagttcgcgcagaactttgactttctccccaaggagcccattgccgtaccagaagccgttctggagcatgcggatgcggcgcaggaccaaccacggccacaccgcgatgacgacctgtcggtgcccccgtcgcgtgtgcccccgtccgaggacgacgtgctggccaacgactggtcgccggtgaagttgctggaggagtacgatgtggaggaaacgcagagcgcgagccggccatacgcctttgtcgccgactatgtcgtccgcgtggatctcagcgtcaacgtcggcgacgagatggctcggtacgaggcggcctcggcggccgccacaaaagacgacgcggacggctggttcgagaagctacgggacaagctgcaggtcggggagaggatagggtggcacattgtcgtgtgcgcagacgaggagagggttgcgccagatgagggtagctcggatgagtacgatttctcggacgaaggagctgtgacgccgaccaggaacctgaatctcccgatgaggccggcagcggaagcgccacccggccgcgagcaaaggcccccgacggcaagcgcaaaagctgaagccgccaagggcaaggaaaagcaagaagccagccagcagcccgactttctccgcaacgaccccatcaagacgagcccgcagcctgggctgcggcacaagctatcgacgaagggactacgccggctgttttccaagaaggacggatcatgaccctacaaggttggaaagggatggcgttcaagaggcggggacaaaagcagcgacgatgtgacgattctggtgctggacttgctctttggagtttgggggtgtcgtgggcatgcgtcgtggagctctagcgatggcgggtagactggggagggcaggtgcgggggtccaggcctgtaacgatatccctaccttacgtgtttaatgatgagcgaagtctaattgtacgatgcgacgtgcgtgagggtcaggtcattggcgaggatgagtgctggtttcgatcttgagtcagtgggctgggagcccagtattcagtttgtttggtggtgccaatgtgcagcgcgtttcacgtttcaaacgtgcgcgcagttgacggtgcaccgagtaaaagggttggttcaccgtcggcatccaggcctttttgaacccgaagcagacctatcccagcgtcccatgcacttgcaattgcaactgcgcagaggtgacgcccggcatcgcgtcgcgtcagattggaccctgtacttcgtatgacatgcagctgtcacgtggggggctcgcatatccgactgcacgcaaggctgagagacagcagctcactcgacaccacaacctcattagtacccaagtgtactttgtacgttttacaacaaccgcataagaaatctcgcgacccgtccggagacgcgtccccgcgccgcatggcacagcgtttcgatccccggggagcttgaccttgtgctgcaagacgcgagcagcggatccgttgatgcggatcgagtactgctagcattagtagtagctcgccctctgtccttccgtccaagtttggctgcgccaaaccaaccccccccccccttgttcagcttcatgtgccgccaccgcccgccatgtcgttccgccccgtgagcccggcgagtcccgcgggggaggcctcggcctcgtttgcgcagacgggcgccgagtttacgctcgacgacagcagcgacgccatcgacgacgatgacgattatgacgacgacgaggaagacctgcgctccgaggtgggcagcggcgccgccgagtcctacgagatggtggagcgcgtggacgaagcagccgccgccgctggcaacagcggctcgggcgcgcgcgcaatgcgctccgcccggcggcccagcgcgagcaccgtcgcaagcttccagctctacacgccggacgaggagcgcgccgtgcgccgcaagttcgacaggcggctggtgctgtttgtgacgctgctgttcatgctcagcttcctcgaccgc

SEQ ID NO: 1674 - DNA, 3324 bp, Homo sapiens
tgttttcacgtgtccctccatctgtcttttgaaagggtttcaggtcttttgaaagggtttcaggagtggtgttaattctttttgtttttgcctttttgttgtcgttgttttttgttttttttttgagacggagttttgctcttgtcacccaggctggagtgcagtggcatgatctcggctcactgcagcctccacctcctgggttcaagtgatgctcctacctcagcctcccgagtagctgggattacaggtgcgcgccaccacgcccagctaatttttgtatttttagtagagatggggtttcaccatgtttcccaggctggtcttgaactcttgacctcaggtgatccacccaccttggcctcccaaagtgctgggattacaggcatgagccaccgtgcccagccgttttttaaaatatatatatgttttatctgttttttactatttttaatagagacgggggtctgtgttgcccaggctggttgaacccctgggctcaagcgatccttcacctgcgcctccccaggagggtgttgattctttggctgtttggcagggtttgcctgggagctcttgggccctgggtttgtctttgttggagacttttgagggggacttggccccttgctggccacaggtctgctcagtccctttcctcttggtcggctgtctgtctcgcatcttgtctggtgcacagttcatgggtttctagtatctgctttttatttctgtaagattagtagttatatcccttctttttctgattttagtaatttgaatcttctttcgtcttagctgatgtagctagaaatttgtcgatttcattatcttttcaaagaaccaactcttgggtttgttgactgtatttttctgttttctctcttctgtcatctttgttactcctgtctgctgcttaggggttcagtgtggtcttcttttttctagtttcttaatttgaaaagttagtttacagctgtaaacatccctccgagtgcagccttcgctgatcccctagcgtcatcatttctgtttgtctggaggtgtttctgattccctctgatttcttgttggagccgtgggtggtttatgtttaacttccacatgtttgtgaagtttctggttttccttctgttgcttgtttctaactttatctccttgttagagaacagactttttgtgatttcagttttgtgaaatgtattgatttgtgtagtggccccacatccatcctggagagtgttccgtgcgcgcgggaggaggatgtgccctcggttccgtgcgcgcgggaggaggacgcgccctcggtgctgttggggtggtgttctgcaggtgggttgaggccgtgtctttcctcactgatcgtctgtctggcggttctctccgtggttagaagtagggcaccgagtctccctgtcactgaagaactgcttttctccttgtcattctgtctattcttgattcagatattttggggtctcttgttaggagcaggaatattttcgtaggaaaaattcctggtagtgaaattgttgggtcacaatacatggcccttgtatgactaggctgaccttgctggagttgatggagtccagtctcaggacgctgctgtctgcacacctgcgaaagctcccaccttggctatttgatggacaagtgatgtcaggggctcatttctgcgtttgtgatggtcacgatttcgtctgtccgctgcttgtttcttcttgctttatcccctgcccttcatttcctgtcctgtcgttgtgcgatggttttgtaggaactctgttgcgggtggttggaacttagcaaatacttgagtgattaacgtgaggacggtattacttgcttataataactattatgtccctcgtcaaatatgcttcatttttcaacctgggcctggtgcttatcatggtacaaaggttttcgtcctaaggaatcacgtttctttcaccgtccttagcggtttttcccttataccacccacagcagcagtgggtatttacaaagtaattcatctgaatttttgttgttttgttctgatgggaagtggttcagttttgaatttgatttatcagtagatgtttgggtttttgaaaagcctctgatatttagaatcggaatgtagggaaccttacgtcagcgctgggtctgtgagcgaggatggcgatcgggatgcgacttcgggtcttttccttaaaactggatgctttgtttcatttccttccctccaagatcgacctgatgccccatgacctcatcactcagctcttgcgcgtcctggccatcgagaccaagcaggagaaggcgatggcgcacgccgaccccacggagctggcgctgagcggcctggaggccttctctttcgactacatcgtcaagtggcccctttcgctcatcatcaacaggtgcgggtcggctgctcgggcacctgccagatcttcactcaggtttggcagaagcgagaactgtgccacgcggtggccacctcgtcccacagaggacccaaggcggctctccccagccttcagtgtccgggagattcacgggctgtccgggggccacggtgcggactgtggagtacagacgccgtgtccacgacgccgccggtcacggaggcccacctgaggtgccgccacgtctcttgcaggaaagccctcactcgctaccagatgctcttcaggcacatgttctattgcaagcacgtggagcggcagctctgcagcgtctggatcagcaacaaaaccgccaagcagcactcgctgcactccgcccagtggtgcgttcttcctctgcccccgcatgccctcctgaagcagcgctcgctgcactctgcccagtggtgcagcgccccccttttgccctcctggtagacagctttctaggcttctggaagtgtcatctggaagcgcacgttggtggctttagatccataatgcttcattgcttcattttcctgtcttggggctgcacggcgctgccgtccaccccacaggggatgctggctctgtccctcagccctttctggagccttgtggtgactgcacgggcatggagactgcccaggtcggcgtgcaggacactagctcctcccgagagcggtcagccacatcttgctgggaccagaggtgctttgcagccggtctgtgcctctagggtgttgaaaaaaggggtcgatggcagagcttcataagaatttgtccagtcgggtgcagtggctcatgcctgtaatctcagcactttgggaagctgaggagggaggattgtttgagcccacaagttcgagacccgcctggacaatgtaacaagagctcatctctt

SEQ ID NO: 1675 - DNA, 3957 bp, Homo sapiens
ctagtttacagcttactgctcgacctcccaggacccgagggcttgggcaggccccacacgtcctccagaacatcctcggtgggagacggagcagacagagtagaggccacacgtgtgtgtgcacatcagagtgtctcctacccatgttggcagcagcgcggccctccgggcatccctggctgtatcagctgcgccgtgagtgttggctgtctcacacgccagctttcccggagttgccgctgggtgccgagcacctgctcactgcacggagcaggtggctccttctgggcggctttgcctgccgcagtccccgagcctcctctcctcagctgggcgtgtgtgggaatgcccaaccgggggcctccacggggcctatagcctccacgtttgggcctactgcccttggacccaggggtcacagtccaggaagcctgggccagtgggggactcctggggtgcatgtaacactgagaatcatgtagataatttggggtgtttgagcacgcatggcctgtggggagtctggccggcttgcctcatgtggaccccccaccaccctggggcagaggagggggccggctgttggggccgtcatggaagcactagggttacactagggcaggccccatgtcccctctggaactcctcacagttcacaccttgaagcccaggcacttgcgatgggaccagcgaggtcaaatgcaggacccctggtcctcactgttaccatgaagtgatgcaaatggccggtcttcagaaaccagagctagccccacccgtgccaccaaggcacaccagcccctgagcagtcgcagggcccaggcagaagggtccggcaggctcctcactcatgacgtggcctgagggggctgggcagctggtcctcggagcccccacctggtgcaccaggccgtgaacctcagcaaaggccccgtctcttgatgcccaaggtttggcaatggttgggggttactttctccagaccacagcaccctcgaggccaacactggggaaagctggagcccctgctcttcacccccacctcccagggctgttgaaccccaaggagcaccagacccaggacccccccaggagggccagaggcaggaagtgcctgatggtgccaggggagggtggatgcctgactagggcctgaaaacagagggcatagcttccaataaagcatggaaagaaaacagcatgaatggaccagaagtgcttcccattgggagaaagaagagcactcacaacctcttctgccccaggctgcttggagtgggccagcgccagagcagtccctgcaccagccgagccgtccgagcttgtcgactatcagggaaggtgtgagccttcggctgagtggtgctgggagctggggagagccgagcactgcccggggcctcctgagtgctctgccacccggctgggcagggaagggagggcccctcacagaggacacccttgtggtcctggggtcgcctttgtgaccgagggggacgtatgtgtgtcaccatcatcctgcacgactgcttcctgactttggaaccgctgtttgcctctgtgttttgggtgtggacctggaccccagtggcccttccccaaaggtcgtgtgaccaccaccaccttcccgtgtcccgtaccgcacacctgtgctcacctgggtgccaggcagtggcccagcagggaggaggagggtgagcaggtggcaaaatgcccattcctcggtcccagcctctgtgtggctgaggccccgcacgtaactctccacgctgggcatcggcctggactgtgcctgggtgctccctgaggcccgggtgggaggcagctgctccaggactctcagtgtcccagtctgtgccgtcagcaggaggatcaggagcctcccctgcaccctatttaataagctcttgctcgttcctgcttggggtacatgaaacagaaacagccgaattgtcaaaggtgtgattgataacgtgaattagacaagaccgggctattggatcagttgaattgatcactcaaatgtgcttggactgaccaagtgctgcatgaaagcttgcctggctcagccctcccacccggacaccagcggtgggtaccgaggatgccaagccctgacctgattgctgcgcacccagggagggggatgccaggcaggctcgtgccacatacgtgagccgcagccccagaccaaccatgggaggagccactcaccccaaaggcgggctctgcacctctgcatttctcatgactcgagtgtgtctggcttcccctgcccagccacagcctcactgggtactcaccctggacgccatattgcagctggtgtcagccctgccccgcagctccacctccctcctcctgaaagcccggggcaccttccagaggccgagcaggtggaagggggcagagaccagacatcgccattctcatcactgacggtgacgggggccccggacgccctgaagagccctcagctgtgcgctgactcgcgcctctccccgtccagcgtgaatgagatgagagacagtgaggacaatggtcccaggaagggaccctcaagagatgccaatcaaatgcgttggactctcacccagtttggtgggaacgtctggagtcataggacagagagctgagggggcaaggctgaggggaggtgctctgtggatgcaagggtgcccacggcctccaacagggcatggcatggcctccaggcatgccgtgcagcagcagtcagggcagcccatggactctgcgccagtccttggtagctgaagcccagaaccactctcacctgaccccacatgtggtcagctctggggcccccatccactgtagttgccagtgtggatggtgcttgcccagagcccagggtggcacggtgaaccggactctgatcttcagggcaactgtctaggccgatggggtgacgtcagtggtgcgctcagcttggaacactgcaggaatgcagccgggtgggtgctggctgggatcttggggtctgggagctggaggaacaagagcctcaggagcaagggccctgtccagacagcagccgggcctctgcccacctggcaccccgagctggctgcccagcctctcctgaagctgagagctgcctttttgctgcctccgggcacccacgcgggctgccagttgtctcggatcggagccccctgcctggaggcgtgagccgtgctcccagccagcagctgtgagttgcccccaccctgccccagcccttcatgtactgtggctctccctggcctttggggcaatccagtcgccttcaggactgtctgcagaggccctgtctccctgcagccagagagagctccagcgccatccacttgtccctgatctgccacactcctcagccctggccctcggccctcgctgtctcttcccacacatcccagggcccaggatccgtggagaagccccagaaggcacacgctgcgccctgcagacctgccaccgctgcctcggggttcccctgggaaaggcacccagggagggccgggcagggaagcaggagcccacttggctcctgccagagagtgaacagaagcaaaacgtgcctttggttaatttttcttctaatagaagtaattcagagtcaaatgaaataccatttaaattttccatgaaaataatcaccctgctatttcacatgattttcccaggctttgttgtatgacttggaaaccaggcttgttatgaaggaggcagagttggggtgtacagcgaacaggcatttctcccaagctcacgggcacattttttcaaactgtgttttttaattggcctcttcatgtataaatgaacagtgtaacggacaagcagggcaccttaatcccaacgccacagtcggccagtttgcgggttcaggcctcctttatgatacatgccacaaacacaatatctttgtattaaaaggattttttttttttgctg

SEQ ID NO: 1676 - DNA, 3032 bp, Homo sapiens
ttctttttttgagacggagtctctctctgtcacccaggctggagtgcagtggtacgatctcggctcactgcaagcgccgcctcctgggttcacgccattctcccgcctcagcctcctgagtagctgggactacaggtgcctgccatcacgccctgctaattttgtttttgtagttttagtagagacggggtttcaccgtgttagccaggatggtcttgatctcctgacctcgtgatcagcctgccaaagtgctgggattacaggcatgagccaccgcaccccgccttcgtagaccattttttgaaaatactttccttttttcattggattccctttgtagtttttcaaatatcaatcaatgatacttgttttgatctaattcatacacttttttttttgagacaactttgctctgtcgcccaggatggagtgctgtggcgtgattcagactcactgcaacctccacctcctgggttcgtgcaattctcatgcttcagcctcctgagtagctgggattacaggcccatcaccatgcctggctaatttttgtattttcagtagagatggggttttgccatgttggccaggctggtctcaaactcctggcctcaagagatccacctgcctccatttcccaaattgctgggtttacaagcgtgagccaccacacccagcctcatttgttcatacagtgtattatatagaatttatgtttttgtctgttttttatgcattacctcactgtcttagttcccttacagtattttttgaaatttagtagtgtaggctctccacctttgttctttatttttagagttattttggctgttttaattccattcctttttccttataaattttacaatcagcttattgattttccagaaaaaaatcattttgagtgagattgcatcattctgtagatcagtttgggcagatgtattgcttgtttggccatattgtcagagaatacggttagtttaatttcctcctttcttatgcatatgtctcatgggttcccctccccccatccagttgtactcgttcggacttcaagtatgctgttgagtacatatggtaaaagttactcttccttctttttctcaatcttaagatcttatgaaacattgtctttcataattagatatgttactagctggagctcttttttagatatgtgatagtaagttgaggaagttccagtttgtttctaacttgctaagaccttaaaaaaattatgaatgtctctggattttgttagatgtttccctgcatctgttgaaatgaacatagattgtttcttctttcatctgttcatacgttgaattatattggtgttttctaaagagttgagatctcactatgttgcccaggctggctttgaactcctgagttcaagcaggctttcagtctcattctgttcttagctggcccaatcggcatatgccactacaccaagtttgattttttttgctaagtgtcagttaatgtgcattctcaaggtagacacccttggtcataacatatcagtccattttataacttgctgaatttattctctgaatttattctgaaagaggttgtgtaatatgtgtattgtcacttacttaagtatttggtagcatttgccattgaagcatcctgtggctagagttttctttgccccaaaaattttcaacttattttctaggtcttggactattcaggttttctcttcttgattgagctttggtaattttgtgaaggaagttgttcctttacattgttgtatttgttagtggaaatatgtatatgtattaatgtttataggatctataagtttccttcatttctgatgttggtaatttttatctttttttggggtcattctggctagaagttcatcaatattatttcaaaaaaaggcagcttatagattatttcttcttttctactttctttgaatttaatttgatctttatggcttagataattgattttagacctttcttttctaatacaagcatttgacaaagtcagaattggtctatatagactatatagactacatacatttaatgtaattattgacatgctggattaaaattgatcattttgctatttttctatttatttcatctatttttgattccttttaagaaatctttttctgttgacttttgaattaagcaacttttaaaataatttcatttccatccttatttataactgaatttcttatttatttttgagacagtgtttgtttgctctgtcgcacaggttggagcgtagtggtgcgatcttggctctctgcaacctccgccttctgggttcacgtgattttcgtgccttaacttgccgaatagctgggattacaggcttctgctatgctactacacacggctaatttttgtatattttgtaggcgtagtttcaccaggttggccagggtagtctcgaactcctgagctcaagcaatccacccgtgtcactggcattacaggcatgagccactgtgcccggcctataaccgaaaaatttttaatattagttgtcctagttttacaagatatacctttatttaatcacattccactttaaaatattattccgttcatgtataatgtcagaacttaacagtgtagtttcagttcctttcttccgtcttttgtgacatagttgtcatgtttttactgtttatatatgctataaacacaatactgtgcaaccttttttttattttttatttttttgctttagacagtctttgtttgttttttgaaatagactttcgctctgtcacccaggctagagtgcagttgtgtgatctcgactcgctgcagcctcctcctcctgggttcatgcaattctcatgcttcggcctcctgagtagctgggattacaggcccatcaccatccctttctccggctggctgggtcgggggcatccctctctgtcgctggcttccagaggcaggacaggcctcctggtaagcccgcaaagttgctgacctcctgacttcgtctgccttttattaatatctgtattgctg

SEQ ID NO: 1677 - DNA, 3764 bp, Homo sapiens
gaataaaaaggatcttcctaaaagctctttctgatgcacttttttttcttttttttttgagacggagtttcgctcttgttacccaggctggaatgcagtggcacaatctcggctcactgcaacctctgcctcctaggttcaagcgattctcctgcctcagcctcccgattagctgggattacaggcatgcgccaccacgcctgactaattttgtatttttagtagagacggggtttctccaggttggtcaggctggtctcgaactcccgacctcaggtgatccgcctgcctcagcctcccaaagtgctgggattacaggcgtgagcccgtatcagaggcgcctggcctccgatgcactcttgagtatttttgtaaaattagagattgttggacagtgctaaggagaatgaattatagtgattgggtccagtgacacttggatagtgctactaagtatgaaattattttaagagagtttaaagaacgacctcctgctgatgagagtgttggaaagttggttgctgtgtaaggtcagctacacatgcctcctggtttttgcttttgttgaataagagaaaagagagtagccaattgtaagtggtcgtattcctagttgatcagggcttgctaaaaaaaagacagtcgaagccgttgattccattaccgtacatataagagttttaaccaggattagtagcccacatgaagtagaaatagaaaggccaaccaaagaactagtgattctaaggtaaaatttccagaaatgtggaaaagaacacttgagattggagatggtaccagttttatataaatggtgattgatagctgttaaggtttgatgagaaaggttcacgtatgtctgtttctttcacaagtttgttcccctgatacttctttctttttttttctgagacagtctcgctgtgtcacccaggctagagtgcagtggcacgatctcggctcactgcaacctccacctcctgggttcaagggattctcctgcctcagcctcccaagtagctgggactacaggcgcccaccatcatgcccagctaatttttgtatttttagtagagacggggtttcactatgttggccaggctggtcttgaactcctgacctcgtgatctgcccgcctcagcctcccaaagtgctgggattacaggcatgagccactgcacccggcctgttcccctgatatttctaagtcactgtttattaaagcatgtaagcctaagcataaaagttaattttttttttaagagacagggtcttgctctgtcacctagactatagtgcagtggcgccatcacggctcactgcagcctcaaactcctgagctcaagcgatcctccagccttagcctgtgagtagctggaactataggcacacaccatcatgtccagctaagtttttttagttttttaggggtttctttgtgtgtgtgcttttttgtttcgttttgctttgagacggggtctccctctgtccctcaggctggagtgcattggcatgattgcagctcactgcagcctcaacctcccaggctcaatcaatcctcccaccacagccttgtgagtagctgggactacagatgtgcactaccacacctgactaatttttggatttttagtagagacaggttttcgccacgtggccccagctggtcttggactcctgggctcaacctatccaccggccttggcctcctaaagtgctgggattacagatgtgagccaccgtgcctggccaaagttattattatttttttaaagtaaacatgtactgcagttacctgatgctaccacatattaactgcatgaaaaatattccatagaagtagaaagtccttttgactgtgaacttacaaacatgtgaatggaaactattatgagctataaattgaatataattatttttttcttaatgactttgcagaagggatctgatacaagcttaatatgaatactaaaaactgccacttttagcaactgaagctaaaatattgtaagatcagaatactcccatcttgtggactgatagaaggctatttattacaattttggggaaaaaaatttctttttttaatgtcttgagtcaatttgaaaaagtgtggtttttttaaaaaaaattttaatagaaataaaagtcataaagtttttccttaaaaacttactgttattaaaacttctggcccataattgatttgttggataatagtcattagtatagtgctattatagcatttgccatcaaaatgccatttatatggccaatacacataaaaattatccaatgaaactatttctcaaatataaattaaaactagaaaatggataattttttaaaactatactactatcaatttgcaactgtaagactagataagatttgacattattgggagagcctctctggaaagcaatttggtaatacatttcaagagtcattaaaaaccagtcataaccaggtatggtaatgcacacctgtagtgccagctactgggtaggttgaggcaagagaatcacttgagcctcagagttcaaatccagcctgggcaatatagtgagaccttgtctcaaaaaaaaaaaaagtttaaaaacttgatgacttaaaaatgtactcctagaaaactatcccaaagcagagatgactttcataaaaggatgtttttcaaaaggtaatttataagccacaaaaaaaccccttgtttccaatatgtatattggaacaaatatgggaagaaataagttatgatagatcctcatattataattaggtgcccattgatgataatattttcaaagaaagataatatattatcttgtttgaatattaaggaaaaactagtcaaacaccatagtatgctttcaattttgtataaaagataaaagaaacccatcagggccaggcatggtggctcaagcctgtaatcccagcactttgggaggctgaggcaggcagatcacttgagtttaggagtttgagaccagcctggctaacatggtgaaaccctgtctctactaaaaatacaaaaatcagccaggcctggtggcgcacgcctgtaatcccaactacttgggaggctgaggcagtagaatcgcctggacccgggaggcagaggttgcagtgagccgagatcatgccactgtactccagcctgggcaacagcatgggactctgtctcaaaaagaaaagaagcatatgaaaatatagaaaggtatgactaaataaagaagaaaagtgaaaaaatcatccataatcgcaccacttagagatagtaattgttaacattttattgtgtattctcccaaataatttttatgcatgtgtagctctatgcaggactggttttcaagcacgctaataaatagccatgtcaggtatttatttttattttttatttgtatttatttttgtgggttttttgagacagagtctcactctgttgcctaggctggagtgcactggcacgatctctgctcactgctacctccacctcctgggttcaggcaattctcctgcctcggcctcccaggtggctgggattgcaggtacctaccagcacgcctggccagcatggtggggccccgtctctactaaaaatacaaaaaattagcagggcgtggtggtgggtgcctgtgattccagctacttgggaggctgaggcaggagaatggcttgaacctgggaggcggagcttgcagtgagcccagaccgtgccactgtactccagcctgggcgacacagcaacacttcatctc

SEQ ID NO: 1678 - DNA, 3214 bp, Homo sapiens
gtacgaaagagaaacccggagggcgccggggactgggccggggtctgcagggctcagctgagcccatgagctcccagagctaacccctgaacacccaggcgggcaaagggctgatgtcggtagtccccatcctggaggggcaggctctgcgcatctgctcctggcatggcgctgcggcacctcgccctcctggctggccttctcgtgggagtcgccagcaagtccatggagaacacggacactgatgtcccagccccagaggtgctgaccaggtccactgctggtgtcagaggggcctgtgcctcgcagaggggagccctccgctgcctgctgggtgagcgcctgctcaggaatggctgggtcaggcggggcccccacggtgaggcatcctggcccgcaatgggagcacctctgccagcggtgacagcacagcgtgccgcgcatcgctatcggggagtgtagctgcggcggctccagactcccaggcggagcgggtggagggtggggacccctcactgtcctggctggggcgtttgagggaccggacctgggcccctccctggcggtgtggattctatcccgcactccgcagtcacccctggacgccctcaccgttcactgcattcaggtcacgagaaacagcacagctgtgatcaacacacaagctgagggtaccctgagccccccaggcctgtccagtctgcctgtggtcagggaatgggccctcacacacaccgtaagtgccagcacccagcgcacctgtgcagtacctgggcacctgggcgtgaattcgtcccctgaaatgccagccaggcccgggcacttcctctgtggggtcaagcggaaacccctgatggagagcctccggagacttgcagagaatgtcggtggcgctgccatggcctgcgggtgccgcctcctgggggtggtttactcttccaggcccagcttttccttggagaccgcccacccagggtcccacagggatgtgcactgtggctgtgaggcccctccttgctcccaggcccacaggggacagagggccacccgatgctgactccagaagaggccggagctgcggacattgagatgtgctcccacggcacccctcagccgctgctgctctgggcgtgagcctgcctggcaggcgcgtcctggagtttcactgccgtgtcccctccaggcccagctgcccgagtgctgtgtggatgtggtgggcgtcaacgccagctgcccaggcgcaagtctgtgtggtccaggctgttacaggcgctggaacgcggacgggagcgccagctgcgtccgctgtgggaacggaaccctcccagcctacaacggctccgagtgtagaagctttgctggcccgggtgcgccattccccatgaacagaagctcagggacccccgggcggccacatcctggggctccgcgcgtggccgcctccctcttcctgggcacgttcttcattagctccggcctcatcctctccgtagctgggttcttctacctcaagcgctccagtaaactccccagggcctgctacagaagaaacaaagctccggccctgcagcctggcgaagccgctgcaatgatccccccgccacagtcctcaggtaacagcagctgtcgcatccccctgtggggtttcccatctctgggccagtcccagggtgctctgtgggtttgtccccaaacgggtttgcctggctctggatctcggccacccctgcccgggtccccaggagacccacccacaaggcagggccagggccggatttggctggtgccccctgctctggatctcagctggatttggccggcgccccctgcccgcccccctttaatccccgtgacttccatgctctttcctgttcccgagacgtggggtctgcaggaaaggaggacccaccacgacagggcagacccccaatacctgctcctccttgaagtccagctccacccgaggacagacgcagccggcctccgccaggccctcctgagcagccatcgcttcagtggtgctgggtcaggcggacccaagagtcagcccgtacggaagccgcgctacgtcaggcgggagcggcccctggacagggccacggatcccgctgccttcccgggggaggcccgtatcagcaatgtctgacctggaggccgagaccacgccacgcacttggcggcagggacccggaggccgaccccttggcgggaaccagcacaaagtgttggcatcgcccggcgcccgggacagtcctgggcacagcctcggctctgggtccctccgcctcccagcgacggacgccaaagggtcccgggccgcctgaggctcctccccaccacagccatctcgtttatcggaccaggagcaggcatccatgagacctcagagcttcagatcgaggccttggggggtccgggcccccccaggaaacacggtgaggccccagcgcctgcagccaaagctggcacgatctatggggcaggtgccgctctgcctagaaaagccaggggctctgctgccgtgccctccagagcccacagcgggcaggactcctccagcaccaccacacccagtggcccgagacccctctgagaacagtgaggctggtcctcgtgccgttccagccggtgcccggccagtggggaggacacagcctaggaaccagctgcctgagaccagggtgcctctgggctgtcctcccgcgtggcggagaccccaagcacgcagccacccatttccggagctgcaggatagagcttcctcttgatctctgtttttaagcagaaattcattgtgcagaaaagtcctccagagctctgtggccccgctcggatccgctggacccccatgcctggctgatccctgcccacgtggggcaggcccacatctaacccccacaagtcactgcctcactgcacctgccaaggctgccctggcgctgagtcctggggtccctcccggagttcctgggagaaaggcgccgtcgtggccgcctcccgcacgccaggcccgggctccaccgtgggtctcagacgccctgcggcaccggcaccgtctgctttagcatgggacccccatctgaggggtggcctggccttcggggtccccacgctcctttgcgaagtccactgtgggtgccatcatggtctccgggacctgggccagcgggaacgtgggggcactgggtgtgctgatataaagtcggcattactc

SEQ ID NO: 1679 - DNA, 3581 bp, Homo sapiens
cagtctttagtttcctcaagttattctcccaaaaagacattcgccttggcacagataagccagctaatcttatgctttatgacccactgtgagctgttcctgacacagcttctgactttgtcagtgacaaaatttctcaccttttaaatgcagtgcttaacattttgttaggcccatactcaaaatcggccagatataaaatgacctcagattttgatctcctaggctcagacgatcctcctgcctcagcctcccgagtggctgggactgtaggcacaccaccatgcacagctaattttttttgtatttttctgcggagatggcgtttcgccatgctgcccaggctagtctcaaaatcctgggctcaggcggtctgcccgcctcagcctcccaaggtgctggaactacaggcaagagccactgcgcccagccacaacctcagatttctttggcaaacagaaatgtttaaaaacacaaaattttgctcaggtgaaacactgtgttactatcaaatctcacatccacataaagtttttcttttcggctttgtttcgtgaggaacagacagaacaaagtttttccaggtagcatctgtatcactattattctcctatttcctgtaccacccccacctccccaagccctactgaatgtgaggtttagaatgttttaaggagggtcaggtgcggtggctcacgcctgtaatcccagcactttgggaggccaaggcgggcggatcacctgagtttgggagttcgagaccagcctgaccaacatggagaaaccctgtctctactaaaaatacaaaattagccaggcgtggtggcacatgcctgtaatcccagctacttaggaggctgaggcaggagaatcgcttgaacccaggaggaggaggttgtggtgagccgagatcgtgccattgcactccagcctgggtgacagagtgagactccatctcgaaaaaaaaaatacaaaaattagctgggtgtggtggtgcacacctgtaatcccagctactcgggaggctgacgcaggagaattgcttgaacctgggaggtggaggttgcagtgagccgagatcgcgccattgcaatccagcctggacaacagagtgagactccatctcaaaaaaaaaaaaaaaaaagaatgttttaaggaaaaaaatagtactgttacatataatcccaggtgataagaccacaatggaaatgtttaagtcctcactttaaagagtaccccactgagaagaggtatgttggactctagcagagatttggaaactctgggacactcaagatgtgaaagagcctggctatctgaggactcaaagagtcagcatcgggacttgtgagctcaagaagagaaaagggagtggtgaaactctgtcctaaaagttagcaccaggaacagaagaaaaaaacccgatatatagtgatacctcatcttttagagaatgggaagctatttttgtgttcacacagaaagtatagttcaaaaaacctctatatccagagttcagacaaggagaatgatttgagatataagtgccgatgaaggaggtcaattttgatctgaaaccagcagctggacctgggccacctcaggaaaaggactctgttctccaaggcagcacgactgaatggttctgagaataagccagggttcaggactcctgaccctttaggaccatggactcagaagagcctgaaggacaattgtgggctttaaacttctgagagcttgtaaagtaacacaagactgtgcctctcccttgccccagctgtagatagtctttgccccaccattgttatgaagatacacagggttttgcagtttgaataaattggatacaagtttcctctttttttttttctttttgagacaaagtctcgctctgtttccccaggctgagtgcagtggcacaatcaaggcttacttgccgcctcaacctcctgggctcaagcaacgagccatcctcccgtcttagcctcccaactagctgagactacaggcgtgggtcaccacacccagctaatttttgtactttttgtagagacagggtctcaccatgttgcccaggctggtcctgaactcctgggctcaagtaatctgcccacctcagcctcccaaagtgttggggttacaggcgtgaggcaccgcggctggcctgagtttcttcttaatactgtatcacaattgtgggctgtcttatgtgttgatatcgattgagctatttgaaataggaatgttaatgggtgtattaaatttttgtaaggatataacaatatctaccttccaaggatgttgtgaggttttccatgattttgtatatgagctaatgttacctttgaggggtggtgtgcattatgttggatgattgtaaattttcagtggaaaatgtaccgtgtcctaaatttaaagacatgaaaaatatcccaagatcatactagatcataatagcaattcctttacaaatgaattatggaggtaactgatctctaacagtttccttcatgttgttttaatgcacaagggcagaggatctgctgacccttggaaccagcgtgagctaaccacgtgctatagacacttcatggtgtcgcacccagggaagtcaaagcgctttgctccctcactgtctgtgagtcctcagccattagtaccccaccccccgctgctccaaaacttgagttatttcaaatgtttctcactgttcatctctccactgaccccactccagaaagcctggagagagtcccaagatgccacccaccttccccaatccctcgccacagatctgtgtctatctcacactctgtaagtgccgctttgcttcttcctctcttgaaaagactgagaacacacattttaacatgttaggaaaatggggcagcctaaaaaatgactgatcccaccgccagtgactcatgtatactccaggctagcagacaaggccctttttggtgggcctgcttctgtgggttcacagaaaccaaattactgtgggttgcaaagaattagcaggtcatttacaaagcagacatcccttcacccagactgtggttttgcatgctcaggttctcagtctatgagctttggtgcaggatcattttggctactggaaaaaccatagcttattttaaatttctggttgccaaagccaccacacgtgtggtctgtggatgaccattgtctgcagaatgacgaggaaggaacagaatgtggtttggggctcagggtggccttcccactgggagggaaggcgggagggagcccttgccctgggttttgacacagcctgtgctcacagcctctcctctcatctgcatttctcagaaatgccctccctgcccagtggtgactttccctcgtcactcctatggagttctacctggagcccagccatgtgtggaactgtgaagtttactcctctgtaaagatggtttaaagaaagtcagcttctgaaatgtaacaatgctaacccttgctggaaccctgtaagaaatagccctgctgatagttttctaggtttatcatgtttgatttttacactgaaaaataaaaaaatcctggtatgtttg

SEQ ID NO: 1680 - DNA, 3119 bp, Homo sapiens
gcagttttagtagagacggggtttcaccgtgttagacaggatggtctcaatctcctgatctcgttggatgcacagtattttatttaacatattcgctgccgatagacaagtcgtttctacacgtgaatttcttttttttttttttttgagactgagtctcattctgtcgcccaggctggagtgcagtggcacgatctcggctgacggcaacctctgcttcccgggttcaagcgattctcctgcctcagcctccggagtagctgggactgcgggcgcctgccatcacgctcggctaatttttgtttgtttgtttttagtggagacggggtttcaccatgttggccagcctggtcgtctcgaacctctgacctcaagtgatccgcccgcctcggcctcccaaagtgttgggattacaggcgtgagctaccgcgcccggcctcacatgtgaatttttttaaaaacaccaccagcaaaaccccactatttccattttcctgagaaagacgctgaggtccagagaaagagaaaacgttctcataatttatgctgaaagctgcgtcctcaagttccggtttcccaactcccatccgcactccaactgctcgcgcagtccacacaggatacctgcccgccaagccggccccagcaagccgcagggagccgtccgctgaacctcaggttcttgggttttcctatgccccctggaggcatctgcgaacctctcggcatcgctccaccacacctcccaccagcaggtggcactgttgccatctccataacatggactggccttccttgtggtgctcctgttttcttaagtcccggggcacttccggcactcgcggaactttggtgcagcctgatgcgcaacgtggggactcaggcgcgctgggcggcaggagttgcttccggccgtgttggtggtctgaattgagaagccgcgactaagggaagatggagacaatactggagcagcagcggcgctatcatgaggagaaggaacggctcatggacgtcatggctaaagagatgctcaccaagaagtccacgctccgggaccagatcaattctgatcaccgcactcgggccatgcaagataggtatatggaggtcagtgggaacctgagggatttgtatgatgataaggatggattacgaaaggaggagctcaatgccatttcaggacccaatgagtttgctgaattctataatagactcaagcaaataaaggaattccaccggaagcacccaaatgagatctgtgtgccaatgtcagtggaatttgaggaactcctgaaggctcgagagaatccaagtgaagaggcacaaaacttggtggagttcacagatgaggagggatatggtcgttatctcgatctccatgactgttacctcaagtacattaacctgaaggcatctgagaagctggattatatcacatacctgtccatctttgaccaattatttgacattcctaaagaaaggaagaatgcagagtataagagatacctagagatgctgcttgagtaccttcaggattacacagatagagtgaagcctctccaagatcagaatgaactttttgggaagattcaggctgagtttgagaagaaatgggagaatgggacctttcctggatggccgaaagagacaagcagtgccctgacccatgctggagcccatcttgacctctctgcattctcctcctgggaggagttggcttctctgggtttggacagattgaaatctgctctcttagctttaggcttgaaatgtggcgggaccctagaagagcgagcccagagactattcagtaccaaaggaaagtccctggagtcacttgatacctctttgtttgccaaaaatcccaagtcaaagggcaccaagcgagacactgaaaggaacaaagacattgcttttctagaagcccagatctatgaatatgtagagattctcggggaacagcgacatctcactcatgaaaatgtacagcgcaagcaagccaggacaggagaagggcgagaagaagaggaagaagagcagatcagtgagagtgagagtgaagatgaagagaacgagatcatttacaaccccaaaaacctgccacttggctgggatggcaaacctattccctactggctgtataagcttcatggcctaaatatcaactacaactgtgagatttgtggaaactacacctaccgagggcccaaagccttccagcgacactttgctgaatggcgtcatgctcatggcatgaggtgtttgggcatcccaaacactgctcactttgctaatgtgacacagattgaagatgctgtctccttgtgggccaaactgaaattgcagaaggcttcagaacgatggcagcctgacactgaggaagaatatgaagactcaagtgggaatgttgtgaataagaagacatacgaggatctgaaaagacaaggactgctctagtgttgagggatgtagctcagcttttgggctagcccaggcttccctaagatctgctttttctatttctcccaaccaaatcctcttaaagaccctttgctatgtagtctcatggtctagcatgcatcttgtagaaacaaggcatgctggcagattgcagggttgagatgtgttttatctgttttatattttaaaagattctgccagaaaataaaaccagaccttgttctaaagcccagggttatggaccaactcagtgcttcaggtcttaatgcctccatacctcttcctcaccaactttactagtagctgagatttaatgggcacctattatgctacatatcatgttaggtaaatctgacctgacctctttccccaccctcctttgttgctgcttccctgaatgagtattaccccaggatgaggtctgccatcagcttagttagccattgatgcaaatactagggaaagactaggaggatgagccagggttgctactaaggactaagtgtcgcaccaaggtttgccttttgtatttgcataaagaaaggagttggagctgggtgcagtggcttgtgcctgtagtcccagctacttgggaggctgaggcaggagggttgcttgagactagcctaggtaacatagtgagaccctgtctcatt

SEQ ID NO: 1681 - DNA, 3607 bp, Homo sapiens
tcagtggatgctttgcaggcctagagtaggatctggtgtgagctctgccatggatttgttgtgtgacctccagcaagcccagtgccctctccgggttcttggttacttggtcagtaaatgcacatttggactaaatgggtgtgtgagacaccccctagccttcaatgccctggacccccagccttactttgcaacgacctaggaagagataccatagataggggcacagaagcagtgggcatgccaggggacttcagaacagctgggggaggggtcagattgcagggtggggcccagaggacggctcacaccctgggaagggagctgaggacagtcccagccctgggaggggcagacagctggcagacagggtcgagttgcggggcaggccttggagctgggaacagctgggagagttttgtacactcctcgcccatccctggttctgtgtgctccaagtgccatcaaggccctggggacctcagctcccccaccccctggcttctgggccactccccagtgactgtctcctcagtaaggcaggagggaacctctaagaaaaagctggcaacaggtgcatgggtgggatggcaagagtgagagccggccctgagtcctggacttgccacactgtgctgtgggctggctggcctcagcctcggtgcccgagggtggttatggacctacagaagatgtgcagggcctgagagcagccatctgcattaggtggggcagggagagcgggcctggcctctgtgctcagcagcccaggcagtgtcacccacccccggtgacacagcccgccctgctcccaagatctcaggccaggaagggtctgcccatcacagggagcaggacttcttgccaccctaagggcccagggagcagatgtggcccactcttcccaccccgaccaaccctgccacaccgacgccatcttcccgggtttgccatccagtgctgagagcatctctctaaaggcccctaagctcccctaacctaaggccttggcttgccaggagtgtcatggggagcaacgcacagacctgtgggtgcccagcatcagaagacacactttagggtcacacctgtggccttggcctaagtgggttagaggagcgtctggccacaccctggacttagggctgcaagctccggggtggcccttggcctccttagaagtccaagctgctctcttggagcagtggcacctggttcccaaggttactgtgcctgggaggtcccttcccagtagcaaccacagcctagaacactgcccacagcctggccctctagaatggccccgcccagctgcttttgatctttgttgaactaaagtcagctgagccccgctagggagccaggagcgccaggcccagaaaagcagcagccgcagccgtagacatgtccaagatgttttctggtggtgcatcttcagcggggaggcgggaagggaacaggtgtgggcaggcagagctgagcaggggtgcaggaggccgcctccgggccccagatggcatctcaactgtgggaagagtccccctgccctggtcctgcccagcaggctggtggccacctgaagcaactgtcaggctctggccgttgactcttcctgctggactgaactcatggccaagagttcgttttgggggagctcctttttgtctcccccaaaatggcctcctttatttccaccctcaagctgctgggccccggctggcctcacgttggaggggcagaactgtagccacagtggcacctgccagatacctaagctggggctggataccaggtgaagctcttacacatcgtgtcaaggcatcttggcagccaccccagggccgctccttaggtagccctcgctttgcagatgaggaaacagtcacatgctcaagtcacaccgctaggaagcggtggagttatggttgggtccaggtctgtctagatcctgtgctctgccagtgcctgcaccccccttcccggccccgccgattggcatcttttcataaacttgaagggccccaagactctctgcttagctgagcagcccacagtcttcctgagaccccttcccaggtccaccaggcctcagggcctggaaacagatacttcctagcccacatggatctgctcctccaaaccagtgaggccaaagggagggagcagaacatttcatgaggcactgctggagggtgagtaggaacaggacaggagcccaaggggatctcatcgccaggggcaagctaagcactgggcttgacagggacagcaaggctaccgcattgcaccattatagggagcatcatgcacactagctgtgcagtgcacaacctgtgttgctgtacagagcaactggagagggtggcagcaacaggaatgtaggagctgtaggcatgtccagtggtgagaccggcattcctcctcccagggacagtgagtgactgcaggccttggggccccaacactcaaaaacaaatgtcctgccaagtggagggcccggcagaggctcttcagcaattcccattttccccagtcctagccctgcctctcagagaaagggccaagctgccacctcccccttctccccagaccctgttccaggccccagctggcttcctggctggctgctagccctggctttcaccccaaagggagccactcgtaaacaggaaatgcttcccaatgcgatgcctgctctgggcgccatcgccagcccacaggccgagggcaatagccaagcagcagtgttggctgttcccaccaactgcggaagagggggatgctcaggggcttcccagctctggggcccgccatgacggaagggttgccaggcctgagacagacgcccacaggccgagcccaccagcctgtggctctgcctctgaccccactgccctccagcagtaacccccctgtgagctgatccctgacactgagcatttctgctccctcttcccagagacagtctaaaggcagcccccaagtcccagaaagctgactcccctagcatcgactacgcagagctgctgcagcactttgagaaggtccagaacaagcacctggaagtgcggcaccagcggagcgggcgtggggaccacctggaccggagggttgtcctctgacaggcctggcacggaggagggcccaccgagtggtcccatgaaacactaagggtcgtcacgccctcccgaggagctcaaggacctgcctgtcaggaccagggctgggcctgccaacccagggcagtgttggggccggaggctgctgtgtctgcccaagctcctctcagagtccagtccccaggcctccagcgctgtcagctgcaccctggcattctcacagagctggctgcccacccagtggggggctatagcctcagagaccactcatcctctggaatcaacctctttctaataccctcttggaaaaagagcttgcccctcctccagcacactagagctctggccttgtgtgtatatgtatacatacgtgaacacatgcctgtgtgtgtgtgtgtgtgtgtacttgtatgcacgtaggcaccagcacaaagatctgaatgatgcaccccacccccaccccaataaagaaataacagaaaaccctc

SEQ ID NO: 1682 - DNA, 2781 bp, Homo sapiens
atggagggctgtcatgtttagattattgttgataaaccgttttgagattttgaaatatacaaagctgccagcttggaaagtaacagtcattgctatggacatgattggctttgggggcatcaagccctcccagttcgctgtgtctacccagaacattctgctccgagtcctgctgcagagcccaggaaatgctgacagcacctgtcaattttggcctcaccctatgagctcatttaaaatcacccaggatgctcattgtttggatgggtcaaatcttcaaaatcaaatggaaaaagaagcctcttgcgtaagataaaagataatgaggaaaacatttcacataaccaaagcattagaatgttaagtcacttcatattagacctttctactgtttcttcattgtttgtttctgttttttcccagtaataaattagagttctttttcctgtgtggagcctggttatgaaaccttgcataagactcttcatgtttctgggccttggctttcttatctgtgaaatgaagatggaggtcccttcctgcttttctgtggttctgtgtgtacacatccctaaagcttttagaatacaaatatccgctgatttgaaaaaacattaggagtcatttgagcttcccacagctggagaatcatccacgtacgatgtgattcttttaaacaagctctctcagtattgattttttcctttccccaagagctctgtaaaaatagtgttttcttgccagagacatcagggcctcagaactactgacttccttctatgaacatattatatggtttgtgtttggcttaggatctctttaacagaccatccagctccattgtgagaggctgactcagcagagccctccagaccgtccagctccactgtgaaaggctgactcagcagaaccctccagaccattcccactcttcgggattagaatgcccttccctgccagcccggggcaggctaggagctggtgctgcacccatctcctgcatgcacccttgggggatggcacactgcagcattgcctccttctgttcccaggactcaatgttgccaagtgccacgtagtccaagaatcccgccagtttgctataggtgtcttccagagcctgtcgttagggctcaggttgaagcaggtctgtcacttttgttcacagcttgttcagggaccacctcggtgctctcagcaatgttctctcccctgcgcctggctcctggcctgttccccacgtctccatcttaccctctggtccaccctagtgtttgccagagattctctttcccttccccttattgaaatcctgacataatcccaaaggttttaggagtgtaagattctacacgcatacctcttcaagtgttttattatggaaatttttgaatatattcaaaagtagaggaaacagtgtggtcagcctctatgtacctgtcactcagcttcacgatcttatttcatctgcacctcttcccggtaacttcatattattttgaagcaacatccccacgtgtcatatcatttctagttttctgtgttaaagaatcccaaactcctcccagttgactggagagaaaggtgtctgtgaattcccctccaggttgcatgtcacttagtccagccacctctctcatctcccaggctgccggtcagcttgggagtcggtgtccctccccgttctgctgcagtcccctgctgtggggcactcggcaggagaacaggatcctttacgagtgggtagcttagctgagaagggaaggctgtttcaggcaggtcggggacaaggcaggaaaaggaaagggtctgggtcacacctcactgtcgggtccgctgggcacactcgcatttgtcctgagtatcagtccctacagaacgaataagaaactccccaggacaaaagggcctgattcctgggataccaaagctgtgacctgacttccattccagcccctcccttccccagtaacaggcgacaccgttctcctgcgagggattcaacgcctcatcctttctccctttcagatgcagtggcagaacgtggagcacgttggtgaccagagcccctacgtcacctctgtcattctgcacatcaagcagaacgtccccatcatccgtgacaacctggcttccacacgcaagtacttcactcagttctgcgttaaatttgcaaagtaagtcctggggcgtgctcatctctgggttcttgttctttttaatagactttatgttttagaacagtttcaggttcacagccaaattaagcagcaagcacagagatttcccgtgtacctgacccccccaacatgcacagtcttcccattaccgacaccgccccacacacaaagtggcacattcgttacagtggatgaacctgcatcaacacgtcattatcacccggactctgacgtcgcgctggacattccctcggtttggacaaatgtacagtgacgtgtggccgccatttcagtgtcatactcaactgggttgtttttaaaaccatacttcccaccagcatcctcacaatttgagtgtccccaccatccagctgcggtttgttctggtgcctgcagtactgattttaatttgtacacaaaagaagcataatcataaaactaaatctgctacttaaagtcataggcaacagtaacagcagtacaattgccagccacgtcaaggcaaacaaaaatgaatggggcctactgttgttttgaactgtgcaggcataagctctccttgcccaggattggataattaaaattctttttcagggatttc

SEQ ID NO: 1683 - DNA, 2817 bp, Homo sapiens
attgttgttatgattactacctcaccttttactgcttgcctagatgtatgtgtgccacatcccaaccactggttcctaactcaccccaggctctcctgtccttgtgcctctgtttatacaggtttctctgcccagcatattttccctttcttacttcccctgccattcatttattcatctccattcatttattcatctccattcatttattcatcaaatacttatggggagcatccatgatgtgccagtcctattggcctgttgggctcatctcagacacagctttggtgactgtcctagtgggaagggccctctgcatcccccacaggcctgcaggcccatgctttgctgtggccacatataacgcacagggccctctctcagtcactcctgttctcctcttttccacgttggtcctagtacatcatttcccatggaggagctatgtgaacagagactgaattgagggaaatcacttttggaatcccagccctctcctcaggcgccagtggagcatgagctgtgctgtggatgaagtccgttggcacagtgagtccctgggatggaacctgcactcgctgcttgacccatggctgggtgagtggtgaagcggtcagcacaagcttctagcccaggcttccctcttagcagcatgtggccttgggcatgtcacagagtctcccttccctctcccccattttctcttctgtcaaccgagcataactgacgctacaatctcactgacagatggtgagcgaggatggagtgagcgggcatgtgcggctcttagctccatgcatggctcaccgacgttggccgctcttgttatcattacagtgatgattattagcctttctacatgacagattctcaaacctggctgctacccatgagaatcatgtggacagcccttaaacaaagattcctgggctcccccttgaacttctgcaccagaactgccaagatggagtccgggaatgtgttagctacgtgcttttaagacgactctggtgcccagcctgggaacccacaaggggcatactcctggcatgggcaatgtctgtgtttagtggggccaaatactgccccattgaatcaagaagtgcactctatactgggctgaatagtgtcccctcccaaaattcctgtccacctggaatccatgaatgtaaccttatttggaaatagggtttttgcagatataatcaagttaagatgaggtcatgctggaataagatgggccataaattcaatgtaactgggtgtccttataagaagaggggaactttgtacacagaaacagacatagatggaagttggtcatttgcctgtggaggcagagattggagtgatgctgccacaagccaagaagcggctacagaagctgaaataggcaaggacggattcttctctagaggctctggaaggggcagacttctgacttccagaactgcgagagaatacattcctattgtttgaacccctcaagttgcggatgatttgttacggcagccctaggaaatgtgacaggctccaagtcacattttgagaatcctacactgaggcagaaactctgctgatgaggcccactttgtgaatagttgacatgcttccagctttataaacatcaattcaaatcttagaagagaatttccccctctgggcaaaatgggcgttgacgtatttttttaaaatgggagttaaatgctgagggtataaggcacctctggcccatatgggactggctgagtcccaggtcttctgtcttcccggccaggcctgagcatgtgcagggaggaggccgacgactggctgggcagatgcaaacctccatttgtgtattgctacctttccagagcctcggggatgctcggtggacacctcacaggaggtgagattgacagagccggttctagtcttagctgtcttcttccttcctgaaggttcctggacaagtcacctgatcttgtggaacccaagtttctccacctctaaatggaacacactaaattgttatgagtgagcatcagaggaaatcaagagtgtgtgatttagctctgcatgcaacgggctctgtagataattttcattgcagttattttgacttcactttggtgagtcgactaccccaggttttgaaatgaacacagggaggcagaatacgtgttgtaatcccaggctacagttctggagcctttattgaaggagaagacattttttatttgtaagaatgaaaaacggaaggcggggagcctatgtggcatggaattcaagaaatggagcaactggccactggcgatgggaaggcccatggcagattctgcaaatctctctggagtttctgcttgagttcctgttcgccgctgtgagcccctcactctttcgttgctgagacaccttcaccatggctcaggaggccacatgctattcctcaggtggcggagggcagagaccgagggagtcggtaaaaaggagagggctggaaaattcctcttagcataagaataaacagtgatttgaatattcagttgtgagggttataaataactgtgagttttcattgacgtgtaagcggtgatacattttgtacaataattagttatttgattacttttgttttagcctgaagtagaggacaattgacaaatgtgaatacctctgagactgatggggcgcagtaaactaactttatttattacaaaatgcaattttattaatatgaattgacagtaattaatttgctggtgttgatgttgttaataattgcatgtaatttatgaaatattcatgctagagcagaataaaataatgcacggg

SEQ ID NO: 1684 - DNA, 2838 bp, Homo sapiens
ataacttgaaaaatcctctccgtctcccttccctgcctcctttcctttccctttcctctgccagtacaactagacccggcgtctggcgtccccggtgcccagcattctgcggggcaggcggtgtggtacccacagcccctgaacagcctgcaggtgaaatggaaaatcaaacaaaaccaccagatccaaggcctgatgctcctcctgaatacaattctcattttttaccaggaccccctggaacagctgtccctccacctactggctacccaggaggcttgcctatgggatactacagtccacagcaacccagtaccttccctttgtaccagccagttggtggtatccatcctgtccggtatcagcctggcaaatatcctatgccaaatcagtctgttccaataacatggatgccagggccaactcctatggcaaactgccctcctggtctggaatacttagttcagctggaggtgcagtgtcctcctggtgtcaccattggctttgttgcggaacattggaacctgtgcagggcggtgtacagcatccaaaatgagaagaaagaaaatgtgatgagagttcgtgggccatgctcaacctatggctgtggttcagattctgtttttgaggtcaaatcccttgatggcatatccaacatcggcagtattatccggaagtggaatggtttgttatcagcaatggcagatgctgaccattttgacattcacttcccactagacctggatgtgaagatgaaagccatgatttttggagcttgcttcctcattgacttcatgtattttgaaagatctccaccacaacgttcaagatagagagacacagcaagccatcaactatggttaattttgaaaaatggaaaagttggattgggcttacagtcagcactcagttatttgcaagtgtatttctttgctttgtagagtatttttattgggtgttaactttgacagctgagagtgggcttgcaagaacacaatctaaaagtgtgtttcaattgagtatctctctagtagaataggagttcatcctgaaaagctgtgactcattaacccagtaaacatatacaaagtaagcttaaaacactataaacatgagataagggaaaatgaatccagagttctcatattaataggtagtgaaacaataaggctttttagagcagactttgttggcataaaataacctggcttctatccctaaccctttcctacctttcctctccgtcaacatgtcctcatactgaagacaaacttgtttcaatgatagtcttcattttcaaaaacaaaaaggcaggcagacagaaataatgatgttttcttgcactaagaaggtactacttgtacacatatatcaaaacctcattctgcaaagtttttgaaggtttcaatgggaaatttgattttattacaaaataaaacattttttaatgttaaagtttatatattccatgcttgttttctcattcactggcatggatgatcaggagctgcctatatatgaaggcagaatcagactatcaggaaaggagctggccagggccacagccagtcaagatctctgagcaacttagagacattggtgtcattatatgaagcttgcatttaatacatttatacataatacatttgtacatttaattcataacgtctcttggtcacagatgccttatatataaaataagttgccagatctctaagattgcctagtacacctttgtatctcatttgatgtgatacccagaagagatcattgttttttgtttttgtttttgtttttttcaagaagatccttcgtgatcaccatgctgttctcatggtaagaactggagttatgtttttaaatttggaaatatgacattttatgtagcactttataaaaagtgaaagcgacaaattccaccgctgcttaatactgctttgcttctttttattgacatgatagataaatatgtatctacacagagtaataataataaaacacagtaaacattctatttctctatggtctacagcatgccagtaaataatatgtaggaccaataataaattatcaattacacatttttgtgttaactaattaaaagcatagtgtataagtgagtacactctaattaacttgcttctgttgcactttagttttctacctgcatatggactgcatttttttttttaacacagtcagtatgtagaatgggatgtattcttctgctgctgcttattaaataaagaaagcctgagtgttcttagatggggttattctgagatgagggtcttagcctacagttctttttgaaatgaaaggtgctttgttttttaattatattcatcttttcagggtaaatttgtttttctgagtttctcgtaatgctcatttttacatgctgctactagcttttttttttaaaaaaagtaaaagttgctgctttctaaaatattaattgccttatatttgaaagtgccattgcaatcgtaagtagactatgtatttcctataatgatgtctgatatttaaataggaaatcagacaaacaatattcagaaagtttaagcatataaactttttatttttaacttgcctaaatccctgtattccaaaacctgctgcatcataataaatatatctatatatatttagcataagacgtgatatttttaatttcttttttaaaaaattatatttgtctcttagagttaaaattttctttatataatattgtcatatgtcatagttttaatacaattcacatgatttctatgtttcttaatgatattttgttgtgtaaaattgatcggattgattaaaaaacaaattctctgg

SEQ ID NO: 1685 - DNA, 3480 bp, Homo sapiens
ttttgcctgttagagcatgcaagctgagttgaggtgaggctggagatacgaatttcaaagtcagagatgtataaatatattcagacccatgacactgaactagaccaccaacagggtatatgtaagaagagaagagaaaatatcacagggctgagcccagagaatgtgcatgctcatttacacatgagaaaccgaggctttagatggttaaatgacgtgctctggatcatatctgcttcctcaagaccacaactgcttcctttcccagtgaaaatctttctttggattcttgatactaaaggagaaaaaatctccatcctgaaattcctcaattcagctctccagaaagttctaggaatttgcaatgtgcttcaggttggaatggattttctactagcagcttttcagcccttgtaagttcgttatatcatccaaatatatatcctttcctttttagtgtcctttaccctaaaattatagatttcataaacatgtcacattcattcactcaacaaacattaaatggtcacctattttgtgcatcatacacagatgatacaaaaataagcaagatcttcccttgccttcaaagaactcccagttttttgcaaggaatagatatgttacaaatacaatacaatacgatttgcacatttttagtagctcatatgtgacatagagaacggagcaaataacttcctcaggaagaacatcaggaagacagcagagaaaagacagggttctgacagcactcctaggcagggttctgaaaggtgaacagttctccaggtggccacgaggggactcaatgtcactccactcacccagacctccttcagctgggaggtggtccctcagactctaccacctgtcccagctcacatcctgttgatattaagaacatgataagcacatgttcttatggagcacaaggctggacatctggatccttccctttcctacagcatgatcctttgtctctcatccatcaaccctgccaagctcattacctggtaccaggaaaggactctaaatacatgaaagtccccattggttctcaaggccccacaatgaatcactctggcctcagacatgacattttagtaagagaccacgaatcctactttagaaagaaagggcatagaggtatgatcactcctggacacaaagggaaaatgcggagaaattaaagggttataattagttataaagatataggatcaacacacacttattattgtttggtttcctaatcacgtcgtgattggataatttcctgctgtttgaaaccaggacagaggttggtactgagcatatttaatatcagccacaacatccaaaagtaaccccaggccacttttaatcctctatcatttctgaagtctcgctctcctgaattgaggactgtacaccagattcttactgttggacctggcggcatcagctgctgcatccactgaatccacagagacatccgtgaccaggatgaccaccgccttcgaggctcccagcctggcaccatgcatttctgaagtcaagtgtcgcacagcaaagcccaaggcatcccctgaggatggagaacagatcacaccaagtcagtactgactgcggctggacaccctgtctcacggtggatccttaagtcacttaaaagctgaatgattcagagactccaaggaacacccagttgagatctggagagacgtggaagagcatctagcccctcactttccaggggaagaaactaaggccaaggagcaaagtgactggccaaggtcacacagtcacttatgccaaaaataagaaccagaatgcagcttctgcatccagcctgtggcaccaacgttaccgatttggctggggcctccctcccgctgcatgacgtccagacggctcagcaaatgggctttctccggggccacgttccatggcacgtcaatggtggtgatgcttccatactggagcactgacccctgagtgagatgaggccctaaacggaacaagaaaatggggattattctgaatcaagtggagccccaaaaagagcctcttcgtcacctgctgcttcaggtgcctcactcactcacctatattggcttttgaaatgaaagccttagcaaaactcttcatttcatcaaaagaagaagctgggaaactggaggagccatccaggagaaggatcacgtccaggggctggctgcagtctgcaaagataaccaggaagaagcacacacaataagaaaagatcttcccccgcaaaaggatcacagtttgtctccctgccagggaggtgaggaaacacaggccctttgaagctcatccacaccgctcatcacgatgaccttcttcttcttcttcaggccctggacgtagcggacaaagttccgggacatccgttggggctcctggctggccatcaggagcagggcgatgcggaaggcttcagggcggtcgatcttgctgatgatttggaacagtgtgtatttcaaggcctcgctggtggaggccacctggctgcccgcatacttcacccggctggcaacgcgccgcagctctgacggtcgcttccggtccttgagcccgatgtaggcgtgggagccgtcgtggtactccaccacagccacgcggacccacttctaggagatgcgcagccgctccatcatgtccaccacaaaggccttcagcacttcaaactcagcctcggacagcctggaggagccatccagcaggaagatcaggtccagtagcctgctgcagtagaaatcgtgcaacagcggttctgagatgtcctccacatacagagtggtggggctcaccggggcatctgtgggaggcaccaccaggcctcccggctcctggcaggcttcacaggtgagggtgacaccatcacagtggctgcagaaaagagcgaagaaattaaaatggttcagaaagaacctatggacacttctgagccctacagtgtatgactacttccatattcccacagaatctcctctgttccacctgaacttgagatcccacggaccattccacacccaagtgagatgtcactgtttaacatctgtccccaaatagcatgcccccccacttcaaaacacacacatagccgacttcctttgattctagaaaccaaagctttagcccatcctaggatatgaaaaaatatactcgttgttctaggccatccacacagccactcaaagctgatttcttttcaacctacatctttagcaacatgaatacttaattataatctaagccttcttacaagtgtctccaagaacaaatgttactaaaatgtagacgctaacctgtgcttgtacatgttctgttgaagataaatgctttacagtacatattctaacagaatgtaaattgcatgagttttaaaacatgtttaatacgttgggccctaacgaagagagaaaaaattggagcaaaaacattgtggaaagatgaataaagattcaaaacccc

SEQ ID NO: 1686 - DNA, 3013 bp, Homo sapiens
cattgccctctgccccgcagcctgcccgttcccaggccagcgagggcgctcccaggccggtctgcagccagaacacagcccgttccatgtgcttgtcctcgggacacattaggaatgaacccaggcctcagtcctggcctcctcctcaaggctgggtgctcagacgtccccctcagcccctttctctagaccttccggctgaacaaacgagaacatctcacagccctgcaacagccaggagctgctcgtggagctccacgcccggctggagagagaggaggcaccctgggcagcccgccagcacccaggctctcacagtggaagcccacgtcttcttgggctctattttgaaagctgttctttccacgacggctttgacaagaatcgatttgagtgagccggcgtgtcaatacaggccagcacaggactggcctcagggccacattggggagggtggcgaccaggccctggctgcagcccacgtgggcaaaagcatggccaggcaggaggtggggcctgtgagcttggctacagcgaccgtgggcgctgggcccggggctcctcagccctgaggggagacccaggcccaggcaggctcccaggcgggctcccgggctcccagccttccgatcttctccctttgagaccttgccttctgcacagtgacaggaaagagccctgagtcccactttgcagggatgtattgcatttccagaaagttccttccgggtgcagagtgatacatgaaccctggggactcactccaacttggtattgattttctccacggaggacccagcagtcacggcccgtgtctgcacagccccttggatcctgcggaggaattcagccggcccctccccctgtgccgaaaaccacggaggcaaagccaggccagggtacagtgagaacacgggagaggactgagagaccgctggctgccgagggaggaagagcaggattcgcacccccgtcatcgctgggcccacacgccgccgacagcttccgcgtgtggccatctgtctttcagaaactctctggcagagggacccagcagatgacacgggggccgttcacactctgaaacctgcctggagtcaaaacactgctggcgagcctccaccgcaaacccaatccagatggtcttccctggtggccctcggggtggcgggcaccctgcccactccctgccagcccctgcccgctggactccaggcccggtcgagcccccgaccggtctcctgacccagcatgctgctctcccctgggcccggcttcctcgcccgctgggactcccaggcccctccagcccagccccgagagcaggagccccaagggaggcttggcggctgtggaggcgagtgggccacgtgtagctgggaggccggcaggaccaggagcccctcacagcgcagcacccacagcatcacgagccacttccactcctgggtggcctgggggcccccaccctgctctgagctgccccttgttgtgacctggggtcccccgtggtgggcccgccccttgagcctgggatccagcctcagcgaggctccagaagtgtcgtctccgccggccaggcgtcagcgcctccacccaggatcacacactcctatctctgcacttctgccctccatcctgctccacgccgcctctgcttgttattccagcacattccagggtgatgcctgctgaagccacgcagccagtgcctccaccctaccccccatctgacccaccggccccttccgcacgctggaagcctgcccggcctgaagtgtcctcacctgtcgccctatcctcccctccactccagcccaccggtgactcagccctcacagctctctcctccccgagggagccggtgacttggctctgatggtgccgggacccagccccggcatgttcagaatccttgtcctttaacctgcgtccacatgtagtcgcctccacctccctgcctgaacctccaggccctgcagagcaaacactgctgcctgcaggagacccctggggccttctccgtcccctcatcctcctaaggagcctcccctgccaccgtgccagaatgtgccggaggaacagaggcccgagcctcccgtggccccagcgaggcttcctctggggaagacagtgagcccaacgccctggctctcgaggggtggacggagtccagctggcatcaaccgggtgcccctcttcaccggtgtccacagtccttgagagcaaagggttcccagaggcgacctccctcctgcacaggcatttgtcatccttaccctctaggacagctttgccatgtgcagtgaacccctggacagtgttgcgtgccactttgccggatttggactgtatacagaccgaagcatgtggcatgaagccttctgctgtcagcaagttccttgtccctcgacagtatgtgcccaggctgcccttcaaggtggcagtgatggcagttgtctcttgcacgctgcgtacagttctgtcactgactcttacacacagccctggagacgggagagtgccgggagcattctatgcaagtgtcctggcctttgcgggcgtctccacagcacaaacacgagtcagggaccacccctcttctgcttccatgattccaccaactgggtggggcagagcagtgccagggccggaggcacgccccaggtgagggcaggtggccatgccagtgagtgcactgcgttctcagttaattcatccgaaatatttctaagtttcttgattattgcagttgcatccccaagataatgccgccctcaccaagtagaaggcacatgtgctctgatggcccctcccacactggggtcagggcacagcaacttagcgaggcgacgtgggggctcagaggacctcggaccaggctcggcacatggggcttctccagccagccagggggaagcaccctgcagactgctaacttttgcaaaatagagtaaaaaagatcagctagaaaaataaaacaaaaaaggaaagatatacaaaatacaaggcc

SEQ ID NO: 1687 - DNA, 3144 bp, Homo sapiens
tttgagctggttagtttgctgttggagcgtggtgccgatcccctgataggaaccatgtacaggaatggaatttctacaaccccccagggtgatatgaactctttcagccaggctgcagcccacggacacaggaatgtgttccgcaaactgctcgcccagccagagaaggagaagagtgatatcctgtccctggaggagattctggccgaggggactgacctggcggagacagccccgccccccttgtgcgccagccgcaacagcaaggccaaactgagggccctgagggaggccatgtatcacagcgctgagcatggctacgtggatgtcacaattgatatcaggagcataggcgtcccgtggactctgcacacgtggctggagtctttgcggatcgccttccagcagcaccgcaggcctctcatccagtgcttgttaaaggagtttaagaccattcaggaggaggaatacacggaggagctcgttacccaaggcctgcccctgatgtttgagatcctgaaagcgagcaagaatgaagtgatcagccagcagctgtgcgtcatcttcacacactgctacgggccctaccccatccccaagctcacagaaatcaaacggaaacagacctcgcgcttggatcctcattttcttaacaataaagaaatgtctgatgttacatttctggtagaaggaagaccattttatgctcacaaagtgctgttatttacagcctctccaaggttcaaagcactcctctccagcaagccgacaaatgatggcacctgcatagagattggttatgtgaaatactccatctttcagctggttatgcagtatctctactatggtggcccagagtcactgctcattaaaaacaatgagatcatggagcttctgtctgctgctaagtttttccagctggaggctttgcagcgacactgtgagattatctgtgcgaaaagcatcaataccgacaactgtgtggatatttacaaccatgccaagtttcttggagtcacagagctctcagcatattgcgaaggctactttctcaaaaacatgatggtcctcattgaaaacgaagcattcaagcagctcctgtatgacaaaaatggtgaagggaccggccaggatgtgctccaggacttacagaggacgttggccatcagaattcagtccatccacttgtcgtcttccaaaggttccgtggtatgaaacgcctagtgcagggaatgcttcccgggaactttccagttctcctgccgcattggctttacacaaacacagacaaattccacctggcacctgtttttggctgggccaaggggctgcctctactgctcccacgtgttcctgttgaaaaacaaaggactttccactggtctgcagatcagatcagctgggtccagagtttaatgggcaactggacaaccaagttaaccccaattgaaagcacccctaggaccattgaacacccactgccggggaccactgtccagtgaatggattgaggccttttaaaggtcactcaggttccaggttgacagttggaggacttcaccgtaccaaccctgaagagattgtattacacattaaggaccttggtagctgtgcttcagcaaacgtcaaccatggtagcaaattggtgaggctgtgaccaataatgaggaaataatctggcaaatttttaggggtgggaacttttttaaatgttcatttaaaaaaaaacaaaaacagggcagtcttgtagtttaaaatatatttctaaaagcttaacagttcgttttcaactaaattgtgtttagggatctgtgtttgagatttttctttatttctttttttttttaaatagtaagtcacaggtccacactgtgtaaacatgcatctgataagatactgctgatattctaaacaagttgaaataatcttgccttagtgatcatgattacacaaaagaggtgcactgccaataagtatctctaattcaatagttgaaagcaacctgcatgctaatcgtggtttcggggtgagaataaaacacccccacataacatgcatttgcatgggcccgaacctgtgaaatgttacgtttgtgcttcatttttgccaaggtaaaaatgttccatcatttctagctaaaactccatttggtgaaaccaacatatccatttcttttcctagttacggatgatttggggatgcttttgcagaaatgtgttcatagatgatgctgaatgggggaggggggcagcacgtcagagaatttactattaatcccagagttttctctgtattctcagaagatgttaatagtttgttactagccagagagtatgactatgttagattatttttaaagatgaaacatgtatgataggatggattctttctgtattctgagagtgtacagtacaggattattataatgaaagtttatatcaacagggtttcgttggctctgccatatattataagcaaaagagattggtaaagtgccacagtattccagataacttttcagttgcggcctttcttctcgttctttaatttgaaacctagatacatgcagtaaaaactaggagaatgacttttacccttggggacagccaagttttgttgataaacctatttcctagcatgccttcaggaagttgtgccagaccctagattgtgaaggacccactgttcttctgttgtacgagctccctgaaccattgttcagaggaccaatgtcacatcgcttcatgggcatggcccatggagcatctgggtgatatctgtctacagtattggctcttctgcgaggctgatacacaaggcctctcttccacatgatcatttgcaaacctcccccagcccctaccatccaatgtggaaggaaaacaagaactgcctgaagaagagtccaagctacagatacacagcgtgtgcattgcggctgtcaccttcctcctcccacttctgtatcctcagagatgctgcgtggatgtttccttaacctcagctgacttccctgtgaatgtctaatgctagttcagggcctccaggcattgatttgtacagtggtaactcccaatgaggcttctgttatcatttggtgtgctttctctgtcattaaaagaaatgattttcccagaaaaaaag

SEQ ID NO: 1688 - DNA, 2991 bp, Homo sapiens
ttggtaacaatacgaccccatggtcgttcagagaatcttcgcttcccggagagtgtgtcccctcccccagccccggtgggcgcggaggtagctaatagctgtctggggtcagcagatcttggttccccgctttgggccattctctgaccctcacttttcaagtctgcggaatggaattgatgataccttcttcaggaggaggatgggagactccagtgacaacaaaacgaggcggccggccgagacatcgggagggattacgttccccgcaacccctgtgtccccatcgctagagccaacctggaccagggcatggccggcaccagctcaggccgcgggtcccggcgccggagggtagccccaccgtccccgcctcctgggcgcattaggccagcgaaggctgcaccccgccgcgggccgcgctctggctggcatgcaggtggtggtagtccctgcagaccgcgcctcccacaagctgcacaaccaggtcgtctgcttagcccaggtttagctcctctgcggagggctgatgagacggtggagcggctgcctccgggtctacttagtttttacagctgccgtttgttgacagaacagccacctaaaggagagctttagagggaatgagtgccctggaaggaggctctggggtggggagaagttggtctcatgggtccccaatttctttctttctttcttttccttccttcctttcttttttcttttcttttctttctttctttcctttttttttcttcctttttttctttcttctatttcctttcttcttttcctttattttctttctttctttctttctctctttcctttctttttttgacggagtcttactttgtcgcccaggctggagtgcagtggcgcgatctcggttcactgcaacctccgccatccgggttcaagcgattctcctgcctcagcctctcgagtacctggggttacaggtgtatggcgcaacgcccggctaattttttgtgttttagtggagatggggtttcaccatgttggccaggctagtcttgaactcctgacattgtgatccgcccgcctcggcctcccaaagtgctgggattacaggcgtgagctaccgcgcccagccccgagttctttctagggtgggaggctgtgagtctgtgacatcacggggatattcttgggctggttccttgtctgtaagagcaacgaagggactttgtaccctgcaaagtgcaacttccggggatgattgggaagttgaggggttgaatgcattcacaccagagtcactctcagcccagactctccgggtcacctctaaggctgtgcactaggtgggcgtcagaggtattacaggtaaaggaatggcggctcagagggaaggagagacttgcctaacttcagggcaagctaacgcttgatttcaacttgataaatttctgagtatgcagtgggtgcacatagcagagacaggtaatgagaagttttcttttttccttttctttttttgtggggggtggggacagagtctcactctgtcacccaggcaggagtgtagtggtgcaatctcggctcactgcaatctccccccaccccacctccaggttcaagcgattcttgtgcctcagcctcctgagcagctggcactacaggtgcacgccaccacgctgggctaagttttgtatttttagtagagatggggtttcaccatgttctacgtttcaccatgttggccaggctggtcttggactcctggcctgaagtgatctgcctgcctcagtgtcccaaaagtgttgggattacaggcgtgagccaccgcactcggccgagaagtttttctgattaaaaaaaattttaaggcacacacttcagcagtggctgtgaaggaaccctgatgtgtatctaaactgtcgcctcgtgcacatcaccccattacttactctgtgctaagtgctgtcatgcattacatcattactccttagaacaggcctatgaggtggagtctgcattaggcccattttggacaaggacaccaatagtgtgggaggtggtgtaccttgcccaagcccccagcaggtaagtggtggtggggattaggacccaggtcacttgagtccatatcctgggctcttagtcccactctgcctggctgcctgctgctccatgaagccaaccctggacctagacctggacctggatcgtcatagcccagatccctgtgtgcttcccaggctgccttgtggcaggtggatggtgcccctcgagatgggcagggcaccatctggccacacgtgcctcatcgtgatgggtccaaaggtctgggcaggccaggacacacctctgtcaaccagagcagtgactcagagctgtcggcctcagccgtaagggcagggagagggggcaggggcttgggttggggtctgccctatttggggcacagcagagcgaccaggctgactcccatggtctgaggcagagcggggagcctggagccttgggtggggtcacctgcctctcttcttactggttaagccaccagcgatgactagtgcctacttccttcagagaggaatctgacggctgtggcaggaaagtcaggggcaagaattgttgcacagatatgctaatatctcagttctgccactttctgtaatctcgggtggtgatctaatctgtctaaggtctattttcccatctgtaatggggaaaaaaatcatccctggagttattggcaggattaaatgaggtgatattagtaatgcaatagtcaccaccatgcccccacgaaaactaacattcattgagaccttattgtgttgggcattgtgctcaggacttcaaatgggtgacttcattacatcctcaccatcacctgcccaggtaggcatcatgtattacctgcaacttacagataaggaaaccgtcttagagaggttatgcaacttgccctgccaaaattgaacccattgtgaatatacagtagataaaaaaaataat

SEQ ID NO: 1689 - DNA, 3956 bp, Homo sapiens
acgtactcccctgcgtcctctgcgcgcagccccaacacagtgagtgagcgcacgggcccctcggccaccatctggaagcgcttgcccacccgaagctgcgtgttgccgcagcgccacaccacctctgcacacgctgggcttagctcgcaggccagtgtcaccgtgccacccagctcgccgcacacaggctccagcagccggcagaacttggcggccacctctgtgggcacaaaggggacatcagccgggctcttaacagaccagacttgagccccagcttcgcccctgtccagctctgggacagaggtgtctggaggagtccccgccccacgccccatgcccggctcaccttccacctgcactgggaagtcctgcccctctgcgcccacacggcagctgtagatggcgctgtccagaacctgggcgccatgcacggtcagggtgtgggtgtccccctggctggctgtctcatgccgcttgctgcggcgaatctccacaccatccttgagccaggtcaccgtggccgcagagggtgtggccagtgtggcggtcaggatgatgtcttcatgctccttgaccaccagaggctccctgcggcagggtctctctgaaatttggggctccagctctgggtagaggtgagttggcatgagagggggaccctgtcatccctggaccggccccgctccccttcagggccaccctaatgctacctggcacccctgatacccattgctcttcaaggatggcccagtgcagtcctgagcaccatcaactaccatccagaatcccagggaccatacagtgtggccatcagcttcaggcgaggtggattcacccaaagcactgacctgccacgtgcaggcggaaggacagccgttggccccccgcctcacagctgtactccccagcatccgcctggcccgcctgctgcactaccagcctccgtgtgtagccgctggcctccatgcgcacttttgagctggagctcagcttcttcccgtccttgtaccatgtcacctccatctggccctgggccacctcacagctcagcgtggcactggcccccgcctccgcctgcacctccctgcatgccggctgctccttggcaaacaccaccttgggctctgggatggacaaggagggatgcagggtcagaggctccagagcagacacagcccatgtgtcagcccagtgacagccaggcagggctgtccatcattaagcagtgcacggtgacgcacagagctccccccggcactaccagagccaaaggtctaaggctgcatgttggcagcaccatcatcatgtcccttgggaacaggatgcggccccttccctgcctcggtcttccagggccctggggccctcacctgtcgccagccctccccaccacgcagggccacaggcagtaggacgtgaagggtcaggagagatggaccagcaacctgggccagcccagaggcagcggagtgttggcagggccattggaaagagggtgccaagctgagtgtggtctgttgtccccagctcagggacagggtggaagggagatggatatcataaagacaggtggacacatggtgatgaccaaggggcccagcacaggcttacagagatctagggcccagagcacagagacaagcccccaccacccagtacacgctctccagtcactgccgggccctcccatggcccagcacccacagaggagtcagcagatcacattagaccagacccagacccccaccccaaggacatcacaccactgtccccaccacccagacagaaatcatcacatctgaccagacccggaccccagacccccgaggacatcacgctactgtccctaccacccagacaggggtcctcacatgagaccggacccagaccccagacccacaccccaaggacatcatgctactgtccctaccacccccggctcagccactgcagggcacacaccatggtcaactcagcccatgggcctgctctagtctcatgacataaggacactggcctgagagctgctggggagagctggggacacagattctgaggcctacatagagggaaggtgccagggcccacagcaccttgggccgcccaaacatgcccttgtagtttcacacccgacactcagcatcacctccattttgcctaaccctggcacccaccagccacatgcagatggaaggagagccgctggcccccagcctcgcagctgtactccccggcgtccgcctagcctgcctcctgcaccaccagcctccgtgtgcagcccacggcctccacacgcattttcgagctggagctcagcttcttcccgtccttgtaccacataacctccgtctgggcttgggccacctcgcagctcagcatggtgctggtccctgcctcagcctgcacctccctgtgcaccggctgatccttggcaaacaccacctgctccttggcaaacaccgccttgggctctggggatggacaaggaaggacatacgaggtcaaagatacagcctaggtcaggaagaccaccctaggataggagggcctggatgaggaagtaggagaaacagaaccttccccaggctctgcactggctgcgtggccaggagaagtcctgccacctcccagcgcaagaatcacagtttgtctatccactgtgcacggcgccatgggctatcacaggtggggcagctatgacaaaccctccatgcatgagctcctccagggcagggactagggtacctgcacatgcggctcttcttcaagcatgtatggagctttaaatccacttgtcatttttcaaccttgcatcccccaaaaccacatttgtttggattttgattgagactgaacgtctttcattcttccatggcttctatccactttagatctttactgtctctcaaaagtgtttcatagcttcccccacagaacctctcgacatcttttattagactgggatcataaacatgatgcctttgaggcgtctgtcaatcttttacgttttcattttccaactgcttgctgctagtctacatgtacggaagtttcttcacacagatcttgcaagggttgatctttctcaactctctaataatttatcttctaggtaaaccgtatcttctgtcaattcacttttttctaacttttacacctttcgttttactttcctcctaactgtgccatccaatgctggatggaagtgttgaccactggcttcctcatgctgtcccctggctcagaggcaaagcttacaaagtctccctttgtgatttttgtgtaataccctgtgtcaaattaggaaaaaaaaacttttatttatactttgttaagaattttatggcatgatggatgctaaattttgccagacatttcttctgaatatatgaggttaaatttttatcaaatatggtactttattctgagtttaagataattacattgttttcaaatttcaatcacatatcatgattttctaatgtttttaacatgaaagcagccctcattcctagactatgaatttcatcatcctgtatgattgtcttgatgtattgctgaattcagtttactaatgttttgtttaaaaaattggccatgatatccataattctttgatctacaatgtgcaaacttcctatcttctggccagattttagtcatggcattaagctatctgcatataatgagttagagggtatatcttcctttttccattctccagaagaatttccatgaacatggaagaatttctggccagaacgtttggaagaatttctcagtagggccacatgtttgatgagaagatttttcgctaccggttctagtttttactaggttgtagtaactgagataacttcagtaacagtagataactgcatataggttatctatttcttaagtctgtttttggtttctagaaattatataatttgttaacacttttcaaattt

SEQ ID NO: 1690 - DNA, 3745 bp, Homo sapiens
catcactcctcatgttgttgctgatattgtatagtttcccctgagcacggtttcctggaggaactggtagaccgtggctcctttgtgcctctggtttccccacatcccgtttcctgagtggaaacctctctccacggcccccttctctccccatgccctgctcatgctcgcacaaaagcagaagggcctggggacacactgggcatggctctgtcgtgtccatttctgtatcccaattattagcacaacagccagcaggaaggaggccttgtatgaggccagatacagggcggaaacttcactcacagttctgccctgtccaaaagagacccggcaggggtcagatagctccagcagtgccaccttatcctcagggcactgcccttagctccagactcctgaatgggcctatgaaagatgctgtcacttttgcaactttcctcaaaggttctgggcaaggggacacctcagggctgtgtttccaggggaggctgatgtgagggccaggtattctggggatggtttctcagcccactaacttcagacaaggaggagaacacacctgttcttcctactggacaggaaaccaaacaactctgcttcctaagttgccttggtttctggggttattggcatccgagtttgccaggagtggaaggcctgggacaggagaggcaggggctggcaggcctccctcttcacagctccaagggttaaaaagcacttagcagcagcatataataaaagcaaatgtaagagaaagaatatcctaaggatttaataaactgcaaacaaaattatcacgattcttttcctagccagttgagttttcagtgattaagaaaatacaatttcctgtaattaaatcttaacaagaaatgttattaaaaacactctgtcccagctcctgtcataattgcatgctcccctagaacagtaaacagaattagactttgcagcgtacatgctaatccatgtgtcattttgatcaaatttgtactaataacctgtcttcttattctgagatgaggaaggcagggaagagggagccaggcccagagggcaaaactgagccctggctggggagtgggagctgcgagtgttgggtttggcccccaggatgataagtgttgaacttactgagcacatatgcacactgggctctgtgctaaacaggttacacatataacttcacatattccttacacaacctcacataatgttgttatgctcattttacagacgagaagactgaggctcagagaggtttggtaacttgcccaaggtcactcagagtcatctagatctaaggccccagagtgtggctatggggctattctagggcacgggctgtcaggtgagaacattctctgtcctggagaactggactggcctgacggtagctggcaggaagaacttccctctgccaggatgtgctggccacagaagcaagggagactgtggcatccactttgagaagtttcttttcctttgaaaaaagccacagggtgggagaggacattgtggaggggctgagggtgagagcagagggctggggtttgtatggtgcagggttctgttcatggccctggggtagacctgagatgagcattctagcacagttaagagggatcggcgtgggtgtggagccctggagttcaaaactgctgcccccacacatgcgtgtgtatgtcagtgtgtgtgtgaatgtatgtgagtgcatgagtatatgtgtgagcatgtaggcaagtgtgtgagttcaccactgaccctgtgtatgagtgtgtaagtgcatgaatgtgtgtgagtcattgtgagcatgtgtgtgaatgcaggcataggagtgtgtgaatgtgtctgtgactgagtgtgtatgtgagcacataactgggtgatgtggttgtatgcggatgtctgtgtgagtgtgtgactatgtgtaaaggtgtgagagtggaagtgtatgaattgggtacatgtcaatgtgtgcatgtgcatgagtgtgtgactataagggtgagcatgtgagcatggatgttagcatgggtgtgcccctggagccccagtctgctggcgctgatggaggggcagagccaggccagcatgcgggccctggctgttttcctactcacagcagccccctccccacagcttcattccctgcggaaagtgagcctgaaattatcctcagctcgcacgctcctgcacgcacacaggcgccagtgcctccatctcccactcccggtccactaattagctcttctaattaaatccctgctgggttggacagggagggccttctcttttccggatcctctgaggaccaggtcatgctgacctagaaggctccacccactatccccattcccattccacagcccctgctcctgctcagaggagcctggatccagggaagagacagaggaggaggggacccctatgggtaggagtcctgttcagcaaacacaaaacacctactatgtgcccagtactgtgcaaagctttctggggaaggaggtggagatgacaaatgggcaagacccaggggctccccattctgagcttccttctcccaatcactctggctccgaaccttgatctcatcctccactcttgtcccttctggtacccccaggcagcaacctgccgcctccaccttatctcctcgcttctctacagagagttcctctttgaccagacggcctatgcattgggccagctgagccctagatcattcctcctttatcaaagttttaatcctctctgaggtcccgtgcactcacctcgcagctctcttgggagcccttcctgactgctgcgtttcctcccgtctgctggggccagctccgggccttggcgtatgccgcctgcttccctttttataggctccacctgcctcactaaacatctttaagcctctgaaatcagaggccgtgtcttgtgcctcttaaccctttactgagcccagcacattgtgagtactctaagaatgtctacggagtgactgacgaaccaggaagatggaggagatgggttcctgcactccctgtgctcgcccctggagagctcctgtgatatggaagagaatcccaggctcctggatctcagcgtggacaagacttagctgtcaccttgtctaacttctcccttcgagcagagcctgccacgggaattctttgcaagtgacttattgtctctcagtgtgcctcttattgtgtaagagtgaaggggtcaggataggccgggggcaagctgagcgaggacgaggcctgagccggcgggaggctctggaccatggacagcatcacagagtcggcccctggaggcaagagggcggcttcttattccccgcatcaggcagtcaccggctgccaggagccggggtcggggaggagcggagcctctccagaatcagggcaaggtggctgagagcagttctctagaaaagggggctgctgtgagctgttagcagcagatgccgattttggggcctggtaagggggtgtgggcgagccccaagagcatccaccacatccccacccagaatgtactttgtactagtcgtggttcctgagcctgtccgagaagagcggggaagaaggatagaggggtctcttgtcttcagtgccagcccatggggcaccacaagatgccactcaggagaggtttcgcctcaatcttgcactgaattatcatctgtcaaatgcgtgaacacatcctgtggcttagtctgtaaggctgctataat

SEQ ID NO: 1691 - DNA, 2774 bp, Homo sapiens
taggggtactatgttctcaaaggggcacaagaccagtctaccttctaaattgccttgtcaggaaagcctgggcaaaagtcactcttacggagcccagaacacagaccttgattttaaatgcaccacaagggactctgccaggcctgaagtttactgtaatgaacctccctggacagtgcagggtcagatcgggtgtcagcagccggggatggctaccaggagcctcagcctcttcctgtctttcagcttctacaaatccaactacgtgcaaaggttccactactcccggcccgtgcgcagggggaccgtagacccagagaatgagtttgctgtgagtatcttccctacccttgatcattccctggagccacctggaggaaccagagcatgcatcggccagcctcagaatgggaaggaacttgatagaaagccagagaaaataaagccaacctccatggataccatgacgtccgttccccaatctcttccattagggcctgtgtccttatttcttgagcctttttccccttaatacagaacccaggcctcatgtcagaggcactttttcaaccacagggcattcaggcattgccagcacgtagaaaccctcaggctaagaaggggtgttgataaaatcaaaccttccagcaaacaccagtaagaagccacagcaatgtagtcatcactgtcccctgagtgctagtctcctctgtgtgtgtccagctaggattcaaacaagactggattaaggaggtgtctccaagtctcagctctttggcctggacagtaattcttaatatttttggagccactgcctctttgagagtctaatgaacactgggaacccttccccgagaaaacaaatggacacattcaatattgcctaaaaattcagactgctaataaacccaggttagtacttacttggcctaagtccagggagagcttacacttaatgttgggaaagaattcttaagggtaaggtgagagcgtgtttctgggtcttgcaatatttattctgctttcgggtagatgggaggcccggggacctggctgggtttctgccaagcttctccgatacccaggtttcataaatgtgtttgttgctttcctgcccttgccacccctctgcccacggacagtccatgtggattgagagaacctccttcgtgactgcatacaagctgccggggatcctgcgctggtttgaggtggtgcacatgtcgcagaccacaattagtcctctggagaatgccatagaaaccatgtccacggccaatgagaaaatcctgatgatgataaaccagtaccagagtgatgagaccctccccatcaacccactctccatgctcctgaacgggattgtggaccctgctgtcatgggaggcttcgccaagtatgagaaggccttcttcactgaagagtatgtcagggaccaccctgaggaccaggacaagctgacccacctcaaggacctgattgcatggcagatccccttcttgggagctgggattaagatccatgagaaaagggtgtcagataacttgcgacccttccatgaccggatggaggaatgtttcaagaacctgaaaatgaaggtggagaaggagtacggtgtccgagagatgcctgactttgacgacaggagagtgggccgtcccaggtctatgctgcgctcatacagacagatgtccatcatctctctggcttccatgaattctgactgcagcacccccagcaagcctacctcagagagctttgacctggaattagcatcacccaagacgccgagagtggagcaggaggaaccgatctccccggggagcaccctgcctgaggtcaagctgcggaggtccaagaagaggacaaagagaagcagcgtagtttttgcggatgagaaagcagctgcagagtcggacctgaagcggctttccaggaagcatgagttcatgagtgacaccaacctctcggagcatgcggccatccccctcaaggcgtctgtcctctctcaaatgagctttgccagccagtccatgcctaccatcccagccctggcgctctcagtggcaggcatccctgggttggatgaggccaacacatctccctgcctcagccagaccttcctccaactctcagatggtgacaagaagacactcacacggaagaaggtcaatcagttcttcaagacaatgctggccagcaaatcggctgaagaaggcaaacagatcccagactcgctgtccacggacctgtgagctgctgctgactagggctgcatgggagagccagggaggggagtttctggaagaggaaagccatgcgtggaacatcgaagcctcagagagtgggagactgtccccatcagttgtccttacttagaggagacagagaggccaatcaggtccctgagcttgaatgctaacaagcccagcatcccctggggctgtgatcatggtggatgaggaagcctcaacgtagattcctgaactcaaggtaccagcaagaatgccttctcccagtgtgctctccccaacatcctaggcacagctttcataacccagtttcttaggtgtaagaaactgtttttatctcatttattaagtctcagaacttaacagaaaaggaagccttttaaatattctttttaattttattttagattaacagttttgtactttacatttttttatacaaccaaccagtttcttttctagccaatcatctctgaagagttgctgtttcttactgacaataaaaaatgttctcttggttcg

SEQ ID NO: 1692 - DNA, 3754 bp, Homo sapiens
ttttggtggagatggggttgtgctatgttgccaaagatggtctccgactcctgggctgggtggtcctcccacctcagccttccgaagtgctgggattatagacgtgaccgtgcctagccatgttagtcttcagtacaccttctctttgctgacagccccgcgctcccatgctcctgccagcctctccagccgttccttcctggtctctggctggctctgcctcctcagctcagtgcccagatatgtttttccccagggctcagccttaggcattctccacagcctacgctcactccttgggcgacctcattcagtccctggctttaagaccccatcatgacgcagacccccagctcccgctccagcacagtgcttaccagagctccagactcatctcccactgcccccttcctgggcagccctacctggatgtctacaggcaccgcgagttcagcagtggccagaatgcttgacgtcctcccgcagacatgctattcccatctccccatctcagtgaatagcaccacattcactcaggtgaaaagcctgggagaaagcctggattcctttcacccacttcatttccaacccacccccaagtcctgctggctctactgttcctgcctcaatccacccgctttggtctctattgctcccctgaatccagatcatcatggccaaccctcctacccctccagccgccatgaagccaggagtcctttagaagtctatgattcccatcaccgcggggctggacagctctcttggggaccttccctgtgcacctgtgaccgtgtctgcccctcataacaccctagtcacaatgccctttcagttccccaaaaaagctagactggtcccacttctgggcctctgcctggagtattcacagaccctcagtcgggccccagcttggatgagtgtcagcagaggccctccccactccacctggattaaagcaggtctgcctggcgccctgcaccacacacccttccctccctcagcgtgtctggcccgaccagcacgcagcttccatgatggcagggcctggcctctcctgcacgccatgcaggcctggcccttgccaaccactggaccttagtaaatatttgaggagcaaaagaatgaaacgctaggtgggtgcatgagtggtggcagagtctggttctgaggtttctgagcttaaggccgtgcagcagctggctctgctcccttgagattctggtgcccactcccttgccaggtttcaggcacccgtggatgagcagtcagagagtctacagaacacgcacgacgacagcaggaacagcgcggcctcagccaggtaaagcaagtctctccactggagagtgtgcacgcgatgtggcttctgaggccaacaggacgacaaaggaaactccaggcttttcccctttggcgccagctctggggccctggctgggcctctttgtaaaacaaggggtcagagaggctctcagcccagatgagtaacttataagtgacctcatagataaaacaggtgttcctttgatagacagaaccccattttaccattataaacagccatggctgctgcctgcatccactttcaccactgggagctgcacgtgcttatgctaggggactcgggtcactgaaatgagaaagtgaccgaggactgttccccagagccagcgcatgcgccccagtacctgccagaggaagacggctgtgcattaacacctacgacacagtcacaggctgatctttgtgtattttgctttcaggaaaacatagtcacagggcagaggacagcactgtagaatgagaaccagaagagcctaggggtgtgcagagggttgctgaagtggccagagtcacagcgcggctggtgacagagcagagtctggccccagcctcccctgcacagccgccatttattagctcagatgcttccaaattcaaaatgcagtgtcaccagaaaccgctgacacaggctgatggttcagcaactcacagccatcccctggggatgggctcctactcagaagtagacaaggtccttttggagacagagccttcctggttctcactcactgaggccttccaggaagacgttccattctgagtgctttggcccaagtggattttagtgcagggatatggtgaaatgggggagcgggctgggcttacatgaggctgtccctttaggaataatccaggaagtgtcccggaaaagagagagaagacatcagagcctaaaggaaacagctgggctccgaacggcctctcagaagagcctctactgaaaaatatggatcatcacagatccaagcagaaaaatgggggcgatgtccccacatggagggaacacccgacttagcaaatgggaccggtccccagggtcaggctcttagagcaggcacaagactgggacactggacagaaggttgttcccatgatggttttttttattttttatttttgagatggagtttcgctctgttgcccaggctggagtgtaatggtgcgatctcggctcactgcaacctctgcctcctgggttcaagcgattctcctgcctcagcctcccgagtagctgggattacaggcgcctgacaccacgccccgctaattttttgtatttttagtagagatggggtttcaccatgttggccaggctggtctcaaactccagacctcaggtgatccacctgcctcagcctcccaaagtgctgagattacaggggtgagtcaccgcgcctggccaatgttgttgttgtttttaagacagaatttcactctttgttgcccaggctggagtgcaatggcgcaatctctggctcaccgcaacctccgcctcccaggttcaagcgattctcctacctcagcccccagagtagctgggattacaggcatgtaccatcacacccggctaattttttgtattttaagtagagagggggtttctccatgttggtcaggctggcctcgaactcccaacctcaggtgatccgcccacctcggcctcccaaaatgctgggattacaggggtaagccactgtgcccggccggttatttctttaaaaggtaatcatttgtcaagagtaaaacccagaagctctgacaggccataatttcagatcctttggcttgggcagttttgattttccccgtgtttgcatggcatgaagtcttcgtccttgtcacagtagcttgggatgactcccagtccacatggaaaacatcagggagtgacaatccagcaagaaatccctcgctagttccacacctacgcaccgagcgtcggtgtgccaggccctgtgctgggcagagtgtggtatgtcagggtgtgccggttttaggtaacaagactccaccactgagtggcacctgccctattgcaaaggaatccagttcctccggaataacagtcccactgttaacctggtgctactgggaagttccacacagtaatctgagcagtgactcatggaaggatgaggaacgtttgctccagcttctctccctttccagcaagggcagagctcctaaagccaggggttagcacctggccagcttatgtggcagatggtctcagttacaacttcgctgctttcccaaactcctgcagccctcctgagtccgacttccgttgatagcaaggcactgggtggcagcaaccttttttctagtagttttttcccagcagttttccatttctccacagtatccttttcatttagaggagcttaataaatgctttttaaaaagt

SEQ ID NO: 1693 - DNA, 2819 bp, Homo sapiens
atgcatgcatccatccatccatccatccatgcatccatccatccattgatccatacatcaatccatgcatccatttatccattcatgcatccatccatccacccatgcatccatccacccatccatccatccacgcatgcatccatttatccatccatgcatccatccatccacccatgcatccatccacccatccatgcacacatccatttatccatccatgcatccatccatccacccatgtatccatccacccatccatccatccatgcatccatgcatccatccatccatccatccatccatccgtccatccatccatgtatccatttatccattcatacatacatccattcatccatccgtggatccatgcatcatccattcgtctttgcatgaatgcatgcatgcatccatccatccatccattcatctgttcatccatccatccatccatgcatccacccatctatccattcatttatccatccatgcatccacttattcatccatgcatccatgcttccatttatccatccatgcatccctccatccatccattcatccatgcatccatccatgcatacatacatccatgcatccatcaatccatccatgcatgcatccatccatccatctatccgtccatccatgcatccattcattcatccatgtatccatgcatccatccatccatccatccatccatctatgcacgcatgcatccatccatccattcatccttccatccatccacgtatccatgcatccatccattcatctatgcatgcatgcatccatccatccatccatctatgcatgcatgcatgcatccatccatccatccatacatgcatgcattcatccatccatccgtgaatgcatccatccatccatgtatccatttatccatctgtgcaaccatccatccatccatgtatccatttatccatctgtgcaaccatccatccatccatttgttcatccatccatgcatccatccatccatccatccatccatccatgtatccatttatccaaccatgcatctatccatccatccatgcattcatccatccatccctccatgcatccacccatccatccatgaatccatccatcatccatccatccatccatccatccgtccatccatgcatgcatctattcatccatccatccatctactcaataaaagtgtgaggtcctagtcttcctggcactgctccagacacaggtaacacatggtgaacaagatgggtgagaacccacacgtgtgcaatttaccttccagttgggagaagacggcataaaaaaacatataaagaaacgatgaagtggaagcattggtgctgtgaagagaaattaaacaggatgaagggatagtgaatggtagagggcggggctactttaggtagaggggtcagggaggcttctctgaggagaagagacttgaagggaagagggaggggctgtgcggttggctgggtcgcagctacaggcattgaaacagcaagttccaaggctggaatggagactgtaccaaaaaaagggggggcgtcaaggagtcctgagtgggtgagcagagtgagtcagagggaagtgtaaggagatgaggcaggagaagggtccccactgctcctgtcaagccttgttgtgtcgggacttgaactttattctaagcaggtgaatgcggtgcatgcaagagagacagagagaatgtggcaggaccaaggaggaggctatgccacttatgtcactcctggcaaaaataagggggcatggagtaggctgtttgtggtgcagatggtgagagcagtcaggtccagcacagattttaaaggttggacccagagaatttgctgcagaatcagatgtggggtgtaaggcagagaggagtcaagggcaacttcaggatttggggccggaactgccattagacagacagggacactgggggagaagcaggttaggtgggattaaaatcaagagttcaagttaagtttgagcagcctgttagacctccaacgagggccagatagaagaatctggtttccagggagaggtcaggatgagagatacacacgtgggaatgattggcattgggcggactttatattctctgggccagtgagacagctgggaagtgaccacggatagagaagagacaaagtcacagaaaccaagagaggtaatgttgcaaggacggaacactcaactctcaaatgctgctgagacgtgggctgagggctgagaatggaattgggaagaaccgaggtcactggtgatcctgagggtttcagtggcaagggcaggtggactgcagtggggcccggtggggatgggtggagcatgggcccctctcccggagagttgcactgtaaacgagggcagacatatgggagtgcagctagagggagggaacgtagggtcaagggagagtttattctgaatgagagagatcacagcttgtttttaggctgacgggcatgatccatagaggggaaagtaattaagatgcagaagagaggccgggggtggtggctcacgcctgtaatctcagcactttgggaggctgaggtgggtggatcatttgaggacaggagttcgagaccatcctggccagcatggtgaaacctcgcctctactaaaaataaaaataaaaaaaaattagctgggtgcggtgacgggcacctgtagtaccagctacttgggaggctgaggtaacagaatcgcttgaaccctggaggcaggggttgcagtgagctgagattgtgccactgcactctagcctgggcaacaaattgagactccatctc

SEQ ID NO: 1694 - DNA, 3481 bp, Homo sapiens
ttgtattgtttaatagtataatttaaaaaaaagaacttagaagtcaaaacaactgataatatcaaactgtccaaagctaggagcttacctggaatgcacttagcttttacttcagcttggaaattctgtgagtccagcgttctttcttttctactataccacggtgctattgttttatttatattttgctgaagaaaatgtactttatttttgaagtattcctttttttttattttatgtttttagagacagggtctccctatgttgcccaggatggtcttgaactcctgccctctagcagtcctccccgctcagcctcccaaagctctgggattacaggcaggagccaccacacccagcctgtacttttatatcaacattaggaatacccccagagaaggaaaaaccacatttggcttctacatccagtattgtttggaaataaataacatgtttgtttgtcattcattactgtccaaaaagaaagaaaagaaaaacaaaacaagacttaaaatggatcttgattgccggttcacaaatttaaaactgacactagtcttctgagaattacacttctcataagcaaacagacctacttaattctaagttgtctttattaaattgatcagaggggaagcacatctttcctttccccgtcttacgttacacaaaggtcaggcataggttgtaaagattttcataaaacctgcaaaatgaagaatatcctttactgaaatggaacatcacaggtccctagaatggaatgggttttgttagtatagctgtcacaagtgtgtgcctcttgttacattaatgctatccctgcttttgttagttccatataaatgattgatttggcttgaatggagataaaagtctaggtctacaaccaatcctagaacttcaagttaactttaagtttggtgttgtatatggacaggctgttacactacccattttactgtgcatattaaacgttactgttacttatttttagtggctagatgattgtaagaggacatttggtgccaaagaagacatgtataggataaacacagatgcacaagaattggagctctgccgaagattatacaaattgcattttcaattgctgcttctgttccaggcctactgtaaacttatcaaccaagtaaatacgataaaaaatgaagcagaggtcatcaacatgtcagaggaacttgcccaactggaaagtatcctcaaagaagctgagtccgcttccgaaaacgaagaaattgacatttccaaagctgcacaaactactatagaaactgccattcattctttaattgaaactttgaaaaataaagaatttatatcagctgcagcacaagtcaaagctttcagatctctctggcccagtgatatctttggcagttgtgaagatgaccctgtacagacactgttacatatatatttccatcatcagacgctgggccagacaggaagctttgcagttataggctctaacctggacatgtcagaagccaactacaaactgatggaacttaatctggaaataagagagtctctacgcatggtgcaatcataccaacttctagcacaggccaaaccaatgggaaatatggtgagcactggattctgagacacttcaggcctttaggaaagaaactaaactgaagatgatgaagaatattaaccaagcaccttttatggacccttgcattcactgataactttctggcagcatctactttttagtgtaactaatgtcaaactgtatcatcaaaaacaaagatctgaaagaaaaaaacatctgatattttaacagctgccaatatctcccacaataactgcgtgaagaaggaattttttaattacttaacctacgtgaaaagaaaagggctaaaagtgatgcctacaaatacattactttctggggaaagaaaagaattccaagaatgtttgcaataatggcctccaatactgaaacaaccaaaagcaggtgaaatgaggctgaaatcaaggctgtttcattttagctgaagacctgcaaagctgcttggatttctagcagttgaaaacctaacctgcaattgatgcttaatcatccatccacatgaacatgcagtcagctatacgcatcaagactcgtttgcaaaaaccattgatttttcagtatgtgggataagggtttgggtttttttgttttttggtctgtataaggaattatgtgtgtgtgagttgggatgtatggatatgtgatagtcatattttcaaggtatggatgtttggtgataacgtctcagagcatgcctaaaagagcactgcaagattatttttgaagaaatgttattttattagatctaactcttcatagtatgtaaatgttagaacattttaataatattttaaaactgggctttcccagtatttcaaaaagaaataatatatctgttaacgttattggaatgctgctcagttctctgatcagtgcttatgttatgattgttgataactaaccaaagtagatgcctgcagagactttaaaatgtaaaataaagatgtatgctgcctgtcagctattctcattagaaaagttttaacttattttactccatatagaaactgtagagactaaaaccagttattttcttgtacatttgtgccatgcactgttgttatacaagaataggtgtacaaagctaaagaaaaattgtggtcattgatgatggaatatatgacttgcaggctttgaagtctgcagaattcaagaaaagagctgcaaatgcatttttgtatctttattcaggactcacatgctttaccctaaagaaacctggggctaggggaaatgaaaggaagcctgaagactgactaccaaaacatgcaatatacttattcactgtctaagtctgtagtataacatgaactggagtctctatccttttctaaaatcgcattttgtaagaaaagaaagaaaaaaaaaaaaaagaatgtagtcccacaactcctgatttgaaagaaacaccttgtattttttatatacatctcttatccactgtgacttttcttttaaactgggctctgtgattccagagtttagaatgtagaaatgaaacgcttagctttaccttttcttggggggtgtggaccctgccagaaatgtaattacgtatgctcaagtgcattaattgaaggcactgtgcacaccattggactgctgaccacagttaaacatttccagtaaaatttcgtaactggtcacagctcattcataatcactgtattttttgaccctgataaagacaattattttgatggtgttctggtactgtaattggtatcctttaaattatttaaaacttttgggtgtggggcaggcagagagggatggtgtccagagatacatcacactttacatcctatcttactgtcctctgtttttcttaccctccttacatcctttttgttaaaaataaaaagcattgtagctgtt

SEQ ID NO: 1695 - DNA, 2775 bp, Homo sapiens
ggggcccacatgtcccccagctgtgatgctgcccctggctgctgcgtgggccgggagcagcacttgggggggagacgcaggcccagagcagcagtggtaggaacgggtgccctgagggcagtgccggggttcccttgaaacactctgtcctttcctcctcccatggtgccaagaggcgcctcccgggaggaccctgagatcatgaggccaccgtacctgttggagcgccgccgcttgctcttcttcacgcacttgaggaggcagcaggtgaggaaggccatggacatgagcaggatgatggcacagctcacaatggaggcgatcacggccaccttgaagccaaaggtctcgtgtggtggcaccactgtgtgggagacaaccaccagctcctgggcgaggtttgcccagatttgcttggcccaggggttgggggtctcaggggtggtacgggtagggcctgggtgtagacagggcctgggcagccctcagtgagccctgtttgcatggtaagggggcagtgaggtgctgggggctgaggcaaagatctgtgcaaactatatttggaggtgggactatcagagaagactctccccaagaagcaggttatttgagcagggtgtgtaggagtatgcagagtggctatttaaagggggtatttaagcagggttttccagggtgtgtaggagtgtgcagagtggctaactgaagagggtatttgagcagggttttgtagggtatgtagaagtctgcagagtggtcaattacagaagttctggcagggagttcagagtgatggcctccttggctcctacccactgaagtcctgcctgaggaatgaaggaagggtgggccacagagaggaggtgacaatagacagtactgaggaggccttgcccagcccatggtctgggttttcacaatgccccaaggtggcaacattcttcagggggcctacatgccttctcaggtcactttccaggaaggtccaaaatactatgtatctgctgtgtgacctcagctatgctccaaaaactagttccatcagattctactggatgttctggctaaaaaaggcctcggaatcctaatttgagcaacaccgtttactcccccacgtagagaacatggccctgtcccctgccccatttcccatgctccctagtggatcctggccacccaaaatggagactacatttcccagtggtcacaggaccatgttctggccagtggaagataagaagtgatgtggggcaacttctaagaaccttccctgagacactggggcctgctctttggccccagggcccctcaccccataacagctgcctggaacatagctgctgccatcttgaatcatgaggctgaggccatgcccagcagagccatgccagggaaggggcctggctcccactgccatggagcctatacagatctgcctgcccaccctgaaggttgagctccatcatagttaatcctagtattttgggttttctgcctttcagaatctaatcctaacactcgcatcctcagagaatcacctagcacgtgaacattttaaaggctctgagaagttctgcagcataaaaacccagaatctgccaaactattttgactctgagccctttttatgcacaaaacacacgaacataacacacatagcttcattttggaaatgtcatgctgggcactgaaaagggactatcttgtggacctttcaacacctgtacaagaaatacaaccagaaaaccattgcctcccacagactgggagctccagggccaggcacgttatgaccttccgtgttgccagtacttaagattcctgatacgtgaaatatcctattaaagttggccatgtgcacctgtacatgaatgaatgaatgaatgaatgaatgaatgaacaaacatagtttcctgcttaacagatgaaaacgtgctggctcagagagcatgcacagcctcttggcggtgaggggctgagtcggtagcagagccaggattggaggcccgctactaggttttcggtccgtgctgccaacatggcactgggagggctgagggcctacagccggctgctgacatgtaagcaagctgtcagtgttgggaatgggaccctacacactggcctagctgcttgtgagtagacacccacgccatccccacccacaccatccccatgacaggatttggggccatcccccacccccagagccaccgagctgagagaggggtccttacgtttgcacactggggaccctgaagaccactcagcgatgctccccttccaggtgcaggtgaggagcccagaccccaccatctggtggttggaggggcagcggaacatgagcacggtccccacggaagcaccattgccacgaaggacttggaaggttgcttgcgggggtagccgcagcttagcgcacgtgcctggggagacaggcaggtatgaggcatggcgggggggggggggtgggcacgcagggcagggctgggcaggaccctggagtgaggagctggcacagcattggggagcacaggggtggggtgcagctccaaaggccattggatgctctagaggtcacatggggtcatccagaccgggggacaacgcagagctggatccctccatgaagtacactctagatgttgaggattggagcattaaaaaaagaaataagtgttagaagacaataaaagcaaacataccttccctgagacactgaggcatggcctttgattatgacctaaacacggctccaaaggcagaaatcagaac

SEQ ID NO: 1696 - DNA, 3688 bp, Homo sapiens
acctgcaccgggccaggcaagatggcggccatggagaccgagacggcgccgctgaccctagagtcgctgcccaccgatcccctgctcctcatcttatcctttttggactatcgggatctaatcaatcgaagacttagccagctatcaagtcatgatccgctgtggagaagacattgcaaaaaatactggctgatatctgaggaagagaaaacacagaagaatcagtgttggaaatctctcttcatagatacttactctgatgtaggaagatacattgaccattatgctgctattaaaaaggcctgggatgatctcaagaaatatttggagcccaggtgtcctcggatggttttatctctgaaagagggtgctcgagaggaagacctcgatgctgtggaagcgcagattggctgcaagcttcctgacgattatcgatgttcataccgaattcacaatggacagaagttagtggttcctgggttattgggaagcatggcactgtctaatcactatcgttctgaagatttgttagacgtcgatacagctgccggaggattccagcagagacagggactgaaatactgtctccctttaactttttgcatacatactggtttgagtcagtacatagcagtggaagctgcagagggccgaaacaaaaatgaagttttctaccaatgtccagaccaaatggctcgaaatccagctgctattgacatgtttattataggtgctacttttactgactggtttacctcttatgtcaaaaatgttgtatcaggtggcttccccatcatcagagaccaaattttcagatatgttcacgatccagaatgtgtagcaacaactggggatattactgtgtcagtttccacatcgtttctgccagaacttagctctgtacatccaccccactatttcttcacataccgaatcaggattgaaatgtcaaaagatgcacttcctgagaaggcctgtcagttggacagtcgctattggagaataacaaatgctaagggtgacgtggaagaagttcaaggacctggagtagttggtgaatttccaatcatcagcccaggtcgggtatatgaatacacaagctgtaccacattctctacaacatcaggatacatggaaggatattataccttccattttctttactttaaagacaagatctttaatgttgccattccccgattccatatggcatgtccaacattcagggtgtctatagcccgattggtaagttaaattttcctctagtgctgatttacatgactttgtagggttaacactgcagataagccaggcaaatagttagtttataaatagtgttccagagaaccctagagattttgagaaagtatcttgggggtcatgtgaatttgttgagagaaatggacaagtaaatgaggctccatagtctctaaccagagaatttctgctgttttaaagattcaacttgtttttcactgttcagtggcctaaatgtagattatgagaaataccacattagaccagtagaatcagctttaagactgggaaaacaacttcttacagtgtttttgctcaaacttccaatttaatgtcaaataaacaaatattccataaagatcattataaagaaaatttaatgtgtggatgtgtacttttggcagtctctctgggatcatttcttaagtcaactgggtatattttttaaaatctcgtttttagggttaccttatgacaagtgtaacagtaactccaaccttagagactataacatgattaaagaaagttatgaagctccagttatacaatggggataaaatatgaattatatacccagaatgcaattgagttgtaggtgttgaatctttggaaaatgccctctagcttctggaatgaccctgatggatgggtttaagtttggaaagatggacatgatattaatctgatccagagctgacacattttcaactccagtttgaaaagagaaggatgataatgagactttgggccattacctgtgtggcatatctagtgaaaagaatctacagtgtgcgtttggaagtgaagatttagatttcttcccagtggaggaatgccagaaactgtatttccagtactgggaatttgctgctttgcataacagaattccttttttgactggcccagtatctgtatgagtttggaataatcttttccctaaatgtttgatatgattcatcactgaagttatctggggctagagttctgtttgtgggaaaattttgaaatttgaatttaatttctttaatattcatattttctatttcttcttgtttcagttttggtaatttgtgcctttcaaggaatttgtccattccatctaaatgttgaatttattggtataaagttattgacagtattcccttgatatccttttaatggctacaaaagccatagtcacttgtcctcttttgttcttaatattgttaatttatatcttctcttttgttcattgctttagttaggggtttgtaatttttattgatcatttaaaggagcaacttttggttttactaattttctctatttgcttattttctatcgcattgatttctgcagttatctttatttctttccttctactttgagtttgcttttcttctagcttttttaaggtagaagtttatattagtaattttagaacttttctctctccaagcactgttttagctgcatttcacaagttttgatgtgttttcatgaacgcgtagttcaaaatagtgtcagatttcccttgtaatttaattttgatctatgacttttctagaaatgtgttaattttcaaacatttgggggagttttcagttatcttttggctatcgattttttaaatttattgtggttagagaatttgctctgtattttcaatcctaaatgttttatggcccaaaattatggtttatcttggtaaatgatccttgtatatttgaaaataatgtacattctgctattttggggaatattactctataaatgataggtcaaatcggttgacagtttttttcaagtcttctgtatacttgctgattttttttttttttggtctttgtcctatcaacaagtgagagatgattgttgaaatctccaaatataattatagttttttgtttctctttttagttctgtcaggtttgcttcatgtattttgaagctgtataattatatgcaaatatgctaaggattattatgtatttttaatgacataattctttcatcattatgaaatctccatctttatcgctgataatattcctcgtcctaaagttcaaagagcattgaggtgtgttttggcaggcagttgagttactattgggtcgacttgatcctttggaatcttgtttgtttttaatgtttgttagggtgggtgtaaagttgtctttatttaaggatggtggttgtcaactttcagtctcatgaccccctgaaactctaaaaacttattgaggactccgaagaattcttgcttatgtggattgtattaatgcttaccatatcagaaattaaaactgagaaataagtaaaacaatatttacttattagttccttttcaaatgacaataataaacccatttcatgttcagctctctcttaactatgttctttcttattagttttcgtttccttctaaccacaaataaacatataaaatctt

SEQ ID NO: 1697 - DNA, 3130 bp, Homo sapiens
agcgcggcggtgtgatgatgactccaaggagcccggcgcccggtgctggcctggtttgaggaaggtgaagagaccatcactgcctttgttgaaccctttgtcatcctcttgatcctcattgccaatgccatcgtgggggtttggcaggagcggaacgcagagaacgccatcgaggccctgaaggagtatgagccagagatggggaaggtctaccgggctgaccgcaagtcagtgcaaaggatcaaggctcgggacatcgtccctggggacatcgtggaggtggctgtgggggacaaagtccctgcagacatccgaatcctcgccatcaaatccaccacgctgcgggttgaccagtccatcctgacaggcgagtctgtatctgtcatcaaacacacggagcccgttcctgacccccgagctgtcaaccaggacaagaagaacatgcttttctcgggcaccaacattgcagccggcaaggccttgggcatcgtggccaccaccggtgtgggcaccgagattgggaagatccgagaccaaatggctgccacagaacaggacaagacccccttgcagcagaagctggatgagtttggggagcagctctccaaggtcatctccctcatctgtgtggctgtctggcttatcaacattggccacttcaacgaccccgtccatgggggctcctggttccgcggggccatctactactttaagattgccgtggccttggctgtggctgccatccccgaaggtcttcctgcagtcatcaccacctgcctggccctgggtacccgtcggatggcaaagaagaatgccattgtaagaagcttgccctccgtagagaccctgggctgcacctctgtcatctgttccgacaagacaggcaccctcaccaccaaccagatgtctgtctgcaagatgtttatcattgacaaggtggatggggacatctgcctcctgaatgagttctccatcaccggctccacttacgctccagagggagaggtcttgaagaatgataagccagtccggccagggcagtatgacgggctggtggagctggccaccatctgtgccctctgcaatgactcctccttggacttcaacgaggccaaaggtgtctatgagaaggtcggcgaggccaccgagacagcactcaccaccctggtggagaagatgaatgtgttcaacacggatgtgagaagcctctcgaaggtggagagagccaacgcctgcaactcggtgatccgccagctaatgaagaaggaattcaccctggagttctcccgagacagaaagtccatgtctgtctattgctccccagccaaatcttcccgggctgctgtgggcaacaagatgtttgtcaagggtgcccctgagggcgtcatcgaccgctgtaactatgtgcgagttggcaccacccgggtgccactgacggggccggtgaaggaaaagatcatggcggtgatcaaggagtggggcactggccgggacaccctgcgctgcttggccctggccacccgggacacccccccgaagcgagaggaaatggtcctggatgactctgccaggttcctggagtatgagacggacctgacattcgtgggtgtagtgggcatgctggaccctccgcgcaaggaggtcacgggctccatccagctgtgccgtgacgccgggatccgggtgatcatgatcactggggacaacaagggcacagccattgccatctgccggcgaattggcatctttggggagaacgaggaggtggccgatcgcgcctacacgggccgagagttcgacgacctgcccctggctgaacagcgggaagcctgccgacgtgcctgctgcttcgcccgtgtggagccctcgcacaagtccaagattgtggagtacctgcagtcctacgatgagatcacagccatgacaggtgatggcgtcaatgacgcccctgccctgaagaaggctgagattggcattgccatgggatctggcactgccgtggccaagactgcctctgagatggtgctggctgacgacaacttctccaccatcgtagctgctgtggaggagggccgcgccatctacaacaacatgaagcagttcatccgctacctcatttcctccaacgtgggcgaggtggtctgtatcttcctgaccgctgccctggggctgcctgaggccctgatcccggtgcagctgctatgggtgaacttggtgaccgacgggctcccagccacagccctgggcttcaacccaccagacctggacatcatggaccgccccccccggagccccaaggagcccctcatcagtggctggctcttcttccgctacatggcaatcgggggctatgtgggtgcagccaccgtgggagcagctgcctggtggttcctgtacgctgaggatgggcctcatgtcaactacagccagctgactcacttcatgcagtgcaccgaggacaacacccactttgagggcatagactgtgaggtcttcgaggcccccgagcccatgaccatggccctgtccgtgctggtgaccatcgagatgtgcaatgcactgaacagcctgtccgagaaccagtccctgctgcggatgccaccctgggtgaacatctggctgctgggctccatctgcctctccatgtccctgcacttcctcatcctctatgttgaccccctgccgatgatcttcaagctccgggccctggacctcacccagtggctcatggtcctcaagatctcactgccagtcattgggctcgacgaaatcctcaagttcgttgctcggaactacctagagggataactgttccccctcctccatctctgagcccgtgtcacagatccagaagatgaaagaaggaagtgagcatccttttgctctgtcctccccaccccgatagtgacacatcttcaggcagagctgtggcacagacccccgtcctgtcccccacacccgtgtcatgtgtctgtttataaacatgtccccttccctttccttccccctcggccacccgcctccctctcaaccttgtaaattccccttcccaaccccgaggggcttgcagggacaaggcgaccgactgcgctgagctgcttatttattgaaaataaacgacggaaaagtc

SEQ ID NO: 1698 - DNA, 2934 bp, Homo sapiens
gttactggaaatgaggagagcctcccaggtcccagcagagctgctgctggtgcctcccactgtgggctccacagaggcagaggatgagggagccactgatacctccctgtaaggcagcctccctgagcgagcaggagcaggtcaggggtgagtgtggaatgatgacagcccagggcatcctaggcccccggggcaagagcaagctccctgtgcttcctgacccccgcctcatttgcagatacatgtgctcatgtcgggagatacctggagtcatctcaactcctgtcccccattccgcaggtccacaagtcaccaggttccattccccttcccctccacatatctcagagctgtcacagactctccatgccccatttcaggggtcttggcccaggccttgtcatgccttatctggaccaagagcaatggtccccaaccagctccacccaggtaccccctgccccgcccatgtcccccacagttgcaccatgcctgctggcacctgccctctcttcactggtgctccagcagctgcagaggcagggctgaaccctgggcccgctctcagggcccccacctcctgctcatcctccacatggcccaagcccttcatgactgtttgcctcttgcccacatcttccatgttgacgtcgcctgggactggaggatgcatcagagcacggatccttgagccagcttaaaaacggtgtgtgaggccgggcacggtggctcacgcctgtaatcccagcactttgggaggccgagggtctacaggagttagtgcatgcagtgtgcttaggacagggcctgctggaggaatgtttactactattattaatgactggtacccggggctagtgatccagcatttcctgcctagcgccttgtccattccatgagaaccggccctcctcagcctcaccagggacatcgacatgtctgaccccctgcagcctgcagggggaggacacggagaccctgagcaggcagcgacttctggagttcaacagccccctagggcagacctgtggatgcaaagccgggctccaggtacgcagtgcccttgggggccgccaggtgctggcagcagggccacggggacctgggactgagccctctctgcctccaggaaaaagcaaaatgggatcatggtcccaggcgtccattcgaggtcctctccccttggcaggagacgaaggacactgaccccagcactcagcatgggctggcaaacctaatcagtgcccatggattatgtttgccatccactgactggtggacggattgaggaccttggagttatcttcctgaatcttccctccttgatggcaactcacctccgctcaccaaggggtccaggaaggcacctgactctcaggaccgctggcgtcttggccagcctgggagagaaattcatctggcttatggcacagggacagaagcaggccggctgaggacaaggtaacagaagggctagggcttttagaagacaaagcttccttcacggatgcagaaggagaatgctgtttctctgcgctgggcaacctgggtttgaatcccatctctgggataagtgtgcagggcgcacagcaggtgttcggcacacagagcccttactgaagatactgctcaacaaggcagggtctgcctggcgctggcttcaggcccttggcaggggctgggcagccactcttgcccatgccctggtggccccgagatgccagcactcctctgggtggttggggaacccacccagggtggaggaggtgggcaaggcctgggattccacatctccagggcagcagaccccacggtctccagggatcttgtctgtgcccaaactcctgagacttccctgtcctttcccacaagggccctggctctggtggctgcagaagtgggaggaggggatgtgggggagtctggggaaggccaccttccatgacgctctgccaagccaggaggagcgaaggaataacctggtccccgtgctggaccctggactccaggaagcagagcctacagccggctcagccttgggtcccctgcctctgtggagctggccctaccccagatggccactgtgcctgaggcccggcatctgaccctctgtcctccctgccgaggggccagaacagaggccccggcaacaggcaaggcgcagtgcacggagctgaccccgtgcctcggtccaggcctagcaacaggaagtgagaggccaatgccggtaaacgagatccgaaagattagaggcctcgctgccgccccaagttagaggacaagttcctggaaggaggaggaagctgccgcagtaaataacgccagaccccagcgtcccagctgtcagcagccagtgcggccgcaggctgatatggggtttcgctgtgttgaccagactggtctcgaactgctgaccttgtgatccgcccgccttggactctcaaagtgctgggattgaaggcatgagccaccgcgcccagccctggggtgaaatctttgcaacgcacagaacccgcaaggatcagtatgcttgcacataccaaccagcctgaccagtcaatgagaaaagaccagaacatgctcttcacaaagaggaattcaaacggctaaaacataagaaaaggggctgggcgcggtggctcacgcctgtaatcccagcactttgggaggccaagacgggtgtatcacgaggtcaggagatcgagaccatcctggctaacacggtgaaaccccgtctctactaaaaatacaagaaaaattagccgggcatggtggcgggcgcctgtagtcccagctactcgggaggctgaggcaggagaatggtgtgaacttgggaggcggagcttgcagtgagccgagatcgcgccactgcactccagcctgggcgatagagcgagactccgtctcaaaaaataaataaataaataaataaat

SEQ ID NO: 1699 - DNA, 3411 bp, Homo sapiens
caacaattactgtgatgtttgccaaatgattttttttctacttccatcattccttctgcttttattaattggaattttatagaagagccttattttctcacatttatttaagtattagtatcaattataatccatcactgtcatcatttttatgctctgttgtcccagacttggccattgggaaccccgcgaagtctgtttctatgtccttttgacatatcccttcattttttcagcacgtcctttctggtatcataagatgctccaggctcatctcatgcttttcttgcccagctttggaaccatcccattacttaaagaagctctagttccttttattggagaattgtatttagaaactactctatgggtgctagatgtgctaattggctttgggatgaggctggtggtattattattactattattttggggcggagtcttgctctgtctcccaggctggagtgcaatggcgcgatcttggcttgctgcaacctttgcctcccgggttcagtcaattcccgtacctcagcctcccaagtagctgggactacaggtgcgcaccatcatgcccagctaatttttgtattttcagtagcgacggggtttcgccatgttcgtcaggctggtcttgaactcctgacctcgtgatccacccaccccggcctcccagagtgctgggattacaggcgtgagccagtgcaccccgccgctggtggtattattaaccctctttacagttggagaaaactaagctgaagttaaaagtcttattcacaatacccaggtaaggtgatccagttgggatgtaaacttggaccttcttattgtggagtctgggttctttccacttactctcctgtggtactgtagtattcctttcttaacatttgcttttccattaattttgtcatttgtcttgccggacaaggacaggacacaatctaattaaaatagattcaagaaaattatttattaataatagatacagttatttcaatgcaaaaaatagtcattgcagtgccagaaatatttatcatatgcttgctatgtgtaaggcagtgtgccaaacattgctggtatgtgagtatttgcatatgtactaggagacattgtgctgtgaatgtttttttttttttttttttactgtggctctttttccctagatacatatttaaggggtagaggtaggtgtataacaattgtaaattatgtcattatccattaattcaaatgacttaggatttttatattatataaatatgcagaagggttatatatatagcatttgtttacatgtacctccttttagtgcactatcatttcataattagagtaatactatacacccgttaaatgatattgtttcataattgtaacattatacactcattaaatgatacatatttgctaaccacagttaagcactttatgttgttgcgtttaattctcacagtagcttcatgagttggtcttatttttcccatgtttcaggtgagcaaacagacttaaattgactcacccaaggcgtaataaatattataaggtggatttaaatctaatttttatgctacctacaatgtgaaatactcttcctattgtggatgtattttgttcaggctttcaagtatcattttaattctcatgttcaggatttggtgagtaagtctattctgtttaaacattttttgacttacacattttgagcctgtccttttaaagtttttgcctgatttatgaaacactgtagtttatcctaaagaagtcttatggcagtatcattttactaacttatggaacattcttctggtctataaagttgtgttaggttagtgatcagtatccacaagtaaaaagaggtggatatatttttgtgctagtttataatagcaggctaatgcttggtgtgcatttcttttctgggtcatcatgatagtttggggtctatctttataaaaaatgatagtaatattcataaagcttatctttgcttctacattaagagaagtaaatttattaaaatttcttgtgtcagtataaggactttttaaaacttttaggttcaaggttacacgtgcaggtttgttatataggtaaattttatgtcacggggtttgatgtacagattatttcgtcactgaggtaataagcataatactcaataggtggtttttttgatctgttccctcctcccaccctcaagtaggccctggtgtctgttcccttctttgtgtacatgtgtactcaatgtttagctcccacttataagtgagaacatgagatatttggttttctattcattcattagttaacttaggatacccatggcttccaggtccatccatgttgctgcagaggacatgatctcattcctttttatggctgtgtagtattccatggtgtacatgtaccatgttttctttatccagtctgccattgatgggcatttaggctgattccatgtcttttctattgtgaataatgctgtgatgaacatacatgtgcatgtgtctttatggtagaatgatttatattcctttgggtacttacccagtaatgaagttgctggcttgaataataattctaacttctttcagaaatcgccaaactgctttctgcagaagctaaactaatttacattcccatgagcactgtataagcattcccttttcttcatatccttgccagcatctgttattttttgactttttaagaatagctattctgctggtgtgaagtggtatcttttggttttgatttggattcttctaatgattagtgatgttgagcattttttcatgtgtttgtgcttgtttatgtatgtcttttttttttaagtgtcttcataccctttgcctactttttaatggggatatttgttttttgcttgttaatttgtttaaattaatgtaaggatgtattaatggcaatggcaagtaatataggattaattatatcttagatatttaacatcaaattttataaatgaaaacaggtaagaaataagagaaggtagaactatttgtgtgtgtgtttattcactagcagtattgaaaacagaaaactctcaagacagaaattcatgtttgttactagagagctcttagaaattattactcctggctgggagtggtggcctatacctgtgatcccagcactttgggaggtccaggtgggcagattgcttgagcccaggagtttgaggccagcctgggaaataggatgaaaccctgtctctaccaaagatttaaaaaattagcctggtgtggtggtgcgagcctgtagtctcagctactctgaaggcataggtgggaggattgcttggtcctgggagctggaggttgcagtgagccatggttgtgccactgcactccagcgtggatgacacagagagaccctgtctcctcctcc

SEQ ID NO: 1700 - DNA, 3511 bp, Homo sapiens
ctgctgacagtttctcgtgggcccttccaaaaaacaaaccttttctctgcattttcgagcacatgcgtgcatttccactttgccatttacagcaagatgactgcgctgctcacgtggggctgctgcttgcatttttccctcgatttatcttgatgtacttttcatgtcagcacctatcaacgcctccttttttttttttttttctttttttgagatgcagtcttgctgtgtcactaggctggagtgcagtggcgcgatcttggcttactgcaacctccgcctcccgggttcgggcgattctcctgcctcaacctcctgagtggctgggattaaaggcacctgccacaacactcggctggtttttttttgtgtttttagtggagacggggttttgccatgttggccgggctggtctcgaattcccgacctcggctgatccgcccacctaggcctcccaaaattctggtattacaggcgtgagcgaccgcacccggtccccagttctgtcttttcaactgcacgcggtcagagtcattatataaaaatcctgatggacatttctccagtctggagcagatccctagaagtgggtttgctgtgtcaaatggagcggctcctcttcctgcccccggaagaggcctgcccactccgacctcagccatagagatactttgctgtgcaaaatttgggaaacgtcaggacacacaggcaccacttcgccatagatagcactaagtctgtgtgtacaaagtgcccaacagggaagacgctgtgttgcctgcgcagctccccccaggcagcattttgtgtagtcaaggaagtccctcaggccgggcacggcggctcactcctgtaatcccgacactctgggaggccgaggcgggcggatcacctgaggtcgggggttcgagaccagcccggccagcatggtgacatgccgtctctgctgaaaacgcaaaaaaattagctgggcttgggtggcgggcgcccgtggtcccagctgctcgggaggctgaggcaggagagtcgcttgaacccgggaggcggacgttgcggtgagccgagatcgcgccactgcacgccagcctgggcaacaagagccaaaactctgtctcagaaacacactcagaaaaaaacagaaaccaaacaaacaaaaagtcactcagaggagctcaaggcccctctgggtttgccacttccgacccgctgtggggcttgtaaaaactttgcctcccggcacagctcagtgttttgttagggagcctcccgtgagcggccgacgctggctgggctccatgggatcagctggggctgctcattcattcatttccacatctacccactgggcttccaagttgaagttcctggggctcccatgtcccctccccatgaccttcaatcccacagagcccatgggcacggcacgtcgctctcatcctctgacattcctgcaagctgaagtcacttcttccttccaccaaggccatcccgggccattcctctgatcatctgtttattgtgtctctgtgtgggagagaactggctgaagaggtggggctccagttttgggaacatggacactgagagagttggggatggaaaacaacatagaaggaagcaaagccagaggctgcgatggccatgctgcctggccctggtcccagacagacaccccagccagctttcctcttgcaccctttgtctgctggccgcagcgtcgcagtgggagtcctgggcccacttctccaaatggcacacagaagcctcaacaggcacccacctgggaaaggccaaggccgagggcttggggtgcacagtcaagaacacgcctcagctcagcatttgtgagccgagtcactttggcccatcgtttgtacacagcccccacctgctggttgaccatgaccacagggcaggcgctgccacagggcgtgggcaggctggaccttcgagggcctcctctgtctcccctaccttctgcccccccaccacttcccatcacccagtctgtgccaagggcactgaccctgtccttgtcttgcaggaagaggagcaggacttggatggtgagaaggggccatcatcggaagggcctgaggaggaggacggagaaggcttctccttcaaatacagccccgggaagctgaggggaaaccagtacaagaagatgatgaccaaagaggagctggaggaggagcagagaactgaagaataacgaagttatccttagcgtcctcctaaaggcttttccttttggcatcttaaaagcttgagagataaaacggaaaccccagagaggagtctgggcaggctcccagggtgcatgctgcctccataaatctgctgagctctagaccctcaatcaggacttgtcccttggctagcaggatcctgggaacacctttggccctgccctgtgtagagatgttcatgtctgttcctgtgggtcactttgttaagctgaagagttttaagaggtagagctcagaccctggactgggatttttcttaccactcaaacttgctatccacacaccctgcacaccttagataaaaagaacattttaaaagcagagttcactttcactccagtctcccctcttttgccctcactgaagccaaaccacagaagactttgaggaatgagagacaaatgaggtagagctcacctgtgctcaccagctccgtcagggtggtcagccgacccctttccctgggaaccccacttctctctgtggctggcttggttgtcgggggtgagatgccatattgattacagggcagcaaagaaccagtaccaggaatttacttgaccattccccttatttttcatctagaggaatctcggattcagccctttcattgctaagacaccttttcactgaggttcttaccagctcagccaaatctccactctgctatagcagaagcaataatgtttgctttaaaaagatttcttgacctatgccttttcttagaaagtttgatagattagttagaacttcagatcatcagatcagtctcaaatgggtttcttggaattttatatttgacaatatttatactataccaaactcatttgcagttcttaggtttgttggttaaaacatttttttaaagcagtaagtttatagaaaatgttttcatttaatggaaggctgggtaatgtccagcatcaacccctatggcatgcattcccaggggccttctcatctgggcctggaacctttggttcagggcttaggggagaacaggccacatggcaacagccacacagtcattgccttcaacacagagccacgtgtccccaaacagcaatagtcatgcccttgtccaggctgggatctaattgacacaataggtcgttgactccctcctagtagagctatctaggtttgtctggaaagtttccgaccctggcttataggcaccacacctcatgtactcctcatggcttggatctctgtattcagcctttgttcagtccaataaactttgagtagatgatctc

SEQ ID NO: 1701 - DNA, 3254 bp, Homo sapiens
atttatatacttgatttcagcttttgccttagatgagaagactggctaactctgggataagagtgccaccaaaattttcacccacagattggaagcacatcaaaagaaatcatatcttcacggaagtcatttttttttggttcctggcctttaggggctgaatctgtttagagaagtagagatggaaatctcaatcaaaacagttctgagtattttacatcatttaaaaaaatttgcatcactgaagagaaggaaccctaatcatttgaaactctcacttctgctttgcaagttgtctgctggctatattcagtcctctttgtcttcttggtcttaggcaggcatggggttagtggccagggcagaactgggaatgggacaagtttgtgttcattcttctccctacccttgtaacagccttaatttctgtatctctgtttcctatctggggtgccctctagtcctcatctctgaagggaaggaacaaagagatgagtgaattctttactcttagctgttagtcatccaccggcttttcctccaagggatgtttagtgtttttaaaagaacctgatggtagaacagaaaatcagagtttaacccaaggtatcacccttctaatgatagtatttcctgtactgctaagagcataatctggggcttggtagcctctcagagatagcaccttgtgttgtcccctttaggttagagctgcggaaccagcaccagccactgaacatgaagaaggttttgactttatctttttaaatttgcattattcagacccatgtcagagtccacgaaaattcttgcaaatgtgtttttgtaagagctgggtgtcaccctgcttccccgtatttggtgttggccaatgggagagttatgggaatgtcatattccttcctcaaagccacttaaagctgtgctaaatttgcagggtttttttttgataatgctttctcctcagggtactctctcaacttactcccttcaggaaaatttcttgaatgaatagtccaccagtgctgtctctgctttctcaacaccagatcattctgcaacctcttgcaatttggctgctatctctagtcatgttactaagttatctttctcaaagaatctccattggtcacccaaccatcatagccattggtcttcagccttcacttctgactggttattctctacctgggggcatttttctttcttttctccctctcttcctcttctttggctggcgttacttttttcagtctctgaagggaagctcactcctaggagacttgcttaatagaatgtttatcgcctgcatgtctttagcaaagaggtgtctggaattcccatctgggatttattagtctaaatattcaggtggtccagtgccggatgttagttcttaacttaaaggaaacaaagtttccaatccgaggatggtgagattgctgctgttctacagtgggcagccgctgctggtgtcttgcttgccctggaaatgccatcaactgaaatggaattttgttcaatccatcttattaatagttcctaaagcaattgtggtggggttgataggtggctagtaaggttgcctctgtaaagataagcacaatccattaattaagtctggagtccactggacttctaccggggatgtttgcatttgctcggcactctgtttataaggatgtcgaaggaagtgcgtccattctgtgcatgttgtaaaacagaaggtttgcagctgtcagatttatttttttcttggctccttttctgacagaacttttgtaaacttgatagttttatagattgtcgaaaattactaacctcggttctgcagatgccatgcagattttcttgtcttgttttctttctttgaagatagcagatatttatgtacatagtttcttgtaaggtactttttggggaagaggagattaagattattcttatatgctatcataattcagtattatgaaattattaaatgattattttattagttatatagtgctttgaaagtgtccagcatgcattgtatgctctagaaaggagaacaaacaaatgcaaggtataatcttgtgttttaaatagcttatggagctgcctcaaagacaactaacatcaagattatcaactttaagtatagcacaagttcactgtagaagtataggtccactgtgggcttcagtaggcttttaagaggagttgggacctgagtatggctttgggtagggtaagaagcggatataacagctgaaaaaatagaccagcagcagctgcccccgctgtgtgaccacacagggtgtcatgattcatcataaggtttgtctcaagtaatttccagttaatgaaaacaagtgtcaaaaatttctgaatgattccttttcaaaccactcatatctatgtgtgtgtgggcgcacattcatgattttgcctcaagtagcatcattcacactcacttgcattgccattgctttctttgagagtgagaagttggtacttcagctggtgtattagtctgttttgcattgccaaaaagaagaacctgagtaatttataaagaaaagaggtttatttggctcctgattctgcaggctatgcaagcatggcaccagcatctgctcagtttctgttgaggcttcaggaagtttttcctcatggcagaggtgaagaaggagcagatgtgtcacacagagagggagcaagagagaggggaggaggtaccaggctcttttaaagaaccagctctcgcatgaactcatagagcaaggactcactcgttaccatggggagggcaccaagccattcattaaggatccacctccatgacccaaacacctcctatcaggccccacctccatcacatttcaacatgaggcttggaagggacaaacatccacactgtaatagctggcatcctgggaatggggcctcacccacagcctgtcctattggtgttgccttcatgggtgcaaggactgaggcagccaattcttgtgtggcaggtatgaattaacatatttctagcctcagtgagcatttgaattttcaacccactgtcttgtttaagggaaactagcttaaaatctgttaggcaacgctaactagagatgatggctttactgactgctgcaggaatggagagaaaaaaaggccaatccaggaaacattttgatgtgagattagaaataaggggagacagagcagcataagtcaaagataattgtaaggtttgtagcccccagtgcctaagtgag

SEQ ID NO: 1702 - DNA, 3540 bp, Homo sapiens
ttctggaagaagaagaagagcatgatcggcatgtccaccaaggcaggtaggccccccgagcgtggccctgctcagatacttcgccccagggagctcactggagcctgcggtagagggctgcctgcctcactgctggctgcagacacagccccgggtgtgtgcttggctcttgagaagcctctgagaccaggcaccgtaaagcccagggagccgttgcggcaattgtggtggtaccatcagaggctgcacggctcagggcctccagcggctgcacagctcagggcctggctgcggactctggcgtgcatggggtctgggtctgggctgtggagagtgagatgcatggacctctcgagccttcccggctgctcatgggcgctgagcagggctggggcctcacatcccctgtcttggttccctcgccccgtcctcccgccggtgttccttccccgaccagcgcaggcctgggcgtgtggggcctgccaggtgatggcagttaataggcccgtggtgctgtgcccagcagtgacaggcagtgtgcagctgttaggtagggcagtcagggacccctgaggccaggcagcccaggcaggaggcctgccaagatctgggaccagtgttcctggccaagggtgcctgccgtggtttaaggggcccaagtgagtgaggggtcctcctgaccttgcaggggtggaggttgtcacagtggggtggggagcggcggtctggacaggggcgagcggttgatgggtgtgaggacgaggagtgggtgtgtcctgttggttaggagtgaggagcatttggctccagtatcagacccgaacaagttgtttttctcgcatggaaaagacgcccaagcaggtggccctggctgcctgggggccgtgccgtgttctgcgttgttgtctcctaaccctaatgcctttcctggcgtcctgggttggagtggccagcagacagtggctgtggccttgaccactgtttgtcctgtggctccatggatctgcttcccctgcttgccctcagggcttgcaggaggaggaagacgtgttgaataagctggagtggttcttaaggtacagctggggaggaaacaaatccagacttgaaaagccacgcgcttatcacagaactggcataagacacgcccggaagcaaagctgtgctggccccgtcatccgacctctgcccacgttccatgctcatttgcaagtgtggctcagacacgtgtttgtggagctggtgtggggccagctgttcagttcagcagccttccaaacactttcctagctgctgaatgcttcattgttctttttaaacggggtgacgtggactggggagtacctgaagcttcttgggcgtggtgggttgggatgggggactgggggtatgtgtgtgacttggggaacacaggtggggtctgccctgcaccccctcccagcccgaccatcctgtccccagtgctctggcgctgcttcagcaccgtggtcatctttctgttcctgctggacgagcagacgagcctgctggtgctggtcccggcgggtgttggagccgccattgagctgtggaaagtgaagaaggcattgaagatgactattttttggagaggcctgatgcccgaatttcaggtaggatttagttgtaatggctgaaccccaagcctctctgaagagtgtgattttgccccctgcgcaaagagtaagatggccatctgcagatgagtcaccgcgggcctctgtcaggggagcctccgtggtggaggcagcactggtttctgatcgcagccactctcttcgcctgaggattccccggtcatatacctagttctgaccgtcttcagtgcagacggcagcacttctgggcctgagccggcctctgggaggaaggatgctggctggccagcgcgtgtgcttcgttttggcaccttgtccagaggcgctcccgaggctggtgctgactggggtccgtacagtcctggcagtcctgaagtgagtgagcccctgccctgagctggtggctgccccagtgcctgggcgcccataaggcccctaggcagatgagggctggggcagagctggagttgaatctcagtgcccacggatggaccttgattgaggcggggccctcagcagtcacaggctgagattttccatgctgtgggcaggggggtcaggaagcccagcacacgcagcgcagccactgtgttccaccttgccccatggctcccggccggctggttcggagcagtgttggctgtgcctgtgtgctctgcagtgttctcactgaagcggtggcactgaaaactgagccacctgagcaaggaacagcagtgaggccgcgttgcccccatcaggcttgtgggacccagggccagggtgaggcgggaaggatccatgcggatccccgtcctctgggtcctctcctcgcctggtagggacctgagcgccctctgtagtgaggcctgggtcagctctgcagccatatgtgacgccccttagtcacagctcagctgtgctcagatcctccctgagtctattaatatcactgtgttgaatttcacaacagtttggcacttacagcgaatctgagaggaaaaccgaggagtacgatactcaggccatgaagtacttgtcatacctgctgtaccctctctgtgtcgggggtgctgtctattcactcctgaatatcaaatataagagctggtactcctggttaatcaacagcttcgtcaacggggtctatgcctttggtttcctcttcatgctgccccagctctttgtgaactacaagttgaagtcagtggcacatctgccctggaaggccttcacctacaaggctttcaacaccttcattgatgacgtctttgccttcatcatcaccatgcccacgtctcaccggctggcctgcttccgggacgacgtggtgtttctggtctacctgtaccagcggtggctttatcctgtggataaacgcagagtgaacgagtttggggagtcctacgaggagaaggccacgcgggcgccccacacggactgaaggccgcccgggctgccgccagccaagtgcaacttgaattgtcaatgagtatttttggaagcatttggaggaattcctagacattgcgttttctgtgttgccaaaatcccttcggacatttctcagacatctcccaagttcccatcacgtcagatttggagctggtagcgcttacgatgcccccacgtgtgaacatctgtcttggtcacagagctgggtgctgccggtcaccttgagctgtggtggctcccggcacacgagtgtccggggttcggccatgtcctcacgcgggcaggggtgggagccctcacaggcaagggggctgttggatttccatttcaggtggttttctaagtgctccttatgtgaatttcaaacacgtatggaattcattccgcatggactctgggatcaaaggctctttcctcttttgtttgagagttggttgttttaaagcttaatgtatgtttctattttaaaataaatttttctggctgtggc

SEQ ID NO: 1703 - DNA, 2781 bp, Homo sapiens
agaacgccatcagctcgctgcttaaagccgtgtttgctctcattttctcaaagaaatctgttttagtttgagattacagtttatcaaatgttaaggctttgaccccaaaatctggtcccagaaagacaggaaggccagctaagaggaggttttcagagtgcatagaaaggctgctctgtgcttcggcatttgttctggaagtgcttcttcggttggcaaagattcctagcaaaacctttgactggaggctttacagggccatacacccaatatcactaatgacagtgttgtaaaatagcttttgtgcaccatgcttaggattcaaggaggataaagtatatctttctaaagttatactttagaaactgtcattccatgttgaaatgataaacattccatgtttatcttttgtgtaagaagtaaaaaagcaaaaattcattgcatcaaagtaggtcaggcactgttaaagccaagcttccccatcgcctaaaaaatgtggacaaactcagaggaagtcagtgattataagctgatccctggagccagttcttacataattgtgttagtctgctcctccaagaagcagactccaagatagaattaaatatgcatggattttattaggggaaatgctgttgtgagagagaatgaggagagaactaggtaaggctgtgagagccatcagacctcgatgcaagtccacccgcgagggaggaaaagaaggaaaccaggttgagtggaagcatcccagacagctgtgcagtctaagagaacttcagcaagattaaaccacaggttccattatgggtcgacttgatgggaaagtcatcatcctgacggccgctgctcaggggattggccaagcagctgccttagcttttgcaagagaaggtgccaaagtcatagccacagacattaatgagtccaaacttcaggaactggaaaagtacccgggtattcaaactcgtgtccttgatgtcacaaagaggaaacaaattgatcagtttgccaatgaagttgagagacttgatgttctctttaatgttgctggttttgtccatcatggaactgtcctggattgtgaggagaaagactgggacttctcgatgaatctcaatgtgcgcagcatgtacctgatgatcaaggcattccttcctagaatgcttgctcagaaatctggcaatattatcaacatgtcttctgcggcttccagcgtcaaaggtgggtctgtctccttccgaggactgcgatgctcatacacgcacatcattaagagctctgcgtttgggaacaggcatagcagagattataatttcaagtattgaaatgatttcaaaactgcttttttcaaaattggtattaagttccttaactacagatcttttgctctcgatgtgagccagtggtaaaattaaattaaaatgtggggtatttttgccctcccttttattctttctaatggacatggaaatgaacatcaaactgggagaaagaaccatttaacatttaattaatttaaaatagtgtattgagcaccggtatgtgctctggccataaaagaattcacagtccaaaactaggagcaaggcagcaaacatcatcttctccagtgtgatgatatataacagaggtttgtacaaagcgctgtcaaaatacagggaaataactgcctgtgagtttgtggaatgcttcacaaagacagttgatctgagccatcagcaagaagtcaagttgaaggacaaggacagcagtacaaaatgtggattatgtcacaatctggcatagttggatctgtgagcttaaaatgaaatagttactgctgagataccatttcttctctttgcaaggatacacatattcaacatacacaagagaggaatgtaaagaagtgcctaggcctcctgttttattgttttgttttgttattaatcttcattttcttttggaatctgcctaagagttatggcaactgatgatgagaaactaagactaccaatgttaagtaagttcagcatttcaattaagtctcaattaagttgtgcctatactgatattatttccctagatccagaaactgactctattgaaggaaaaaaatctgatatcaatctttttaaaaggggaggaatgtgggagaaagcatgaaaatggctactgggaaaacttatttgtgttacctttctgaaggaaaatacattttttattccttcaattgttgaacctttcctccaccctcaggagttgtgaacagatgtgtgtacagcacaaccaaggcagccgtgattggcctcacaaaatctgtggctgcagatttcatccagcagggcatcaggtgcaactgtgtgtgcccaggaacagttgatacgccatctctacaagaaagaatacaagccagaggaaatcctgaagaggcacggaatgatttcctgaagagacaaaagacgggaagattcgcaactgcagaagaaatagccatgctctgcgtgtatttggcttctgatgaatctgcttatgtaactggtaaccctgtcatcattgatggaggctggagcttgtgattttaggatctccatggtgggaaggaaggcaggcccttcctatccacagtgaacctggttacgaagaaaactcaccaatcatctccttcctgttaatcacatgttaatgaaaataagctctttttaatgatgtcactgtttgcaagagtctgattctttaagtatattaatctctttgtaatctcttctgaaatcattgtaaagaaataaaaatattgaactc

SEQ ID NO: 1704 - DNA, 2863 bp, Homo sapiens
acacggcgcgggatggacgcgcaggactgccaggcggccgcatcgcccgagccgcccgggcccccagcccgtagctgcgtggccgcctggtgggacatggtcgaccgcaacctgcggcacacagtccccagctgccggggggaagatgccaaggggaaggactgttgctggtatgaagcagcccttcgtgatgggaacccaattattgtttatcttcatggcagtgcagaacacagggcagcttcgcacagactgaagctggtaaaggtgctgagtgatggtggctttcatgtcttgtctgttgactacagaggatttggggactctacaggtaagcccacagaggagggactgactacggatgccatttgtgtctatgagtggaccaaggcaagaagtggcatcactcccgtgtgtctctggggccactctctgggtacaggagttgcaacaaatgctgcaaaagtgctagaagaaaaaggatgcccagttgatgctattgtcttggaagctccatttaccaacatgtgggttgcaagtatcaattatcccttgttaaagagtctggctctgtcgtccaggctggagtgcagtggcgtgatatcggctcactgcaagctccgcttcccaggttcacgccattctcctgcctcagcctcccgagtagctgggactacaggcgcccgccaccatgcctggctaatttttctgtgtttttagtagagacggggtttcaccgtgttaggcaggatgatctcaatctcctgacctcgtgatccgcccacctcggtctcccaaagtgccgggattacaggcgtgagccaccgcgcccagctgataaagagagatttctaaatttaatgtggaccaatttaccaatatttttctttatggtaacttttatgtcatttataataaaactctgcttacccaaagattatcaagatactcttctatgttgtcttctggaaactctattttaccttttacatgtaaagttataatccacaggtttagatttttgtatggaggcaggggtccacatgagtgtctaattggtctagagtcatttattaaatggaccttccccaccactatgcagtgctaatgtttgcatatatcagtgtctatacatatagagagaggtctggtggtaggttctcatttctctccattgtctatctgtcaatcttaatatactatggtcttttaattactatagctttataatatgtcttgatatctggttgtataagttcctcagctttgtcttcttattcaggattgtcttggctattcttaacgctttgcatttcggtatacattttgaaatacacttgtcatgttctacagaaaacttgctgggactctgggattgcattggatctatttgggggacttgagatcaatttgggggacttggtatctttctaacattgagtcttcaaattcatgagtattgtgttttatttattatttatttatttaattttacatttatttctcatttaggttttgtttagtttcagttttaggtcatattctcctagaagcaaagcctgagacagagatttggtgtgtttgatttattgaggaaatgttcttcaggaaaaaatccaaaagggaatgagggtagtagcactggaaagggggaagagcagaacaaggacgtgacctcaggcaaagtctagctttggcctgattcaggcggggtgctaagctttgaagcaaagggcctgttgtttctgccctccgctaaggtaggcagtggaggaggggcgggaggatggcgtaacctcttaggagtgatggcttctgtcatctaagaataaggagaagcagccaacactcacagcagaagttaattaattttgtcagtcttttcaaagaaccagctttgactttatcttctgtgttatatggtttctatatttttaatttctggttttacctgtattattccctttctcatatgttctttggatttaagttgttatttaaaaatttctttagatagtacttaataccatctaataatttatttttactatttttttctaatttatgtactaaggcatacttcacctaaaccacacttcagccgcaaccaaattttgaagtgtgttctaattatcatttagttcaaaatattttataatattattgtgatttcctccttgactatatggattatttagaagtatgattcataacttctatgcatttgggcatttgattatgatttttattgatttttaccttaaatctctcaagatccaagaatatactgtgtatgattttagtcttttgaaatttgttgagactcactttgtgtaccaatgtatggtcaattttggcaaattttccatatgcttgaaaagaatgtgttctgctgtttttcatgcagtgttctatgtacgtcgattgaatcgggattattaaccatgcttaaatttgtcaggcctctgagcccaagccaagccatcgcatcccctgtgacttgcaggtatctgcccagatggcctgaagtaactgaagaatcacaaaagaagtgaatatgccctgccccaccttaactgatgacattccaccacaaaagaagtataaatggccggtccttgccttaagtgatgacactaccttgtgaaagtccttttcctggctcatcctggctcagaagctcccccactgagcaccttgtgacccccacccctgcccaccagagaacaaccccctttgactgtaattttccattaccttcccaaatcctataaaacagccccacccctatctcccttggctgactctcttttcggactcagcccacctgcacccaggtgaaataaacagccatgttgctcac

SEQ ID NO: 1705 - DNA, 2957 bp, Homo sapiens
gcagctccgcggccaggggtggaaggaagccgcagccgcagccccaagtcaacccccgctgccccgtcccaccgtctcatctctcccccctcgcagagacggggtttcaccatgttagccaggatggtctcgatctcctgacctcgtgatccacctgcctcggcctcccaaactgctgggattacaggcgtgagccactgcgccctgcctggaccattggccttttccatgaagaagaggcaacattgagtggcggacaacactttttggcatctctccaattcagctgttagcatctcctagtgtcttcttcacagctaacagctttggctacttgctcatgacactccgtctctgatcacagagcaaatccactgtctccattggtttccagtactagtactcaattctactcaatcccacctgattccaggagacataatggagaagtgcacgaaatcatcatctaccatgcaggtagagccttcctttcttcaggcagagaatctgattctgcggcctcaaatgcagcatccaaccacggagaacactgctaaaaggggccaagtcatgcctgccctggccaccacagtgatgcctgtaccatactcacttgagcatctcacccagtttcatggtgaccctgccaattgctcagagttcctcactcaggtgactacctacttgacagctctccaaatctctaatcctgcaaatgatgcccagatcaaactcttttttgattacctatctcagcagttagaaagttgtgggatcatatctgggcctgacaagagtaccttactgaagcaatatgagaatcttattcttgagttccagcagtcatttggtaaacccacaaaacaggaaatcaatcctctgatgaatgctaagtttgacaaaggagacaactcctctcagcaggaccctgctactttccacctcctcgctcaaaatctgatctgtaatgaaaccaatcagagtggtcagttcgaaaaggcactagctgatcccaaccaggatgaagagagtgtcactgatatgatggacaatcttccagacctgatcactcagtgcattcagttggacaagaaacacagtgacaggccagagctcctacagtcagagacccagctcccattgttggcttccttgatccaacaccaagccctctttagccccacagatccaccacccaagaaagggcctatacagctgcgagaaggccagctgcctctcaccccagccaaacgagcccgccagcaagaaactcagttgtgcctctactgcagccaatctggtcacttcacaagagattgccttgccaaacgttctcgagctccggcaacgacaaataacacagctcaccagtaagaggagaccaggaaagtcactttttaaacttacatcccagccttactgatttataacctgcattaacttttaaaatacagatggggaactgtgacaccactttataggcagttatgaactgacacgctttgggggaatctaaacaatcagatcttgttcattggcaaattacccctcacgaaacctaacccgagaatgatgaaaacaattcacaggcactttctgcagttgggattaattctccaagagcaccaaaaacctgcaggcaaaactttgcccagtctgagccaatgaaaataaccgtggaagcacattgggaaccttatcctgaccaatgggtgacatctgggttgagtttgtgtcccaaatcctgaatcttgtgtgcctagaaatgagcccaagacttttaccttcacctttattggtctgtatcctagtttcctgttggcttaggactttggctgaagtccaaatgacattcctataatctgcttatattctcctcctagagtttggaccatgcttcacctattgactacgatctaccttcagcataaatcaaccttcctggaaccacagctctgccacccttccatagagctatatgttttgtttccatctaaagactcatgctttcccaacaaacagaacctcctggctatttacaaaccagattgaatgggcatttgaatactgcttggaactgttggtccctttttctttgcaggctagcccatcaggcaggtgtatgcttttagccaagcccaccaattccaacttattcctctcttctccaacaaccctacttgaggttccagcatgtcttatagccaagtcaatatgctctaggataaggatttctgaaaggtatttagtgagagttggggatggtgtgtcataattactgtatctgtagcatgtccttgctgccttggacaagggacctggccaaataaatctccactgaagactgacagccagaccctgcagtagtttctaactctagaagcctcaatgtagtcaccatctaggattactactcattgctattgagctctacctttatggaccacctctgaagtccttcatctaattgaggatcttaaaaaacaatgaatggcaaaaaacttcctacactatctcatctgaaaaatcctggggcacatacattaaaaccatttgtgcacaaaactcaggaagtcgggattttattttttatgttttactcttggtacacaccagctttgtgtagattcctgatgcttctgaacaaaagtagtgttatgctagaaaggcaaaactccctaaaatgttaaaactgttcagcaatgatcactgctggtaattaccagccctctgttccctgcttcttgtttctgatgtatgtccccaaaatggatatcctggagaaatatcagtaatcacatattccctagcaaccatcaaggcctctcagaacatgaaatcccattgtactttggctttgtttctggagaattatgctaactttgacaatacttaaacctaactaggaccttactactctgattctgtagcaccaataaatagatattttcaccttg

SEQ ID NO: 1706 - DNA, 1244 bp, Homo sapiens
aacactgcatttacagcgcgcatagcgcccacgcacgcgcactggggtgtccgccgggcatcgctctgtccagttattccagtttctctgggagcagccgagttgaccccacggtctgagatgtccaagctgcccacagacagcagtgtcccgcagacaggcgcggcgaatggtgacagagacgtcccgcaggcggaggtaggccgcgggaggcgggagccggccccggcacagcctgaggaggccagggaaagcccggcggcggcggcggccagggaagcccggatggcggaggtcgcccgcttgctgggggagccagtggacgaagagggtcccgagggcaggcccaggtccagacacgggaacggaggcctggctgcgttgccctatctccgtctccgccacccacttagcgttttaggcatcaattaccagcagtttctccgccactatctggaaaattacccgattgctcccggcagaatacaagagcttgaagaacgccgcaggcgattcgtggaagcctgcagagcaagggaagcagcgtttgatgccgaatatcagcgaaatcctcacagggtggacctcgatattttaacctttacgatagctctgactgcctctgaagttatcaaccctctgatagaagaacttggttgcgataagtttatcaatagagaatagttatgtggtgacactacttcaagagaacctctgcattccagtcataccaatcctgcaacttgattttcagaagtcaagagtatatcgcgataagacagtgcacaggtggaggggaaaaaaagggggagggggaagcttatcttgaaaaagcatcacagaagtagaaaaaaatgtcgaaagcattataactgtaacgttctttgagtttgtgattgatccacatttttccccctgcattatggaaaatgtctctcagcattgctttattacaaagtaaaggatggttttataaaattgagactgatgaaacatcaatactagagcccatgaggatgaaagaaattatcaaatagtgctgaacagaataagatgttaacgctgagttattaggactggaaggctatgaaaagaacttgaaattgtcggaatatgtgctctcttcatgtcatattcaatagaagtttctagtttaagattgattttgtgttttcttaggcatttcaagtgacaagcaaagtaaatgtatatattatgtgataaatcatgttttcaagaacgtc

SEQ ID NO: 1707 - DNA, 2164 bp, Homo sapiens
ttttctgaatattttctctcaatgcttggttgaatccccatctatggaacccgtggatacagagggccagctgtagttatattacacataattattggatataattcatacagttaaaaaatttaagagggaaaagtgaatagaagtaaaagcattacaaaagaagaagtttagatcagtgtacgaagaagctataagaaaaacatcaaaggtccaacgtggagattgtcagggctgctggcggtgtggagagtgactgaaggtgcaagctgcatgtcgggggagctggcggtgtgcagagtgactgaaggtgcaagctgcatgtcggagctggcggtgtggagagtgactgaaggtgcaagctgcatgtcgggggagccggcggtgtgcagagtgactgaaggtgcaggctgcatgtcggagctggcggtgtgcagagtgactgaaggtgcaagctgcatgtcgggggagctggcagtgtggagagtgactgaaggtgcaagctgcatgtcgggggagctggcggtgtgcagagtgactgaaggtccaggctgcatgtcggggttgctggcggtgtgcagagtgactgaaggtgcaggctgcatgtcgggggagctggcggtgtgcagagtgactgaaggtgcaagctgcatgtcgggggagctggcggtgtgcagagtgactgaaggtgcaggctgcatgtcggggctgctggcggtgtgcagagtgactgaaggtgcaggctgcatgtcgggggagctggcggtgtgcagagtgactgaaggtgcaagctgcatgtcaggggagctgccggtgtggagagtgactgaaggtgcaggccgcatgtcgggggagctggcggtgtgcggagtgactgaaggtgcaggctgcatgtcgggggagctggcggtgtgcagagtgactgaaggtgcaggctgcatgtcgggggagctggcggtgtgcagagtgactgaaggtgcaggctgcatgtcgggggagctgacggtgtgcagagtgactgaaggtgcaggctgcatgtcgggggagctggcggtgtggagagtgactgaaggtgcaggctgcatgtcgggggagctggcggtgtgcagagtgactgaaggtgcaggctgcatgtcgggggagctggcggtgtggagagtgactgaaggtgcaggctgcatgtcgggggagctggcggtgtgcagagtgactgaaggtgcaagctgcatgtcaggggagctgccggtgtggagagtgactgaaggtgcaagctgcatgtcgggggagctggcggtgtgcagagtgactgaaggtgcgggctgcatgtcgggggagctggcagtgtgcagagtgactgaaggtgcgggctgcatgtcgggggagctggcggtgtgcagagtgactgaaggtgcgggctgcatgtcgggggagctggcggtgtgcagagtgactgaaggtgcgggctgcatgtcgggggagctggcggtgtgcagagtgactgaaggtgcgggctgcatgtcgggggagctggcggtgtgcacagtgactgaaggtgcaagctgcatgtcgggggagctggcggtgtgcagagtgactgaaggtgcacgctgcatgtcgggggagccggcggtgtggagagtgactgaaggtgcaggctgcatgtcgggggagctggcggtgtggagagtgaccgaaggtgcaggctgcatgtcggagctggcggtgtggagagtgactgaaggtgcaggctgcatgtcgggggagctggcggtgtgcacagtgactgaaggtgcaagctgcatgtcgggggagctggcggtgtgcagagtgactgaaggtccatgctgcgtgtcgggggagctggcggtgtgcagagtgactgaaggtccatgctgcatatcgggggagtgcattcggagtgttctcatctgtctcatccctgaccacgtgagtacgcaggacacctgtgtctgtgttaagggagttcgttcctaagtgctctcatctgcctacttccatgactgtgtgagtaaaaagggctcaggtcacacacaagaaggaagaaattggaaacccaggaacacatatcagaggaaaccaactgaaaacaaataataaaatgcagacgtacgttctaatggtctaaatacgagacagaatggat

SEQ ID NO: 1708 - DNA, 2491 bp, Homo sapiens
ctggtgcaggctgccttccaccgcttccattggtcccgctgcagcaagctggagctcagccgctacctcccgtaggtcattcctgccctcagagctgggataggggagtatgcgacctgccactctgagcagacatcacacagctggctggcttccccacgtcgcccctggcttgactcttccgtgactcatctcgcctccccgccaaacctggcctaaaacataccccattagcatagcagctcctacgactgcctcctcgatgacccctttgatcctgcctggccccagcccccagagctgcctgggatcaactactcaatggatgagcagtgccgctttgactttggcagtggctaccagacctgcttggcattcaggacctttgagccctgcaagcagctgtggtgcagccatcctgacaacccgtacttctgcaagaccaagaaggggcccccgctggatgggactgagtgtgcacccggcaagtggtgcttcaaaggtcactgcatctggaagtcgccggagcagacatatggccaggatggaggctggagctcctggaccaagtttgggtcatgttcgcggtcatgtgggggcggggtgcgatcccgcagccggagctgcaacaacccctccccagcctatggaggccgcctgtgcttagggcccatgttcgagtaccaggtctgcaacagcgaggagtgccctgggacctacgaggacttccgggcccagcagtgtgccaagcgcaactcctactatgtgcaccagaatgccaagcacagctgggtgccctacgagcctgacgatgacgcccagaagtgtgagctgatctgccagtcggcggacacgggggacgtggtgttcatgaaccaggtggttcacgatgggacacgctgcagctaccgggacccatacagcgtctgtgcgcgtggcgagtgtgtgcctgtcggctgtgacaaggaggtggggtccatgaaggcggatgacaagtgtggagtctgcgggggtgacaactcccactgcaggactgtgaaggggacgctgggcaaggcctccaagcaggcaggagctctcaagctggtgcagatcccagcaggtgccaggcacatccagattgaggcactggagaagtccccccaccgcattggtgagtgctggggtgctgggaggggacagcagggccccaggccctgccctctgacttgggggagctgggagaccagaggacaagattctagtacaagtggaattgtactaactggagtaatgggcagagacccccttttcattttattttaaatttatgctgcatgggtaacccattccatggtttacattttagaaggtctcaaaggggacctagtaaagagtcccctttctacccctgtaccctgggggcggttttcttccctaagggcaactactgttaataatttcttgtgcacatagatggctgttaaaggaaagccatgttcacagagtgtatcagtcagcttttgctgcctaacacaccactccaaaacttagtggcttcaaacaagaataattcttagctcacggtcctatgggtcatcagtttgggctgggctctgtggggtggttcttctacttatcttcttggaccaagtcatgcagatgccctcagctggtaggtctctgggagctggttggtctaggatggcctcgctcacatgtctggtggttggtactggctgtcagctggggtcatggaggtggcagggctgtgtcctcaacaggctaacccagtgttattcacattatatctgtcacatagtcctcaggaatggcttgtgtcatgttttctagcgtcccattagtccaaatcacatggacaagcccagatttaaggggtagaaacatagactagctcttgatggtagaagtggtgaagttactgtgcaaagcagcatgcatagaggaataggaggaatgtagaggcattctgcagtctaccacacaggcccttacattattctcattataatcatacttaaacaccaagccactaaatgaggtgacacccttgtgcttgtaacagttatctaactatgaagctaggctcgattaaaaatgagaataccacaataagttaataaatttaaattaaggccattaatataatatgagtgatgttttgtttcgtttttgctgaaactaaattggctgtcaaaaaatggacatgtccagagaggcaaatccacagacagagagagaatagatccgtggctgccaggggctggggaaggaaagaggcatgacggctaatgggtatcaggtttctttttggggcgatgaaaatgttctggaattagacagtggcaatggctgaatctacttaaaaatcagggcaggcgcagcggctcacgcctgtaatcccaacactttgggaggccaaggtgggtggatcgcttgagctcagaagtttgagatcagcctggggaacatggtgaaatcccatctctac

SEQ ID NO: 1709 - DNA, 3622 bp, Homo sapiens
atgtgttgtgtatcctcctgctttaccttctaccgtgagtcaaagccccctgaggcttccccagaagcagatgctggagctatgtttcctgtacagcctgcagaactgcagatggagttattgccatggtgttaggacaagctgattgtgttaaagcatgtgacacacctaatttcagaaaccagaggggaaatcgccgctcattaaagttcaaggaacatatcctggaggcttagtgaaaccagctctctcttcccatcaaatgagaagtctctgtgtcttcaaatgaaagccaagaaagcacaccccagagtcgaatacaacaaaacatcaggcaatgcctttgaagagcagttttctttgccaaccaaggttcggggatcgcctctagcttcccaggacaaccagccacggatcctgtgggcaggagggctgccaaggcccagttggaggctcaatttatggcggcctgggggaagaagcatgcaggtaaatacagcccaaggggacccagaagaaggtgcacgcccaagaggacggtctgtctgctttctgcgctgggggcacaggggcagcccgaggccccaggccccttcgtggctctggagtccattgtgcacgtgctaagatgcgccaggttttcaaagcaggctcaagggccttaggcttccccgtggaaggctccccctcatagcagggttacagatgctctcagagcagctcttctccatgggtgcagtcctgacatccaaggggtctgaactgtagtacgttgtttactggaacctgaacccgaagggcttccaaaagtccctcgataaaatggtcaggaaccggtgattccatgtatagctctgctttaaagctttaattggcagagagcccccccccccaaaaaagtctacaactagtacatttctccacaaaaaatgtccacagcagcatcttcctctaaaaaaggtttgtcttttacattttaatgcaggaaaggatccagtccgtgatgaatgtgaggaaagaaaccgttttacagaaacaagggaggaagatgtaactgatgagcatggggaaagagaaccttttgctgaaacagatgaacacacgggggctaataccaagaagccagaagatactgcaggtatgttttaggagttatctgtagtttatgaaaattgttttcagtcatacaactgttgcagtaggttatatgaattagtggacgacaagactgtcttaaatggcttctcatatgtagcatttaacgtacgtatttaatgtaatctatttgataaatttttcttacctttttgattgttgatgtggaatgtgagaatgcttctaataatggtgaagcgagatggatggcttttctttcatacatgtggaaatttaattgtttggaggatattagaggacagtggaggagaaacagctctattcgttccttttagtatacacagattaagtcatatatcaatggttttttttagcttttactttaagtttgggggtacatgtggaggtttgttatgtagataaattgcatgtcacagggttttggtatacagattattttgtcacccagtttataagcatagtacctgatgggtggtctttgatcctcaccctcctcctaccctccaccctcaagtaggcccagttgtctgttgttcctctcttcctgtccgtctgtactcagagtttttaatatgagtttttcatgttcctaatttagctgttctattgtcacagctttctgattttgttttctttaaagtacaagagaaaattgaattttctaaaatcattttctattattattccagtaataaactgtgtagtagaaaagtaaggacaacttttctacctagtgagaaacatgtaattggctccaaaaactcataaactttatattgctgtgtgaaatattagttacactcttataggaccatattttcaaaaaagtttgagaaaatttctgtagagatgatggagacaatactcttatttttaaaaagctcaattcagttttcagctcttctctagcgatgattcatacaagcagtatatttggaaagcttggtgacaaagtgctggttttgtgagctgcctaatacattgggcattatagatggagactgtatgtaaaaaatatttgcattgtggtacaaatcttttatgattgctgaaaattattcttagcaattgatggtagagctctgatgtgaaatcatgtttaggaaagcattccttgcagtattacagttttctgaaacacagcactatgggtacaaatgtcataaaaagctccaagaaaacatttcaaaagtgtttttggatgtatttctttacctaaacctaaatttttatactcatggccattgcttcttttattaaaatacagttaatagcatcaatcactagattgcttaaaaatgcttttcttattgtgcattaagttatttctacccttttgagggttctattatataagatacttttttgtgtgctttacgtaatgaattgtgcagtatttcatggaagcatctcctttgaattgtaggacattttataaatgtagaaattaaagtctgtgcttataactctttctgcacatttaaaaaatagagacttttaattatttgctttttttcatcatctgtcaattaagtgattttcagttataccaactggaattgaaatgcgaatgttaatacctgaaaggttttacagaaaataagtgagtaaatcttgctttttgaaatgatctttgcattttatattttaagtatccttctgaaattgctgaaccataaagtcccatattgatgtcagtatatgcaaagaaactacttttcaacattaacttttaatccattttcatttactatctaactgacattaaagaggatcttactgcaaaaagaaaaaggatgaaaatggataaaacttgcagcaaaacaaagaacaaaagtaaacatgctttgagaaaaaagcaacttaaaaggcagaaacgtgattatatacattctctgaagttgctaaatgtccttgaagaatacatcacagacgagcagaaagaggaagaagaagaagagggagaagaggaagaactaattagaatatttcaagaacaacagaagaagtggcaacaatatagaagtgttaggagagagaggctgaaagagatgaagctgctacgtgaccaattcgtaaaggctcttgaggactttgaagacctttgtgacagagttttttccgatgaagacagtgaacttgataactagacatgtttttaaataaaatcatgtcagaactcttttggaaaagttggcacttacccagttgtctcttcaacctctgttattctgatgactgaagaaagaacttgaacctatgttatatgatacaagcacaacttgagctacagtaaactacatgacagtgttttgataattgttgtataaatcggtatagctcctctgtcactcgtctgttaaatgccagacctcgtttctatgatctgttgaatgaatcctagacacttctgtgagaaagcagggattgcatagttatgtacacggtcaattaaattttaacattaaagataatttagatttcg

SEQ ID NO: 1710 - DNA, 2758 bp, Homo sapiens
gtttagtagagacggtgtttctccatgttggtcaggctggtctcgaactcctgacctcagctgatccgcctgccttggcctcccaaagttctgggattataggtgtgagccactgcacccagccacctgttccttttactgttccctttgtagtgccctcaacatatgacctgtacttaaggtgttgtgaggtctggatgtatatatttcagcagtccctgaacaccagctctactgtcacatcagatctctctgggtctggacacagtcttctacacattgttcaccagaagctatggcctgttgaaagccattcactgaggagtaacttggggactccacttctgtgctctgcactgtaccactccctatgttgttccccatcatcaggactctctcgttatgggtttctgtcagtcccggttctgcccagtaggctttcctctcactggctttaatgtcccatgcctgtcaccaatcccatggtcttatttgtgagttggtctgacagacatttgttatggggctgcctcttccctccaaagtcatcatgcacttcatgagcatttctgttttaggttgttggcatggagccaaggatgaggaggcaccttccaagcaatgtgtttctgtaggagtgtcacaggtcacaactttaaagccagctttgtccacccagaaggcccagccctgtgagacatgtagctcacttctgaaggacattctacacctggctgagcatgacggaacacaccccaagcgtacagccaagctttacctgcaccaaaaggagcatcttagagagaagctcaccagaagtgatgaagggaggccttcgtttgtgaatgacagtgttcacctggcaaagaggaacctcacatgcatgcagggtggcaaggattttactggtgattcagatcttcaacaacaggctcttcacagtgggtggaagccacacagggacactcatggtgtggaggcctttcaaagtggacagaataattacagctgcacccaatgtgggaaagacttttgccaccaacatacactgtttgagcaccagaaaatccacacagaggaaaggccttatgagtgcagtgaatgtggcaaattgtttaggtacaactccgaccttattaaacatcagcgaaatcatactggagaaaggccttataagtgtagtgaatgtggaaaagccttcagcctcaaatacaatgttgttcaacaccagaaaattcacactggagaaaggccttatgagtgcagtgaatgtgggaaagcttttcttagaaagtctcacctacttcagcaccagaggattcacaccaggccaaggccttatgtgtgtagtgaatgtgggaaggccttccttacacaggctcaccttgttggtcaccagaaaattcatactggagaacggccttatggatgcaatgaatgtgggaaatactttatgtacagttcagcactcattagacatcagaaagttcacactggagaaaggcctttttattgctgtgaatgtgggaaattctttatggacagctgcacactcattattcaccagagagttcatactggagaaaaaccttatgaatgcaacgaatgtgggaaattctttagataccgttccacactcattagacatcagaaagttcacactggagaaaagccttatgagtgtagtgaatgtgggaagttctttatggacacttccacactcattattcatcagagagttcatactggagaaaagccttatgaatgcaacaaatgtgggaaattctttaggtattgcttcacactgaatagacatcagagagttcactctggagagaggccttatgaatgcagtgaatgtggcaaattctttgtggacagctgtacactgaagagtcatcagagagttcacactggagaaagaccttttgaatgcagcatttgtgggaaatcctttagatgtcgctccacacttgatacacatcagagaattcacactggtgaaaggccttatgagtgtagtgaatgtgggaaattctttaggcacaactcaaatcatattagacatcggagaaatcactttggagaagggtcttttgagtgcactgagtgtgggagagtttttagccaaaattcccacctcattcggcaccaaaaagttcacactagggaaagaacttacaaatgcagcaaatgtgggaaattttttatggacagctccacactcattagtcatgagagagttcatactggagaaaagccttatgagtgcagtgaatgtgggaaagtctttagatacaactccagcctcattaaacatcggagaattcacactggagagagaccttatcagtgcagtgaatgtggaagagtctttaaccaaaattctcatctcattcagcaccagaaagttcacaccagataaagaatgtatatataaagcagatggggaaagacttcacacagaaatctactctgatttagcactgggacctacgttttaaaaaaagtattcttgtagaatacagataacataaaatctaacatcttaaccatgttaaagtgtatagttcagtaccgttaagtcattcacattgtgcaatgaatatctagaagtcttttcaacttatgaaactaagtctataccttttaaaaccttattcctcactccatccagcctcttgacaagcaccgctctgtatgaattttactagtccgggtacctcatataagaaaacttaagttttggtcaaaaaag

SEQ ID NO: 1711 - DNA, 1955 bp, Homo sapiens
agacgccgcgcggggcggggattggtctgtggtcctctctcggctcctcgcggctcgcggcggccgacggttcctgggacacctgcttgcttggcccgtccggcggctcagggcttctctgctgcgctcccggttcgctggacgggaagaagggctgggccgtcccgtcccgtccccatcggaaccccaagtcgcgccgctgacccgtcgcagggcgagatgagcgcggacgcagcggccggggcgcccctgccccggctctgctgcctggagaagggtccgaacggctacggcttccacctgcacggggagaagggcaagttgggccgagaaggcggggctgctggcgggggaccggctggtggaggtgaacggcgaaaacgtggagaaggagacccaccagcaggtggtgagccgcatccgcgccgcactcaacgccgtgcgcctgctggtggtcgaccccgagacggacgagcagctgcagaagctcggcgtccaggtccgagaggagctgctgcgcgcccaggaagcgccggggcaggccgagccgccggccgccgccgaggtgcagggggctggcaacgaaaatgagcctcgcgaggccgacaagagccacccggagcagcgcgagcttcggcctcggctctgtaccatgaagaagggccccagtggctatggcttcaacctgcacagcgacaagtccaagccaggccagttcatccggtcagtggacccagactccccggctgaggcttcagggctccgggcccaggatcgcattgtggaggtgaacggggtctgcatggaggggaagcagcatggggacgtggtgtccgccatcagggctggcggggacgagaccaagctgctggtggtggacagggaaactgacgagttcttcaagaaatgcagagtgatcccatctcaggagcacctgaatggtcccctgcctgtgcccttcaccaatggggagatacagaaggagaacagtcgtgaagccctggcagaggcagccttggagagccccaggccagccctggtgagatccgcctccagtgacaccagcgaggagctgaattcccaagacagccccccaaaacaggactccacagcgccctcgtctacctcctcctccgaccccatcctagacttcaacatctccctggccatggccaaagagagggcccaccagaaacgcagcagcaaacgggccccgcagatggactggagcaagaaaaacgaactcttcagcaacctctgagcgccctgctgtcacccagtgactggcagggccgagccagcattccaccccacctttttccttctccccaattactcccctgaatcaatgtacaaatcagcacccacatcccctttcttgacaaatgatttttctagagaactatgttcttccctgactttagggaaggtgaatgtgttcccgtcctcccgcagtcagaaaggagactctgcctccctcctcctcactgagtgcctcatcctaccgggtgtccctttgccaccctgcctgggacatcgctggaacctgcaccatgccaggatcatgggaccaggcgagagggcaccctcccttcctcccccatgtgataaatgggtccagggctgatcaaagaactctgactgcagaactgccgctctcagtggacagggcatctgttaccctgagacctgtggcagacacgtcttgttttcatttgatttttgttaagagtgcagtattgcagagtctagaggaatttttgtttccttgattaacatgattttcctggttgttacatccagggcatggcagtggcctcagccttaaacttttgttcctactcccaccctcagcgaactgggcagcacggggagggtttggctacccctgcccatccctgagccaggtaccaccattgtaaggaaacactttcagaaattcagctggttcctcc

SEQ ID NO: 1712 - DNA, 2467 bp, Homo sapiens
aacacaaattacctgctctcccagtgatcagtcacgtgcaaaaagctttgtccaattctttgaaaaggtgagatttttttttttctttttgcggtttttgaagtttggttgaatttagaaattcgaaggaataaactaagagcctgaattaaatgttttgaaatatacatacataaaacaaaagacactagtatttctttcacttttatcaatacgcatagagaaggaagcagagtatgtgtttccaaaacgtgacttggaaagctgtaagacctctatgtcttgttgttgttgttgttgttgttgttaacagaagtaaattttttcagacccaccaccacagaagtggccagactcccaaaccagcatttccagctactggctggctggtgtacaccaggccaattctttatgagaatatattaaaagtcacccctgtggattcctacaaagtacttccccttgcggggaggggagaggcttactgtccctttggtcttgagaccagcacagttgtagataatatcctgaaaaggttattattaaattctttcgcgtaatgcccctttacaaatattgttaaacattaatttacagaagaacttaaatcttaatttcaagggtggcataagactatcgctttgaaattgtatctttcgcaagttaaaaaaaaaaaataacaaagccattcgctgatgctacagaataaaagaaagggaggctgctaaggtaatttcagcctggtagaattcacattgcatgcatgctgcataaagttccatgctatccagataagactattcactgaatcttttagactagaatctagaccaataaaatgcattttagtttgtatggaatgtcctagcttcctagaggctagggttcgacgtcttgtttgtcaagacataaagggattaatgacatacccactgtgtgctagaccacagagtgggcacagagggatgaaaaaataaaaattcctgcccttgaggagctcacagtctaagctgtcaataataacatctaacatttattaaatactatgatctaggcactgaactaaaagctttatgtcaactcagttaatactgccaacaactctttgacatcactggaaattccatatgctgaattcacacggaattaagtggaaatctacaaagtagccagtctactggttctgtagtggtcaacctattaaaaatggtttttaatttctaaagtactttatgccaaatataacatgtttatggtatatgcctgactgtagaattataactcaggggaataacgacttatttaaatgtaacagatctattcatagtctgtaaagaacaattcatcctctgattttgtttttcagattaagcagtgtgtttattaaaaattattatcatcgcaatactaaaaagatctttagattgctgctaatctgattctgcattttaactgccttaaattctacattcacttgcaagtgggggccacagtcaggttggcaacaagttttgcagacaaaaggaaatcctggttgtaaatcccatgatatattgtactcaattttgtatgatactgtctaatgtgctgtgctgccttattaaagaactcgatgtccatttggtttacattagagggaaacttaactgcagcttaacatattgttcattttcaacactgtcacgttacattcgtggggggcagattttaatttctttatcagtaatcaactggaagtttctttttgttaaattaaagcaagaaaggttttaaaataaagggcatgggggtaggacgccaccttttggtgataaaacaaatagaaatcccttctgaaaacagatgttcctgacataattttatttttaattacaccaaggcaaaggtgcttgtccccatttcgttatattttaagtaacaggagaaaaaaaaaaccaatgtaaatgcaaaattagcaaattatagttaactgcagccaaaattttcccaaacgtatcagaatatgttagtcccctgtcacattactgttgattgtatacaccaaacatgagcttcattcaccaaataccatgtcactaaatatatgtacatttggggaacagaaactggagtggacatttaccacctgacgacgtacctgaatgctcttgtaagttttgagttgaacaaaaactaaaaccacttaatttagtgtttctttaaccacagttactggtgtcctgatttttgccatatctatatgacataacagttcccgaataattaatataccatactcattggaggccacttattatggtaattgtagcaaacattttcatttaaatcaaccttcttttaatttttttctattactgccttaaatgggaaatcagtatcacccaccataaattaaaaacaagcacagtaaaaacaaagtcactgatttctctttgagggtcaaaacaaaaattaaaaatgatttttg

SEQ ID NO: 1713 - DNA, 1550 bp, Homo sapiens
agcgagtgcgcgctcctcctcgcccgccgctaggtccatcccggcccagccaccatgtccatccacttcagctccccggtattcacctcgcgctcagccgccttctcgggccgcggcgcccaggtgcgcctgagctccgctcgccccggcggccttggcagcagcagcctctacggcctcggcgcctcgcggccgcgcgtggccccgctgcggctggacgccgacccctccctccagcgggtgcgccaggaggagagcgagcagatcaagaccctcaacaacaagtttgcctccttcatcgacaaggtgcggtttctggagcagcagaacaagctgctggagaccaagtggacgctgctgcaggagcagaagtcggccaagagcagccgcctcccagacatctttgaggcccagattgctggccttcggggtcagcttgaggcactgcaggtggatgggggccgcctggaggcggagctgcggagcatgcaggatgtggtggaggacttcaagaataggtacgaagatgaaattaaccgccgcacagctgctgagaatgagtttgtggtgctgaagaaggatgtggatgctgcctacatgagcaaggtggagctggaggccaaggtggatgccctgaatgatgagatcaacttcctcaggaccctcaatgagacggagttgacagagctgcagtcccagatctccgacacatctgtggtgctgtccatgaacaacagtcgctccctggacctggacggcatcatcgctgaggtcaaggcacagtatgaggagatggccaaatgcagccgggctgaggctgaagcctggtaccagaccaagtttgagaccctccaggcccaggctgggaagcatggggacgacctccggaatacccggaatgagatttcagagatgaaccgggccatccagaggctgcaggctgagatcgacaacatcaagaaccagcgtgccaagttggaggccgccattgccgaggctgaggagcgtggggagctggcgctcaaggatgctcgtgccaagcaggaggagctggaagccgccctgcagcgggccaagcaggatatggcacggcagctgcgtgagtaccaggaactcatgagcgtgaagctggccctggacatcgagatcgccacctaccgcaagctgctggagggcgaggagagccggttggctggagatggagtgggagccgtgaatatctctgtgatgaattccactggtggcagtagcagtggcggtggcattgggctgaccctcgggggaaccatgggcagcaatgccctgagcttctccagcagtgcgggtcctgggctcctgaaggcttattccatccggaccgcatccgccagtcgcaggagtgcccgcgactgagccgcctcccaccactccactcctccagccaccacccacaatcacaagaagattcccacccctgcctcccatgcctggtcccaagacagtgagacagtctggaaagtgatgtcagaatagcttccaataaagcagcctcattctgaggcctgagtgat

SEQ ID NO: 1714 - DNA, 1602 bp, Homo sapiens
agctctgggagaggagcccagcactgggattccgaggtgtttccattcagtgatctgcactgaacacagaggactcgccatggagttggggctgagctgggttttccttgttgctattttaaaaggtgtccagtgtgaggtgcagctggtggagtcggggggaggcttggtccagcccggggggtcccggagactctcctgtgcagcctctgcattcaccgtcagcaacaattacgtgagctgggtccgccaggctccagggaaggggctggagtgggtctcaatcatttatagcgctggtgacacatactacgcagactccgtgaagggcagattcaccatctccagagacaactccaagaacactctgcatcttcaaatgaacagcctgagagccgacgacacggctatttattactgtgcgagaatggggggtggtttcctcgggaatgcttttgagatctggggccaagggacattgatgaccgtctcttcagcatccccgaccagccccaaggtcttcccgctgagcctctgcagcacccagccagatgggaacgtggtcatcgcctgcctggtccagggcttcttcccccaggagccactcagtgtgacctggagcgaaagcggacagggcgtgaccgccagaaacttcccacccagccaggatgcctccggggacctgtacaccacgagcagccagctgaccctgccggccacacagtgcctagccggcaagtccgtgacatgccacgtgaagcactacacgaatcccagccaggatgtgactgtgccctgcccagttccctcaactccacctaccccatctccctcaactccacctaccccatctccctcatgctgccacccccgactgtcactgcaccgaccggccctcgaggacctgctcttaggttcagaagcgaacctcacgtgcacactgaccggcctgagagatgcctcaggtgtcaccttcacctggacgccctcaagtgggaagagcgctgttcaaggaccacctgagcgtgacctctgtggctgctacagcgtgtccagtgtcctgccgggctgtgccgagccatggaaccatgggaagaccttcacttgcactgctgcctaccccgagtccaagaccccgctaaccgccaccctctcaaaatccggaaacacattccggcccgaggtccacctgctgccgccgccgtcggaggagctggccctgaacgagctggtgacgctgacgtgcctggcacgcggcttcagccccaaggacgtgctggttcgctggctgcaggggtcacaggagctgccccgcgagaagtacctgacttgggcatcccggcaggagcccagccagggcaccaccaccttcgctgtgaccagcatactgcgcgtggcagccgaggactggaagaagggggacaccttctcctgcatggtgggccacgaggccctgccgctggccttcacacagaagaccatcgaccgcttggcgggtaaacccacccatgtcaatgtgtctgttgtcatggcggaggtggacggcacctgctactgagccgcccgcctgtccccacccctgaataaactccatgctccccc

SEQ ID NO: 1715 - DNA, 1640 bp, Homo sapiens
agctctgggagacgagcccagcactggaagtcgccggtgtttccattcggtgatcatcactgaacacagaggactcaccatggagtttgggctgagctgggttttcctcgttgctctttttagaggtgtccagtgtcaggtgcaactggtgcaatctgggggaggcgtagtccagcctggaaggtccctgacactctcctgtgcagcctctggattcatgttcagtggttatgccttccactgggtccgccaggctccaggcctgggactggagtgggtggcagtcgtttcaaaagacggaggtaagaaagagtatgcagactccgtgaagggccgattcaccttgtccagatatatcaccaacaacacggtgtctttgcaaatggacagcctgagacttgacgacacggctgtctattattgtgcgagagccccccaggaatacgaatttgggaggggatatcacagcaacaggaacggtttggacgtctggggccaagggaccacggtcaccgtctcctcagcctccaccaagggcccatcggtcttccccctggcgccctgctccaggagcacctccgagagcacagcggccctgggctgcctggtcaaggactacttccccgaaccggtgacggtgtcgtggaactcaggcgccctgaccagcggcgtgcacaccttcccggctgtcctacagtcctcaggactctactccctcagcagcgtggtgaccgtgccctccagcagcttgggcacgaagacctacacctgcaatgtagatcacaagcccagcaacaccaaggtggacaagagagttgagtccaaatatggtcccccgtgcccatcatgcccagcacctgaattcctggggggaccatcagtcttcctgttccccccaaaacccaaggacaccctcatgatctcccggacccctgaggtcacgtgcgtggtggtggacgtgagccaggaagaccccgaggtccagttcaactggtacgtggatggcgtggaggtgcataatgccaagacaaagccgcgggaggagcagttcaacagcacgtaccgtgtggtcagcgtcctcaccgtcgtgcaccaggactggctgaacggcaaggagtacaagtgcaaggtctccaacaaaggcctcccgtcctccatcgagaaaaccatctccaaagccaaagggcagccccgagagccacaggtgtacaccctgcccccatcccaggaggagatgaccaagaaccaggtcagcctgacctgcctggtcaaaggcttctaccccagcgacatcgccgtggagtgggagagcaatgggcagccggagaacaactacaagaccacgcctcccgtgctggactccgacggctccttcttcctctacagcaggctaaccgtggacaagagcaggtggcaggaggggaatgtcttctcatgctccgtgatgcatgaggctctgcacaaccactacacgcagaagagcctctccctgtctctgggtaaatgagtgccagggccggcaagcccccgctccccgggctctcggggtcgcgcgaggatgcttggcacgtaccccgtgtacatacttcccgggcgcccagcatggaaataaagcacccagcgctgccctgggcccctgc

SEQ ID NO: 1716 - DNA, 1666 bp, Homo sapiens
gcattgatggtaggtcctgctgtgcctggtccctggctggtagagtgaggatgagggcagggaagggaaaacacccaacaaaggtttgcttttgttgttgaaatcaagccagttaccctgtgggaagtgaagcttgctcccaccatagaactctgggcaatgatgtaaagcacacacctcacctcagatatgtctcacagcaggggccggggaactgggatatttgtacaccagttcccatcagccaccagctgctgctgctcctgcgcactgattccgcagcacttctggctggtgggcaaagcaggcaggaaaaggcatacggatatggggggttgggagttcaccctgtgggaagggcagagggagaggcgccagacactaagagccagggctgtacacagggacccttcaggtcaacagctctttattaaacacctgctgcctgctctaggccagatcctagagacgcagggtgagcaagacccatctctgtccctgagctcttggttggttgggaggtggcccttaaccagatcatcagcacacatggtaaggagtgtgtgacggagggaagggcagtgccctgggagcaggatgaaggatggggctggcagggcaggagaccagatctgaacagagcctggagggtcttagtcaaggagggcagaagaaggcatacagagtggggccaggtgagtcaaagcctgaggctcggggaggggctggggagcacggagcccgcccctagcctgctggcaagagctgtaggaatcatgtccggagtagggaacagggctgagtctgggcctgttagcctcaaagcacataaggcacataagggccaggctgggcttttcctggagcccttgccgctctgtggctctcagtctggggccttaagcctgacccagggccttctcccaggctctgtccctgggctcattaagcctggttgttccagaagctcagtaccccaccaggcagctcctgcctgcactgatgcccctagaaaccagccctcccgcccgcccccgctcacatggacagtggtgctactgatcactgtgaccagaactgacccacaggacacgaggagctaacatggtagagctgtcacagttgggcagtggtgttactgcccctcgagggagtgaaatagcaggcctgtggctccctgccaagctgcgcgcatggtagaccgggctgcacaggaaaggaaagaccctgccatttatgaagccctgtggagggtgctgggcacagttctctcattccatcctttaaggcaggtataatcaggcccatttcacagaagaggaaacagaggcccagaaaggaaaagtgacttgcccacggtcacagagctcataagcaggggagctgggaattgcagcctggggtttgtctgattccaaatccggggctctttacctccccacttggtaataaagggtgctggtgctgcattctgcttctgttcttggcttccttctccatagagcagagtggtagaacacataacctccctgtgcctcagtttcctcatctgtcaaggatggtgacaggggcaggtatgcagaggcacagcacagacgacgccaccatgctacctgcttgctgattaatgatagggtgtccaagccaaaaaataaaactaaacatt

SEQ ID NO: 1717 - DNA, 1264 bp, Homo sapiens
cggccgcggtcagaggggtgaacagggagacgctgaccaggggcaaggagccggctgagctctcctcctcgccctcttcgtccaggcctcggtcggtcctgtcgtccctgctgggcaggctgagccctgcaaggagggatttcagcatcaccaggtcactgttgtcgaaggacaggtcgtggagcgggtcggcgtgcttctgcaggaaggagatggctgctggggcattgtaggtaatgtacttatggatgaactgcacaaacttgttgatgaaggcagccagatggcgggaggacttcctgtaattcagcagcaggcggatgaaggacagaaggcagtcccacagcgccccctggtgctcgctgcggaacacgtgcggctgcagcagctccagcaggcccagcacgtgcaggaagcagctcaggtggttctgctgccggaactcctggaagttgaggtgggtgcggccgtgcaggagcgccgcgatcatgggcaggtgcctgagcagcagcagcgggtgcgccaccgccagcttccggcaggccatgctggcatccgcccctcggttctccaacgcccgggagtcgctggtgtccgcaaggagcgtgatgaagcggtggatgagtccgtccagcttgcagacgctgctgctggcagccccttcgctgtgcagtaggacctcaggcacgggcacccgcagctccggccgctgtaggtagagctgcaggagaaggtctcggcagcgcctgcccagcacgctgtctccccactgctggatgcagcctgacaggtgctccgtcaccttcctgacactctcatcgtccccacagcagcagctgagcagcaggggcagccgggcctggatgaggctgcaggcggctgtgtccccgtcctggctccgcgtctccgcctcggccaggatcagctccaccaggctgatgagctccgggccctggacccgcagcaccagctcctcccgccgcttctgcggggtgcgctggtcccgcccctgccagatgcgaggaacatggatgcaggcccagaggaagtccagagaggcagaggggtcgaacctctgttcccggctcttgcccagcaggactcggatgcactggtgcagtgtgggccagctggactgatgcgtgaagagggtcaggaggtagggacggaacgagggcacctgggcctgacctttgcccttcctccgggagaagagcagcctgagctgcaggtcggggcagctgctgaccacctcggggtccag

SEQ ID NO: 1718 - DNA, 2750 bp, Homo sapiens
actacccaactctgcccttatagagcaaacacaactacagacattaaaaccagtgagtatggctgtgtcccaatacacttcatttccaaaaacaggcagtggggcctgacttggcctgaggaccacagtttgccagctcctggtctaagatatcatgaatatcttgggatacagagtatcaggaataagttttttcctgctgtttcttaatggtttattgagttgtcagcccaatatctactatatagctaactcctccctggtatgtgatgagtatagtaggcctgccttcataccaggacttcagaaaatgtttgatgatgctgtagaaatatctgccctaggccgggtgcagtggcttacacctgtggtctcagcactttgggaggccaagggaggtggatcacctgaggtcaggagttcgagaccggtgtggccagtgtggcggaaccccgtctctactaaaggtacaaaaagttggctgggtgtggtggcgggtgcctgtggtcccagctgcttgggaggctgaggcgggggagctgcttgagcctggggggtggaggttgcagtgggccaggattgcgccattgcgctccggcctgggtgacagagtgagactctgtctcaaaaaaaaaaaaaaaaaaaaaaaaaagaaagaaaaagaaagaaaagaaaaagaaaagaaatatctgctctattccacagcagaagggttgaccactttgatctaatctgtttcctttttcataggaaacccagaagttctgtgaacaagtccatgctgccatcaaggcatttattgcagtgtactatttgcttccaaaggatcagggtaagccacataagtgttgcatttatcgtgtagatctttgctaatattgtggattatgtcttgtgacttttacctttacccaacttgaacatgtaactttctcccataaaatacagtgaaggataattttgtaatgtaagtgacttatataaacaagccattattctaagatacagatgctttgttcctatgacttcccatctcccctgccttgcctgactcataaggcttttaattctcacagccttctccctcttcaacccgttttaacaccacagatactggctggctctcagccccatatgcaggctcaggccatccttactttcctccacccatgttatatctcaccctatttctgaacatctgcataggttaaatggcctccagccctgcctgtagaatcatgcattgattataatcatgccaaaattataactgaatacatgtcatggatcttcagggttactcaagtggcttaaacttcaagtgtttcatctacagttgttaagagatcacggtccttaatgaatgaatacatggtgtcacggaaagattttgttccaaatctcttttgaagaaaacactaaggaatggcaggaggggcaagaaaatgccatggggatataagtaagacctgagttttgtgttagcatgtaggttaaagcatgtgggtgtacattaccttatagttctgtaatgcttagactcaggaaagcagatggtgcttctgaaaagaacaccaggttgcttattctttgggtttggccacagggatcaccctgagaaagctggtacggggcgccaccctggacatcgtggatggcatggctcagctcatggaagtactttccgtcactccaactcagagccctgagaacaatgaccttatttcctacaacagtgtctgggttgcgtgccagcagatgcctcagataccaagagataacaaagctgcagctcttttgatgctgaccaagaatgtggattttgtgaaggatgcacatgaagaaatggagcaggctgtggaagaatgtgacccttactctggcctcttgaatgatactgaggagaacaactctgacaaccacaatcatgaggatgatgtgttggggtttcccagcaatcaggacttgtattggtcagaggacgatcaagagctcataatcccatgccttgcgctggtgagagcatccaaagcctgcctgaagaaaattcggatgttagtggcagagaatgggaggaaggatcaggtggcacagctggatgacattgtggatatttctgatgaaatcagccctagtgtggatgatttggctctgagcatatatccacctatgtgtcacctgaccgtgcgaatcaatgtaagtactggctttgagggaatagctacagaacaaatgggcagaatttcactaatcactagtatttcctgtaagctatagggtacatatttattagtcacatttggatggaagtacaacagtaatgtcacagttcttgcatgcgtttggggttgataaatattcactgaagttgaattataatagccatgagctttggtagttctctcttccataatcacctgggtaatcattcagaaaagcccaaaggccttagaaaatgatgctttaaggctgggcgcggtagctcacacctgtaatcccagcactccaggaggcggaggtcaggagttgagaccagcctggccaacatggcgaaaccttgtctctactaagaatacaaaaattagccgggcatcatgcacctataatcccagctacttggaaggcttaagcaggagaatcgcttgaagccgggaagtggaggttgcagtgagccgacatcgcgccactgcactccagcctgagcaacagagcaagactctgtctcaaaaaaaaaaaaaaaaaaaaaaaag

SEQ ID NO: 1719 - DNA, 2011 bp, Homo sapiens
acaaatatcttagttgcttgctttttactttattacagggtgttttttttttttttagtgagcagacattcttaattttattatagacctatttatagttgttttcctttatagttagtggttttatatgtgtgtgtattatgtagttatgtttaagaaatctttgctcatgaggttttatttcatttttgtatttttttctggactcagtattagatatgttacttgattctaaaaaaatccatcttcctacccctcccctattttctctctctccagagtgggtattaaggacattgctggtatccatttgccaacaaatgtgaaatttcagagtccggcttattcttctgtagatactgaagaaacaattgaaccttatacaactgaaaagatgagtcgagttcctggaggatatttggctttgacagagtgctttgaaattatgacagtagatttcaacaaccttcaggaattaaaaagtcttgcaactaaaaagcctgataagattggtattcctgttattaaagaaggcatactagatgctattatggtttggtttgtgctccagcttgatgatgaacatagtttatccacaagtcctagtgaggaaacatgttgggaacaggctgtctaccccgtacaggaccttgcagactactggataaagcctggagaccatgtgatgatggaagtatcttgtcaagactgttacttaagaatccagagtattagtgtcttgggtttggaatgtgaaatggatgttgcaaaaagttttacccagaataaagacttgttatcgttaggaaatgaggctgaactttgtagtgccctcgctaaccttcagaccagtaaaccagatgctgtagagcagacatgtatattggaatctacagaaattgctttgcttaacaacatcccatatcatgaaggctttaaaatggcaatgagcaaagttttgtcttcactgactccagagaaactgtatcagaccatggatactcactgtcagaatgagatgagctctggaactggacagagtaatactgtacagaacatccttgaacctttctacgtgttagatgtgtccgaaggcttctctgttctgcctgttattgctggcacacttgggcaggttaaaccatacagttctgtggagaaagaccagcatcgtattgctctggacctcatatctgaagccaatcactttcctaaagaaacacttgagttttggctgagacatgtggaggatgaatctgctatgttacaaaggccaaaatcagacaagttatggagcataattatattggatgtcattgagccatctgggctcattcagcaggaaataatggaaaaagctgcaatatccaggtgtttactacaatctggaggcaagatctttcctcagtatgtgctgatgtttgggttgcttgtggaatcacagacactcctagaggagaatgctgttcaaggaacagaacgtactcttggattaaatatagcaccttttattaaccagtttcaggtacctatacgtgtatttttggacctatcctcattgccctgtatacctttaagcaagccagtggaactcttaagactagatttaatgactccgtatttgaacacctctaacagagaagtaaaggtatacgtttgtaaatctggaagactgactgctattccattttggtatcatatgtaccttgatgaagagattaggttggatacttcaagtgaagcctcccactggaaacaagctgcagttgttttagataatcccatccaggttgaaatgggagaggaacttgtactcagcattcagcatcacaaaagcaatgtcagcatcacagtaaagcaatgaagagcagttttccaatgaaaactgtgtaaatagagcatcaacaagtacaaaattcttgtcttaattagtgggggtatataaaaattccttgtaatggtcaaatattttttaaaattgacattaataaagcatattttaaaagattct

SEQ ID NO: 1720 - DNA, 2069 bp, Homo sapiens
gagaaatccagggtcacaggcattgtgcaggagaagctgctgaatgactacctgaaccgcatctttcctcttctgaccatgcacccccagcagccaccggcagttactcgggaggctgaggcaggagaatcgcttgaaccggagaggcggacgttgcagtgagccgaggtcaaaccagcgcactccagcctgggcaacagagcgagactccatctgaaaaagaaacaaaaacaaaaaaaatttttggacccgctgcagctgggaggggagctgtccaggaggccggcctgggaatgagcacaggcctgcggctggcagagagccgggtcgagccagccctggagaagcaggccctgctgcaggcccagctggaggagcagctgcgggacaaggtgctccacgagaaggacctgtcccagcagcagatgcaaagcgacctggacaaggctgacctcagtgccaggagggtccctggtgggtgctgcacgaggcaggcatcactgcagaagagtgacagagctgggcctggcagtgaagcgtcttcagaagcagaatctggagaaggatcaggtcgacaaggacctcaccgagaagcttgaggccctggaatccctgcggctacaggagcaggcggccctggagacagaggacggagaggggctacagcagagcctaagggacctggcacaggccgtcctgtctgacgctgagagcggcagcctgcgtccaacagcgtccgaccgcagcctgcgggggctctcgggccagcggaccccgtctccaccgcggcgctcctcgccgggccgaggccgttcgccccgcagaggcccctccccggcctgctcagacgactccacgctcgcttgccctgattctctccgccctgcacttttgccagctgaaggtccagggagaagagcaacctggtccacagcctgcaggcccagctggaggagcagctgcgggacaaggtgctccacgagaaggacctgtcccagcagcagatgcaaagcgacctggacaaggctgacctcagtgccaggagggtccctggtgggtgctgcacgaggcaggcatcactgcagaagagtgacagagctgggcctggcagtgaagcgtcttcagaagcagaatctggagaaggatcaggtcgacaaggacctcaccgagaagcttgaggccctggaatccctgcggctacaggagcaggcggccctggagacagaggacggagaggggctacagcagagcctaagggacctggcacaggccgtcctgtctgacgctgagagcggcagcctgcgtccaacagcgtccgaccgcagcctgcgggggctctcgggccagcggaccccgtctccaccgaggcctgccgtcgtagggaggcttgcggagcaggagcgccctctctccaccgagctatcccgcggtttccagcatcccatctggcggactcctcttcctctctcttctcctactctgggtcttctatcctggtgttccttgaatgcctatcttccttttgtgcctcggaacctctcacgcctgccacaagttactcttttccttggtagttctgaactttaaataaggtaatgcctgtaagaatgccataaatgctcaataattgtcatctgttattattttcatcagtaacatcatctgaatcatcagtattgtctgcttttaacagctgcatttttcattgtccaaatatagtcacatacatttgaccattttataattattgaataataaattcgttctgctattttacaatgaaaaataatgctgcagagagcatttttgcacatgtatcgtggcagatgtaggccagaggctcttcttttatccatcctatggccaacctatgaatgtatacacgtttaatgagattttgccagcaatcaaagccttcagggaaaatgtccctagctctttactacatcagatcaaggactctggataattggcataacatcctggaatagctgaaacagagatattattctctgctctcctctgttgtctttgtcttttcacgtcttaataaaagtgctggtgacaag

SEQ ID NO: 1721 - DNA, 2928 bp, Homo sapiens
atgttagtttaatttttccttcacaggagaggaaaacatggaagcaatgtgaactctccatgaatttgtaagctaaatcatgtagaatccatactctctctggaacctctatagcaggctggcagactgcaatgcttacaggaaccaggcaagcaaatgagtggatggagttagtgtagacaaaagggccttatatgactctggccaattggagagaactgaaaatgtggattttttaaatatgtgaaattcatcaacttttaaatttttggtaatgaattcaaattttaaaaatcatggtgtggccaaacaaaatgtacctgtgggctgaattttatctaaagctgttattttgtgcactctgcacaagagatgaagggaagattgccaatgtacaggcatcttgcctgctgtggccaggcaaagaggctatggtgacagggatggaggttatgaatgggctcagcaacatggacttccactcaccaaggctgacctggctacggctaccattaactgcccaatttcccagcagcagagaccaacactgagcacttgatgtggcaccattccttggggtgatcagcaagctacttgttggcaggttcattatattggacctcttccatcatgtaaaggacagcagtttgtcttcactggaatagccacttgctccagatatgggtttgcctatcctgcatgcaatgcttctgcgaagactaccatccgtggactcacagaatgccttatccagcatcatgttactccacacagcattgcctctgaccaaggcactcactttacagctaaagaagtgcagcagtgggctcatgctcatggaattcactggccttaccatgttccccatcatcctgaagcagctggattaataaaatggtggaatggccttttaaagtcacaattacaatgccagctaggtgacaatactttgaagggctggggaaaagttctccagcaggatgtgtataccctgaatccgcatccaatgtatgacactatttctcctgtggatttctccttgaggattcatggatccaggaattaaggggtggaagtggaagtagcaccactcaccatcacctccactcatcatcatccctagtgacctactagcaaaatttttgcttcctgttcctgcaacgttatgtcttgctggcctggaggtgttagttccagaaagaggaatgctgccaccaggagacacaacaatgattccattaagctggaagttaagattgccacctggccactttaggctccacctacctctaagtcaacaggttaagaagggagttacagtgttggctgggttgattgagccatactaccaagatgacatcagtctactactcaacaatgaaggtaaagaagaatatgaatggaatacaggagatccattagggtgtctcttagtattaccatgccccatgattaaggtcaatgggaaactacaacaacccaattcaggcaggaatacaaatagcccagacccttcatgaatgaaggtttgggtcactctaccaggtaaaaaaccatgacctgttgaggtgcttgctgagggcaaggggaatacagaatgaatagtagaagaaggtagtcgtcaagaccagctacgaccacatgaccagttgcagcaacgaggactgtaattgtcattagtctttcctccttcttttgttaagaacatgtttgtgcatgtgtacacttgtactaagaaaatatcttcgttttatttcctttatttttcctttgtcatgtgacataagatttattgacttcatattagcatttaagtgttgttaactttacgaaatagcatttaggttaaggattagtacacttccggttgtatgaaggatggctgtattctattaggcataattatgaccttattatctttatttgaagattatgtatgatttcaggagatgtgtatgggttcaaggttgacaaggggtgaacttgtgatggttaatattgtcaacttgattgaactgaaggatgcaaagtattgttcctgggtgtgtctgggagggtgttgtcaaaggagattaacatttgagtcagtgggctgggagaggcaaacccaccctcaattcgggtgggcaccatctaatcagctgccagcacggctagaataaggcaggcaggagaagacggaaggactagacttgctgagtcttctggtcttcatctttctcccatgctgcatgcttcctgccctcaaacatcagactccaagttcttcagcttttggactcttggacttacaccagtgatttgccaggggctcttggacctttggccacagactgaaggctgcactgtcgccttccctacttttgaggctttgggactcggactggcttccttgcttctcatcttgcagatggcctattgtgagacttcaccttgcaatcgtgtgagtcaatactccataataaacaacctttcatatatacatctatcctattagttcggtccctctagagaaccctgactaacacattatttttcatctttctgggcctcgccaatcaatttagggaatgaaaagaaggaattcattctactttgttcccgtttgtcatcttcacagctgagaagcaggctttctacatcttcaccaggaggccagtttgtggatactctgtcttttactggtaaagatgctccttgttgctggattctagatccagaaggcatcaaggcatgcaaagtcttcgaaattagggccaacaaggaaaactttctgtgattgtgggagccgagagttcccatcatcagactgccttctgtgaagaactggtgatttcttctagaaaatcaatcccattgactcctgtccttgttcatgacttaatccagaacagtgcctgtggatgctcagtaaatatttgtgagatg

SEQ ID NO: 1722 - DNA, 2325 bp, Homo sapiens
ttataaaatggcttggttaagtcaacgccagctggcccgctcctgccttgatttgaatacaattagtcagagccctggatgggcccagacacaacttgcggaggtcaccatagcttgcaaagtaaaccatcaaggagggtcagtacaattacctgaatcagacatcactgttcatgtgccccaaggtcatgtggctgtgggagaattccaagaggtgtctctaagggctttccttgatccgccacacatgcttaaccatgatctttcgtgcactgtgagcccgttgttggaaatcatgttaggcaacctcaatacaatggaagcccttttgctggagatgaaaattggggctgaagtaagaaaggatcctttcagccaagtcatgacagaaatggtgtgtttacacagcttgggtaaagaaggcccttttaaagttttaagcaactgctacatttataaagacaccatccaagtcaagctaatcgacttgagtcaggtaatgtatctagtggttgctgcacaagctaaagctcttccgtcgccagctgccaccatttgggattatatccacaaaaccacctcaattggaatttatggacccaaatatatccatcccagttttactgttgttttaacagtttgtggacacaattatatgccaggacagcttacaatttctgatattaagaagggtggaaaaaacatatctccagttgtgtttcagctctgggggaagcagtcatttttacttgacaagccacaagatttaagtatttctattttttcctgtgatcctgattttgaagtaaagacagaaggagaaaggaaagaaattaaacaaaagcagttggaagcaggtgaagtagttcatcaacaatttttattttctttagttgagcacagagagatgcacttgtttgatttttgtgttcaagtggagcctcccaatggtgaaccagttgcacagttctctatcactactcctgatccaaccccaaacctaaaaagactctcgaatctgccaggctatttgcagaagaaggaggaaatcaagtctgctcctttatcaccaaaaattcttgttaaatatcctacatttcaagataaaacattgaactttagcaactatggggtaaccctgaaggcagtgctaagacaaagcaagattgattacttccttgaatatttcaaaggggacacaatagctctcctcggggaaggtaaggtaaaagctattggtcagtccaaagtgaaagaatggtatgtaggagtcctcagaggtaagattggacttgtacactgcaaaaatgtcaaggtgatttcaaaggagcaagtaatgtttatgtcagatagtgtctttacaaccagaaatcttcttgaacagattgtcctgcctttaaaaaaattgacttatatctactcagttgtattaaccttggtgtcagaaaaagtttatgattggaaagttttagctgatgtcctgggttactcacatctgtccctggaagattttgatcaaattcaagcagacaaagaatcagagaaagtttcttatgttataaagaagttaaaggaagattgccacacagagagaaatacaaggaagtttctgtatgaacttattgtggctcttctgaaaatggattgccaagagttagtcgcacgtctcatccaagaagctgctgttctgacttcagctgtcaagcttggaaaaggctggagggaactagctgaaaagttagtacgactcacaaagcaacaaatggaggcatatgaaattcctcatcgaggaaacactggagatgttgctgttgagatgatgtggaaacctgcctatgattttctgtatacctggagtgctcactatggaaataactacagagatgtgttacaagaccttcagtcagctttggacagaatgaaaaaccctgtgactaaacactggagagaattaactggagttttaatactagtaaattctttggaggttttgagagtaactgcattctccacttctgaggaagtatagaaacaaagcgtgtgtttttgatgggagggaaaatgaggtaatggtgtgtgtgtgtgtgtgtctgtgtgtgtctgtgtgtgtgtgtctgtgtgtgtgtgtctgtgtgtgtgtgtgtgtgtgtaggaaagaaagaatctcagaaaagcattatattaattttcttcatgctcaaaaccagtttttttttcctgatgaaagcacagcctaactgataaccaagatgggttttatcctcaaatatgtatttttgtgtatgtttcaaatacaagtattaggctgctttgttcttagaaagg

SEQ ID NO: 1723 - DNA, 4492 bp, Homo sapiens
atttagaaaagttttggattcatctgtttatgaggaggaaaagaggccaagaaaaggcagcaatttgtccatgtgcttaattagtgagtggcagtggcagtaacctggtctgctgagctccctggactccctgatcccagctcaaaatagtttccagttttcatctgccagttgcttcggaggcttttctaaggaagacagttcataaaatgacccagaattcatcctccttaggtgataggatcattactccttatacaccccctaggtctcagcctatgaacaaacacttgtttgtttctctgtttaccctgttccaaaccaccgaactggattttgccaacaagaagagctgtttcctgtgcctgcccctgagagctgatggcttcccagagatgcctcacagtcctgcgcagacagagagaatgcagaagctggcaaaggatcctccacacgcaagatcagaggacgtcccagatcatcttttctttgtggatactgcaggtctacgtgaaatagtgtgtttttgcggggtgctgtcccttaggacaagtgaagggctgatgagaaaggaaactgcgtgaggtatcacaaagccatccatggggcagcctatgaaaatatgttcacacggagggaaaatatcagtgttcatatattccttttagtgctgccttcccttttccactcccacaccacccccaaaacattttaaaaagttagttttggaagactgactttgtcttattctaaaatgtgtgcacagtaacagaagtgagaaagtcattccagtcttcatctagtcacctgagtcacaactttaatgcagcttctttttgttcctcaatctttgattacataatcatttgcaaaaatacactcctgaaatgaaatcacagttagccttgcattttggagtagtattagaattaagacttgccatcaaagaggttgccatctagaatgtttattctctttactgtgccccaggggttttacatgcatttgcaactttatttttattttatcctacaggaaaaaaggctcagagtgaatggctattagcctaaggttactcagctagtgatataggagttaagaagaaattatttaggcagatagtgagggtactggagtcctcagaaaggttttccttttaatgaaaagcagccccaaaatctttttcttttctaacaaagagcagcctgtaaaatcgagctgcagacatagacaagcaagctagaagcttgcacaggcgaatgcctgcagttgtgccaacaggaaaaggctacctggaactaggcatgttcaaaatggcagctctgtcttctcttctctttgccagccaggtgtacagtaaggagcagacaacatggcactggccaagtggaaaggctgtttgcataataagattacgatggggtggcctgccttccctgtgtgctacgtaaacatcacacctgatccaaccaatctgcgggccctacataaatcagacaccacctcctccagcctgcctataaaatctggtacactccacgtgggccagaagtcccatttggatgcccctctctttcgcaagagagagagctgttctcctttctctttcttttgcctattacattccgctcctaaagtcacttctcatgtatgtccacgtccttaatcttcttgatgcaagacaatgaacccgggtatttaccccagacaacaacaccacttcactaggagttaaaagaacttgaaatgcaaattcatggtcatctggttccaaagcccatattaacaaaatttttttaattgtgataaaatacacataacataaagttgaccgtgttaactgtttttaaatgtacagtccagtagtgttaagtacattcacattgttgggcaatccttcttcagaactttttaagtttcccaaactgaagctctgcgtctattaagaacaactctttcttccaatccccagctgttggcaactatcattctactttctgtctttatgcatttaataattctacgtacctcatataaatgaaatcaaatggtatttgtaactggcttatttcacttagcataatatcctcaagattcagtcatattgttatatgtgtcataaattgcatttgtaatatcacaaactacaccttgatatattgtctactgattagcatggatttataattatttttatgctttgccttctacattctataaaagaataaaaagttgagttaaaaaccaaaattataataatgaaagtttttacatttgcccatatttttaccttcgctagaaaattttatatggcctagcatccattcattttaacttaagggattctctttcacattccttacagaacaggtctagtagtaatgaatttcctcagcatttttttaaatctgggaagttttaattctttgcttttgaaggacagtattgctggatatagaattcttagtcacaactttttttttctttcagcattttaaatatattatctcactacttttttatttgcaaggtttttgctgagaaatctgctgatagtgttattgaggacacattgtatagctatttttccatttctgttttcaagatttcctttgtctttgatttctcacagttgactatattttagttggatctctttggattatcatacttggagtttgttgagcttcttgtatttgtagattcatgtcttttctcaaatttgggcagtttggggtcattatttctccaaacacagtagtttaccatcacccacagtttcactttccacagtttccattgccaatggtcaacagcagtttgaaaatattaaatgaaaattccagaaataagcaatttataagtttaaatcacatgccatactgagcagtatgatgaaatcttgtgctatcctgctctgttctacctaggacatgaatcatccctctgtctaggatatctacactgtatatactacctgcctgttagtcatttagtagccatctcagttatcagattgactgtcatggtatcacagtgcttttgttcaagcaactcttagtttacttaacaaagtccccaaagtgtaatataggtaatgctggaaatttgggtatgccaaaaaaaaaatgttcatggagtgcttcctttaagtaaaaagttgaaaattcttgacacaaggaagaaaaaaaattatgcgaggtttctaagatctacagtaaaagtaaatctatccatgaaattgtgatggaagaaaaagaaatttgtaagtagtacatatagggtttgatactatatttgggatgttggaacatacccaattgataaaagaggactactgtaagttctctgttctttgtttctctcttctcctaaaacttcataatgagtatattggttcatttggtagtatcccatagtctttcagtctctgtttacttttcttcattcatttttctattggcaccttagcctcaataattttaaatgatctctctttaacgttaaggattttttttctgcctattcaagtctgccattaaaacattaggctggatgcggtggctcacgcctgcagtcccagatttttgggaggctgaggtgggtggataacttgaggtcaggagttcaagaccagcctgactagcgtggtgaagccccgtctccactaaaaatacagaggttggccaggtgtggtggcgtgcacctgtagtcccagctactcgggaggctggggcgggagaatcgcttgaacccagcaggtggaggttgcagtgagccgatatcacaccactgcactcctgcctgggcaaccaagggagactctgtctaaaaaaaaaatacaccgtagtaaatgtttgaattcagttatcgtgtttttcagctccagaattaatttctgttaggttcttttttataacttttatctctgttttgctttgttttgagtcagggtctcactctgtagcataggctggagtgcagtggcacaatcttagcttactgcagcctcaacttccctggcatcaggtggccttcccgcctcggccctactagtggctgggactggaggtgcacgccatcatgcccagctagtttttgatttttagtggaggcggggttttgctgtgttacccaggctggtctctagctcttgggctcggatagtcctcccacctcagcttcctgaagtactgggattgtaggcgtgagctacccggtctgactaatttccatttccttgtgaatatgtgcattttgttcatgtatcttttttatgattttctttacttatctgcctgtgttcttctttggctcatatttaagaatataagcatatttaagacagttgttttaaagtctttgccaagaaagtctgaaaactgtgtttcattagggttagtttctggagatttatttggctctttgaatgtgccgtgcttacctatttctttatatgctttgtggtcttttttattgaaacttgggcatg

SEQ ID NO: 1724 - DNA, 3263 bp, Homo sapiens
aggttacgatctgccctcccgaggctggggagccaagactacttgcctttgttcccagctccctgcctgcgatgctggcagcaaaatctcagccccgcccggcagggcaggagctcagggccgtgttgcaacgtgactaatggatgagaaggttgaggaggaaagccattacttcaccaatgtgaatcaaggtcattcgtcacctcgggaagcacacagagctgcgacgttcaggagggaggcacgctgctcccaagccaaaccacgatgcagcctggcaccagtcccatgcagcagggagaaggggagtttctggaagcgaggatgagctgggcagccaggcccagggccctggccgtgcatgcatcagcccctcctgagaaaaagagctcaaggactacatggggtcttacccacgagtggggcaacggtgcagtttccaggaggcgttggcaggagctgaccggccactgacgctggccggggtccctaggggacagggactggagggtcagcggcctctgaccgtccagcgtcatctgaggaaatcaggccaatcgtgagccaccagagtgtcctcaccgagacggcctctctccctagtataacaggccacatttgctgcctttctgggagagttagaagcaaaccacgtgggtgacttcttttcaaagttctctgcctcagaggaggaagccccatgggtggaggccaggcccgaggccatcctgctctgggccagagcgtgcctgtgtctgatgagcgaggacatgcctcgtctggctgagccttccatttcacaccggcagctcgaaccccccatcacggcttccttttgggctcccctcctcaggggaccgagcttgaaatgtgcttgcccttcatccctaaggcctgcgtcccttcctcagagaggactaagcccctctcccagtcttgatgttctccgaggcccttcttattcacagaacctatctggcttatttattcgcttgcttgcttctgatgtcttctcttactgaaaggtaagttatgtgggagatggaatcatgccagctttggttcaccattacatcctccacacttttctattctgatttatttatttattttagagtcagagtcttgctctgtcgctcaggctggagtgcagtggcacaatcatagctcactgcagcctcaaacttctggacttaggtgatcctcctgcttcagcctcctgagtaactaagactgcaggtgtgcatcaccatgcttggctaatttaaaaaaattgttttaatacaacaattggctggacgtggtagtgtgaacctgcagtgccagccactgtggaggctgaggtgggaggatcgcttgagcccaggagattgagtctgcaatgagctgagatcgtgccactgcattccagcctggcaacagagtaagaccctgtctcaatcttttttttttgtagacgtggggtctcactatattgcccaggttggtcttgaactcctggactcaagggattcctctgcctcagcctctagtgtcactgggattacaggtgtgagccactggacctcgctcccctgaaaagtttttgtggagcctggcaccaggggaacccaatatctatcctttgaatgaatgaataaatgcaaggaaataaatgaagaggaggcgggggtcaggaggggcgtgttttatatgagtagataccatgcaaaggtcctcctgggtgccatcgccagtgcggggcagcctgcgagccccttgagggaggtctccctgacacactgcccactcctcctggggccgagcaggagtcacatccaagggctgggtcattatctgataaatgagtgggttgtgcggatgagtaaacagggactgacccagaggtcaggtgtaactcagcctcagaaactgcgtgtgtcaataggaatcgaagggccaaggaatgtgtttttcgttgatgtcagcttgctgcaaaggaccacacctgcttctcgacccaggaacgtgggaaagggaaaggcttggcttgttttggtggagatggagatgctggtaacagtggaggaatgccctccttctgattcacagtggggaggtgctctgggcccctgccactgcccgaggacttcaggtaagtcagcccgtggcccccagcccttccctgccagacgccctggcagacggcttgttctgacaagtatgcgctttctggatggaacagcctcccttttgtccaaacccttcctttgaatttaaaatgcacaaagaacctttcgaagaggaaaagaatgggatcaggaagaggaggctgtatctcatttggacactcaagcccacagctcctgcccaagagtttctgtaatttgctcccacatcacgtcatgacttttggctcccagccaggtgcggtggcatctgtggcttcatccttctgggaagtcagggtcatgttcccttgagtcttctccctttcctctccccagcttttggttgtcctgctgagaggatgcggcatttgagcagtagcttctggagcccagagtgaagccccacccaggcaccctgacaggaccacaggaatgctcctggcacagcaagcaggactcttgagaagctcagcctccacgctccttgtagatgttcagttcaaactccacagtttgtgtgactcactgaagggcttggtttggctctcgctgacgagtctgtcatcggtgccaggtgacacgcttttcccctcctcccgtctagtcctctctcttgccccagggcttctggtggggaagtttaacctcctcttcataagcagtgggagggctactgtgctgccctctggcccaagctctggtattccctttgcagtggtgggtgctctcattcctttgcaatgtgccctgcagtgtgaacccaggggatccatgagacagggaactcacgtctgttttcttcatttggtgtagcatgccattgggcgtttgccagacagggcctatcatgtgggccctacacctattcacacacctgccatttgccttcagaatcctgttcccagtgggtaatgggtttaaaagcccatagctgagtttatccacattggatccgacccacattccaatgctctttagacaaccgggtttcaccgtgttagccaggctggcctcaaactcctgacctcaagtgatccacccgcatcgacctcacaaagtgcttggattacaggtgtgagctactgtgccaggccagaaaaaataaaataaaat

SEQ ID NO: 1725 - DNA, 3670 bp, Homo sapiens
ttattccaggcagttacagctttgaatcagttttatcagctgtagctgattttaaggctcctgtttttgaacctggaggttctatgcaacaaggcatgtatactcccaaagctgaagtctgggatcaagagtttgaccccgtcatggtcattcttcgaacagtttaccgtagagatgtgcagtctgcaatggacagatatactgcatttttaaaacagagtggaaaatttcctggaaatccctggcctccatataagaaaaggacatcactccatcctagctataaaggtcttatgagacttttgcactgtaaaactttacacattgtgctattcactctgctttacaagattttgatggatcatcaaaatctgtcagaacatgtactctgcatggttttatatctgattgaattaggacttgaaaattctgctgaagaagaatcagatgaagaggcatcagtgggtggaccagaacgttgtcatgacagttggtttcctggcagtaacttagtgtcaaacatgcgacactttataaactatgttagagtaagagttccagagactgctcctgaaattaaagaaagcatattgtctttgctaattaaacttcaccacaaactctcaggaaaacaaaactcctactatcctccttggcttgatgacatagaaattttaatccaaccagaaattcctaaatacagtcatggagatggtataactgccgtggaaagaattttactaaaagctgcatcgcaaagtagaatgaacaaacgcatcattgaagagatacgtagaaaagtgacccctcctgtaccacctaaaaaagtcactgcagcagagaagaaaacattggacaaagaagaaaggcgacagaaggctagagagaggcagcagaaattgcttgcggagtttgcttcacgacagaaaagctttatggaaactgcaatggatgttggtttgacctcttttggcagtagccagggcacaggaagaacaattgagggatcaggcaaatatgattgctagcaaacagaggcagttcacagaagtcttcaggataatgagctctactttctcccagtctcggttcttgtatgctgcagtggtgacagattctcctgagaatgatattcctatggagatcaccacggcagaaccacaggtttccgaggcagtatatgactgtgttatttgtggacagagtggcccctcctctgaagatcgacctactggattagttgtactgttacaagcatcctcagttttggggcagtgccgtgacaatgttgagccaaaaaagttgccgatcagtgaagaggagcagatttacccttgggatacctgtgcagccgttcatgatgtgaggctttcattattacagcgttattttaaggatagttcatgtctcttggcagtatcaattggctgggaaggaggtgtttatgtacaaacctgtggtcacacattacatatagattgtcataaatcttacatggaatcattacggaatgaccaggttcttcagggcttctcggtggacaaaggagaattcacgtgtccactctgtaggcagtttgctaacagtgttcttccatgttatcctggaagcaatgtggaaaataacccttggcaacgtcctagcaacaaaagcatacaagatctcataaaggaagtggaggagctgcagggacgaccgggagctttcccatcagaaacaaatttaagtaaagaaatggaatctgtaatgaaagatataaaaaataccactcagaagaaatatagagactatagcaagaccccgggctcaccagacaatgattttctctttatgtactccgttgctagaaccaatttagaacttgaattgattcatcgaggaggcaatttgtgttcaggtggtgcaagcacagctggcaaaaggtcttgtttaaatcagctgtttcatgtattagccttgcacatgcggctttatagcattgactctgagtataatccctggagaaagctcacccagttagaagagatgaatccacagctgggatatgaagaacaacagcctgaggttccaattctttatcatgatgtaacatcccttttgctcatccagatcttaatgatgccacaacccttacgcaaagaccactttacctgcattgtgaaggtactttttaccctactgtacacacaggctcttgcagcactctcagttaaatgcagcgaagaagataggtcagcctggaaacacgcgggagctctcaaaaagagtacatgtgatgcagaaaagtcttacgaagtattactgagctttgtgataagtgaactgtttaaaggaaagttataccatgaagaaggaactcaggaatgtgcaatggttaaccctattgcttggtctcctgaatccatggaaaaatgcttacaggacttctgcttaccttttctcagaatcaccagccttcttcagcaccacctttttggggaagatttacctagctgccaggaagaagaagaattttcagttcttgccagctgcctgggacttctgccaacgttttaccaaacagaacatccattcatcagtgcctcctgtctggattggccagttccagcatttgatattataactcagtggtgttttgagataaaatcatttactgaaagacatgcagaacaaggaaaggccttgcttatccaagagtcaaaatggaaattaccacacctactacagttgcctgagaattataacaccatttttcagtactaccacagaaaaacctgtagtgtctgcaccaaggttcctaaagatcctgctgtctgccttgtgtgtggtacttttgtatgcctgaaaggactttgctgcaagcaacaaagttactgtgaatgtgtactgcactctcagaactgtggtgcaggaacaggtattttccttttgatcaatgcatcggtaattatcatcattcgaggtcaccgcttctgcctctggggttccgtgtatttggatgctcatggagaggaagaccgggatcttaggcgaggcaaacctctctacatttgtaaggaaagatacaaagttcttgagcaacagtggatttctcatacttttgatcacatcaataaaagatggggtccacattacaatgggctgtgactctccacctcagcattgcatcgtatcatcattttcgctacgaatttatttttcaacaataagctttaacttaatttgggggattaacacttttgctgagggagaaaaagaaaacatacattatgaagcctttccaaaattaggtgcttggtaatcacgttaatggtataattttttttttttaatatctggagaacattaataacaagttaaattattctttagtggtcattttttaagtgcacaattaataagaagcacaacttgttcacaaactcattcagaaatgattctcccaacaatgcatatcagctattcattgatacttagagtgggtgtgatttatttgacattttactgcttctttctgtctgtgtgttttaatttgcatctgccaagcataatgcatcttttttcctctgccattcttgtgttgattggagaatttttctgtatgtaattagaaaaaaatgtaaaacatgatttatgtgaaatactgtatagtaaaagttggtctaatagt

SEQ ID NO: 1726 - DNA, 4174 bp, Homo sapiens
agaggagtccagactccgatcccagctccactgctgcctcccgcacgcctggagccagcccggccctcatctgtgcacgcagggtgtgctgcaccccaccaggcatctccaactcggagattcagctgcagccctggccgtcagacccacgggccctgaagtccagggggccctctcgcccgcctcctgtctgcagatggggaaattgaggcccagccggggcaggggatttgccgacgtttcgcaacaaattcgagtcagaaataggcccagctgggcctgccggcgcggaggcccgctcgggacactgctggccaacgcagggcccagcacggtcccagtcacacccacagcagggtcctgccagccttctccgctctcccctgggggaagtgaccctcctccaccccccagagcccacgtgagtccgcaggaggcccccctgggccaggtgccaggtgccgagtggctgcctccaactcgggggctgctatgcaaggatgtttccagttctccgggtccttccttccacctgggaggtccggggctgccgggccatgctggtccctgtggccctagggcccgcccagcgcagggcctggcagggagagggggaaacgtgggtgagggaagtgagtcaccccttgggacacttccctgctcagttcctgcctctcagcagcttctgcgaggcaggtcacacctgcaggggagcctggcagcgctaggagaggcaaggggtgggggtgccgccttttcatggggccaagaggggccctgagagggacaccgggtggacagccccaggggcctccttgctcggccagccggcatctccccctgctcccagcataggagggccggtggcctgagtgctctgctccgtgtccggaaaagactcatgttccaggaaaaagccgcttggcaggtcggagcaagctcatggtgctgttcccagacccgatgcgatgcgtgtggagggaggcctgcccttgcccccagggctgcagggcgagaacagaccttgattcctgctataaccctgggcacggcctctgtttctccgcgtgtgcccgggggcggcgtgttctcagggcaggggcctctaaggatcagagtgaggctgcaggcccaggctgaggcctgcaccacctcggccgggagatgagtaaatgtctgggtccccctggccactccagagtgaggccgccaagcctccggcctgaagtccggctcctgttctcagactgccaggctcttgtgcggtggcgtcgggcaggcagggcagggaggccacggcagccatcttcccggggagctggggcctggccagcagcgtttcccagtggcctcctcctgtgctccgagctgcattacctcatcgggaagccattccagaaaggagctgcggagcccctgggagtgggagtggggagagctgcgtcagcgccctcctggcagcctcggtgccagacgagggcaggcgtcacgcctccgggtgtctgcctgccgagcgactgctgggagagcagctggcttttgtcagcgtttcggggtgaccgggctgggctgcagcaggcaggtggcgtggcacggcccatggccggccagctaccaggtgggcagaggatctatttcaagagccggaaccaaatggccaggcatgaggggaagccaggtgcaaactcagtggcagagaccaagccctgaccccgcagtcccaggcctcagtttcccctcaggccagccctcctcccagcacctgtcctctgcttcctatagccacaaagagcaccagacacgagtgagcaggtgactacactccctgctgcccgctggtgtaagccagaggccctgccacccacagctggcctccagaggcctttctggaccacagggtcagggctgagaggggtgggggtggcaggggcagctgaggtgctggagagggaggacaagcttcctgcctgtggaggagacaagggcagctcccaaccctgctcctagccttcctgccaagtttggattccagaaacacctcttggtgcctcagttttctcatctgttttgtgtgtgtgtgtgtgtgtgtgagtgtgtgtgtgtgtgtgttttgtagatagggtctttctctgtcacccaggctggagtgctgtggtgcgatcatggctcactgcaacctctacctcctgggctcaagcaatcctcccgcctcagtctctcgagtagctgggaccacaggtgcacaccaccatgcctggctaatttttgtttgttggttcatttttgtagcgacagggtctccctatgttgcccatactggtctcaaactcagctcaagtgatctgcccgcctcagcttcccaaagtgctgggattacaggcatgagccactgcgcccagcccggctttctcatctgtaaaatgggttgacaatgcccacccagataatggttgaaaggactcgtgaaaccacgtaggaggcacaggcagacaggcacttgtgggggtccatgaatgagcctcagtgccagctcccccaggccagcttccagccttcacactgtctgggccagaggagtcttcctaaaacagaggactgtgtggagcacttctccacagagaagcctcttgcctcaagtcagtgacactgtcctccagccccacccaactgtacatgtgcccaagctcatcatacttttcctcaaaccctgtctgtcaggaaaactcctactcaccccgcaaaactccatgtgagatgcccactcgctcatctaaaatgcctcacaggattactctaagaaccaaagaagaatatacatgtgtgaacacatgggcatggttgccaagtgaggggcatcacactcatgactgtccccattacttattagagcaaccataaccaagaatgcagcggtgggcaggaagtgttactggggataggaattagcaggaagtttttctggcttggaatttaagcccaactttggcagatggcagaattttcagagaggaaaggaggaaattggaggctagtgtggcagtgttaaatatggctgcaaagtccttggtccttctcccattgaagcgtgggccctatggcctctcctcttgaatccaggtgggcttgtgactacttcagccaagacaatgcggcagaagtgttgttgggtaacttccaaggctcactcataaaagaccatatggcttataacttggagtcctaagttgccatctaagaaggaagttcaacaacctgagacttccatgctgtgaggaagcccaagctccatgaggagtcacatgggggtgcactggttgacagttccagccttccagccagcccagcccaggcaccagccatgcgaatgcagaagccatcttggaagtggatccaccagcagcaggtgtcccggcccccagccatttgagttgtctcgggtgagccactgaaccacacagagtagagtggagttgtccctactgtgccctttcaggacagaattcctgagcgtaataaagtggctgtagttttagtcactgttttggggctgtttgttatgcagcactaattaactagaacaggtgagaagatcagaacttcctggtgcttaaagccagccacacagcccctcgaagcaagattgtcttaatctggaagtcagtcccaagaacaggttctccccagtgctctcagcattccccaccccagcctggcccataagcagtgcttggggcatgcggggttgctggagcactcccaagccactcccaacacctggaaggagcctcccctcctcaggattctcagcggcgtttgcagcttggatgactgtggacccagaagctctggggagttatccaggttctatgtggcatgagtatccctctgtgcctcagttttccacccatggaatagggcacgaaactcataatctctctgatccctctcggctcctaccccaccttcctggaggccttgttcattctcatgtgtgtctcccccacatcctcttacccatgtgactctgcctgccatgaaagcaggagtcatgactgcagtctcacggttgaatgttctgcacctggcacccagcctaggccagaggatggatgccacaccactggtgttttctgaatgaatcaatgagtcagtcaataaatggagtgaatgaatg

SEQ ID NO: 1727 - DNA, 3896 bp, Homo sapiens
cttagaaattcatttagtaccatataccccaaaatttccaactcccaagcccagaaagacacgaactgctcgtctgttacgccaaaagtgtgtagatactcctagtgaaagcactgaagaaccggggaattcagacagtagctcttcctgtcttactgaaaatagtttgaaaatcaataaaatcagtgttctgcatcagaatgttttgtgtaagcaggaacaggtggataaaatgaagctaggaaataaaagtgaattgaatatggaatccaacagtgatgcacaggacttagtcaattcacagaaagccatgtgtaatgaaacaacttcctttgaaaaaatggcaccttcttttgataaagactctaatttgagttctgacagcacaactgtagatggttctagtatgtcgcttgctgtggacgaagggaccggttttataagatgtactgtatctatgagcctgcctaagcagctcaaattaacttgcaatgaacatttgcaatctgggagaaacctgggagtttctgcccctcaaatgcaaaaggaatctgttataaaagaggaaaattctctacgaattgtccccaaaaaacctcaaagacatagcttgcctgctacaggagtgcttaaaaaggctgcctccgaggagcttttggaaaaaagttcttatccttcaagtgaagaaaaaagttcagagaagagtctagaaagaaatcaccttcagcatttgtgtgcccaaaaccgtggtgtgtcatcctcctttgatatgcctaaacgggcttcagaaaagccagtgtggaagttacctcatcctattttacccttttcagggaacccagaattcttaaagtctgtcaccgtatcgtcaaacagtgagccttcaacagccctaaccaagcccagagcaaaatcgttatctgctatggatgtggaaaagtgcactaagccttgcaaagactctacaaagaaaaactcttttaaaaagttgctcagcatgaaactgtccatctgtttcatgaagagtgactttcaaaaattttggtccaagagtagccaactcggagacaccaccacaggccacctctccagtggggagcagaaggggattgaaagtgattggcaaggcttgttggtaggagaggagaagagaagtaaacccatcaaggcatattccacagaaaactatagcctggaatctcaaaagaagaggaagaagtctcggggccagaccagtgcagctaatggtctgagagctgagtctttggatgaccaaatgctctcccgggagtcatcatctcaggcaccttacaagtctgttacaagcctctgtgcaccggagtatgaaaatatacgccattatgaggaaataccagagtacgagaacttgccatttattatggctatacggaaaactcaagagttggaatggcagaattccagcagcatggaggacgctgatgcaaatgtgtatgaggtagaagagccgtatgaagctccagatggccagctgcagcttggacccagacatcagcattccagttcaggagcatcccaggaggaacagaatgatcttggtcttggtgaccttccctctgatgaggaggaaatcatcaacagttctgatgaagatgatgtcagctctgagtcaagtaaaggagagcctgacccactggaagataaacaggatgaagataatggaatgaaaagtaaagttcatcatattgccaaggagatcatgagctcagagaaagtgtttgtggatgtgttaaaacttttgcatattgatttccgggatgcagtagctcatgcttccaggcaacttgggaaaccagtgattgaggaccggattctaaatcagatcctatactacttgcctcagctgtatgagctcaaccgggatctcttgaaggaactggaggaaagaatgttgcactggactgaacaacaaagaattgctgatatctttgtaaagaagggaccatatctaaagatgtattccacatacatcaaagaatttgataagaatatagccttgctggatgaacagtgcaagaaaaatccaggttttgctgctgttgttagagaatttgagatgagccctcgctgtgctaatctggccctcaagcactacctgctcaagccggttcagaggatcccccagtacaggctgttgctgacagattatttgaagaatctcatagaagatgctggagattacagagacactcaagatgcccttgctgttgttatagaggtagccaaccacgccaatgacaccatgaagcaaggagacaactttcagaaacttatgcaaattcagtacagcttaaatggacaccatgaaattgtgcagcctggtcgggtttttctcaaagaaggaattctgatgaagctgtctcggaaagtgatgcaacctcgaatgtttttcctgtttaatgatgccctgctgtatacaacaccagtgcagtctgggatgtataaactgaacaacatgctctcactggctggaatgaaggtcagaaaacctacccaagaagcctatcagaatgaattaaagattgaaagtgtagaacgttccttcattctctcagccagttctgccacagaaagggatgaatggctagaagcgatttccagggcaatagaagagtatgccaagaaaagaatcaccttctgtcctagtaggagtcttgatgaggcagactcagaaaataaagaagaagttagtcctcttggatcgaaggctcccatctggattcctgataccagagccacaatgtgtatgatctgcacaagcgaattcactctcacctggagacgacaccactgccgggcctgtggaaagattgtatgccaagcttgttcgtctaataagtatggcttagattacctgaaaaatcaaccagcaagagtatgtgaacattgtttccaagaactgcagaaattagatcaccagcactcccctaggattggatctcctggaaatcacaaatctccttcaagtgccttatcatcagtcttacatagcattccatcagggaggaaacagaaaaaaatcccagctgctctcaaagaagtatcagcaaacacagaggattcttctatgagtggctacttgtacagatcaaagggcaataaaaaaccctggaaacacttttggtttgtcataaaaaataaagtactatatacatatgctgcaagtgaggacgtggccgctttggagagtcagcctttattaggattcactgttattcaagttaaagatgagaattccgagtctaaagtatttcagttactgcacaaaaacatgttattttatgtattcaaagcagaggatgctcattcggctcagaagtggatagaagcatttcaggaaggcacaatattgtagcagtattggtttcatctcttctgtgattccaaagaggtggaatttcatcagaatggagtaaatgcaattcaaaaattgtataaaaatgaacactgccaagataaagccaaccagacccttcatcaaagaaattgttttgttaggtataagcaatttttaaaaggtgtttgttttttcatttatgttatttattaaaattttgatgtttacttaatggtcagaattatttctgagacacactgaattctaaagtaccatttctttagagaccagaaaaactatcttaatactgtatactgtattaactattcgtgacatagttcacactgttttcttaccttacattgtaacaatcttactggtggaaagtctttgtaaggaaaaaacacatagcaaggagcaaatttccacaaagtgcttggtttaggaattgtgattattataaaactgctgatgaaaaaaatgcatgtctttgaatcaataaacttgggtgaatattcgt

SEQ ID NO: 1728 - DNA, 4034 bp, Homo sapiens
tcggttaagatggaggaatgccgagtcatatatccttcccccaaaattaaatatttgaagggatatgtcttattttatttctgggatagaatgtttttcattttcatgttactgaagtgtagttttactaaactactaaatcggagactgctaagcaccttccctgtgccaggcacagcactgggtagggtgagggccctgggagtaaatattctgggacaggcacagggggtgtacagggaaagagtctttcctctctgtggcatctgggaggctttaggatgtgggaaagatggtctcctcatctcagttgcccctcattttcaggcagacacgtatgaaatgattacactcccctgaaagatcagcttctacataattcaagatcatcctcaatctctctcatcagagaggaagaaaagccgcatgaattatttacagaacactaagttatttccttttatgagctccaactttgtttttgtctctgcaaactgagattttgtttatccatgaatagtttccccaggggcatgaaaaatatgactcttaaattatgaatgaggttttttgtttcagtccatgttaactaaaacatgcaaaataaactatgtttttcattagatccctttcagctccctgcaaaaacagaaccaataaaagaacgagcagttcaaccagcacccaccaggaagcccactgtaattcgaattccagccaaaccaggaaaatgtttacatgaggatccacaaagtccacctcctctccctgctgaaaaacctattggaaacactttcagtacagtatctggaaagctcagtaatgttgagagaactagaaacttggaatccaaccacccaggtcaaacaggaggttttgtgcgagtacccccaaggttgccaccgagacctgtgaatggaaaaaccattccaactcaacagcctccaaccaaggtgccccctgagagaccacctcccccaaagctttctgcaaccagaagatctaataagaaactgccttttaatcgatcctcttctgacatggatcttcagaaaaaacaaagtaacttggcaactggactctcaaaagccaagagtcaagtttttaaaaatcaagatccggtgctaccccctcgtcccaaaccaggacaccctctctacagtaaatacatgcgtggggatgtacttgtgatgctgaagcagacggaaaataattacttggagtgccaaaagggagaagacactggcagagttcacctgtctcaaatgaagattatcactccacttgatgaacatcttagaagcagaccaaacgatccaagccacgctcagaagcctgttgacagtggtgctcctcatgctgtcgttcttcatgatttcccagcagagcaagttgatgatttgaacctcacttctggagaaattgtttatcttctggagaagatagatacagattggtacagagggaactgtagaaaccagattggcatatttcctgccaactatgtcaaagtgattattgatatcccagaaggaggaaatgggaaaagagaatgtgtttcatctcattgtgttaaaggctcaagatgtgttgctcggtttgaatatattggagagcagaaggatgagttgagtttctcagagggagaaattattattcttaaagagtatgtgaatgaggaatgggccagaggagaagttcgaggcagaactgggattttccccctgaactttgtggagcctgttgaggattatcccacctctggtgcaaatgttttaagcacaaaggtaccactgaaaaccaaaaaagaagattctggctcaaactctcaggttaacagtcttccggcagaatggtgtgaagctcttcacagttttacagcagagaccagtgatgacttatcattcaagaggggagaccggatccagattctggaacgtctggattctgactggtgcaggggcagactgcaggacagggaggggatcttcccagcagtgtttgtgaggccctgcccagctgaggcaaaaagtatgttggccatagtaccgaaggggaggaaggccaaagccttatatgatttccgaggggagaatgaagatgaactttccttcaaggctggagatataataacagagctggaatctgtagatgatgactggatgagtggagaacttatgggaaaatctggaatatttcccaaaaactacatacagtttctacagatcagctagaggagaagcttgtctgtgttccttggcacaagaactcacttgaactatcaccttgactatcagatatgtttttgcactattttttttaactgaaaaagaaatatctaagctgtacatggtacactagaattttctgaaagcagaaaacgttcagattttgtagttaattttcattacaatagaaacatgcacatggaaacccatgagctaggattctaccgaggaaaacatctagtgggattagcaaggtgaagggaaagcatctggtggcatggcagcatggggaggctcacacacagaagttgcacgtggacatctgttttaatcagcacaagtgaattaaccatgcttcttcatttttttactttagttaaaaaagaggacatttaatattctacatgctgtaactatcaggacatggttagcaatctcaatttcatttttgatattcaaattaattcttacagcttgagcatatcagccttattaccagagcaaatccttccttcagatgggatagtttactgactagttggagcatttgtaagcacatggtgaaatcagcccctgcccaccaaaataatctttatgttaccaagtgattcccatttgtctaaggatttgaagggggtctaaattggatgtatcttagtctaaagaaccaaaaccatccctgaaatgccttgctaatacaactaatccttccatatatgtgccatacttatttttttcctcagtgtatactttatgttaacagggttattacaaagcacattttctgaatctgcaatcattcctttgacaattactggacccaaaggaaaattcattttctttgcattattccagtaatatataaaaactgtgtcttgttatagtagtacattatgaatcacatataaaatcttacaatacagaacaactgttaagatggaaaacagtgccaaacctccacagctcatttctttgtaatataatcagaatgaaaaataatttaagaggacagaagactggtacttttttgttttattttttctctagcttatccctgcacaattattagagtgaatgaaaaaccactttcctgctttccattgttataaattctaagcttaagataaaagtggttctttacatgactgaatcaattacaatttatgggctagagccaaataggttgaagacaatcatccaaacagatcaatggaatagaatttcattggaaatgtaaaacactttcccaacaatggtcatgactttcttctgtttttgagaagagtttcatatgctggaccacattttagcttttattgttttttttttcccattgtccaaaaagttaagcaacaagtggccacacttttacgtgactacaacctggggttctgcaaagaaggtaatatttacttggtctttgactaaagttatctccccattctatggttacattttattttggactatggggacttctaatacgttttggtaaagaagagagtataaagaaaattcttgtcaaatttcactcaaaagtaatttcatgagaaatcaatgatttaaagcattatccaaattaaattatcatttgcagcaaactgtacaacagcaggaaggatatggaatggaacatgaggtatatatctttgcctttataattttaacatcttatattgaagattctgaaaacctatctttattagaggaaaatctcaatcttcagttttggccttctgtcaccagaatgataagtgcaatagttgtaaatctacttgacactgtaataaactgaactgaactttc

SEQ ID NO: 1729 - DNA, 4209 bp, Homo sapiens
attgtttctctctgctgccggagctccaggtctacccttcactgctctgtgtcctcagcgtgtgtggcttcgtgacctgaagatactgggaaatccatagctaagatgccaggaccccctgaaagcctagacatgttatatgttctcattttgctgaagacttttgcccagggccaggcattaaagattcttttcaaaaagtgatactgagagaatatgtaaaatgtggacataaggatttacagttaagaaaatgatgtaaaagtatgaatgagtgtaatgtgcacaaagaaggttataatgaactaaaccagtatttgacaactacccagagcaaaatatttcaatgtgataaatatgtgaaagtctttcataaacttttaaattcaaatagacataacacaaaacatactggaaagaaacctttcaaatgtaaaaaatgtggcaaatcattttgcatgcttttacacctatgtcagcataaaagaattcatattagagagaattcttaccgatgtgaagaatgtggcaaagcctttatctggttttcaacccttactagacacaggagagttcatactggagagaaatcctacaaatatgaatgtggcaaatcttttaaccaggactcaaaccttactacacataagagaattcatactggacagaaaccctacaaatgtgaagaatgtggcacatctttctaccaattctcataccttactaggcataagctaattcatactagagagaaaccctataaatgtgaacaatatggcaaaacttttaaccaatcttcaacccttattggacataagataattcataatggagaaaaaccctataaatgtgaagaatgtggcaaagcccttagtattttctcaacccctactaaacataagataattcacactgaagagaaatcccacagatgtgaagaatattgtaaagcttataaggagtcctcacaccttactacacataaaagaattcatactggagagaaaccctacaaatgtgaagaatgtggcaaagcctttagtattttctcaacccttactaaacataagataattcacactgaagagaaatcccacagatgtgaagaatgtggcaaagcttataaggagtcttcacacgttactacacataaaagaattcatactggagagaaaccctacaaatgtgaagaatgtggcaaaacctttagtgtattctcaattcttactaaacataaaataattcatacagaagagaaaccctacaaatgtgaagaatgtggcaaagcttttaaacgatcttcaacccttactaaacataggataattcatactgaagagaaaccctacaaatgtgaagaatgtggcaaagcttttaaccaatcttcaacccttagtatacataaaataattcatactggagaaaaaccctacaaatgtgaagaatgtggcaaagcttttaaacgatcttcaacccttactatacataaaatgattcacactggagaaaaaccctacaaatgtgaagaatgtggcaaagcttttaatcggtcctcacaccttactacacataagagaattcatactggacacaaaccctacaaatgtaaagaatgtggcaaatcctttagtgtattctcaacccttactaaacacaagataattcatactgataagaaaccctacaaatgtgaagaatgtggcaaagcttttaaccgatcttcaatccttagtatacataagaaaattcatactggagaaaaaccctacaaatgtgaagaatgtggcaaagcttttaagcggtcctcacacctcgctgggcacaagcaaattcatagtgtacaaaaaccctacaaatgtgaagaatgtggcaaagcctttagtatattctcaacccttactaaacataagataattcatactgaagagaaaccctacaaatgtgaaaaatgtggcaaaactttctaccgattctcaaaccttaatacgcataagataattcatactggagagaaaccttgcaaatgtgaagaatgtggcaaagcttttaaccattcctcaaaccttattaaacataagctaattcatactggagacaaaccctacaaatgtgaagcatgtggcaaagcttttaggcggtcttcacatcttagtagacataagataattcatattggaattcatactgaagagactgtacaaaagtgaagaatgtggcaaaggcctttactgctcctattcccttactaaagaatgtggcaaagcttttcaccagtactttacccttaatacacataagataattaatgctggagagaaaccctacaaatgtgaagaatgtggcaaagatttctattgattctcataccttactaaatataagataattcatattggagagaaattctacagatgtgaagaatgtggcaaaggctttaattagttctcatcccttactaaacataagagaattcataccatagagaaatcctacaaatatgaagaatgtgacaaagcttttaaccacttctcaaccctgcctacacgtaagataattcatactggaaggaaaccctacaaatatgaggaatgtctcaaagctttttactgattcttataccttactaaacataaaataattcataaaggagataaattatacaaatgtgaagaatgtggcaaagcttttaacaaatcctcatccattagtaaacataagataattcatactggagagaaaacctacaaatgtgaggaatgtggcaaagcctttagcctgcccctccaatttactgcacataagataatttatactggagagaagccctacaaatgtgaaaaatgtggcaaaccttttaaccaatcctcaacccttactacacattagataattcatgctggagagaaaccctacaaatgtgaaaaatgtggcaaagcttttaaccaattttcaaaccttactaaacataagataactcatactggagaaaaatcttacaaatgtgaagaatgtggcaaagcctttatccagtcctcaactcctagtaaacataattaatgatggagagaaaccatacaactgtgaagaatgtggcaaagcttttaaccagtcctcaaactttattgaacaaaataattcatacaggagagaaaccctacaaatgtgaagaatgtgacaaagcctttaaccagtcctcaatttttactaaacataagaaaattcatactggagagaaaccctatgattgtgaaaaatatggcaaaggctttaactagtcctcagttcttaacacacatacgataattcttactgcagagaaactctacaaaccagtaagatgtgacagtgcttctgacaacatctcaaacttttctaatcataaaagaaatcatattggtgagaaatcctagaaatgtggagaatgtaacaaagtatttaaatggttgtcacacttgattataggtaatattcatattggaaaaatttcctacaagtaagaacaatgtggcaaagtttttaactaatacaccttattgcacagaaaatcatttatatttgagaaaaattgtagaaatatagactgtgaaaaagacgtcaatatctgctcacatcttactaaacaccagagagttcatgcttaataaaagcatgataagtgcaattactgccaaaagatctttcagaaaatattatcctttaaagtgaaggagagtatttatattaaagatgaacattacaaccataaagagggttgaagtacctttacttgtatcagatcttattgtccacattttgtactacagaaaaactctgaagaggtcactcaaactttgttcaacatcagggaatttatattggagagctgtcttgcaaatgtaataaatttgggaaaacaaattttcaaaaactacagcttagaaaacaccagagtttatacgaaaatatattttcaaaggtgtagtaaaaataaaaaaaattttaatccaaatttgtctatgtaaataccagaatttatagtagaaatatatgaggaagcgacacttcgaatattctactaaatgagagttctgagtatagaaaataaaactaaagttggtagaaaaattatttgtatataatgttaagaggagtaaaagattttttgtagaataataactatattcagattatactttgtttcttgaaaaaattacagattttttgaaaagc

SEQ ID NO: 1730 - DNA, 3540 bp, Homo sapiens
actacccagagggctgccgccgcctctccaagttcttgtggcccccgcggtgcggagtatggggcgctgatggccatggagggctactggcgcttcctggcgctgctggggtcggcactgctcgtcggcttcctgtcggtgatcttcgccctcgtctgggtcctccactaccgagaggggcttggctgggatgggagcgcactagagtttaactggcacccagtgctcatggtcaccggcttcgtcttcatccagggcatcgcttctttcaggtttttcagtctttctgcttccatgggctccgctttctctccgagcatttctcatgcccatacatgtttattctggaattgtcatctttggaacagtgattgcaacagcacttatgggattgacagagaaactgattttttccctgagagatcctgcatacagtacattcccgccagaaggtgttttcgtaaatacgcttggccttctgatcctggtgttcggggccctcattttttggatagtcaccagaccgcaatggaaacgtcctaaggagccaaattctaccattcttcatccaaatggaggcactgaacagggagcaagaggttccatgccagcctactctggcaacaacatggacaaatcagattcagagttaaacaatgaagtagcagcaaggaaaagaaacttagctctggatgaggctgggcagagatctaccatgtaaaatgttgtagagatagagccatataacgtcacgtttcaaaactagctctacagttttgcttctcctattagccatatgataattgggctatgtagtatcaatatttactttaatcacaaaggatggtttcttgaaataatttgtattgattgaggcctatgaactgacctgaattggaaaggatgtgattaatataaataatagcagatataaattgtggttatgttacctttatcttgttgaggaccacaacattagcacggtgccttgtgcagaatagatactcaatatgtgaatatgtgtctactagtagttaattggataaactggcagcatccctggcctgttgtcatgcagtcatttcctgttaattctgggagacaatgatttcacaactagagggaagcagtcctaaaagtttaaaatccgataaggaatatctgggacagggtttagatcatgactctacacagataccatgatgagagtatattaaagaaatttaggaaagcacctggttcctttctccccatgcctgccttctgctccctccccagctggtttgggctcaaattgtccctggagactagggtttatgttagggtattgatagattagagcaggtggttgaagagatcttctctggtcagacttggaagaatttccaaaactgaagttagccccaagacttccctagggttgatgtactttatgatccagatgctaaacttcttagaatgaaattatgcttcaacacttaagtagcatacactgccctacaaacctcagagagcacttttccccaagttcttgtttttatttttgaaagtactcacacagcacttactatgctccaaacactcctctaagcactttacacatattagctcattcagtccccagacagacgggatgaagtaggtattgttactgttcccattttacaggtgagagatttgaagcctggggaggctagtaactcaccccaaggtcacacggctcatacatggtgggactgagactcagatgcaggcagtctggcacctcagtctggattctaaccatttcactaagctatttttgtcttgtactactttgacccacccctgaataaacctcaattgctggagtggggtgtagttattaaagggatgctttttaccttttgctgtctgctgtggcagattccccagataaccaaggaaaaggggccacccatacctggaaataggccatagggcccctactactgccaacaagccatggcctaccttgacaattgtttgatcttaaaattgtgtcttggtaacaaaagatttggacaggcatatctgtagctttcaagttaattaattgcaatatttttttcttcaggattttagctgctgaacaactttcagtttggagctaaaagagacctgtctcatggtctgcccttccctggggcaatagctagggtctttcctgatttttatggaattttaggggatattttgaacttgggttctcagtagtgaattgagacttggaggtgacttttcatgtttggagtatcatctctgtctgggatctgggctgacaaattaaaacctagagtagtgcttatgctgaaatgatacttttcattttttggttgatttttttgccttcccttcaattttaaactgaagcattttaatgtgggtagaaactctacaccaaatacactaaacattttggtgcttagtggatttctttttaggtaactggtacttacttccaaagactgaatacaagccacactccatcatatcccttaaacttcatgaaaaaccattcaagatccccttgctgcaacactgttctcttcttctctactaaattctatttccaaaattggtaatagagccagaaggatccccagtacccagccctctgcctggcacaaactggtagcacaattaaattcagtatgggtggagcatggtacagtcttggtgccatagaaggagtagttgcatagtcacacatcatctgataagttggatgttccattacatagaggaacacaaaattccagggtttttggaggaagggattagatagtgactaagccgccagaattgaggtggccattcctttttgtataggctaagaaacaggttatcagtgaaaagttaattatggctttggcactagaatagcactgttgcaaagtatttaagcaccccccatctcagccctttattttatctttcatgtgggctaatgtgaggataatcttacagatattataggaatttcttttctatctttatgaaaacaacgtatataaaatatatctagaaaacctttgtttgagactcttatttaatgggcttttgattctaatgataattgtacctttatctttcaaaagctgatatttcctacctaagcatctcccgagaaaaatatctcattaaaaagcccataaataataggggagaagaaagccttaggtatcaattccaaaacagtgattgaaatttcccaaaataattatggcttctgtcatctccagagataatctggcttggtttaccccataatctaatttcagaaaagaaagctttattttaacactcatctgaatcaacattaaagccttttctctcaaagcgtttattgagaaactcaaatgaatatactttttgaattactgtcatcaaaagtgtacggcttcccgtgctgcttgtgtcaaatggaacctgccctctaaagcactttctttcctttacttgcgtggtttcatgtaagctgtgctgtttagaaacaacatctcagactttacaaaaaag

SEQ ID NO: 1731 - DNA, 4135 bp, Homo sapiens
gttttttttttttttgagacagagtctagctctgtcacccatgctagagtgcagtggtgtgatctctgctcactgcaacctctgcttcctggattcaagcaattcttctgcctcagcctcccaagtagctgggagtacaggctcccgccaccacacctggctaatttttgtatttttagtagagatggggtttcgccatgttggcgaggctggtctcaaacttctgacctcagatgatccgctcacctctacctcccaaactgctgggattataggcgtgaaccaccgcgcccagcctaaaagtcttgcttcatgtttatcatgtgttacaaatggcacctgctaaaataaccctggggaaaacaaataaaggcattttgaaagggatactttttaatcattgtcatcaataccatgtagaaatgtgatctgcactggcttagaaagtgacttcttctccactactttttcttgtttttccacatgttgcctccatacacaagtagaacttgtcaggagctattgcaaagctccatgacttcgcacctttgcccatcagctgacagatatttttaaacattcaatttttgagggcaaggactggtgtgtccttttccaatagagacccaagcagttggtgttcttagaaagtataagccactggtagttaatatcatgtataaatggattgatggcaatctccccttctctcctccctctttcttctcctcctgatggcattcctcagtttaacaggcgtcatcattgtcgccgctgtggccggctagtgtgcagctcctgctccactaagaaaatggtggttgaaggctgcagagagaaccctgctcgtgtgtgtgatcagtgctatagttactgcaacaaagatgtaccagaggagccttcagaaaaaccagaagctctagacagctccaagagtgaaagccctccatactcgtttgtggtgagagtccccaaagcagatgaggtggaatggattttggatctcaaagaggaggaaaatgagctggtgcggagtgaattttactatgagcaggcccccagcgcctccttgtgcattgccatcctgaatctgcaccgggacagcattgcctgtggtcaccagctgattgagcactgctgcaggctctccaagggcctcaccaacccagaggtggatgccgggctgctcacggacatcatgaagcagctgctgttcagcgccaagatgatgttcgtcaaagccggccagagccaagacttggctctttgtgacagctacatcagcaaggtagatgtgctgaatattttagttgctgctgcctatcgccacgtgccatctttggatcagatcttgcagccagctgcagtaaccaggctaaggaaccagcttttggaagccgagtactaccaactgggcgttgaggtctccacaaagactgggcttgataccaccggggcgtggcatgcttggggcatggcctgcctcaaagccgggaacctcactgctgcacgggagaagttcagtcgctgtctgaagcccccatttgacctcaatcagctgaatcatggctcaagactggtgcaggatgtggttgagtacctagagtccacagtgaggccctttgtatccttgcaagatgacgattactttgccaccctgagggaactggaagctacccttcggacgcagagcctttctctggcagtgattcctgaagggaaaatcatgaacaacacctactaccaggaatgcctcttctacctgcacaactatagcaccaacctggccatcatcagcttctacgtgaggcacagctgcctgcgggaagctcttctgcaccttctcaacaaggagagtcctccagaagtttttatagaaggcattttccaaccaagctataaaagtgggaagctacacactttggagaacttgctagaatccattgatccaaccttggagagctggggaaagtacttgattgctgcctgccaacatttacagaagaagaactactaccacattctgtatgagctgcagcagtttatgaaggaccaagttcgggccgccatgacctgtattcggttcttcagtcacaaagcaaagtcatatacagaactgggagagaagctctcatggctacttaaggccaaggaccacctgaagatctacctccaagaaacatcccgcagctctggaaggaagaaaaccacattcttcagaaagaagatgactgcagctgatgtgtcaaggcacatgaacacacttcagctgcagatggaagtgaccaggttcttgcatcggtgcgaaagtgctgggacctctcaaatcaccactttgcctctgccaaccctgtttggaaataaccacatgaaaatggatgttgcctgcaaggtcatgctgggagggaaaaatgtagaagatggttttggaattgctttccgtgttctgcaggacttccagctggatgctgccatgacctactgcagagctgcccgccagttggtggagaaagagaagtacagtgagatccagcaactgctcaaatgtgtcagtgagtcaggcatggcagccaaaagtgacggggacaccatcctcctcaactgcctggaagcgttcaagagaattccgccccaggagctggagggcctgatccaggcaatacacaatgatgacaacaagatagtgccaatcttggcagcattgagggacagagttcacaccgaagagagaggacgttcccctagcactttgtgctaattggtatttaaaaattcatgaatcaagtgagccaaaagcttaaagaaggagaaaaacgatccagatctccatggcataaccaacagcgacagtcttctttaaaagctttcagaaagctgcaaagttttcatggaaaagcggcacacgagtataaaataaagccagaaaagcaactcttcccaacacataagtttgtactgtaagtttccttaacaaagcaacggcattctgtttgcaggcccaacccaaacctggattgcatcatcaggcacaaactcagcttctcaggatgaacagcccagcgagtccggcacctcccatgcacacaggtggtggagagaaccgcattgccttcacacacctgaagtacttgccgctcaggggctccaggccctcagccagggcgcagtgcaggctggtctgcgccccctcccgtgccgtcttgacaaagggggagaagagccgccagagcaggcagagcagggaggagtgccggaccagctcagagcggacgacgcctgggtgcactgcgcattctggaagtgaagatcattgttcccaaactctggcttattcactgtaacaaatggacccctagatccgcagatgtcagagccagcagctcacccagtgctccaggagagcacagaatcattaaggaataagaaccagcctgacctgattttacagctgagaagatgaagtcaggggaggttaaaggggcacatccacatccacatccacatgcggctagcatgtggtagagcaagaacttggacccaggggtctgaaatccagccctaactccctgagtccaggcagtggcagctctgtagctcagatcaccatgtggacctcagcaaatggcacccagaaggaagcaccctaggtttaaagctgagcacccacattccggttctgacgccctcacctgccatatactctttagctggccatttccttggacctcagctctgctctataaactaggagtaataatacctgttaccaaaggcctcttctgccagatcacctgaggtcaggagtttgagaccaacctggacaacatggtgaaagctcgtctcttctaaaaatacaaaattagccaggcgtgatattgcgtgcttgtaatcccaactactcaagaggctgatgcaggagaatcacttgaacccaggaggcagaggtcgcagtgagccaagatcgcactactgcactccagcctgggcgacaagagcgaaactcaagtctcaaaaaaaaaaaaacaaaaaaaaaaaaaagcctctgtctgttgcaaaaagctactgtgaaaatcaaatgagataagagataagatgtgacacaaatacaaggtaactttttgaggttcttaacccc

SEQ ID NO: 1732 - DNA, 3570 bp, Homo sapiens
acaaaacaaaacaaaacaaaagaaatacacacaggcagccgggtgcagtggctcacgcctgtaatcccagcactttcagaggctgagcgggcagatcatctgaggtcaggagttcaagaccagcctggccaacatggtgaaaccccgtctctactaaaaatacaaaaaattagctgggcgtggtggcgggcgcctgtagtcccagctactcgggaggctgaggcaggagaactgcttgaacccgggaggcggaggttgcagtgagccgagatggtgccattgcactccagcccaggactctatctccaaaaaaaaaagaaaggaagaaaaataagcacaggcatgtgtggagacctggaggcagggctgcccctcacgaaccatccacaatgccaaggaaaccagaagcaaacgtccagcagcagggagcgcagggcatgtgaaaccgacactgaggaaacagccacgggagagagcacacagggagaaaggaaggctcgggcactcccttgctgtggttcaggcctgttctaccacccctggggtcaccatcgcccacggaccttcctgctgggtgcctgtagcacggcacctcctgacaggtcaggtttaagggaagtttgctggataactaaaatgaggctggggggaggagggagcagggaggagctagcccacaggagccaatgcaggcctgaccccactggtgccggactgactcagggagagtcattagggctgctttctcaggctggatgagcactgggggttgggggcttgccctggcccaccccaccactcaggaaaccttccctcagcaggacctgccctgcacagatcatgggcagcctccctctgctccccacttccacagccccagactccatctcaaccgcagccaggagtcactgctaacaccacaaaggacctgttcctgcaccagcacgggccagctctgggggcaggtgcccaggacagagtcacgagtggcaagcagacaataaacaacaggcaagatggacagactgattgccgggaggatgtggcaggaggcactggaacggtggtggaggaaccccagccctggggacagacctccacccgtgcacagacctccaagctggagcctgctctggaacactaagggcagcagcagaggttgaagaggggcagacgcaggaacgttggggacacgctcggggaacagtgagaaaagccctaggctggggcagaggaagtcctcgatggcacaagcatcaggacacaaagtgcaagaaatgtgcctaagacaagaggcagttccagggcagaccggggcccctggagaagggtgctgcaatctatcctcactgcctggagcttccctcctgtcccttggtaaccacaccaaagaaagataacaacagtctctgcctcgtgggacacagcgagggccaccgtgcccagcccaccgtctgtgcacagggcaggcccagatggctgctgccaccaacctgtgtcatccaggagtgcctttctcaagagctctcagtgcttatctagcgttggcctgccccacctcgggttaaatcaaaacctctttggtggctgggcgcggtggctcacgcctgtaatcccacggaggccgaggcgggcagatcacctgaggtcaggagttggagaccagcctggacaacctgacaaaatacctctctactaaaaatacaaaaaaaattagccgggcgtggtggcgcacacctgtaattccagctactcgggaggctgaggcaggagaattgcttgaactgagctcgggaaagggaggttgcagtgagccgagatcgagccactgcactccagcctgggcgacagagtgagactccatctcaaaacaaaaaaacaacgcctctttggaaccagcagaggaacagactcaggccctattagactccagccatgcaaagttcctagtcactgcccactgggagggtgtggacctgaagggacgcagggccaggggaaagctctttctgctcagcagctcctggagaggagcgaccctgtgccgggacacccttccccctgcggcatccagcgcagcccatctctgagggagtcctggctcacagcgtttctgacaggagtcacagcctgaacccaggcaagaggcgcctgagtgggaacaaccccttcctggggaccccgcgggctccccaagggacacttcagacccggaagggaggggcagcgcccagagcgccctcttgcagccccgggcactgcgtggccaccgccccctgacggccacggccccaaaggcgccgcgcagggcccggctcccagaggggccactcggggtgacgaaccggggtgggggcgggttcctcccgctgcacccccacaacttccccacttcatgctcttgcaaagcccccgcagaggctcgaaggtgccacgcgcgtgcgaggcaatccgaaggcaccgtgcgccgcagcacctccaaatcctaagccctggcctcgcgggtcgggcagggccacaccccgagccgacaacatagaccaactcgcacagtcgagcaggcacacagcccgccgggcgctcgaggccgagggccccacccaccgggggcagagaccaaggtcaacgctgggggtgcgcacccggactccttccccgagccccgaggagcctgccggcttgggccaggtccgtcctcccggccgcttcaagcccgcggggttccacccggcacgtgggagaacggggcgccgccgcctggcctccgggagtgggggacttgggctcgcggcggggacggaccacccgcccagctcggccggatctgcagccccttcccgctcgccagtggagtggaggcgaggcccacgcctaccggtcctcgcacgcggtctcgcttttctcagcctgccggcctggtgtgtctcgggccgtaggtggcgacgtgggcgaaggatcagcgtccgcgcgggccgggggcgcagccatggcgctcggaggcctctttgcgggcctggccgggcggcgcgcatgggccgccgggagctggcgggtccctctcttgcccaccgcggactacaagccccacaaggccgcgcgtcgcggactacaagccccacaaggccgcgcgtcgcggactacaagccccacaaggccgcgcgtcgcggactacaagccccacaaggccgcgcggcgggcatgggggacccgtagttcggcagcctccgccacgtgcctggagggccccgccccctgtttttcaccacaaactgagccgcacaaaaaccctggaaaaaaatcaataaacatttatttgatacagtcattttaatacatacagtgatggcccgtccccacgccactcgggaccagggcgcggggcggggacgaggaccggggacagatggtcacaaggcgggcggggcccgaactcaccgttgaaacatctcgcaaataaacactttgtagatagaatatatatgtatatatatatggttacaagtgatagctggaacctctttcaaaatgcacttatgtactgagaactggcattaaaaaacccaaaccaag

SEQ ID NO: 1733 - DNA, 3297 bp, Homo sapiens
gcataatctctgctggtccacaaacaggatcacatacatttacagtttttaaaagatgttggttctccttttattacatactatttgatccctttaaactccagtgttctcatctacaatatggcctaatatgatgataaagataacatgctagaagtgaattttctttcttgtaaatgaaaaacatagttttaaatttccaattgcaactgaagggcctgatttggcatttctcaatgtcttactcttagtttagaataggttgcaattattgttcttttttagccatgacaccaagttattcatctatagcagcttttctctttttttttgagacagagtctcgctctgtcgaccaggctggagtccaacggcccgatctcggttcacttcaacctctgcctcctgggttcgggcggttctcctgcctcagccttccgagtggctgggattacaggcgcgtacgaccacgcccagctggtttttgtatttttagtagagatgaggtttcgaggtttcaccatgttgcccaggctggttttgaacttctgggctcgggcggtctgccctcctcggcctcccaaaacggtcggattataggcgtgaaccaccgcacccagccgcctggaatttttaagcctcaagtttgttccactttgaatgcaagaagccacctgctcctctttctgtcatcaatttaattgtttataaattggggctaataacgatttccttaggccactatattctttacccagctagttccaagttgttttgtgtgtgtgtgttttgtttttgttttttgttggttttttttgtttttgtttttgttttgagatggtgtctcgctccagcctggacaacacagtgagattctgtctcaaaataaataaataaataaacccaagcagaaaaagaatcactctgaaaacgatcacatctaactatcaatgctcatacagtttatggaattatcagcccaacttgataaaatcagtatttgaggaaactgtggataagccccctgatttcaatccccattgtgccaggtcctggttaactgaggttaacgaagtaaagagctgcagacactattaactgctaccttaaaccgattactctagcttagcctactttccacgtacagattttaccagtggacaacatgatgctttatcttgtttttctctccctgggacttttctccagacattgaaaacagaaatactaataaggccacttttacctgcctgatgcaagaacagaattttcaaactcaacattaatgcaactcctcagtccctgacaatggcgggtggaaaagtttctaaaaatatgcagcagcacaattatcgggaagagatgagatactgttacctaataaaaatgccataaatagagaatgatgaactaccatgggaaatgaatgcatagaagaggacatgctggaatgtgggacagtaaaaatcacttaaactttgcgtgaccttgaagaaagtcacgatgatctgtttttccaggtccctcaaacagtgagatgtggctgtttcccaagtcttcctctccagtgtaaagggtctgaatttagacgctttgtgagtcttccttctttcgacagcctggagtctctcttgagtctcaaggctgcctgagttcctctctaacatcctctaggcagtatcagctaatgagacaatgaattccatggaggcagcagtgggaacagaagtacctctcttggataatttacaacactgtaacagcgggaacatgaagccgccactcttggtgtttattgtgtgtctgctgtggttgaaagacagtcactgcgcacccacttggaaggacaaaactgctatcagtgaaaacctgaagagtttttctgaggtgggggagatagatgcagatgaagaggtgaagaaggctttgactggtattaagcaaatgaaaatcatgatggaaagaaaagagaaggaacacaccaatctaatgagcaccctgaagaaatgcagagaagaaaagcaggaggccctgaaacttctgaatgaagttcaagaacatctggaggaagaagaaaggctatgccgggagtctttggcagattcctggggtgaatgcaggtcttgcctggaaaataactgcatgagaatttatacaacctgccaacctagctggtcctctgtgaaaaataagattgaacggtttttcaggaagatatatcaatttctatttcctttccatgaagataatgaaaaagatctccccatcagtgaaaagctcattgaggaagatgcacaattgacccaaatggaggatgtgttcagccagttgactgtggatgtgaattctctctttaacaggagttttaacgtcttcagacagatgcagcaagagtttgaccagacttttcaatcacatttcatatcagatacagacctaactgagccttacttttttccagctttctctaaagagccgatgacaaaagcagatcttgagcaatgttgggacattcccaacttcttccagctgttttgtaatttcagtgtctctatttatgaaagtgtcagtgaaacaattactaagatgctggaggcaatagaagatttaccaaaacaagacaaagctcctgaccacggaggcctgatttcaaagatgttacctgggcaggacagaggactgtgtggggaacttgaccagaatttgtcaagatgtttcaaatttcatgaaaaatgccaaaaatgtcaggctcacctatctgaagactgtcctgatgtacctgctctgcacacagaattagacgaggcgatcaggttggtcaatgtatccaatcagcagtatggccagattctccagatgacccggaagcacttggaggacaccgcctatctggtggagaagatgagagggcaatttggctgggtgtctgaactggcaaaccaggccccagaaacagagatcatctttaattcaatacaggtagttccaaggattcatgaaggaaatatttccaaacaagatgaaacaatgatgacagacttaagcattctgccttcctctaatttcacactcaagatccctcttgaagaaagtgctgagagttctaacttcattggctacgtagtggcaaaagctctacagcattttaaggaacattttaaaacctggtaagcagagtgcctggttaggaatgccttgttgacaggaatagttaattctcaaaagggaaaaacaaaacttgtttcaaaatacctggaaaacatgtttaacctcattaataaagacatgaaaacaaac

SEQ ID NO: 1734 - DNA, 3832 bp, Homo sapiens
actcactgtagcgcgtggctccgtaggccacaccgaggaacagggcggagtagcggccgagctgcgaaagagctatgtgttctcatttcacccaagactttttgccagtgcaggggatagaagattcattccacaaacttatactgagaagatatgagaaatgtgggcatgataatttacaattaaggaaaggctgtaaaagtatgaacgtgtgtaaagtgcagaagggagtttataatggaattaataaatgcttgtcaaatactcagagcaaaatatttcaatgtaatgcacgtgtcaaagtttttagtaaatttgcaaattcaaacaaagataagacaagacatactggagagaaacactttaaatgtaacgaatgtggcaagtcatttcagaagttctcagacctaactcaacataaaggaattcatgctggagagaaaccctacacttgtgaagaacgtggcaaagactttggatggtacacagacctgaatcaacacaagaaaattcatactggagagaaaccttacaaatgtgaagaatgtggcaaagcctttaataggtcaacaaaccttactgcacataagagaattcacaacagagagaaagcttacacaggtgaagatcgtgacagagcctttggatggtccacaaacctgaatgaatataagaaaattcatactggagataaaccctacaaatgtaaagaatgtgggaaagcctttatgcattcctcacacctgaataaacatgagaaaattcatactggagagaaaccctacaaatgtaaggaatgtggcaaagtcatttcctcatcctcaagctttgctaaacataagaggattcatactggcgagaaaccctttaaatgtttagaatgtggtaaagcctttaatatttccacaacccttactaaacataggagaattcatactggagagaaaccctacacatgtgaagtatgtggcaaagcctttagacagtccgcaaacctttatgtacataggagaattcatactggagagaaaccctacacatgtggagaatgtggcaaaacctttagacagtccgcaaacctttacgtacataggagaattcatactggagagaaaccttacaaatgcgaagactgtggcaaagcctttggacggtacacagccctgaatcaacacaagaaaattcatactggagagaaaccttacaaatgtgaagagtgtggcaaagcctttaatagttcaacaaaccttactgcacataagagaattcacaccagagagaaaccctacacatgtgaagatcgtggcagagcctttggattgtccacaaacctgaatgaatataagaaaattcatactggagataaaccctacaaatgtaaagaatgtgggaaagcctttatacattccttgcacctgaataaacatgagaaaattcatactggaaagaaaccctacaaatgtaagcaatgtggcaaagtcattacctcatcctcaagctttgctaaacataagaggattcatactggcgagaaaccctttgaatgtttagaatgtggtaaagcgtttactagttccacaacccttactaaacataggagaattcatactggagagaaaccctacacatgtgaagtatgtggcaaagcctttagacagtccgcaatcctttatgtacataggagaattcatactggagagaaaccctacacatgtgaagaatgtggcaaaacctttagacagtccgcaaacctttatgtacataggagaattcatactggagagaaaccttacaaatgtgaagagtgtggcaaagcctttggacggtacacagacctgaatcaacacaagaaaattcatactggagagaaactttacaaatgtgaagagtgtggcaaagactttgtatggtacacggacctgaatcaacagaagaaaatttacactggggagaaaccttacaaatgtgaagagtgtggcaaagcctttgccccatcaacagacctgaatcaacacacgaaaattcttactggagagcaaagttacaaatgtgaagagtgtggcaaagcctttggatggtccatagccctgaatcaacacaagaaaattcatactggagaaaaaccttacaaatgtgaagagtgtggcaaagcctttagtaggtcaagaaaccttactacacataggagagttcacactagggagaaaccctacaaatgtgaagatcgtggcagatcctttggatggtccacaaacctgaacgaatataagaaaattcatactggagataaactctacaaatgtaaagaatgtggaaaagtgtttaaacagtcctcacacctgaatagacatgagaaaattcatactggaaagaaaccctacaaatgtaaggaatgtggcaaagtcattacgtcatcctcaagctttgctaaacataagaggattcatacaggtgagaaaccctttaaatgtttagaatgtggtaaagcgtttactagttccacaacccttactaaacataggagaattcatactggagagaaaccctacacatgtgaagaatgtggcaaagcctttagacagtcagcaatcctttatgtacataggagaattcatactggagagaaaccctacacatgtggagaatgtggcaaaacctttagacagtctgcaaatctttatgcgcataagaaaattcatactggagagaaaccctacacgtgtggagactgtggcaaaacctttagacagtctgcaaatctttatgcacataagaaaattcatactggagataaaaccatacaagtgtaaagaatgtggcaaagcctttaagtcatactacagcattcttaaacataagagaactcataccaggggaatgtcttacgaaggtgacgaatgtcgcggtctttaaatgctcctcaatcctttctaatcataagataattcataatgaagagaaactctaaaatgtgaaaaatgtgagaaggcttttaatcacacctcaatctgttgtagacataagagtaattatattgatgagaagccaaattaaaattaaaaatgtggcaaagacttccaattctagtcagttcttaatgtaattcctactgaagaaaacacctggaaatacaaaaaatgtggcaaaacttgtaaccaatgcttagcatttttgcacatgatagtatttatatgtgagactacttgtacaaacataaaaatatacaaaagctattgtctacttgaaatttatagttaataaaagcattataaatgtaatttctgttgaaagaccttttagaaaatataggccattaaagtgaagaatagtcttaagacagagaatacaaagataaagagggctctagtacctgtacttgtatcccagaacttactatatgcattttgtactagaggaaaactctgaagcagttgcttaaactttgttcaacatcagagaatttatattggagagaaatcctacaaatgtaataaatgtggaaaaacctctgttcagaaactgcaggttaagaaaccagaggccaggcgcggtggctcacgcctgtaatcccaacactttgggaggccaaggagggtggatcacctgaggtcgggagttcaaggacagcctgaccaatatggagaaacctcgtctgtactaaaaatacaaaaattagcaggacatggtggtgcatggctgtaatcccagctactcaggaggctgagacaggagaatggcttgaacccaggaggtggaggttgcggtgagctgagatcgtgccattgcactccagcctgggtaacaagagtgaaactctgtctcaaaacaagat

SEQ ID NO: 1735 - DNA, 3430 bp, Homo sapiens
gtagtccattttcatgctgctgataaagacatacctgagactggggtagtttacagaaagaagagatttaattggacttacagttccacgtgactagggaagcctcacaatcatggtggaagggaaggaagagcaaatcacgtcttacatggatggcagcaggcaaagagagaatgaggaagatgcaaaagcagaaatccctgataaaaccatcagatctcgtgaaacttattcactacaatgagaacagtagtggggaaaccgcctccatgattcagttgtttcaccttggtccctcccacagcatgtgggaattatgggagtacaattcaagaggagattcgggtggggacacagccaaaccatattattctgcccctggcccctcccaaatcctttatctttacatttcagaaccaatcatgcattcccaacggtcccccaaagtcttaactcatttcagcattaactcaaaagtccacagtccaaagtctcatctgagacaaggcaagtctcttctgcctataagcctgtaaaatcaaaagcaagctagttatttcctagatacagtgggggtacagacattgggtaaatacacctgttccaaatggaagaaattggccagaacaaaggggctacagggtccatgcaagtctgaaatccagcaggacagtcaaatcttaaagctccaaaatggtctcctttgactccatgtctcacatccaggacatgctgatgcaagagatgggttcccatggtctggggcagctccgcccctgtggctttgcagggtacagcctccctcctggctgctttcacagggtggccttgagtgtctgcggcttttccaggcacacggtgtaagctgtcaatgaatctacaattctggggtctggaggacagtggccttcttctcacagtgccactaggcggtgccccagtaggaactctgtgtggcggcttcgaccccgcatttcccttccacactgccctagcagaggttctccatgagagccccgcccctgcagcaaacttctgcctgggcatccaggtgtttccatacgtctgaaatctaggtggaggttcccaattcttgacttctgtgcacctgcaggctcaatgccacatggaagctgccaagacttggggcttgtaccatctgaatccatggcctgagccctatgttggcccctttcagccatggctggagtggctaggacgcagggcaccaagtctctaggctgcacacagctcagggaccctgggcccagctcacgaaactcctttttcctctaggcctccagggcttgatgggaggggctgccttgaagacctctgacatgccctgaagacatttcccccattgtcttggggattaacttttggctttttgttacttatgcaaatttctgcagccggcttgaatttctcctcagaaaatggaattttattttctattgcattgtcaggctgcaaatttttcaaacttttatgctgtttctcttttaaaactgaatgcttttaagagcacccacgtcacctcttgaatgctttgctgcttagaaatttcttccgccagatatcctaaatcatctccctcaagttcaaagttccacaaatctctagggcaggggcaaaatgctatcaatctctttgctaaaacgtaacaagagtcacctttgctccagttcacaacaagttcctcatctccatctgagaccacctcagcctggaccttattgtccatatgactatcagcattttgggcaaagccattcaacactaggaagttccaaactttcccacattttcctgtcttcttctgagccctccaaactgttccaacctctgcctgttacccagttttaaggtcacttccccattttcgggtatcttttcagcagtgccccattctactagtactaatttactaaattagtccgttttcatgctgctgataaggaaatacccaagacagggcaatttacaaaaggaagaggcttaattaggcttacagttccacgtggcttgggaagcctcacaatcatggtggaaggcaaggagaggagcaagtcccgtcttacatggatggcagcaggcaaagagagaatgaggaagatgcaaaagcagaaacccctgataaaaccatcagatcttgtgagacctattcactaccacgagaacagtatgggggaaccgcccccatgattcagttatctattcccgggtccttcctacaacatgtgggaattatgggagtacaattcaagatgagatttgggtgagggcacagccaaaccatatcaccattttaaacagatgaggaaatgaaggcactgagaagttaaataacttgcccatggccccacagcaagtgacagcagagattcagaggtaggtaggctaattgcaaaaccattgttcttaactgttgtgttatgctacctctggaatatcaaatgtatagctttacttgttcagtcattgctggattcagggcccaaacaaggttattgggattctctctcatgttgtattttggctcagtttttctctgggttgattttatcctcaggcaggcattgccggtgaagtgacagtatagctgctgggatgagaactgcatattcataatttagcaattggtgtggaaagagagaatttattttaacaatacagttctagcaaatgttctagaattgactctcattgggtcagtttgagttttattcctattcctgaaccgtcactgtggcctgagggtagggatgggatagagtggaatattcttattggccagtctgggccatgtgtgtttccatccctggatctgagacgggggaatgaatccttacctccagggaacatcagggtgctaataccagaaatgggaatggatatgggccaggcaaaaacaaatgttcaccacgcttaagatattaggacctcactgggtgcaatggctcacgcctgtaatcccagtactttgggagactgaggcaggcagatcacctgaggttagaagtttgagaccagcctggtcaacatggcaaaaccccatctctactaaaaatacaaaaattagccgggtgtggtggcatgcgcctgtaatcccagctactggggaggctgaggcaggagaattgcttgaacccgggaggcggaggttgcagtgagctgagatcatgccactacactccagcctgggtgacagagcgagactcaatctcaagggaaaaaaaaaaaaggatattaggaccgtgctcacccagtaggatctgtctgcttgatttctattttagccttaacatgtcaaatatttttacagaattatgatgaattatgataaattgaaatcacgtctgggtgagattcatgatagcaaaatgcgtctagagcaggatttgaagaaacaagctttggacaaccg

SEQ ID NO: 1736 - DNA, 5054 bp, Homo sapiens
agaacccatccagacatgaagagcgccaaaggtattgagaacttggcttttgtcccctccagcccagacatcctgcgccgcttgtctgcgtcgccctcccaaatcgaagtctctgccttgtcctctgacccccaaagagagaattctcagccacaggagcttcagaagccccaggagccccagaagtcacccgagccatctctgccttcagcccctcccaatgtctccgaagagaagctccggtcactgtcgctgtccgagtttgaggaggggtcttacggctggaggaacttccatcctcaatgtctccagcgctgcaacacacctggaggctttctgcttcactactgcctcttggccgtcacgcaaggtattgtagttaatggcctagtaaatattagcatttccactgttgagaagcgttatgaaatgaagagttccctgactggcctgatttcatcaagctacgatatttcattctgtttgttgtctttatttgtatcattctttggtgaaagaggacataagccgagatggcttgcatttgcagcctttatgattggactgggagcacttgtattctcattgccacaatttttcagtggagaatataaattggggtctctttttgaagacacttgtgtaacaacaaggaatagcaccagttgtacatcttcaacttcttcactttctaactacttgtatgtcttcatcttgggacaactattgctgggggcaggaggaactcctctttatactctgggaacagcctttcttgatgattctgtgcccacacacaagtcttctctctatataggaaccggttatgctatgtcaatcttaggccctgctattggctatgtattgggaggacaactgctaaccatatacattgatgttgctatgggagaaagcactgatgtcactgaggatgatccgcgatggttgggagcttggtggattgggtttcttctatcatggatctttgcttggtctttaataatacctttttcttgctttccaaaacatttaccaggtacagcagaaattcaagctggaaaaacttcccaggctcatcagagtaatagtaatgcagatgtgaaatttggaaaaagtattaaagattttccagctgctctaaagaatttgatgaagaatgctgtctttatgtgtttagttctatcaacttcttcagaagccttaattactactggatttgctacatttttacctaaatttatagaaaatcaattcggattgacatccagcttcgcagctactcttggaggggctgttttaattcctggagctgctctcggtcaaattttaggtggcttccttgtttcaaaattcagaatgacatgtaaaaacacaatgaagtttgcactgttcacatctggagttgcacttacgctgagttttgtatttatgtatgccaaatgtgaaaatgagccatttgctggtgtatctgaatcatataatgggactggagaattgggaaacttgatagccccttgtaatgccaattgtaactgttcgcgatcatattattatcctgtctgtggagatggagtccaatatttttctccctgctttgcaggctgttcaaacccagttgcacacaggaagccaaaggtatattacaactgttcctgtattgaaaggaaaacagaaataacatccactgcagaaacttttggttttgaagctaaagctggaaaatgtgaaactcattgtgcgaaactgcccatattcctttgcattttctttattgtaattatttttacctttatggccggtactcctataactgtgtctatcctaaggtgtgttaatcacagacaacggtccctagccttgggaatacaatttatggtccttcgattattagggacaattcctggaccaattatatttggtttcacaatagacagcacatgtattctttgggatataaatgattgtggaattaaaggagcttgctggatttatgataacatcaagatggcccatatgctagtagccataagtgttacttgtaaagttatcaccatgttcttcaatggatttgcaatctttttgtataaaccacctccatcagccacagatgtgtcatttcataaagagaatgcagttgtgactaatgttttagcagaacaggatctcaacaaaatagtaaaagaagggtgaaatgggaaaagagaagactgttttacacctggaaaatttacctcgatttttaagaacacacattgccatggcaggattatctatccaatatggacaatcatatttacaaaattgatgtttttataatcaaatgtatttttttacttatgtagtttttgttttatgcaagaaacagacctgtgccttcaaagcccacgtaaagcctcaaaacacagcacacacacacacgagcacacacacacacacacacacgaacacacacacacacacacacacacgcacacatacacacttatttcctattcccattgtctaggtatgaaatcctcaagcaataacaagaaaaaaggcccacaattagaaaaatttacatttaaaaaaaatgttgtttctatccccattacaacttgtttaattttaattttcattgtcaatattttgagcttagaacatttatggtataaaaatttaaactaatcaaagttgtgtgatgatttccgggaattattattgaaagcctatgaatttaaaaccaggtttaccatgtaatttgtttttaaatttatgtatactagcctggcctttctccaagcaaattattgaactattagaatatgttagttatcatccttgtgtcttagtatatagtgaatacagaaacatcagcattgtatacacatattttcactttaactcaagaattccaggaggtaatttgttgatattacaatttttaacacatttatgattctgtgataatattattcaattgcatatatttcagaggaaagtaccagtcagtaaagaaaaatgccaactaaacatgaaactattgatcaatacttatatacctttaatttttcctatttgaaaggccaaccacttaacacattactcatagcacctaagacagtgccttgcatagtgtagtcatctattattattgtttaattagaatattaaaccctaccctttaactcagcagtccccaaccttttttgcatcagggaccatttttgtggaagacaatttttccatgggggaagaaggtatggttttgagatgaaactgctccacctcagaccatcaggcattagttagattctcgtaaggagagtgcaacctagatcccttgcatgtgcagttcccaatggagtgtgcactcctatgagaatctaatgccactactgatctaacaagaggtggagctcaggcagtaatgctcactcacctgcctctcagctcaccaactgtgtggcccgattcctaacaggccacacacagcccagggctggggacccctgctttaactgatgcattgatttgataaagtattttacaagcctgataatgttataaccctatttattcaggtcagatttatgccaactttgctgagaatatggagggtatagatgagtgaacatcaacaaacataacttctaccatggttaagaattttacttaggaaaagtattgaagttcaaatccagatagtattacatttgaaattgttataagggttattaatttaataaaattcatcatcaggtttcccctataagctttctcctaggttaattttccacaagcattgttttatatacactgtaatcaggataacacaagcttagtgttagatcttgtaggaaaccaagattagaaacattagaaatttgcagaatttaagaaattatgttttgtggtaatctatggccaacgatgttagaacctagcgcaattgtaaagtgaaattcaaggagaaggaatgaggagttagggaagcagcatacttgaatattagagaaggagaggagctgtgggtcaggaatcagagagacctgctaaaaccagacagatataaacaccaaagatggaagccaaataggtagccaaaaatccagatatttgagaagcaggaaatttatagcaaccaaagaaatagggcaagagaggcaggtgaacacacatgatacctcaattgacaatcttcctcccaccaagccagacacgttgtaaatgctgcttcctattggagcccagaaaaaaggaaagtttaggctttctttgtcctttgtgtggaagcagggaattggattgaagactttcatagttgtaacataaaggcaaatcctgaggaactcactgatggagatgtgaaatggcagtaaggaagaaaacagaataactgaacaaatatattagtctagggccacttaatttagaggaagaaaaaaaatcaacccatccatagaaatagtttgataaacaggtcactaaatcattggcgtttataaagattcttagctatcaagggctgcattgtattttatatactcagttttataaggtgatactttttaaataagcgctttaatgaaaatggttagactgaaaataattttggtccttaaaaggagtcaggagcttttatatataaggtacatattttaaaagaatacctcctttataacagggttttacagacactaccataatttataatcattattttttacttttgggttcacctagatcatatgagttgatgtgatacttctagaacaaaattattcatagtgcgttttttgtaatttatgattgttaagtaagcttgacttataaattgacattgtaattgtgtacataattggatatatgtgttaaaatttaacatttagatttacttaattgtagaaaatacaaatgtaaaacttacacatggaaagaactgtatgcagttgactttactatgtaaattggagggaaacaaagttttagatccattttctttcaaaattttctttattgtaaagtatgcaaaatatatattcataccatttattaaatcagaatgtttatac

SEQ ID NO: 1737 - DNA, 3481 bp, Homo sapiens
cagatgcagaccaagatgcagaaaggcacccttctcaggccgcaggtgtccaggcaggtgtcagaggtgcagcccgtgcacaccggggaccctatccatcctgtctagttgggaggactaggagttccacatgtgggaccctcagttcctgctgccttcagaaccaggcccaacccttgctgtgacctcgagggctgccacttttcagagtgcactgggcctgtctccacccatagaccatactgccacatctgtacctcgggcaccaatctctccccaccacaggggcctgtgcctgagatggtccctctacagaaatacctgctcctggcatggctggcttcttgccaattctggatctccagctgccaccccagagaggcactggcttccctgtttaaagagggtccccccatcacccatcttcacagcagactgtttgcttggctgtgtgccccttcagacccacacccattacctccccctctcccccatcctcccaccctcttccaaaggctgaacacacaggagggattgggaaatttgttgaacaaagaagttacacataagccctgatgtgttagcaggacagtgagatgaacaaaacgttctggaaagtgggtgtgagggtcagatgtggagggagtgaaatcttcccagggagagaatgtctctgggtcaacctgctcctgctgggctgggagggccgaacaccccccacccatcaccccaggctggccctgaccccagccttccctgtgcctgcagcaccggcagctgctgaaggacagcttcatggtggagctggtggagggggcccgcaagctgcgccacgtcttcctgttcaccgacctgcttctctgcaccaagctcaagaagcagagcggaggcaaaacgcagcagtatgactgcaaatggtacattccgctcacggatctcagcttccagatggtggatgaactggaggcagtgcccaacatccccctggtgcccgatgaggagctggacgctttgaagatcaagatctcccagatcaagagtgacatccagagagagaagagggcgaacaagggcagcaaggctacggagaggctgaagaagaagctgtcggagcaggagtcactgctgctgcttatgtctcccagcatggccttcagggtgcacagccgcaacggcaagagttacacgttcctgatctcctctgactatgagcgtgcagagtggagggagaacatccgggagcagcagaagaagtgtttcagaagcttctccctgacatccgtggagctgcagatgctgaccaactcgtgtgtgaaactccagactgtccacagcattccgctgaccatcaataaggaaggtgggcccccccgtttccgtgtacagggcacctgcagggagggcaggcagctagcctgaaggctgatccccccttcctgttagcacttttgatgggactagtggactttggttcagaaggaagagctatgcttgttagggcctcttgtctcctcccaggagtggacaaggtgggttaggagcagtttctccctgagtggctgctgctgggtggttgaggagatgcacggcttctgttcctagtcacaaggctgcagcagacgctcctcagatgctctgtgccttggatctggccccactcccgtcctcccagccctcctctcctccagctacctgccagccggcacttttggtcaagctgttttgcattcactgttgcacatatgctcagtcacacacacagcatacgctatgcacatgtgtccacacacaccccacccacatcccacatcaccccgaccccctctgctgtccttggaaccttattacacttcgagtcactggtttgcctgtattgtgaaaccaactggatcctgagatccccaagacagaaatcatgatgagtatgtttttggcccatgacactggcttaccttgtgccaggcagatggcagccacacagtgtccaccggatggttgattttgaagcagagttagcttgtcacctgcctccctttcccgggacaacagaagctgacctctttgatctcttgcgcagatgatgagtctccggggctctatgggtttctgaatgtcatcgtccactcagccactggatttaagcagagttcaagtaagtactggtttggggaggagggttgcagcggccgagccagggtctccacccaggaaggactaatcgggcagggtgtggggaaacagggaggttgttcagatgaccacgggacacctttgaccctggccgctgtggagtgtttgtgctggttgatgccttctgggtgtggaattgtttttcccggagtggcctctgccctctcccctagcctgtctcagatcctgggagctggtgagctgccccctgcaggtggatcgagtaattgcaggggtttggcaaggactttgacagacatccccaggggtgcccgggagtgtggggtcccagccaggagggctgtcagcagtgcaccttcaccccacagcagagcagatttggctgctctgtcgagctggatggatactactttttttttcctttccctctaagtgggggtctcccccagctactggagctgtcagaacagtgaaggctggtaacacatgagttgcactgtgtaagtttctcgaggccgggcgcagtggctcatgcctgtaatcccagcactttgggaggctgaggcaggtggatcgcttgagctcaggagttggagaccagcctgaccaacatggtgaaaccctgtgtctactaaaaatacaaagattagccaggctaggcagtgggcacctgtaatcacaactgcttgggaggctgagggaagagaatcgcttgaacctccgcctcccaggttcaagcatttctcttgcctcagcttcccgagtagctgggattacaggcatgtgccactatgcccggctaacttgtatttttagtggagatggcgtttcaccatgttggccaggctggtcttgaagtcctgacctcaggtcatctgcccaccttggcctcccaaagtgctaggattacaggcgcgagccactgtgcccagcctattttttatttttatgggtacctattagatgtatatattaatggggtacataagatattttgatagagacatacaatgtgtaacaatcatgtcagggtaaatggagtatccgtcagctcaagcactgatgctttcttcatgtttcaaacaatccagttatactcttttagttatttttaaatgtataataaattgtagtcactccattgtcctatcaaatattagattttattaattctatctaactatatttttgtacccattaaccatcgctcattttctccacccccaactaccctttccagactctggtagccatcattctactctatctccacgggctcaattgttttgagttttagatcccacaaataaacgagaacatgtgaggcttg

SEQ ID NO: 1738 - DNA, 4128 bp, Homo sapiens
tttgagatcaaccggtctgaccaaaatttattaggcgggaatttcctcttcctaataagcctcacaggaccacaggactgaggcgaaattaaaattgctaatgaagttttgggcaccattgtcattgataacatcttatcaggagacagggttttgagatcaaccggtctgaccaaaatttattaggcaggaatttcctcttcctaataagcctaggagcgctatgggagactggagtctgttttagctctgcagcctcaaccataagagacaggcgcacctgggggggctgtttataagcctatacctccaggtgcgtattctctttctcagggatgttccatgctgagaaaaagaattcagcgatatttctcccatttgcttttgaaagaagagaaatacggctctgttatgcctggctcaccggcggtcagagtttaaggttatctctcttattccctgaacaattgttgttatcctgctcttttttcaaggtgcccacatttcatattgctcaaacacacatgctatataatttgtgtagttaacacaattatcacatggtcctgaggcgatatacatcctcctcagctgacaggattaagagattaaagtaaagacaggcataggaaatcacaagagtattgattggggaagtgataagtgtccatgaaatctttacaaattttatgtttagagattgcagtaaagacaggcataagaaattacaagaatattaatttggggaactaataaatgtccatgaaacctttacaatccatgttcttctgccatggcttcagctggtccctctgtttggggtccctgacttcctgcaacatagttaggtcagcgcagtggaaaataatgaagctggctgacttcttttcaaaccacacacaatttctgaagttaatgattcaacagctggagagttctgatggaaaaaacagtataactaaagaatttcctaggcagccctagctacttttaagtaggggcaaatgaaggatattcttaagtatacaggactcagtaaatgtaccaccccttttttatcatgaggttaccctgtctacatagttttatgcttttccgtctggaactcagttttgcttatgccctctaaatctagattttgtttcctttttgtttgtatatctctgatttgtctttgcctatcattttagtttaattatttaacttttagatatggctatgtaaatgtatttgaaaacctggatttttaagaatgatgtaaataagttcaagatgaggaaagacaaaaacctaacagactctagttataaaaaaattgaaacattattcgctaataaaagcaccagtgtagctctccctctccctctccctatccctctccctctccccacggtctccctctccctctctttccacggtctccctctgatgctgagccaaagctggactgtactgctgccatctcggctcactgcaacctccctgcctgattctcctgcctcagcctgccgagtgcctgcgattgcaggcgcgcgccgccacgcctgactggttttcgtatttttttggtggagacggggttttgctgtgttggccgggctggtctccagctcctaaccgcgagtgatccgccagcctcggcctcccgaggtgccgggattgcagacagagtctggttcactcagtgctcaatggtgcccaggctggaatgcagtggcgtgatcttggctcgctacaacctccacctcccagccgcctgccttggcctcccaaagtgccgagagtgcagcctctgcccggccgccaccccgtctgggaagtgaggagcgtctctgcctggccgcccatcgtctgggacgtgaggagcccctctgcctggctgcccagtctggatagtgaggagcgtctctgcccggctgccatcccatctaggaagtgaggagcgcctcttcccggccgccatcccatctaggaagtgaggagtgtctctgcctggcctcccatcctctgagatgtggggagcgcctctgccccgccgccccatctgggatgtgaggagcgcccctgcccggctgcgaccccgtctgggagagccttgcttcctgttttacatcacaaatctaaaaaaggacccccccgtcaagccaaatatgccattcattgtatccatgcgatattttctagtaaagagacccagtttgcacagatatttgagcctctgcataagagcctagatccaagcaacctggaacatctcataacaccattggttactattggtcacattgctctccttgcacctgatcaatttgctgctcctttgaaatctttggtagctactttcattgtgaaagatcttctcatgaatgatcggcttccagggaaaaagacaactaaactttgggttccagatgaagaagtatctcctgagacaatggtcaaaattcaggctattaaaatgatggttcgatggctacttggaatgaaaaataatcacagtaaatcaggaacttctaccttaagattgctaacaacaatattgcatagtgatggagacttgacagaacaggggaaaattagtaaaccagatatgtcacgtctgagacttgctgctgggagtgctattgtgaagctggcacaagaaccctgttaccatgaaatcatcacattagaacaatatcagctatgtgcattagctatcaacgatgaatgctatcaagtaagacaagtgtttgcccagaaacttcacaaaggcctttcccgtttacggcttccacttgagtatatggcaatctgtgccctttgtgcaaaagatcctgtaaaggagagaagagctcatgctaggcaatgtttggtgaaaaatataaatgtaaggcgggagtatctgaagcagcatgcagctgttagtgaaaaattattgtctcttctaccagagtatgttgttccatatacaattcaccttttggcacatgacccagattatgtcaaagtacaggatattgaacaacttaaagatgttaaagaatgtctttggtttgttctggaaatattaatggctaaaaatgaaaataacagtcacgcttttatcagaaagatggtagaaaatattaaacaaacaaaagatgcccaaggaccagatgatgcaaaaatgaatgaaaaactgtacactgtgtgtgatgttgccatgaatatcatcatgtcaaagagtactacatacagtttggaatctcctaaagacccggtactaccagctcgtttcttcactcaacctgacaagaatttcagtaacaccaaaaattatctgcctcctgaaatgaaatcatttttcactcctggaaaacctaaaacaaccaatgttctaggagctgttaacaagccactttcatcagcaggcaagcaatctcagaccaaatcatcacgaatggaaactgtaagcaatgcaagcagcagcccaaatccaagctctcctggaagaataaaggggaggcttgatagttctgaaatggatcacagtgaaaatgaagattacacaatgtcttcacctttgccggggaaaaaaagtgacaagagagacgactctgatcttgtaaggtctgaattggagaagcctagaggcaggaaaaaaacgcccgtcacagaacaggaggagaaattaggtatggatgacttgactaagttggtacaggaacagaaacctaaaggcagtcggcgaagtcggaaaagaggccatacggcttcagaatctgatgaacagcagtggcctgaggaaaagaggctcaaagaagatatattagaaaatgaagatgaacagaatagtccgccaaaaaagggtaaaagaggccgaccaccaaaacctcttggtggaggtacaccaaaagaagagccaacaatgaaaacttctaaaaaaggaagcaaaaaaaaatctggacctccagcaccagaggaggaggaagaagaagaaagacaaagtggaaatacggaacagaagtccaaaagcaaacagcaccgagtgtcaaggagagcacagcagagagcagaatctcctgaatctagtgcaattgaatccacacagtccacaccacagaaaggacgaggaagaccatcaaaaacgccatcaccatcacaacc

SEQ ID NO: 1739 - DNA, 4575 bp, Homo sapiens
ttctctaaccagattatctacctcttgatggcggtggtaaagtttcatgatatctgtacacatagtccccagcagcctctattactcctaacccatctacaaggagaaaaaaaccaaatcattaatatgacttggaagatactttttcatcttgctctggccacattgcgtttctcatccctccccattccttcacaggtactttactctgacatgcagaacaaggagcagctccctgaacacatcatgctctctctcgagtccttccctttctatatagtgttcttttcttctgaaataacctttttctccccagttaatttctacaagcctttcctaactcaacacatactacagtgcacttttcattcgacctagcagtatttattggggacctgctatgtgtcaggcactgttctgggggttgagattaagagaacaagatcgatcaagtccttctctcctggacgtttgattttagttgagagagacaagataataagcaaagaagaaaaatatcaaatagtgagacgtgctatataaaaagttaaaatagggtaatataggagtgacttgatactttagatagagtgatcagggaaatatctgataacaatcaaaatctgaatgacaaaaacagctgcattcactgcgtgatgattgtatgttaggtattgtttgaagtgctttacatgtgttagctcacttgatcctcagaacagccttttgcagttgttaccattatcctcatttgacaaagaagaaaactggggcactagagcccatgttctgaaccacatgctaaactgcctgccttatgaaaagacagtgaaaatgagaaaagagaattcagagtagagagaacaaccactgcaagtcccctaaggctggttggagcttggcgtgttaaaaaaaaagaatgccagtttggctgcaccctggagggcaaaggagagcatgggaagggaggtgacagagggaggcaggttccagatcacacaggacttgagtgagcagggaaattagtttagattttattctaagtgctatagtaaaccagttttggggttactgttctgtgacatggtttaggggctgccatgtttggtctccatcatactgttgcaattagatggcagctggggctggaggcatctgaagcctttttcactcacattctggttcttgggctgggataactggacctgctgggggctgtcgggcatctctctcactgaggagcttcttcatgtgacttggttgtgcttgcatacaacatagcaatctcgggctggttggactccgtacatgacagctgtcttctcctagcatgagcattccaggagacaggaagtaggagctgccagtcccttagagtctatgttgggaaactggcacaatgtcacttttgccatattctgttggtcaaaatagtcacagagccaggtgttattccaggggaggggacttagatgccacctctcagtgagaaaagtatcaaagaatttgtggcccgtccgggcacagtggctcacacctgtaatcccagcacttcaggaggccaagtctggcagatcacttgaggccaggagtttgagaccagcctggttaacatggcaaaaccccttctctacttaaaaaatacaaaaactagctgggcatggtggcacacatctgtaatcccagcttctcaggaggctgaggcacgaaaatcacttgaacccgagaggtggaggctacaataagccaagatcacgccactgtactcccgcctgggcgacagacagagcgagaccctgtcttaaaaaaagaaagaaaaaacaaatggaatttgtgggcatttttaggctaccagagatcacaatcttttttcacattttaaaaggctcattcttgctgctgggtaaagagtgactgggaaggggccagagaggagcagttagattgtcatcctttaggcttccccagcatcctgtgggtgtctttatcaatgcgtagcacacagttttgcagttatttgttttgcatgtctgttttctccactggactgaacttctgaagataaagactctctctcatctccatacccccaaaacctggcatctcattactagatgcttaataaatttgttttttttttttttttcagatggagtttcattgttgttgcccgggctggagtgcggtggtgcggtcttggctcaccacagcctccgcctactgggttcaagcaattctcctgcctcagcctcccaagtggctgggattgcaggcatgtgccaccacaccacacatattggtcaggctggtcttgaactcctgacctcaggtgatccacccgcctcggcctcccaaagtgctgggattacaggcgtgagccactgcacccagccaataaatgttttatgactcaaagaataattataaacagagggagaccaaagtattacaagtcattaaagaatatacttttagatattttcatactaattatatctaattgtgatataggcacaagatctagcttttaaagacttgcatttttcagataaaaaccctgagtattgctttagtattgtgatcctatctgaagacaggtttgttgaatcttaattcttgtttatagtattttattaccatttttttttactaagaacactgtcaaaactttttagtatttctttagaccatctcattcataaatcaacacttactgttgatgcctgttctgtgtgaaaccctcagtggaggaaatagcaaagaactagaagtcatggtctcatttgaaggactgtacttctaattcaataaaaaatgtagaaaacatcatttttagtatgaccaacatggagaaatcctgactctactaaaaatacaaaattagccgggcgtggtggtgcatgtctgtggttccagctgctcgggaggctgaggcgggagaggcacttgaacccgggaggcggagattgtcagccaagatggcgccattgcgctccggcctgggcaacaagagtgagactgtctccaaaaaaaaaaaaaaaaatcaaatcttctttataactgtaagaaaatagttatctacaactttttgcttgattttaacctaatatattcttttttttgtttttgtttttgtttttttgagacggagtttcacacttgttgcccaggcaggagtgcagtgatgcagtctcggctctcagtctctcagggtatcctgaagcagtttatgttgtttataccggcgatgttaatgtcaacggtcaacagatactagaaggtgctttcagaagatttaacatcagattaattcacccagtgcagtttgtttttttaaggaaacgctatcttgtggaagattcactgtatcctcacttcacactgctgggccaaagtctaggatccatttttcttggctgggaagctctaatgcagtgtgttcctgatgtttacattgattcaatgggatacgcttttacgcttcctctgtttaagtatatagggggttgccaagttggaagctatgttcattatcctactatcagcaccgacatgctctctgtagtgaagaatcaaaatattggatttaataatgcagccttcattaccaggaatccttttctcagcaaagtaaagctcatctactactatttatttgcttttatttatggacttgttggttcttgcagtgatgtagtcatggtcaattcttcttggacactaaaccatattctctcactatggaaagctgggaattgcactaacattgtttatccaccttgtgatgtgcagacatttctggacattcccttacatgagaaaaagatgaccccaggacatttgctggtttctgttggccagtttaggccggaaaagaatcatccattgcagatcagagcctttgctaaattgctgaataagaagatggttgagtcacctccttcgcttaaacttgtcctcattggaggttgtcgtaacaaagatgatgaacttagggtaaaccaactgagaaggctgtctgaggatttaggagttcaagaatatgtggaatttaaaataaacattccatttgatgaattaaagaattatttgtctgaagcaacaattggtctgcataccatgtggaacgagcattttgggattggagttgtggagtgtatggcagctggcacaattatccttgcacacaattcggggggcccaaagcttgacattgtggttcctcacgaaggagatataactggctttctggctgagagtgaagaagactatgctgaaactatcgctcacattctttccatgtctgcagaaaagagactccaaatcagaaaaagtgctcgtgcatctgtaagcagattctctgatcaggaatttgaagtgacattcctatcatctgtggaaaagttatttaagtaatgccatatctgtaaaattaaagatattttatataaactggttaaacaccttcatatgtaaatatttttctaaattcaatctcatttgtcaaatcattttactttagaaaacagacaaaatttccttttagaataaaaggaagtgttgaaaagaaaatgg

SEQ ID NO: 1740 - DNA, 4184 bp, Homo sapiens
atggtttcactcattggagccccataccaaccaccagcactcctgggacctccatagtgaacctgggaacctctgggatcccaccttccctccctgaaactacagccaccggccctctcctggtgccattcacactcaacttcaccatcactaacctacagtatgaggagaacatgggtcaccctggctccaggaagttcaacatcacggagagtgttctgcagggtctgctcaagcccttgctcaagagcaccagtgttggccctctgtattctggctgcagactgaccttgctcaggcctgagaaggacggagtagccaccagagtggacgccatctgcacccaccgccctgaccccaaaatccctgggctagacagacagcagctatactgggagctgagccagctgacccacagcatcactgagctgggaccctacaccctggatagggacagtctctatgtcaatggtttcacccagcggagctctgtgcccaccaccagcactcctgggactttcacagtacagccggaaacctctgagactccatcatccctccctggccccacagccactggccctgtcctgctgccattcaccctcaattttaccatcattgacctgcagtatgaggaggacatgcatcgccctggctccaggaagttcaacaccacggagagggtccttcagggtctgcttatgcccttgttcaagaacaccagtgtcagctctctgtactctggttgcagactgaccttgctcaggcctgagaaggatggggcagccaccagagtggatgctgtctgcacccatcgtcctgaccccaaaagccctggactggacagagagcggctgtactggaagctgagccagctgacccacggcatcactgagctgggcccctacaccctggacaggcacagtctctatgtcaatggtttcacccatcagagctctatgacgaccaccagaactcctgatacctccacaatgcacctggcaacctcgagaactccagcctccctgtctggacctacgaccgccagccctctcctggtgctattcacaattaacttcaccatcactaacctgcggtatgaggagaatatgcatcaccctggctctagaaagtttaacaccacggagagagtccttcagggtctgctcaggcctgtgttcaagaacaccagtgttggccctctgtactctggctgcagactgaccttgctcaggcccaagaaggatggggcagccaccaaagtggatgccatctgcacctaccgccctgatcccaaaagccctggactggacagagagcagctatactgggagctgagccagctaacccacagcatcactgagctgggcccctacaccctggacagggacagtctctatgtcaatggtttcacacagcggagctctgtgcccaccactagcattcctgggacccccacagtggacctgggaacatctgggactccagtttctaaacctggtccctcggctgccagccctctcctggtgctattcactctcaacttcaccatcaccaacctgcggtatgaggagaacatgcagcaccctggctccaggaagttcaacaccacggagagggtccttcagggcctgctcaggtccctgttcaagagcaccagtgttggccctctgtactctggctgcagactgactttgctcaggcctgaaaaggatgggacagccactggagtggatgccatctgcacccaccaccctgaccccaaaagccctaggctggacagagagcagctgtattgggagctgagccagctgacccacaatatcactgagctgggcccctatgccctggacaacgacagcctctttgtcaatggtttcactcatcggagctctgtgtccaccaccagcactcctgggacccccacagtgtatctgggagcatctaagactccagcctcgatatttggcccttcagctgccagccatctcctgatactattcaccctcaacttcaccatcactaacctgcggtatgaggagaacatgtggcctggctccaggaagttcaacactacagagagggtccttcagggcctgctaaggcccttgttcaagaacaccagtgttggccctctgtactctggctgcaggctgaccttgctcaggccagagaaagatggggaagccaccggagtggatgccatctgcacccaccgccctgaccccacaggccctgggctggacagagagcagctgtatttggagctgagccagctgacccacagcatcactgagctgggcccctacacactggacagggacagtctctatttcaatggtttcacccatcggagctctgtacccaccaccagcaccggggtggtcagcgaggagccattcacactgaacttcaccatcaacaacctgcgctacatggcggacatgggccaacccggctccctcaagttcaacatcacagacaacgtcatgcagcacctgctcagtcctttgttccagaggagcagcctgggtgcacggtacacaggctgcagggtcatcgcactaaggtctgtgaagaacggtgctgagacacgggtggacctcctctgcacctacctgcagcccctcagcggcccaggtctgcctatcaagcaggtgttccatgagctgagccagcagacccatggcatcacccggctgggcccctactctctggacaaagacagcctctaccttaacggttacaatgaacctggtccagatgagcctcctacaaccatggggtaccacctgaagaccctcacactcaacttcaccatctccaatctccagtattcaccagatatgggcaagggctcagctacattcaactccaccgagggggtccttcagcacctgctcagacccttgttccagaagagcagcatgggccccttctacttgggttgccaactgatctccctcaggcctgagaaggatggggcagccactggtgtggacaccacctgcacctaccaccctgaccctgtgggccccgggctggacatacagcagctttactgggagctgagtcagctgacccatggtgtcacccaactgggcttctatgtcctggacagggatagcctcttcatcaatggctatgcaccccagaatttatcaatccggggcgagtaccagataaatttccacattgtcaactggaacctcagtaatccagaccccacatcctcagagtacatcaccctgctgagggacatccaggacaaggtcaccacactctacaaaggcagtcaactacatgacacattccgcttctgcctggtcaccaacttgacgatggactccgtgttggtcactgtcaaggcattgttctcctccaatttggaccccagcctggtggagcaagtctttctagataagaccctgaatgcctcattccattggctgggctccacctaccagttggtggacatccatgtgacagaaatggagtcatcagtttatcaaccaacaagcagctccagcacccagcacttctacctgaatttcaccatcaccaacctaccatattcccaggacaaagcccagccaggcaccaccaattaccagaggaacaaaaggaatattgaggatgcgctcaaccaactcttccgaaacagcagcatcaagagttatttttctgactgtcaagtttcaacattcaggtctgtccccaacaggcaccacaccggggtggactccctgtgtaacttctcgccactggctcggagagtagacagagttgccatctatgaggaatttctgcggatgacccggaatggtacccagctgcagaacttcaccctggacaggagcagtgtccttgtggatgggtattctcccaacagaaatgagcccttaactgggaattctgaccttcccttctgggctgtcatcctcatcggcttggcaggactcctgggactcatcacatgcctgatctgcggtgtcctggtgaccacccgccggcggaagaaggaaggagaatacaacgtccagcaacagtgcccaggctactaccagtcacacctagacctggaggatctgcaatgactggaacttgccggtgcctggggtgcctttcccccagccagggtccaaagaagcttggctggggcagaaataaaccatattggtcgg

SEQ ID NO: 1741 - DNA, 4350 bp, Homo sapiens
gagtgcgcgctcctcctcgcccgccgctaggtccatcccggcccagccaccatgtccatccacttcagctccccggtattcacctcgcgctcagccgccttctcgggccgcggcgcccaggtgcgcctgagctccgctcgccccggcggccttggcagcagcagcctctacggcctcggcgcctcgcggccgcgcgtggccgtgcgctctgcctatgggggcccggtgggcgccggcatccgcgaggtcaccattaaccagagcctgctggccccgctgcggctggacgccgacccctccctccagcgggtgcgccaggaggagagcgagcagaagtcggccaagagcagccgcctcccagacatctttgaggcccagattgctggccttcggggtcagcttgaggcactgcaggtggatgggggccgcctggaggcggagctgcggagcatgcaggatgtggtggaggacttcaagaataagtacgaagatgaaattaaccgccgcacagctgctgagaatgagtttgtggtgctgaagaaggatgtggatgcttcctacatgagcaaggtggagctggaggccaaggtggatgccctgaatgatgagatcaacttcctcaggaccctcaatgagacggagttgacagagctgcagtcccagatctccgacacatctgtggtgctgtccatggacaacagtcgctccctggacctggacggcatcatcgctgaggtcaaggcacagtatgaggagatggccaaatgcagccgggctgaggctgaagcctggtaccagaccaaggtgtgaggccaccaggggcgtacttcctcctgccagggtccttggtggcagcttcccttactcctcaacttgtctcaagccttcagggcctgggtcccactgttctggcaggcaccagtggtttaagtctgtggtgctctgccctggagaaaatcccaagatgggaggacagggcagaggaaatagatatggattaatcattataatagctaaaatatggcaagtacttacacagtactaggctcatgtaattattgactcatgtaatccacagaacagccctattagataggcatcattattacccccattttgttttatttaatttaatttattttatttctattttttgagatggagtcttgctctgtcacccaggctgaagtgcagtggtgcgatcttggctcactgcaacctttgcctccctggttcatgtgatcctcgtgcctcagcctcctgagtagctgggactacaggtgtgcaccaccatgcctggctaattttttttgtattttgagtagagacgaggtttcaccatgctggccaggctggtctcaacctcctgacctcaggtgatccacctgcctcggcctcccaaagtgctgggattataggcgtgagacaccgcacccagcctattacccccatttaaagatgaggaaattgaggcacagagaggttaagtaatttgcctaactgcatacagctagtagatggaagagcagggactaaatcctgaatgtgagggccctagacctgggaggcttaatcatcacatctacttcatggtggcaggacagttgatggtgcaggggctgagggagcaggagtgggtgctggggtgaaccagtgttcctgaagaagggatcccgaggcaaggattgagaggtctgcccctgcagagatagagagtcattcatggtgcctgggtgagaacacaagtatgccaacaagaagacctgggttcaggccctcgttccatcactgattggctgtgtgatccctgggtggtgctttctcttctccgagactcactctcctcacctgtgaaatgggtgttctgggtgttgaatgggtgcgaatctcaaactctcagtgattctccagcagaagggcatggtgggagtggaagagccctggggtccatggggatgggactgcggagccttgtctgtcctccctgcctggcttggaggagaatgaatcccttcctcacactgctgtctggtctcctggcatcgggcaaaggttgatgggagtcagactgtccttccctgaaaatataagttgggaggggccttgggtggggagagggatgagttacctgtactcactgcccatctctctgccataactctctgtatggcccctccagtttgagaccctccaggcccaggctgggaagcatggggacgacctccggaatacccggaatgagatttcagagatgaaccgggccatccagaggctgcaggctgagatcgacaacatcaagaaccaggtgggacaagtcctcctggcttcccctgctacttggggcatgcaggggtggccagctgaggccaaactcaggatgtggagcaggaggttcccatctcccggccaaagctggtgccactgtctcagacccccttgtgagatctccagcacagaatgttcttggccaggtcctggcatgggctgatgggagaaaggtcctggatgtgcacagagcctgtggagggagactcaggctggctggccagaagaaagccaccactggttccacattgatactgagcactctgcttgcacctggttctggctgcagggcgctgtccctgggagctcatcattcattgcagggacagaggacagcagaagaccttataatgactcacatggccctttcccacccactccaacctcactttccacgattcccctcactctgctctggccatgctaacctgcttcctgcatcttgcatttgccaagaatggtcatgcttcagggcctttgcacttggcgttgcctccccctggaatgtggttctcccagctctgtccatggttgttgttttctcctccctggggtttaggaaaagaccccttctcagagacggcactctcaaacaccagcccctctatcggcagcctgtctgaagttctttgaagcccctgtcactctctgaaatgttctgtcttattcattaagtgattgatggtccctacctccactggaatataacagatgcctggagagcagggaccctgtctgtctggttcactgctcctctcttccagcacctggcacatggcaggggcacgggtctcagatgagagactgcctgggaggatgagctttgctggaagctggggttggaggtgttgatgggggaagggcccccagccctggctgagtagtgtgtggccagggtagctcagcctgtgcaggtgtctgcagtggagagagggggagggcacacatgtggaagcttcggaaagctgatttccagatgagctgtgggtggtggggggatgtgagggtgatttacccacaaatgtcctccccttggagccctgtgggcctgtttacaggagggcggaggctgccttggggcacagaggcagggccgtgagtcaccccatgaagtgggccagcttccaggccaggaggggaagcacagaataacaaatggtggtttcccaaaccctgcagcctctactacatccggttctcctctcacacaacagggcggatccaggcctatagccaggtgtctaccaccactgaggggcgtcatggggagctacaaggggtctccagaggcagcggggatggcgttggctctgggggcaccagtgtgacagggcagggcaccgagctgtggccgaggggcagagtgtcagagggcctcctggggaatgctgtctctggcagagaggcagactgcctccactgagggaagaggatctgaggatagagaatggccgcgtgccaagttggaggccgccattgccgaggctgtggagcgtggggagctggcgctcaaggatgctcgtgccaagcaggaggagctggaagccgccctgcagcgggccaagcaggatatggcacggcagctgcgtgagtaccaggaactcatgagcgtgaagctggccctggacatcgagatcgccacctaccgcaagctgctggagggcgaggagagccggttggctggagatggagtgggagccgtgaatatctctgtgatgaattccactggtggcagtagcagtggcggtggcattgggctgaccctcgggggaaccatgggcagcaatgccctgagcttctccagcagtgcgggtcctgggctcctgaaggcttattccatccggaccgcatccgccagtcgcaggagtgcccgcgactgagccgcctcccaccactccactcctccagccaccacccacaatcacaagaagattcccacccctgcctcccatgcctggtcccaagacagtgagacagtctggaaagtgatgtcagaatagcttccaataaagcagcctcattctg

SEQ ID NO: 1742 - DNA, 4038 bp, Homo sapiens
acagccgttcagaaggtcaagaggtggccgagctcagcgctggcttttaaagccctgtttcacactggaaaggtggcccagtgctgtggcctggcatgtccaggtggctctctgtcacgggtctggggtccacctgcttgccgtgctctgtgggcagggcaggctgggggcccacagaacagcacagaaggaaggctgggagcactggccccgggtccacctggccatcctggaatctggtggcaccagcgtccccaggcccagagcacaggaacaccttcccgagagtgcgtcatgggttttaaaaatgaagatcgtcttttttgtctggagatgctttttcttatttttgaaacccaacgtatatttttatgtatttttaagtaaaggggaatggaacccagttttgctaacaagataacccaaactgcccagtgcctggccttgtgtctggcgacctctgggcccttggcctccggagcaggtcctggggctggggtggtgtgaatgatgctggttcgtaacttttggttgagttaatgggcggcaggtttcagagcttatggagaccaggtccttcagtcatgcctgatgcccctggtcttccagaagcaaaaacagctcgggaatgcgaaggcaccggagtccaaagttggcagccaacaacaacaacaacaaaagaaaaggccgggcacggtggctcacgcctgtaatcccagccctttgagaggctgaggcaggtgggttgctggagcccaggagtttgagaccagcctgggcaacatggcaagatcccatctttacatgcctgggcgtggtggcgcgtgcctgtggtcctagctactctggaggctgaagtgggaggattcccttgagccaggaattggaggctgtagtgaagtatgattgcaccactgcactccagcctgggtgacagagtaagaccctgaatcacggacagagggtactgttgggagccctggggagaaatccatgctcttggctgaagctctgagatccttgttgctgtcagggtgctgccccccgccccccggggaggggcttttgtctttgcatcgcctgcttttccagatagtctaaaaaaagacttctgaagacaaggacgttcacgaggaaaaacttgccattttgagctttttaagcagttgctgaaagcttggcagactgcctcaatttttcctaagtaggcgtcaatgaagtcaggtccaggccttggtgtgtctggaatgcttcaagcacattcgaacacttgatcgtaagggagagccggtactttggaaccggaactcacccgaggctgtggccaccgcatgggcaggctagctgggggacaagccccatatctttgggaacaagggtttgcacagccaccctgggatgccctgggactcctgaccgcacaggaccccagcagggaggccgcctggattggagggtctggtctaacagccggacttggtcttgaaccgtcgccctgtcccgcacaggcgcctgctgagcctggagccctggcagaggcgggtctggggagtggagctgccgggaggcctcccatttctcacagccttggtgttctccgggtcacccagaggaccgtcaaatgctggatttgacaaactatgtagaatgttctttgtgtctttaagatcttcttgtggtcctatttggacattttgtgcattttcagacacctgcgggtcacgtgggtggatgggaagctgggcacctggtgaggggtgaggatgttgagagccggagctgcgttttgtctctgttgatgtggcgaggccctgggttggtcactgggatttttttttttttgagacggtgtctcgctctgtcgcccaggctggagtgcagtggcatgatctcggctcactgcaacatctgcctcccgggttcaagcgattctcctgcctcagtctcctgagtagctgggattacaggcgtcaccacacctggctaatttttgtatttttagtagagacagggtttcaccatgttggtcaggctggtcttgaactgatctcaggtgatccgcccgtctcggcctcccaaagtgctgggattacaggcgtgagccaccgcgcccggccggtcgttgggattttaacagccctgaggcccctcacgctgccaggtgccagcccaccctgcagccctgctcccctgcccacacgcagaagccaccagaggcttctggactgagcccccactgtcctgcagccgggctggcctgtccacaccacagggcgtgctcagctactgagcagaagcgtcacggacagggcagatcaggccaggacaaagctcttccgccacaggcgggggtctgaaggcatctcagagggcccccaaacaagggacgctgcctggaaaccccgggacaagatgacctcggttcagatcttagcaccttctggcaaccttagagaaagcttctggagggaggggctggttcccaggatgggcagaagccggaaagtctcagactgagtgaccctcgggggcttcagaaggcactgggtgggctctgccagagtgagaaggcagctgatggctgctggagccagccccgggagtgggggtccagctatggtctggagagggggacttgagggttgcagtggccacacagacggggcacaggagccaaaggaagggacacagcaaagcccaagggtaaaacggcgcgccgtggactggtctgagggcagaggctgtaggggagcgaggggcggtgtggctgacaggtggacacagggacacgtgtcctgtggacttggccgctcagtgggggtgtgtcccccagcagtggcgtgtgagggatggtcactctgatgggacactgaccacttggcctccagcaagatctaggcccaagtctaggctgaagccgcccactcagccccgggacatcgtccccggcagctctgctgagcacgccagctccggcactctccgggagtcatggccggaagtcaactgtcctggcttccagggccacaccttggccaggcctggtgatggtcatttccagccgctccagttgggctgatggggccacatgaggccggggatagaaggtggctgcgctcagacacccctcccggccccactggatgcccagggcgctgacctgcaggactcggatgggttttctcctgccacccctgcctggccggccaccatcccagcgccagcgccctcctgagaggtgcaggggccgcgtggggcctcccagagtggcaggttggcagcctgcacgccggtgacggcgtccttctccgtggtgaggcttggtccctcctcgccagaaacaccaattctctgacgtgagctgcacatccactgcccagccatgtttactcttctgcctcctgtagacgcagccgcggcggctctccctggcaggccacccgccgtcctgccttttctccgggtcaggccgcctgtctgccgggctccacgatgagcgcgttctcaagctgagcaggcgccagaatcccatagagaggcttgttgagacacagcttccccacccccagctcggacgcaggggcctggcgtggcctcctcacgggcacggtgtggagacaccatggcggttaccgtggtctgccgggtgcatgagcccctggggtggccccgtcccttgtttctgaccagccggatcctctccagcggcaggagcagagagggcccggaggtccagacggtgctctctgcggccagcatgccgcggaggtggccgagtgagtgtggcccctcccttgcaggctgacccagctggatgttgacagccacctggcccagtgcttggccgaaagcacagaagacgtgacgtggtgagcgccatccaagagccctgcgcagagtgcagcgcccggacacgctctcccccgccagcagccccgcctctcggctcccccgccagcagccccgcctctcggctcccccgcatgcgcattaaagcagggcgggctcctgtctgtctctgtgttgtgatgaaacgtc

SEQ ID NO: 1743 - DNA, 3856 bp, Homo sapiens
agtacaccctcctccagctccaggtgaatggcgtcctgcccatcctccccctgctctttccagtcctctgggttctggcaactgcctgtggagaggcccgtgtcctggcccagatgagcaaggcctcacccagctccctgctggctaagttctcagaggatactctcagcagctatacggaggctgtctcctctcaggaaatgctgcgctgcatttggggccacttcctgagggtgctcggggggacatcgccaacgctgagccacagttccagcctgctgcacagcctgggctctgtcacggtcctgtgctgtgtggacaaacaggggatcctgtcatggccaaatcccagcccagagactgtactgttcttcagcgggaaggtggagccccctcacagcagccatgaggacctcaccgatggcctatccacccgctccttctgccatcccgaggtagaggaggagccccatgaacgagacgccctcctggctggctccctgaacaacaccctgcacctttccaatgagcaggagcgtggcgactggcctggcgaggctcccaagccccccgagccctattcacaccacaaagcgcatggccgcagcaaacacccatctggctccaacacccagcctgggatggagagcgacccctacgaagcagaggactttgtgtgtgactaccacctggagatgctgagcctgtcccaggaccagcagaacccctcctgcatccagtttgatgactccaactggcagctgcacctcacctccctcaaacccctgggcctcaatgtgctgctgaacctgtgtgatgccagcgtcaccgagcgcctgtgccgattctccgaccacctgtgcaacattgccctgcaagagagccacagcgccgtgctgcccgtccatgtgccctggggcctctgcgagcttgcccgcctcattggcttcactcctggggccaaggagcttttcaagcaggagaaccatctggcgctgtaccgcctccccagtgccgagacaatgaaggagacatcgctggggcggctctcctgtgtcaccaagcggcggcctcccctcagccacatgatcagcctcttcattaaagacaccaccaccagcacagagcagatgctgtcccatggcaccgctgatgtggtcttagaggcctgcacagacttctgggacggagctgacatctaccctctctcgggatctgacagaaagaaagtgctggacttctaccagcgagcctgcctgtctgggtattgctctgccttcgcctacaagcccatgaactgcgccctgtcctctcagctcaatggcaagtgcatcgagctggtacaggtgcccggccaaagcagcatcttcaccatgtgcgagctgcccagcaccatccccatcaagcagaacgcccgccgcagcagctggagctctgacgaagggatcggggaggtgctggagaaggaagactgcatgcaggccctgagcggccagatcttcatgggcatggtgtcctcccagtaccaggcccggctggacatcgtgcgcctcattgatgggcttgtcaacgcctgcatccgctttgtctacttctctttggaggatgagctcaaaagcaaggtgtttgcagaaaaaaatgggcctggagacaggctggaactgccacatctccctcacacccaatggtgacatgcctggctccgagatccccccctccagccccagccacgcaggctccctgcatgatgacctgaatcaggtgtcccgagatgatgcagaagggctcctcctcatggaggaggagggccactcggacctcatcagcttccagcctacggacagcgacatccccagcttcctggaggactccaaccgggccaagctgccccggggtatccaccaagtgcggccccacctgcagaacattgacaacgtgcccctgctagtgccccttttcaccgactgcaccccagagaccatgtgtgagatgataaagatcatgcaagagtacggggaggtgacctgctgcctgggcagctctgccaacctgcggaacagctgcctcttcctccagagcgacatcagcattgccctggatcccctgtacccatcccgttgctcctgggagacctttggctacgccaccagcatcagcatggcccaggcctcggatggcctttctcccctgcagctgtcagggcagctcaacagcctgccctgttccctgacctttcgccaggaggagaccatcagcatcatccggcttatcgaacaggctcggcatgccacctatggcatccgtaagtgcttcctcttcctgctgcagtgccagctgactcttgtggtcatccagttcctttcttgcctggtccagctgccgccactcctgagtaccaccgacatcctgtggctgtcctgcttttgctaccctctgctcagcatctctctgctcgggaagcccccccatagctccatcatgtctatggcaacggggaaaaacctccagtccattcccaagaagacccagcactacttcctgctctgcttcctgctcaagttcagcctcaccatcagctcctgcctcatctgctttggcttcacactgcagagcttctgtgacagctcccgggaccgcaacctcaccaactgctcctccgtcatgctgcccagcaacgacgacagggctccagcctggtttgaggactttgccaatggactgctgtcggctcagaagctcacggccgccctgattgtcctgcacactgtcttcatttccatcacccatgtgcatcgcaccaagcccctgtggagaaagagccccttgaccaacctctggtgggccgtgacagtgcctgtggtgctgctgggtcaggtggtccagacggctgtggacctgcagctgtggacacacagggacagccacgtccactttggcctggaggacgtgcccctgctgacatggctcctgggctgcctgtccctggtccttgtggtggtgaccaatgagatcgtgaagctacatgagattcgggtccgagtccgctaccagaagcgacagaagctgcagtttgaaactaagctgggcatgaactctcccttctgagccactggctgtggtggctgtagttgcccccgtccctggggctaaagccagacccatttctgaacaggggagtttgtatcatgaatgtttccaggtttgctcctgcacccgtggcactggaaacccagctccccgtgtcagaccccgctgtcttcctgagccctggggctcactgtggaggagctgacggcctgggcccttggccagtcctggctcttccctgggcctcaccagggacactcttgaatgtatggcctcaggcgctccctagagggggcctaaaccccctcacctgtgagctaccccctttagggatcccttgcccccttggagatcccttgccccccagtgcctctgctcgtgggtccctggacacggccttgaagccaaccttctttggaggagcaacagcagcagccttggccgacgcgtccaactcccaaggctgccgtggagggcaggggggtggtgcttgcctggatgtggccccgagtgcctcccctccctccctctgtgggggagtctcccgcctgaacctgaagatggagcagggcccccgcttcgccctggagcctcttcctgtgcctggctcaagctggctgcctgtcagtcttggggaatctggcccaggtctcctcagcctctgccccagttctgggagaagtttctactggtgtatattttttactggaaatgagccttttaggaatgaatgtagactggtttgtattaaaatgtgtcaattgctaag

SEQ ID NO: 1744 - DNA, 5459 bp, Homo sapiens
ctggcaacctctgggactccatcctccctgcctggccacacagcccctgtccctctcttgataccattcaccctcaactttaccatcaccaacctgcattatgaagaaaacatgcaacaccctggttccaggaagttcaacaccacggagagggttctgcagggtctgctcaagcccttgttcaagagcaccagtgttggccctctgtactctggctgcagactgaccttgctcagacctgagaaacatggggcagccactggagtggacgccatctgcaccctccgccttgatcccactggtcctggactggacagagagtggctatactgggagctgagccagctgaccaacagcgttacagagctgggcccctacaccctggacagggacagtctctatgtcaatggcttcacccatcggagctctgtgccaaccaccagtattcctgggacctctgcagtgcacctggaaacctctgggactccagcctccctccctggccacacagcccctggccctctcctggtgccattcaccctcaacttcactatcaccaacctgcagtatgaggaggacatgcgtcaccctggttccaggaagttcaacaccacggagagagtcctgcagggtctgctcaagcccttgttcaagagcaccagtgttggccctctgtactctggctgcagattgaccttgctcaggcctgaaaaacgtggggcagccaccggcgtggacaccatctgcactcaccgccttgaccctctaaaccctggactggacagagagcagctatactgggagctgagcaaactgacccatggcatcatcgagctgggcccctacctcctggacagaggcagtctctatgtcaatggtttcacccatcggaactttgtgcccatcaccagcactcctgggacctccacagtacacctaggaacctctgaaactccatcctccctacctagacccatagtgcctggccctctcctggtgccattcaccctcaacttcaccatcaccaacttgcagtatgaggaggccatgcgacaccctggctccaggaagttcaataccacagagagggtcctacagggtctgctcaggcccttgttcaagaataccagtatcggccctctgtactccagctgcagactgaccttgctcaggccagagaaggacaaggcagccaccagagtggatgccatctgtacccaccaccctgaccctcaaagccctggactgaacagagagcagctgtactgggagctgagccagctgacccacggcatcactgagctgggcccctacaccctggacagggacagtctctatgtcgatggtttcactcattggagccccataccaaccaccagcaccaccggccctctcctgatgccattcacactcaacttcaccatcactaacctacagtatgaggagaacatgggtcaccctggctccaggaagttcaacatcacggagagtgttctgcagggtctgctcaagcccttgttcaagagcaccagtgttggccctctgtattctggctgcagactgaccttgctcaggcctgagaaggacggagtagccaccagagtggacgccatctgcacccaccgccctgaccccaaaatccctgggctagacagacagcagctatactgggagctgagccagctgacccacagcatcactgagctgggaccctacaccctggatagggacagtctctatgtcaatggtttcacccagcggagctctgtgcccaccaccagcactcctgggactttcacagtacagccggaaacctctgagactccatcatccctccctggccccacagccactggccctgtcctgctgccattcaccctcaattttaccatcactaacctgcagtatgaggaggacatgcatcgccctggctccaggaagttcaacaccacggagagggtccttcagggtctgcttatgcccttgttcaagaacaccagtgtcagctctctgtactctggttgcagactgaccttgctcaggcctgagaaggatggggcagccaccagagtggatgctgtctgcacccatcgtcctgaccccaaaagccctggactggacagagagcggctgtactggaagctgagccagctgacccacggcatcactgagctgggcccctacaccctggacaggcacagtctctatgtcaatggtttcacccatcagagctctatgacgaccaccagaactcctgatacctccacaatgcacctggcaacctcgagaactccagcctccctgtctggacctacgaccgccagccctctcctggtgctattcacaattaacttcaccatcactaacctgcggtatgaggagaacatgcatcaccctggctctagaaagtttaacaccacggagagagtccttcagggtctgctcaggcctgtgttcaagaacaccagtgttggccctctgtactctggctgcagactgaccttgctcaggcccaagaaggatggggcagccaccaaagtggatgccatctgcacctaccgccctgatcccaaaagccctggactggacagagagcagctatactgggagctgagccagctaacccacagcatcactgagctgggcccctacaccctggacagggacagtctctatgtcaatggtttcacacagcggagctctgtgcccaccactagcattcctgggacccccacagtggacctgggaacatctgggactccagtttctaaacctggtccctcggctgccagccctctcctggtgctattcactctcaacttcaccatcaccaacctgcggtatgaggagaacatgcagcaccctggctccaggaagttcaacaccacggagagggtccttcagggcctgctcaggtccctgttcaagagcaccagtgttggccctctgtactctggctgcagactgactttgctcaggcctgaaaaggatgggacagccactggagtggatgccatctgcacccaccaccctgaccccaaaagccctaggctggacagagagcagctgtattgggagctgagccagctgacccacaatatcactgagctgggcccctatgccctggacaacgacagcctctttgtcaatggtttcactcatcggagctctgtgtccaccaccagcactgccagccatctcctgatactattcaccctcaacttcaccatcactaacctgcggtatgaggagaacatgtggcctggctccaggaagttcaacactacagagagggtccttcagggcctgctaaggcccttgttcaagaacaccagtgttggccctctgtactctggctgcaggctgaccttgctcaggccagagaaagatggggaagccaccggagtggatgccatctgcacccaccgccctgaccccacaggccctgggctggacagagagcagctgtatttggagctgagccagctgacccacagcatcactgagctgggcccctacacactggacagggacagtctctatgtcaatggtttcacccatcggagctctgtacccaccaccagcaccggggtggtcagcgaggagccattcacactgaacttcaccatcaacaacctgcgctacatggcggacatgggccaacccggctccctcaagttcaacatcacagacaacgtcatgaagcacctgctcagtcctttgttccagaggagcagcctgggtgcacggtacacaggctgcagggtcatcgcactaaggtctgtgaagaacggtgctgagacacgggtggacctcctctgcacctacctgcagcccctcagcggcccaggtctgcctatcaagcaggtgttccatgagctgagccagcagacccatggcatcacccggctgggcccctactctctggacaaagacagcctctaccttaacggttacaatgaacctggtccagatgagcctcctacaactcccaagccagccaccacattcctgcctcctctgtcagaagccacaacagccatggggtaccacctgaagaccctcacactcaacttcaccatctccaatctccagtattcaccagatatgggcaagggctcagctacattcaactccaccgagggggtccttcagcacctgctcagacccttgttccagaagagcagcatgggccccttctacttgggttgccaactgatctccctcaggcctgagaaggatggtgcagccactggtgtggacaccacctgcacctaccaccctgaccctgtgggccccgggctggacatacagcagctttactgggagctgagtcagctgacccatggtgtcacccaactgggcttctatgtcctggacagggatagcctcttcatcaatggctatgcaccccagaatttatcaatccggggcgagtaccagataaatttccacattgtcaactggaacctcagtaatccagaccccacatcctcagagtacatcaccctgctgagggacatccaggacaaggtcaccacactctacaaaggcagtcaactacatgacacattccgcttctgcctggtcaccaacttgacgatggactccgtgttggtcactgtcaaggcattgttctcctccaatttggaccccagcctggtggagcaagtctttctagataagaccctgaatgcctcattccattggctgggctccacctaccagttggtggacatccatgtgacagaaatggagtcatcagtttatcaaccaacaagcagctccagcacccagcacttctacctgaatttcaccatcaccaacctaccatattcccaggacaaagcccagccaggcaccaccaattaccagaggaacaaaaggaatattgaggatgcggtgagaagggggtgctcaaccaactcttccgaaacagcagcatcaagagttatttttctgactgtcaagtttcaacattcaggtctgtccccaacaggcaccacaccggggtggactccctgtgtaacttctcgccactggctcggagagtagacagagttgccatctatgaggaatttctgcggatgacccggaatggtacccagctgcagaacttcaccctggacaggagcagtgtccttgtggatgggtattctcccaacagaaatgagcccttaactgggaattctgaccttcccttctgggctgtcatcctcatcggcttggcaggactcctgggactcatcacatgcctgatctgcggtgtcctggtgaccacccgccggcggaagaaggaaggagaatacaacgtccagcaacagtgcccaggctactaccagtcacacctagacctggaggatctgcaatgactggaacttgccggtgcctggggtgcctttcccccagccagggtccaaagaagcttggctggggcagaaataaaccatattggtcgg

SEQ ID NO: 1745 - DNA, 4596 bp, Homo sapiens
tttattatagtccaaaagtatccagagctgtccagttttgccaacttgaaataattctttttacttcaagataaagccaatatttaacatttctgtctggcaccgattgaatcaaaatgtcaggggctcaacttttgtgactttcagcatcaccttctttgtctccctcaggaaattctgtgtaaaagggcagttcaacacctgcccaattcttagggattggagggaaatgctggcctgtagggtccaagggcctcagccaagggtagaggcctcacctcaggcaggatgtaaggtgggctccttccctctgccctccagctcctgctccacccacctctccagaccccttacagtagccattccctgtggccactgggggaagggaaccagcggacgctacttgacttggttcagctgccctctgtgcctagcctgccagcattgtcgagaggtaaagaacacagaacacacacccagcccgaccttctaggttgagttacaccttggagtgttccttttgggcagtgattgatgttgatttttgtatataagtgagtgagatgttgttacaattttcacagcacttagaacaaggtgttagatgttgtggcacctttgcctaattatggcatttgtgcagattgttctcagtcatgtaggtttagtctcaaaacatccactcctcctccctgtgtagacagaggtaagctgtggctgtggatgagagcatctgaatgaattgtatccatttcagatgttagctttaaaagctatagggtcatgttagaagtttggttcccgccaaatgagtaattttagagatctgcacatcagatctttatgggtcttggaaaaatgctcctcctcagttcaattttctgccgggaatgtgtttctaaggccctttaggtattgggcatcttcaggtttatgtggcacatgggtcattagggccataggccccatttctgcatcaggagggctgagtccagatgttctggtttaatatttatgagtggcttccattgaaatacctgtccttccgagagaagtgcccctaccccctgcctctctattccgggtgagtgagctgaaaactgcctcctgcttttctcattcacatgggattctttcagaacagagttttagataggtcttgaattgtgtttttgccttttgccataatcttgtgtctttggtagcaacagtcagggaagtgattgctctacccccatcactgtgccaagccacaggcttgggcggggccccgggatgacagccttcggtggttcagccactgtggctgtctggacaggcatcctcttcttccattcctgttccatgtgccccctcgcgatgctgtctgctcacttgaaggagatcttctcagatggagggtgtagctggtggagaccctggggaaaccttccccccaaatcacagggggtgtctggtactacttgctgtggttgggcctcctcactagtcctgctctctctcttcccatgcccagggcagcctgtcagaagccagaatggtagcaggcagagagaggcctcagtccagagggccatggaaagtggagtcatggagcacagtgcctgcagagctgctgtttttccctccctttgaaatcgagggctcatcctaaattgctcttcagtgccaacaagcaaagggacgcccacacaagttcttcagcattttgtacagatttactgaacgcaactcaggcatccttaaggaagctctgcagcttcctcctggaccagtatttcatgaaaatccagtaatcttgggctctaaggagcagggtagccagtcatgtgacttggcaggggaaagggctaaggttaaaccacatttagcaggcagattacattttcagccactttgccatgactcttcctctctctttttggggggtgagcatccttttaaccatattcccctatcccttatcctcctttatcccttcaaagcaccaaatgatatatagctgtagtaagcaaaaatctgttgaaatgtttttaaaattacatgctgctgaacgatagggccataaggaaagtgtagatatgggaatgtgtgtatgtgaatgagtcagtgaatttgattttttttatttgtacaaatgtatggggtacatgagaaattctgttacatgtatataatgcatgtgatcaggtcagggttagggtgtctgtcacccgagtgcagtacatttttgctaagtatagtcatcctactccactatctaacattgaatttattccttctatcttactatgtgtttataccctttaatccacttctcttcatcctcctccctctccacattcaccctcccagtctctctcttttcactctctacctccatgtgtttaaattatttagctcctgaatataagtgagaacatgggatatttgcctttgtgtgcctggtgtatttcacttaagataatgacttccagctccatccatgttgctgcaactgacatgatttcattctttttgactgaagagtattcctttgtgtatatatactacattttatttatccattcatcccttgatggacactgaggttgatttcatatctttgcttttgtgaatagtgccacaataaacatgcgaatgcaggcatccctttgatatattgactttttttcctttgggtagataccctgtggtgggattgctggatcaaatgataattcttagttttttgagaaatttccatagcggtttctatagtggctttcctagttgacattcccaccaacagtgggagtccttttctctgcatcctcgccaggatctgttatttttttgtctttttaacaatagccatactgactggggtaagatatctcattgtggttttgatttgtatttctctgatgattaatgatgttgagtattttttattcacctattgactgtacatcttcttttgataattgtctattcatgtcctttgccagtttttaataggattttttttttcctgttaagtaccttatgtactctggatatagtcccctgtcagatgagtgatttgcagatattttttcccatttggcaggttttctctttacctgtttgattatttcctttgctgtgcagaagcttttaatttagttaagtctcatttgtctatttttgtttttgttgcctgtgcttttgaggtcttagtcataaattctttgcctagatcaatgtccataagagttttccctaggttttcttgtagtattcttacagtttcaggtcttgagttgaagtcttgagtccattttgagttgatttttgtgtgtggtgaaagataggggtccagtctcactcttctgcatgtagcaggccaattctctgagcaccatttattgaagaggatttcctcttcccagtgtaagttctcattggctttgtcaaagatcagccggctgtgaatatatggctttatttgaatttgattttaatatataactttttaaaatctggggaaaaaagaattacatgctaccctgggtaataataccagagctgctgtcgtagttcagcaggtcagttctgtgtactcagtgttttcatcccttctggatgccaccgtccttggccctctctggaaaggcccttgttggtttctaagaaatgaggtagaggaagtgttaaggctggcctagctaacatgactataaatcctctgtgttttaaaactgctcatattgaaattatggaaaataatcttctgtagcagcctggactcatctctctccttacccagcttggatcccagaattcaatcagagagcaacccaaggttcatgacacttgtagtggtttctggaaacagatctgtgagtaccaagaaaagaggataaagattcatcccatccaccagtcattcccatgcacctctacccgccatcccctgtatccaggacaacccccttctgacaccaaaatgcatttcaccattggctgctgtcggtagataatacctgctcagcatttgggacaagttccagacataacttcctcttagtgaatgatcctgacaggagaaagaattgagcttaatttatgccatctaataacctcagtgcagctacttgggaagttagccctccagagtttcccccaaagttttctccagtgaattacagtgccatatattctcattgctaccagcgctgctcccaaaatctatctgctgtttaatagtttttacctttcaaaaatgcaagctggctgggcgtggatttttgaaagcattcctcctgccttggcctctcaaagtgctgggattagagggtgccttctaatcccagcaatccagcacttggaagggtcaaggcgggaggaatgcttgaagccaggagtgtgagaccagcctgggcaacatggtgagaccttgtctctacaaaaataaagtataaagaaacagctaggtgtggtgatgtgtgcttgtggttgcgctactggggaggctgaagcaggaggacctcttgagcccagaaggttgaggctgcagtgagctgggatcgcgccacagcgctccagcctggtgacagagcaagaccctgtctc

SEQ ID NO: 1746 - DNA, 4018 bp, Homo sapiens
gcggcggcggcggtcgctgtcgcggcggcgagagcgcgattccagaagcggcatcgcggcggcggcagcggcggcggctacaccgggcttggccccctccctcctccgttcccccctcctcccccctcccctcagcggtggctcccaagaagtccgagacacgcggatcaactcactatcctgaaggtccattctcccaagaagaggggacagaaagacagatctatttgtaagaaaggcttgggtatcccatgaacgagccaacagaaaaccgattggggtgcagcaggactccagagccagatataaggctcagaaaagggcaccaactggatggtacacgaagaggtgataatgacagccaccaaggagatttggagcccattttagaggcatctgttctatcttcccatcataaaaaaagctctgaggaacatgaatacagtgatgaagctcctcaggaagatgagggctttatgggcatgtcccctctcttacaagcccatcatgctatggaaaaaatggaagaatttgtttgtaaggtatgggaaggtcggtggcgagtgatccctcatgatgtactaccagactggctcaaggataatgacttcctcttgcatggacaccggcctcctatgccttctttccgggcctgttttaagagcattttcagaatacacacagaaacaggcaacatttggacacatctcttaggttgtgtattcttcctgtgcctggggatcttttatatgtttcgcccaaatatctcctttgtggcccctctgcaagagaaggtggtctttggattatttttcttaggagccattctctgcctttctttttcatggctcttccacacagtctactgccactcagagggggtctctcggctcttctctaaactggattactctggtattgctcttctgattatgggaagttttgttccttggctttattattctttctactgtaatccacaaccttgcttcatctacttgattgtcatctgtgtgctgggcattgcagccattatagtctcccaatgggacatgtttgccacccctcagtatcggggagtaagagcaggagtgtttttgggcctaggcctgagtggaataattcctaccttgcactatgtcatctcggaggggttccttaaggccgccaccatagggcagataggctggttgatgctgatggccagcctctatatcacaggagctgccctgtatgctgcccggatccccgaacgctttttccctggcaaatgtgacatctggtttcactctcatcagctgtttcatatctttgtggttgctggagcttttgttcacttccatggtgtctcaaacctccaggagtttcgtttcatgatcggcgggggctgcagtgaagaggatgcactgtgatacctaccagtctccagggactatgaccctaaaccagggcctgcggcacttgcgggcctccctgctggctactgatgccagtaccagaggagccccaaaactttgacagcctcgtgggctttgtgacggcccaggggctctgcgtggtacatgactgagaagagaaaaacaaaaataaatcatacctcaaaggatggagtgcatcaattgggagaaaaggagacatagcccaaaccctggcttattcttgggatctactgattgcgggctctgcaagacccttggcaaactggcttctgatccatatcatatttatttgtagaagatggcgaaacagtttagctggtggttctttcttctccctttctctctctctatgacaataatacaaaccaatttaagtgaacatttatatccgataaggggtgggagtgtgattttaaatgctcttttgggagaacaaagaaattaatgtaaataagatttctaactgtttaaataagactttatataaatgtttaaaacataggggtaagggagggagggagaatttttgtatagaatgaaacatgcaagtaccacacactgtttgaattttgcacaaaaagtgactgtaggatcaggtgatagccccggaatgtacagtgtcttggtgcaccaagatgccttctaaaggctgacataccttggaccctaatggggcagagagtatagccctagcccagtggtgacatgaccactccctttgggaggcctgaggtagaggggagtggtatgtgttttctcagtggaagcagcacatgagtgggtgacaggatgttagataaaggctctagttagggtgtcattgtcatttgagagactgacacactcctagcagctggtaaaggggtgctggaggccatggaggagctctagaaacattagcatgggctgatctgattacttcctggcatcccgctcacttttatgggaagtcttattagagggatgggacagttttccatatccttgctgtggagctctggaacactctctaaatttccctctattaaaaatcactgccctaactacacttcctccttgagggaatagaaatggacctttctctgacatagttcttggcatgggagccagccacaaatgagattctgacgtgtccaggtttctcctgagctcatctacatagattggtagacccttcctttggattaggaaagatgagttttacctctggtacactgtcttggtaagcctggatgtgacagacacctcggctctccttgaataagaaagccagcagaactcttaaagccagttgtagtacggagttgtcagcactcactgaacctcactttacagggataagagtggtgtggcattttaaatacaatggtatgttattgccagggagtgaggtacaagacgatggctcatgtcacaggcctacctgatacggtgtcagagaaagtggtggggaaaggatctggttcatggaattctgatcttggcccataggtgaaccaccaaaatagtgctcgagtcttaggttactgtcatcaaagacttgggatgactccattatatcctggggttgtgggtattagaactaaatatggaggtcctgagcatggggactggcgtcctcagtaggtgtttgggaatatgggaagggtctcctatttattcaatagagttttctcagttattttcctcccttgcccttgcaatctccagcaaaaggtgggatctaggaagaaagaatccagtgtagaagttgagaagaacttgaacgttttggttctggataaggtcactgtcctaggtgctaggtggaccgagcaaaagactcagtggatgaactggtgcagtgcctgacagaataaagaacagtattaatccctttgagaaagcacagtccagcaggacagtggccatttggacagaagcccacttagtttcttgggagcaacagcacgtatcagaagccagacttgctcttcggtcatgcactttgggatacagcgtataggtgcagccctgtctcaacaccaacagaagtagcagcctctgggtgcagtcacccacaccccaaagctggaaggatctggttcaacatagcacaaacccttaggaaaaatgaaattaacatcactgatgtgtaatccagtaaaatctccctttttcgggtgtgtatgtgggcatgtgcccatttctatgtgtgtgtctacgtgcagctcactaccaacagcctcatgtgcacttgacctgacagtgctcgctgagaactctcaccaggttggcgcctgaatgccttactctcagcagtcagaggcttgcttgctctgtgcagatttttaattttcttttttggccctaggctggttgggacctctacagcttcattctttcaccattaaatagtggcctttttcagtattttccctcttcccctttataaattatgctaaagccacaaagcacatttttggggatcatagaaggttggggttccagaaaggcatctgtgtgatggttccattgatgtgggatttccctacttgctgtattctcagtttctaataaaaagaaccaaatgaaatatg

SEQ ID NO: 1747 - DNA, 5386 bp, Homo sapiens
ttttttgctgtggcagctgctggagcggcggccgcctcgggagccggaggagaggcagccgcggagcgccgagctggcctcgccccgaggcccggccctgggtgtggggaaccgcgctgaggagctggaaactttcccggcaggagctgactgctgggcaggaacgtctctcaggagaaagagtggaagagaagattgtgaactaaggccccctgcccccttttcctggtgcatgtgaagttatcaaaaacagaaacaagtgttgaaaatgttaaaggctgtgctgaagaagagccgagagggaggaaagggaggcaagaaggaagcaggaagtgactttggtccagagacttctccagtcctgcaccttgaccacagtgctgactctcctgtgagcagtcttcccacagcagaggacacctatagggtgagcttggccaaaggtgtctcgatgtctctgccttcctcacctttgctgcctcgacagtctcacttggtgcaatcaagagtgaacaaaaaatccccaggtcccgtcaggaagcccaagtatgtggaaagccccagagtgcctggagatgcagttataatgccattcagagaagtagccaagccaacagagcctgatgagcatgaagcaaaggccgataatgaaccgagctgttcgccggcagctcaagaactgttgacaaggctgggatttttactgggagaagggatcccaagtgccacacacataaccattgaagacaaaaatgaaaccatgtgcacagctctgagtcaaggcatcagtccttgctccacactaacaagcagcaccgcatctcctagcaccgatagcccctgctcaaccttgaatagctgtgtcagcaagacggcagccaacaaaagtccctgtgagaccattagcagccctagttccaccctggaaagcaaggacagtggaattatagccacaattacaagttcatccgaaaatgatgaccggagtggctccagtttggaatggaataaagatggagaaggaacatgaagtagaagtcaatggcaccgacacattgtggggagaaacagccctgactgccgccgcaggaagagggaagctggaggtctgtgagctgctgctggggcatggagctgctgtgtcgcggacaaacaggagaggggttccacctttgttttgtgcagcacgccaggggcattggcagattgttagactgctgttggaacgcggctgtgatgtgaacctaagtgacaagcaaggccggacgcccctcatggtggctgcttgtgaagggcacttgagcaccgtggaattcctcctttcaaaaggtagcagcgtgatgccctcaaaggtttcttttggacggacacagagagaacttcagcagacccattcagtgctttctgattcaaattctaagttttctgttaatggaaattttctaataaacagtagagagaataggcaacacagccacatgcctggtattcctcttcagcagcgatgaccattctgccagcccatccggccagtgtcacccttcacagtgcttgactgacacttggttcaggccgggtgttccgcaggtgtgaaacaatttgctttctggctttgtcatctcataatgttcatgttctgtgaatgggctttcctttcaggtgcagccctttcttctctagacaaagagggtctgtcagcattaagctgggcttgtctgaaaggtcacagggcagtggtccagtatctggttgaagaaggagctgcaatagaccagacagacaagaatggccgcacacccttggacctggctgccttctatggcgatgccgagactgtgctgtacctggtggagaagggagccgtgatcgagcatgtggaccacagcgggatgcggcccttggacagagccatcggctgccggaacacatctgtagtggtggcgctactcagaaagggagccaagttaggaaatgctgcttgggcgatggccacttccaaacctgatatcttgattatacttttacagaaattaatggaggaaggaaatgtgatgtacaaaaaagggaaaatgaaagaggcagcccagaggtaccagtatgccttaagaaagtttcctcgagaaggattcggagaggacatgagacccttcaatgaattaagggtttccctctatctcaatttgtcgcgatgccgaagaaaaacaaatgactttggcatggcagaggaatttgcttccaaggctctcgaattgaagcccaagtcctatgaagccttttatgccagagcaagagcgaagagaaatagcaggcaattcgtggcagctctggctgacctgcaagaggctgtgaaactctgtcccaccaatcaggaagtcaagaggcttctggcccgcgtagaagaggagtgcaaacaactccagaggagtcaacagcaaaaacagcagggcccgctaccagctccactcaacgactccgagaacgaagaggacaccccaacccctggcttaagtgaccactttcactctgaggagactgaagaggaagaaacttctccccaggaagaatctgtttccccaactcccaggtcccagccatcctcatctgtcccttcctcatacatccgaaaccttcaagaagggttacagtccaaaggaaggccggtatcgccacagagcagggcaggaatcggcaagtccctgagagagcctgtggcccagccagggctgctcctgcagccctccaagcaggcccagatcgtgaaaaccagccagcacctgggctctggccagtcggcagtgagaaatggcagtatgaaagttcagatctcttctcagaaccctcctccaagtcccatgccagggagaatcgctgccactcctgctgggagcagaacccagcatttagagggaacaggtactttcactacaagagctggttgtggccactttggggatcggctgggccccagccagaatgtccgcctgcagtgtggtgagaatggccctgcacaccctttaccaagtaagacgaaaaccacagagaggcttctgtctcattcctccgtggctgtggacgcagcccctccaaaccaaggtgggctggcgacctgcagcgacgtgcgacacccagcttccctcaccagctcaggctcttctggttctccatccagcagcataaagatgtcaagttcaaccagtagtttgacttcgagcagcagtttttcagatggcttcaaggtccaaggaccagatactagaattaaagacaaggttgtaacccacgttcagagcggtacagctgagcacagaccccgcaacacgccgttcatgggcatcatggataagactgcgaggttccaacagcagagcaatcctccaagccgcagctggcactgtccggcaccagaggggctgctgacaaacacgtcttctgcagctggcctgcagtctgctaacactgagaagccctctctcatgcaagtgggaggatataataaccaagccaaaacctgttctgtttctaccctgagtgcaagtgtccacaatggggcacaagtgaaggagctagaagaaagcaagtgccaaattccagtccactctcaagagaacaggataactaagactgtttctcatctgtaccaggaaagtatctccaaacagcagcctcatattagtaatgaagcccacaggagccacctcactgcagccaaaccaaagcgatcatttatagagtcaaatgtgtgaaccttaagaaatccccatttgtggaatttggaaacgtgtgttgactcctggtggtaaattaaatagttttttttatcagaaaaattattttttagccattttttttctttggggtggatctgatgccattgatatatctaaaatgtgggataaaacttctctaatagctagaaatcaccataaataagaatgctaaacagaattgaaaattatatcaacttaaaattttaagacagcccagaagacattaatgactctcacttatgaaattgtttggcttttgccactttcttccttgcctttgctatatggtagaatcacagaacttacttagagaataaatatgtctattgttcaaaagtaacaggtttaactcatgaccaagtgatgtacatccaagtgatgtattctggaaacgatggaattttacagttacagttccattgagtcaaatcccattttatatatacataaaaattaagttctgagtgagttctagctaaatataagtgcgactgtaaacgcagccaatttttttaagcagaatatgagaacacctaagtattctcttcatagcagttcctataaagggattaaacacttatttctgtgttatggttcttattcatatatttttatagcacttttggaacctatatttgtgcttgaaggtgtttttgatatttggaaacagtataagccatttggagtcatgattggtggtcaagtggattcaagctaaaatactaagaccagcattcttagtggcgcttataaattagctctcacctggtttccaaactgcttttaacaatggtagtgctcctggaacaatccttccaagctcctctaaggacaatatttaattcagatactaaaggtaagactggttgttacttttgttttgttgtacaattagtactttatagtcacatgttgtatatattaaatagcccagttttattcagacttgtaaatagaactatttcaatgtagttaatctaaaaacaaaaaagaaaaccccagtcacgatttgcatgttctctgtaagcttcatccatgctggttattgcactgaatgatatattattagggcatgttaacagtataccagtaacagcactttatctcatttatatgaacacctttgaggtgctacttaagtccaagctctgatgtattattcatttgtaaagataaggtacaggaatgaaccttggtttaaaggtatttttatatgaaaatggtgtgttattggaagatgttaaaatgctaatttgagagaagtaggagtgtatctgttttatatgttgggatgtgaaatttattttctaaaattgaggagaaggaagttatatatttgcagaatgttttaaagtgaattgttgtaatgaagttcctgtgaacatcattatggttttgtacaaataggaacctctgatgtcattcttcaacgtttgttcctgtgtgtacaattgtactttgtatgaacagctttatcatttttataggctttccatgagttttgctgtaactactatggcttatttattttctttaatatttgtgaaagtcttactcctttgttagttttgtttctgcacaactactgtacttttccatatggaataaagactattaat

SEQ ID NO: 1748 - DNA, 3924 bp, Homo sapiens
ttaatgagcacttagtgacttcatttgttcaagaatatttgatttcctattgtgtgcatgggaggtttacaaaagacagactgtccctatgcttgtgcagcttacaatctatttaactattagaggccctgtgagatgtaggcagttatttacagatgagaaaactaacacagcagtggcaatgctgggaatggccaacaggcttggaattcaactcagtttagcaccaaagccagtgctattaagacctgaagttcaacagtggattccttaccaaatagtttttaaagtatgctctaaggaacaatgttttaatgaaatcttggatacaaagtggaataaaaggtttctgagcataaagtagctcttcagtagttacaacctattcttttgcatacatagcctttccttccctgcaaaaagttaagcctgctaagtattcagatccctgtcatttacttctcagcagtctcattcaagctaaggcttgcatactcaatctgtgccgtagtctacacatttttaggggatatttcaccaaaatacttgacatggtaacatcactattatatactagaagcaagaattttacacttatgctctaagtgatccttttaaaaattttctgaactatttgaggaaagtattatttgtcttaaagggtaacagcctcatgaaatgacttgaggattccaatttcttattagcttaagatgtcacttaaaagctgacagccctcatctgtctcattggctacataagagctgcagaagatccatcaataaccaagtataaagaaagattttaagactaagtaccaattgaggtaaacatgaaaccgttataaagcaaattaaaaaaaaatacattaggaaaagttacacaaatgaagtgtacgcctattatattcccaaggcatttttgtggggaggaacagtgctgcttgttggcctttccatattccctcatacaaaaatgctaaaatctattcgcaagagttttgagctaacttcgtctcttaaattgctttaattgtcatcaataaaaacaaatatgaaaaaccctagtttaaaaagcggttcaagaataatgtaaacttatacatatagcttattttcttcatttactagaggaggaaaaatagaaccaaaaaatgcatgaactcctgcttttcaatctgattacctcaaactgaaaagcaggtgaaaggaggaatatttcagtgtgtttttacatctgaatccaagggatccaagtggcccagcagaaacggaattcttgttaaaatgactgattctcgtgcatgtgaaaggctctggggaatgaatacctgtttggtccaaacttactgtatcataatgctgtatatgttgaaaacgtaatacctgttaatgtcctaatgaatcacgttttgcagaaaacaccgtaagaaacacttcagtctttctgtagtttccatgcatatttcaccatggttcgcactctgatcctcatctggtttagaaagcaattcagtttctttcaaaccaccataacctaagtgctgccccatccttcacctttaccctagaaaatctgagaatccattggtgtgtactgtgtgacacaatgccaacaagcctctggtttctaatactggcaggaccaacacacatactttagtgggaatataatctgtttagacgataatagagggaaatgccataattaacaaatctcccttcactcaccactatcctcattcttgcagttgtcaaggtgtaagcctcactgtaagttacaaagctaccactcccctctttaagaacacatagcttaggattgccttggcgatgcgggctcttttttggttccatatgaacttaagtagttttttccaattctgtgaagaaagtcattggtagcttgatggggatggcattgaatctgtaaattaccttgggcagtatggccattttcacaatattgattcttcctacccaagagcatggaatgttcttccatttgtttgtatcctcttttatttccttgagcagtagcttgtagttctccttgaagaggtccttcacatcccttgtaagttggattcctaggtattttattctctttgaagcaattgtgaatgggagttcactcatgatttggctctctgtttgtctgttattggtgtataagaatgcttgtgatttttgtacattgattttgtatcctgagactttgctgaagttgcttatcagcttaaggagattttgggctgagacgatggggttttctagatatacaatcatgtcgtctgcaaacggacaatttgacttcctcttttcctaattgaataccctttatttccttctcctgcctaattgccctggccaggacttccaacactatgttgaatacgagtggtgagagagggcatccctgtcttgtgccagttttcaaagggaatgcttccagtttttgcccattcagtatgatattggctgtgggtttgtcatagatagctcttattattttgaaatacgccccatcaatccctaatttattgagagtttttagcatgaagggttgttgaattttgtcaaaggctttttctgcatctattgagataatcatgtgttttttgtctttggctctgtttatatgctggattacattcattgatttgcgtatattgaaccagccttgcatcccagggatgaagcccacttgatcatggtggataagctttttgatgtgctgctggattcgttttgccagtattttatccagttagaatggcaatcattaaaaagtcaggaaacaacaggtgctggagaggatgtggagaaataggaacactttcacactgttggtgggactgtaaactagttcaaccattgtggaagtcagtgtggcgattcctcagggatctagaactggaaacaccatttgacccagccatcccattactgggtatatacccaaaggactataaatcatgctgctataaagacacatgcacacgtatgtttattgtggcattattcacaatagcaaagacttggaaccaacccaaatgtccaacaatgatagactggattaagaaaacgtggcacatatacaccatggaatactatgcagccataaaaaatgatgagttcatgtcctttgtagggacatggatgaaattggaaatcatcattctcagtaaactatcacaagaacaaaaaaccaaacaccgcatattctcactcataggtgggaattgaacaatgagatcacatggacacaggaaggggaatatcacactctggggactgttgtggggtggggggatgggggagggatagcattaggagatatacctaatgctagatgacgagttagtgggtgcagcgcaccagcatggcacatgtatacctatgtaactaacctgcacaatgtgcacatgtaccctaaaacttaaagtataaaaaaaaaaaaaacatagctaaagaaaaactgcatatgcaaatcataccgtattcatttttttatttaacttggggatggaatggggatagcatacattttatttgtacaatatttaacaatcacttatccaaggtggggttttatggggattttaagctttctgttaaatacttgcagaaaaaatagcaagtacgatttgacagtagtacaataacctgtgcccaaaacacaagaaatacagagtaaagcgaaaataactgcttaccaatattctgagaggtaacaaatgggatatgggttgagactgcataaaaaacgtactgctggttgaatatctgaggtaaatgatgttcaatcaagatgctacttgtatcattttgcccataaatggataaataattttatgcatatcataccaaatgttcctaaaaagtaatctttcaaaaaagtataaaagagaaactggaaagt

SEQ ID NO: 1749 - DNA, 3295 bp, Homo sapiens
atgttgtagctgtgagttggaagcacaagctactcttcacccacatgctttgtatgttgtaactattcagattgttgtgttcaaatgtgcatttggattagcaaagccaggcaaaattatgttcccctgaacggacaaaattagatcactaagggtagttcctcggttgttccaaatgccttttttttttttttttggtgacagggtctctgtcacccaggctggagtgcagggtgcaatcatggttcactgcagcctcaccctcccaggctcagacaatcctcccacttcagcctgccaagtagctgggatcacagactgccttttaattatttttttggagatggggtctccctatattgcccaggctagtctcaaactactggactcaaatgatcctcttctccatggcctcccaaagtgctgggattacagacatgagccactgtgcctggccccatgtactttcacatcttaccttcctcccatagattttcatttaaaatggatatgggttaagtgttattatcctcattttattaatgaggaaaattgaggcatggcatagtcagatggcatgctcaggttacctgctagttggtactggagcaaacatagaagtatggtcttatatctccctaccccaggtacttcctattctgccattgtgtattgtgccattctttccccacagcctatgcccatcctacaatatctgtgaagattgtgaagcagggccatatggccatgacactaaccacgtcctgctgaagttgcgtagacctgttgtgggctcctctgaaccgttctgtcactcaaagtactctactcctcgtcttcctgctgctctggaacaagtcaggctccagaaacaggttgataagaactttcttaaagcagaaaagcaaaggttgcgagctgagaagaaacaacgtaaagcagaggtcaaggaacttaaaaagcagcttaaactccataggaaaattcacctgtggaattcaatccatggactccagagccccaagtctcctttaggccgacctgagagcttgctccagtctaataccctgatgctccctttgcagccctgtacctccgttatgccaatgctcagtgcagcatttgtggatgagaatttgcctgatgggactcaccttcagccaggaaccaagtttatcaaacactggaggatgaaaaatacaggaaatgtaaagtggagtgcagacacaaagctcaagttcatgtggggaaacctgactttggcttccacagaaaagaaggatgttttggttccctgcctcaaggccggccatgtgggagttgtatctgtggagttcattgccccagccttggagggaacgtatacttcccattggcgtctttctcacaaaggccagcaatttgggcctcgggtctggtgcagtatcatagtagatcctttcccctccgaagagagccctgataacattgaaaagggcatgatcagctcaagcaaaactgatgatctcacctgccagcaagaggaaacttttcttctggctaaagaagaaagacagcttggtgaagtgactgagcagacagaagggacagcagcctgcatcccacagaaggcaaaaaatgttgccagtgagagggagctctacatcccatctgtggatcttctgactgcccaggtggaagattcagcactttgaagggcaagggacagagggagagagcacaggagagaaggtggtagagccataggcagtaatcaggaaatcagagatatgcccactttgatctagtcaggtatatttaatgggaaggagatcacccatggaagcaagtttgtaaactagatgtttcctctttgaattgggaactcaatcctgtacttccccacaaactccctttagttgcctcttcaccttggcctagctaattctccttcatacctgctgcattttctctttcctgctattgggttatttcaacatctaattcccatttaactcttcttgttttcacttgtctggggacaggcatgaatttgaacagagttgaatacgaaatgatgtggaaatggtctacaggtcccatcaagacatggctccagcatgcactccaaacagcctaacattgtctttttttataggacctgctgtcctttgagctgttggatataaacattgttcaagagttggagagagtgccccacaacacccctgtgggtaagaatgtcactcatttcatcttgttcgtcttactaataggcacaaaagtaccacagcctagacactggtagtgttttattctgaggaaatggcaaggatttctcccacagtaggatagtaaagcagcaatcatggatccgtttttcttctttcctgtcctttgtcaaaagtaacaacatgctgggcatggtggctcgtgtctataatcccagctctttgggaggccaaggcaggaggatcacttgaggccagggtttgagaccagcctgggcaacatggtgaaacccccatctctacaaaattacttttaaaaattagctgggtgtggccaggcacggtggctcacgcctgtaatcccagcactttgggaggctgagacgggcagatcacctgaggtcgggagtttgagaccagcctgaccaacatggagaaaccccttctctactaaaaatacaaaattagctgggcatggtggcacatgcctgtagtccgaactactcgggaggctgaggcgggagaattgcttgaacccagaaggcggaggttgtggtgagctgagattgcaccattgcactccagccaggacaacaagagcaaaactccgtctcaaaaaaaaaaaaaaaaaaaaaattagcttggcatggtggcctgcacctgtggtcccagctaccagggagactgaagtgggagaatctcctgatcccaggaggcagaggctgcagtgagccaggattgtgccattgctctccagcctggatgacagagtgaaacccaatctcaaaaaacaaacaaaaaaaagaggctgggcacggtagctcacgcctgtaatcccagcactttgggaggccaaggctggtggatcacaaggtcagaagttcaagaccagcctggccaagatggtgaaaccccatctctactaaaaatacaaaaattagccaggcatggtggcaggtgcctgtaatcccagctactcgggaggctgaggcagagagttgcttgaacctgggaggcggaggttgcagtgagccgagattgtgccactgcattctagcctgggtgacagagcaagactgcatctc

SEQ ID NO: 1750 - DNA, 3879 bp, Homo sapiens
atattctgtatgatgccagcttaggtgggtagttcctacagtacaggaagcttaacaatctctaggattaaaagataaaagaatgcctcaggctcatttatctttagtacttcatggtttaaaaaaaaaaatgagggcatggggaagtgtaaatggcaatgttgtggcagtaattgctaaaaaaaaatcagattataataaattttaatgatagagtctctggactcagctatcaaggataatcattacagatttggggacattgttgcccatggtgtggcatattaaagaacaaaataactccattagtttgacctttctgtgaacatttgctacttttgcaatggaatcatgcaagtatataaaattgcttttattacagacatctttgtattccacctgcctttttttattttccatttgcagtctgttcagttcaggaagctgctataacacttggtgccagtgttcccaaactctaaataatgtgttttccatttgcactaaccatcaggaaactagaatttctggtttcctcaggtatgtgtagtggtcattagtgttacgtgaaagtctcatagcatttgattataacataaggtatttagaaaaagaaagttttctgttttaagttagctctcatgttcttttgtattctatatgaatcaagtaaatgctttagggatattaacctggaaaaattattgactttgtaagttcacaattcatgtaaagaaatttttataaaatatgggagaatttaaacatttgacaggaagagaacaactttttaaatttgagatatattgagttcagagaggttagtgatagctggaaattttattcgccctagtaattattttgtttacattaaaaaatctgtaataaagctacaaaatagtaaacagattactgtaacgtacttggtacatatgagtggcagagcaactgaaatgtccaaaattggagaattagcagactcttgttcttacctacttatagagccattgcacttttttggtaccacacagtgataatgttttactttgaactacaaaaatcgcaatgcagataatgctgctggaaaattaaaaatagatattaaaaagacttctaagtacttaaatattctctaagggaaaagctctaaaattgttgacatttctttacttgttctatgaatactgaagtgttacatttcttaactaatgtttgctccaataactaggcactggacattatagctctatgcatggattaaaagaagaagtgtcgtttcccaaacataaaacagaatttgctacttgtgtgctgttggggattcatgattattctgtccatagagagggtactttttcagaaatccggaaatagtatggaaccctcaaataaataagcagctgaggagtttggtgttacggagtgtgttgtatttttacaggtgccactgattaatgaacttgaatcagcaatacatcagctgtacaaacagcgagcttcccgccttgtccaaagacgacaagatgatattaaagatgaatcttcggagttttcaagccattcaagtcagtccatcttgaagacaaagctctgatggcaccaaatcttgactcctttggacgcgatcgggcactgtatcaagagcatgcaaaacgtcgcattgcagagcgggaggccaggaggactcgtcgtagacaagccagagaacaaaccggtaagatggcagatcaccttgaaggcctttccagtgatgatgaagaaacttctacagatattactaatttcaatctggaaaaagatcgaatttcaaaagaatccggcaaagtttttgaagatgtccttgaaagtttctattcaattgactgtattaaatcacagtttgaagcatggcgttcaaaatactacacatcctacaaagatgcttacattggcctttgtttgccaaaattattcaaccccctcatacgacttcagctcctcacttggactcctcttgaggcaaaatgtcgtgactttgagaatatgctgtggtttgaatctttgctgttttatggttgtgaagaacgagagcaagaaaaagatgatgtagatgttgccctactacctaccattgtggaaaaggtgattcttcctaaactaacagtgatagctgaaaatatgtgggaccctttttctacaacacagacttcaagaatggtgggaattacactaaaattaatcaatggatatccttcagtagtgaatgcagaaaataaaaatacacaggtatacctaaaggcacttttattgagaatgagaagaactttagatgatgatgtatttatgcccttatatcccaaaaatgtcttagaaaataaaaattctgggccttacttgttttttcaacgacagttttggtcttcagttaagctgttaggcaattttcttcagtggtatggcattttctcaaataaaactctgcaagagttatcaatagatggtttattaaatcgatatattctcatggcttttcagaattcagaatatggagatgacagcatcaaaaaagcccaaaatgtaatcaattgtttccccaaacaatggttcatgaatctgaaaggagaaaggactatttctcagttagaaaacttttgccgataccttgtacacttagcggatacaatttatagaaatagtatcgggtgttctgatgtggaaaaaagaaatgcaagggaaaacataaaacagatagtaaaactccttgcaagtgttcgagctttggatcatgctatgtctgttgcaagtgaccacaatgtgaaagaatttaagtctttgatcgaaggaaaatagatctatgagactgaaaaacctatttgcttgattaccattcccaatgtgtaaattttgtatatatgtaaagtttcttaaactgtaaaatagcaattcttgttttaatacaaaaaacattatattcaatactgtgtccttaaatgatatttcttcagaatgaaaggaattcagattatttctaggagtctatgaatgttttctttactgcctgtcatactttgtttactgaagtattttgtatggtcatttaaattaaccctctcagttaattgtcccctgtaaacgatgtgtgcagtgtaaattgtgtaattatgcatatatatatttataccaccatggacttactttcacactggaaatttgtggtgtttttccacagaggaagccttttaacagcagaaaattatccggtagcaaattgtcttagggaaattactacactgttgtaacaaaagggctggcaagtgactaaatgttcattaccttttggttagcgttgctatcactgtagctgtgctgccttaacattgagagttgagttgtggacttagtcattgagtgaatgttgaactttcttccttgaatcagcgttagagtcaaatgtgggtttaatgtgaatgctaaatgaatatgcaacatagtttcaaatggaacatagaaatttcacttttgaaaataataaacccacaacctaattgcatggttttgggctgaccgtcctgtctcattcatgattttactccctgcccagcttgcagatacatgcatttgaattttagtagtctgtcatatttaaaatcccacatatgtgagttaaatatgcaataaagaatacgccttgctgattagccacacccaggcaatttaatatccatggtcttctataatgtttataccacattgtaaatattcagagaacttgttttaaagtttatgctttctgattctgtgattttcaaaagaggaatttttttggaaattaaggactatcgtttgataattatatatgtaattaagatttagccaagcattaaattaatttttaaatat

SEQ ID NO: 1751 - DNA, 3928 bp, Homo sapiens
tatagctctggaaccttttttttacatatatgattcccagatctgtatcttcaagcctgccccatcactcttccttcagtcctgtcttgtgcactgggacattgccctgtggctctttgctgctccctgaaactgaatctgttgaatatagagtctcttctcttgcaaatcttttccccatgcacagctttgcaggcctctgaaggacttcactagacctgtcatcccatctagaaggccagctttcttctctctctgttctttaactttctactttttgagtcaggagagaggcgctaggtgagaccctggtggattgatgttccctctctactccacccaccttcacattaagcgttccatttctgcccatgtaggaatttaccggttctctctttatagtctgggctgcaccacttacttttcccattagagccggcctgcattggagtgccgaagtggttgcttctgagggctgctaggtggcctctgaccaggaggagactagaaaagggtcctggcctgggcatctggaggcagctgtggccccgacttccccatcagtggctcactaggtgagcctaggctaatggctggaccttctcttgctttggttgtcttggcagtggaacagtgggatgaacctgttgttccttacggtgcacttgaaaatgccagaatcccatcctcaacctgcttgaggagccatctcctagttgctgcttttgtacacccccgtggcccaggtgccagattcttcttggcatccaatggtgctccctttctgctgggttccgggcactgtctgcagtacaggtttaggggcttgcctgccactgtgatgtgtgaggccaggaatctgaggttcacacgtgctgagagctgcaggcatttgtggggcctgcctggttgtccctgaggtttctaggagaagcaggtgtcagggactctgggactagccagacagatggagcctattatatgagggctaccatggcaaataggatatggccttggccccagaagaggcacaggcctgtgaccttgggagagtgggaaggatgatttcaaacttgcaaatgtgttgaagctcaaaaatcagacctaacccagtgaggaaagagacaatctggctgtttgtcgtcgaagtaggacagtgtgcaacagggagaaatgacatttgtcagagcctttctcctggggctcttggtctctgtatgcgtggttggaatttaaactccacatatgtactctgagtttagtttctttagacatgaactttgtttcttccaagtaggcagggactatttgtcaagtctctgcatgcctgtttgtctgtgaggttatcctcaccccgtcagtgtacgaaacagctgtctctgcagggagtgtgtgtcggcatttttttttttttaaggagaacctctctccatgagtctgtatttagctccctggagccgtctgatgagtaggtgggggcagtagtgggcaggtgtggtgcagtgtggccccttgtcgtagttggctttatctcccaaattgctagtgggacaaattttcctaggaagcgtttcaaggtggaaaggctgaagtggctcctgagagaggttccaggctgcacactccctccccctcttgctgcttcctgtggctgcgctgcatggtgcgtgagggggatgcttggggggctccctgcatcgctgggctctgggtgcgtgatggggacgctggggggctccctgtgtcgctgggctccgggtgctgggtcctggctgcaggctattgggttgggctgggctgtctgcacacgagtctgcgttgaaaagcctactcatctggcgttgcttgctaaacaatttttaaaaggttatttttctccaccttattaagatattcgtgtattaatacattatatttggaaaatgtaaggagatttggaaaatgattaaaaaaggataaagtagtaaacaaaattcacccacagcccagagggaagaaaagtaacgattcttaaattttctttttatgatatgtatgatcctatgtacatatatgttggtgtgtgtatatatatatgtgtatgcgtatatataatgtatgtatatatacatttatttatacacactccccctctgtccctgctttgtggatttagctgcatggatagtaatgtctatctaaggggctatagtctagaatctagaatacatactatttgcttttttttctttcatatcattgaatctacagagtttggtaacctgcatctttttccacttagtgttagttacattctgaatattttcccatgctattaaaaaacttgtggaatgtgtttttaatggctgtgcaatatcttattgttcagttgtaccattatttatttaactagttccctattgccaggcatttagacctgctttatggggaaagaatcaggactgtggcttccgtggccagtgtgcggcagttgccaaacaggtcatgtggtcctggttccccaggattcccaaaggctcaattctctaaccagctggtgctttccaggcagccagtgccccttgggccatcaggaccctacagcctgcgaggaatagttttagaaagcagattaatttcctattgtgtgtgagtgattttaaatgagtttttcgtttcccctttcttcccttctgtgctctggttgctcccacagggcagtaaacggctttgaccccgctcctcctcctcctggtctgggctcctcgcgtccatcgtcagcgccgggtatgctgcctctcagtgtgtgagtgcctagcctccaggtgggggctcctgccctcctccaacaacccaggacacccacgcctcacccctcggtgcctgggcccagccccgtgcccctccgtctgcctccgcacggctggcagagggcaggctgcatgcagtggcggctactgggccctgcccagccccggaactctgcgcgatatcaatactggctattttctcttctcgccgtagtgccgttggtttcacatgattgcacttttgtgggtcgcaaggtgatacatacgtgtattacttggtcactggatgcagaagtacccattcatcacacctgccccatagcccccactctgctgtactgataggatttagttgtgttttaggacattgcaaatcttctagaagttctcccccaaatcaggtcaatgtgtgccctcctgagctcccacccaggcatctccagtgctcatgatcatgtgtcccccaactccacccctcacagtttgggcctgtttctggcaaagagtcaggaaggttactgaattagggaacattttctgcaccttctgattttacttaagcagctaccattccatggacttgcctcccagggcagcacaatgcccgtctgagccccacgtggcaggagcctctgggacggggcacacacaggcccagcctctgtgctgtctcctcctctgtgcgcctcagactcggggtgagggaggcgggcagcctctcgccagccttcccgtccttcagttcaacgacatctttggagtgtttttgttttctcttccaagggccgtcccgttgtgttaggaagggtgagtggctggttccagggtgggccggtgccagctccggggtggactgaacagcggcggctgtccctgtgcatcctttgattactctcatgctgcatttactgtttacatttgttttattgtacataggtttgtaaacattattgcctgagatatttgtatataacttgggctttgtagcttttatttattcagaacgcatacggcatgttaatgactctgatggtgtcctcctctgggcagctgtataggatcatcatgtggttacaaaaaatacttccctcaaaaaaattcttttaatgtggaaacaataaatttcacagaaaaaaagg

SEQ ID NO: 1752 - DNA, 3858 bp, Homo sapiens
agtgtgcggatttgccggggtcagactccaagcttgattgtgagttctagcctttgtcagaaatgcagcaagtcatgctaacttgcaagggagtcaacagagggcacgcggtgcctgcggggccgggacggaagccccgcccccggcgcagttcccgcctgttagcgggggagaagcaccttacacgctccgctctgcttttgtgccacacagaggacggtcgggccctggaaggaacgctctcggaattggccgcggaaaccgatctgcccgttgtgtttgtgaaacagagaaagataggcggccatggtccaaccttgaaggcttatcaggagggcagacttcaaaagctactaaaaatgaacggccctgaagatcttcccaagtcctatgactatgaccttatcatcattggaggtggctcaggaggtctggcagctgctaaggaggcagcccaatatggcaagaaggtgatggtcctggtctttgtcactcccacccctcttggaactagatggggtcttggaggaacatgtgtgaatgtgggttgcatacctaaaaaactgatgcatcaagcagctttgttaggacaagccctgcaagactctcgaaattatggatggaaagtcgaggagacagttaagcatgattgggacagaatgatagaagctgtacagaatcacattggctctttgaattggggctaccgagtagctctgcgggagaaaaaagtcgtctatgagaatgcttatgggcaatttattggtcctcacaggattaaggcaacaaataataaaggcaaagaaaaaatttattcagcagagagatttctcattgccactggtgaaagaccacgttacttgggcatccctggtgacaaagaatactgcatcagcagtgatgatcttttctccttgccttactgcccgggtaagaccctggttgttggagcatcctatgtcgctttggagtgcgctggatttcttgctggtattggtttagacgtcactgttatggttaggtccattcttcttagaggatttgaccaggacatggccaacaaaattggtgaacacatggaagaacatggcatcaagtttataagacagttcgtaccaattaaagttgaacaaattgaagcagggacaccaggccgactcagagtagtagctcagtccaccaatagtgaggaaatcattgaaggagaatataatacggtgatgctggcaataggaagagatgcttgcacaagaaaaattggcttggaaaccgtaggggtgaagataaatgaaaagactggaaaaatacctgtcacagatgaagaacagaccaatgtgccttacatctatgccattggcgatatattggaggataaggtggagctcaccccagttgcaatccaggcaggaagattgctggctcagaggctctatgcaggttccactgtcaagtgtgactatgaaaatgttccaaccactgtatttactcctttggaatatggtgcttgtggcctttctgaggagaaagctgtggagaagtttggggaagaaaatattgaggtttaccatagttacttttggccattggaatggacgattccgtcaagagataacaacaaatgttatgcaaaaataatctgtaatactaaagacaatgaacgtgttgtgggctttcacgtactgggtccaaatgctggagaagttacacaaggctttgcagctgcgctcaaatgtggactgaccaaaaagcagctggacagcacaattggaatccaccctgtctgtgcagagtttttttcatttatttgagatagggttcctgtcacccaggctggagtgcagtggtgtgatctcagttcactgcagccttgacctttcaagctcaagcgatgttcctgcctcagtctcctgagtagctgggaccacaggtattcacaacattgtctgtgaccaagcgctctggggcaagcatcctccaggctggctgctgaggttaagccccagtgtggatgctgttgccaagactgcaaaccactggctcgtttccgtgcccaaatccaaggcgaagttttctagagggttcttgggctcttggcacctgcgtgtcttgtgcttaccaccgcccaaggcccccttggatctcttggataggagttggtgaatagaaggcaggcagcatcacactggggtcactgacagacttgaagctgacatttggcagggcatcgaagggatgcatccatgaagtcaccagtctcaagcccatgtggtaggcggtgatggaacaactgtcaaatcagttttagcatgacctttccttgtggattttcttattctcgttgtcaagttttctagggttgaatttttttcttttttctccatggtgttaatgatattagagatgaaaaacgttagcagttgatttttgtccaaaagcaagtcatggctagagtatccatgcaaggtgtcttgttgcatggaagggatagtttggctcccttggaggctatgtaggcttgtcccgggaaagagaactgtcctgcagctgaaatggactgttctttactgacctgctcagcagtttcttctctcatatattcccaaaacaagtacatctgcgatcaactctagccaaatttgcccctgtgtgctacatgatggatgattattattttaaggtctgtttaggaagggaaatggctacttggccagccattgcctggcatttggtagtatagtatgattctcaccattatttgtcatggaggcagacatacaccagaaatgggggagaaacagtacatatctttctgtctttagtttattgtgtgctggtctaagcaagctgagatcatttgcaatggaaaacacgtaacttgtttaaaagtttttctggtagctttagctttatgctaaaaaaaataatgacattgggtatctatttctttctaagactacattagtaggaaaataagtcttttcatgcttatgatttagctgttttgtggtaattgctttttaaaggaagttattaatatcataagttattattaatattttgaacacaggtggatgtgaaggattttcatttaaaaaccaagtggttttgactttttctgttgaatgaacaactgtgccttgtggaatttttgcagaagtgtttatgctttgttagcatttcaacttgcattattataaagaggtattaatgcctcagttatgtgtttgtcaatgtactggctgaggattctatctcagctgtcttttctaactgtgtaggttgagttttgaacacgtgcttgtggacatcaggcctcctgccagcagttcttgaagcttctttttcattcctgctactctacctgtatttctcagttgcagcactgagtggtcaaaatacatttctgggccacctcagggaacccatgcatctgcctggcatttaggcagcagagcccctgaccgtcccccacagggctctgcctcacgtcctcatctcatttggctgtgtaaagaaatgggaaaagggaaaaggagagagcaattgaggcagttgaccatattcagttttatttatttatttttaatttgtttttttctccaagtccaccagtctctgaaattagaacagtaggcggtatgagataatcaggcctaatcatgttgtgatcctcttttcttagtggagtggaatgttctatccccacaagaaggattatatcttatagacttgtcttgttcagattctgtatttacccattttattgaaacatatactaagttccatgtatttttgttacaaatcttctgaaaaaaaacaaaacaatgtgaaacattaaaattaaaaggcattaataat

SEQ ID NO: 1753 - DNA, 4480 bp, Homo sapiens
gtgcagggcgtccagctgctccgcgcacaagtggccgcgatcctggcccggaggctccgccgcacgctgcgcgccgggaagagcaccctcgccgacctgctgctgccagtcctcttcgtggccttggccatgggcttgttcatggtgagacccctggccaccgagtaccctcccctcagactcacacctggacattaccagcgggccgagacctactttttcaggaagaattcttcatgctggcgcacagatcccttttctcacccagaattccaggattcatgtggctgcctgaagtgtccaaatagaagtgctagtgctccctacctgaccaaccacctgggccacacactgttgaatctctcaggcttcaatatggaggagtacttgctggcaccatctgaaaaaccaaggcttggaggttggtcttttggattaaaaatccccagtgaagctggaggtgcaaatggaaacatatcaaaacccccaactctggcaaaggtgtggtataatcagaagggttttcattccctaccttcctacctaaatcatctaaacaaccttattttgtggcagcacctaccccctactgtggactggagacaatacggaataacactctacagccacccatatggaggggccttgctgaacgaggacaagatcctggagagcatccgtcagtgtggagtggccctctgcatcgtgctgggattctccatcctgtctgcatccatcggcagctctgtggtgagggacagggtgattggagccaaaaggttgcagcacataagtggccttggctacaggatgtactggttcacaaacttcctatatgacatgctcttttacttggtttccgtctgcctgtgtgttgccgttattgtcgccttccagttaacagcttttactttccgcaagaacttggcagccacggccctcctgctgtcacttttcggatatgcaactcttccatggatgtacctgatgtccagaatcttttccagttcggacgtggctttcatttcctatgtctcactaaacttcatctttggcctttgtaccatgctcataaccattatgccccggttgctagccatcatctccaaagctaagaatttacagaatatctatgatgtcctcaagtgggtctttactatttttcctcaattctgtcttggtcaaggactggtagaactctgctataatcagatcaaatatgacctgacccacaacttcggcattgattcctatgtgagtccctttgagatgaactttctgggctggatcttcgtgcaactggcctcgcagggcacagtacttctcctcttgagggttctgctacactgggaccttctgcgatggccaaggggtcattctactctccaaggcacagtcaaatcttctaaggatacagatgttgaagaagaggaaaagagagtgtttgaaggaaggaccaatggagacattcttgtgttatacaaccttagtaaacattatcgacgctttttccagaatattattgctgtgcaagatattagtttgggcataccaaaaggagagtgctttggacttctaggggtgaatggagctgggaagagcacgactttcaaaatgctgaatggtgaagtttctctaacttcaggacatgctatcatcaggactcccatgggagacgccgtggacctgtcttctgctggcacggcaggcgtgctcattggctactgtccccagcaggatgccctggacgagcttctgactggttgggaacatctctattattactgtagcttacgcgggattccaaggcagtgcatccctgaggttgctggagacctcatcaggcgcttacacctcgaagcccacgcggacaaacctgtggccacctacagtgggggaaccaagcggaaactctctacagccctggccctggtggggaaacctgacattcttttattggatgagcccagctctgggatggatccctgctctaagcggtacctgtggcaaacaataatgaaggaggttcgggaaggctgtgctgcggtgctgacctcccacagcatggaggagtgtgaggctctttgcacaagactggccataatggttaacggcagcttcaaatgtcttggttctcctcagcacatcaaaaataggtttggtgatggttatacagtcaaagtttggctctgtaaggaagcaaatcaacattgcactgtttctgaccacttgaagctttattttccaggaattcagttcaagggacagcacctgaatttattagaatatcatgtgccaaaaagatggggatgcctagctgacttgttcaaagttatagagaacaataaaaccttcttgaatattaagcattattccattaaccaaaccactttggagcaggtatttattaattttgcttctgagcagcagcaaactctacaatctactcttgatccatccactgacagtcaccacacacatcacttgcccatctgagcactaaagaagtttccataaggaataaaaccttgtcttccattacaattaacagtcaaggataaaacaagcacgcgcacaatcaaggagctggaacacactctccaggccgtcaaattattctcttgttcattttctattttgaatctccttgttagttaataaccaccaaatggaaaggtcattctttctgcagacttttggggagctcctccaaaacatttgttctctttaccatgccagatggacaccagcttctttgtgacaaaggcatgaatgatttgacagtgtccaaactgagacattctggagctggaaagcctgtcacactagagtgtgtgtgacatgtccactctaaacatgtcacttttctgttaagaaaactgagccccctccccacaggttaaaaaactttagtaacttgtttgtatagaaaatagtaacaaggactattttctattgttgtcatctatttactagatacatgtttttaatgattttaatgtaagcttttattaatactgatgacattatatggtatgatatgaaaaaatcaccaattttttacatataaaagatgcctttttaaaaaaataggttttaagagctcttttagtatacactttagcaaaattaattaaattgaactagttactctgtatcaattacagtagttctaccagaatctcccaggttataatttatgagggtagagaaataaaatgtagatgcattttctttttcttcatttggatgaataattactgttttttgttattctaagtcagtgtttttcaaagcgtagtggtccccatattagctgcattgccatcttctgggagcttgcaagaaatgtacattctcaggatccactccagacctattgaatctcaaattctggggcttaaacaagcacattccaaattaagaaccaatgacctaagggaatgtctggttacctcctagttatacaagcaaaatctgcatagtatgtagtcttttttatttatttatttattttttttgaggcggagtctcgctctgtcacccaggctggagtgcagtggcgcgatgtcggctcactgcaagctccgcctcctgggttcacgccattctcctgcctcagcctccccagcagctgggactacaggcacacatcgccacacccggctaatttttagtatttttagtagagacggggtttcaccgtgttagccaggatggtctctatctcctgaccttgtgatccgcccccctccacctcccaaagtgctgggattacaggcgtgagccaccgtgtccggccgtagtttattttaaaatatatttttaaaagctttgtaaaaattatgtcattctcagaattgttgtcttcaaagcattgtcagatgtagagtgctcagatgtggctcttaaagactatatacatctgaatttttcatcctatagttagtaagatgcataaaatcaatccactactgaaatagtttcaagtcagacatttctgagttcagacatttctcaacattcttttaacaacatttttctgaatcctcaatagaaagtcacattaatcttattttaaaatttggcctttttcaacactaacgttgagtaccggtagcttgtgatcaaaggcatatacttccttatgagatttctttactaaagcaagatttcattaaatctctatttcctaaatatcattctatacaaaagatattttttaaacggtaaggattaagacaatcactgatagctttgttgtgagcaattttgattcccatgtatcacatgaattacacttccttaaataaattacagtttatggctgtatgatttattctctaattctaacatagtctagttgtcaaaaggaaatatgtaatctttttatgattgttgaatcaataaataccaatttgtgaaacatgaatgtgtttaaactgcagtgaataaatgagatgtgctttaatttaacccg

SEQ ID NO: 1754 - DNA, 3555 bp, Homo sapiens
aagatcgacgaaactagggaaaaggtgcaagtgatgtcgttggagctggaggatgccaagaagaaggtggctgagttccagaagcagtgtgaggagtacctggtcatcattgtgcagcagaagcgggaggcagatgagcagcagaaggccctggagtctctgaacaagaaggatataggagagatcaagtcttatggacggcccccagcccaagtggagatagtgatgcaggcagttatgattcttcgaggcaacgagcccacatgggcagaggccaagaggcagctaggggaacagaacttcatcaagtcactgatcaactttgataaagacaatatctcagataaggttctgaagaagattggggcctactgcgcccagcctgacttccagcctgatatcatcggccgcgtctccctggctgccaagtccctctgcatgtgggtgcgggccatggagctgtatgggcggctatatcgggtggtggagcccaagcgaatccgaatgaacgctgccttggctcagcttcgggagaagcaagccgcgctcgctgaggcccaggagaagctgcgggaggtagctgagaaactggagatgctaaagaaacagtatgatgagaagctggcacagaaggaggagcttcgcaagaagtctgaagagatggagctgaagctggagcgagctgggatgctcgtgtcggggttggctggcgagaaggccagatgggaggagacagtccagggcctggaggaggacctgggctacctggtgggggactgtctcctggcagctgccttcctgtcctacatgggacccttcctgaccaactaccgggatgagattgtcaaccaaatctggatcgggaagatctgggagcttcaggttccttgctccccttctttcgccatcgataacttcctgtgcaatcctaccaaagtccgggactggaacatccaagggttgccctcagacgccttctccactgagaatggcatcatcgtcacccgaggcaacaggtgggcactgatgatcgaccctcaggcccaggccctgaaatggattaagaacatggaaggaggccagggcctgaagatcatcgacctgcagatgagcgattacctgcgaatcctagaacacgccattcactttggatacccggtgctacttcagaacgtgcaggaatatctggaccccacactgaaccccatgctcaacaaatctgtagcccgaatcggtggtcggctgttgatgcgcattggcgataaggaggtggaatataataccaatttccgtttctacatcaccaccaagctctccaacccccactacagcccagagacctcagccaagaccaccatcgtcaactttgctgttaaagaacagggcctggaggcccagctgctgggcattgtggtgcggaaggagcggcctgagctggaggagcagaaggactcactggtcatcaacatcgcggctggtaaaaggaagctcaaggagctggaggatgagatcctgcggctgctgaatgaggccaccggctccctgctggatgatgtgcagctggtgaacacgctgcatacctccaagatcacagccacagaggtgactgagcagctggagaccagtgagaccacagagatcaacactgacttggcgcgggaggcttaccgcccatgcgcccagcgggcatcaatcctgttcttcgtgctcaatgatatgggctgcatcgaccccatgtaccagttctcactggatgcctacatcagcctctttattctcagcattgacaaaagccaccgcagcaataagctggaggaccgcattgactacctgaatgactaccacacctacgctgtctacaggtacacctgccgtacccttttcgaacgccacaaactactattcagttttcatatgtgtgccaaaatcttggagacttctggcaagctcaacatggatgaatacaacttctttctacgtgggggtgtggtcttggatcgggagggccaaatggacaatccatgtagtagctggcttgcagatgcctactgggataacatcacagagctagacaaactgaccaacttccacggactcatgaactcctttgagcagtaccctcgtgactggcacctgtggtataccaatgctgccccggagaaggcgatgctgccaggtgagtgggaaaatgcctgcaatgaaatgcaacggatgctgatcgttcgctccctgcgccaggaccgcgtggccttctgcgtgacctccttcatcatcaccaaccttggctcccgcttcatcgagccgcctgtgctgaatatgaagtcggtgctggaggattcaaccccacgatccccactcgtgttcatcctgtcccctggtgtggaccctaccagtgccctgctgcagctggcagagcacatgggcatggcccagcgcttccacgccctgtccctgggccagggccaggcccccatcgctgctcggctcctccgagagggtgtgactcagggacactgggtgttcctggcaaactgccacctgtcactgtcttggatgcctaatctggacaagctggtggagcagctgcaggtggaggatcctcatccatccttccgcctctggctcagctccatcccccacccagacttccctatctcaatcttgcaggtcagcatcaagatgaccacagagccaccaaagggcctaaaggccaacatgacacgtctttaccaaggctgatgtcagaaccacagttttcccgctgctccaaacctgccaaatataagaagctgctgttttcactctgtttcttccactctgtgttacttgaacgcaaaaagttcctgcagcttggctggaacatcatctatggcttcaatgactccgactttgaggtgtcagaaaacttgctgagcctctatctcgatgagtacgaggagacaccttgggacgcacttaagtacctcattgccggcatcaactatggtggacatgtcacagatgactgggaccggcgcctgctgaccacctacatcaatgattatttctgtgaccagtctctatcaactcccttccaccggttgtcagcactggagacttatttcatccccaaggatggcagcctcgcttcttacaaggaatacatcagcttattgcctggcatggacccccctgaggcctttggccagcaccccaatgctgatgtggcctctcagatcactgaggcacaaaccctctttgatactttgctttccttgcaacctcagattacacccaccagggctggaggccagacccgggaagagaaggtccttgagttggccgctgatgtgaagcagaagatccctgaaatgatcgactatgaggggactcaaaaactgctagctctcgacccctcccccctcaatgtggtccttctgcaggagatccagagatacaacacactgatgcagaccatcctgttctcactgacagacctggagatacctagttgtgttagccataaaagtgaaagagttgtattggagctcagtgctgtaaaacacccgcgacaac

SEQ ID NO: 1755 - DNA, 3479 bp, Homo sapiens
tacaaatacgacaagaaacagcagcaagaaatcctggcggcgaagccctggactaaggagtgaggaggtccctggcgagacgcaggggagggaaagggtggcggagtttaagagacccagagggagagggaggtgaaaggggtgaagagctttcaccgactgggagggggacagaatatgcgtcttggatctgcaagtagagcctaagccctccgctggggctttcactcccctttctgtcgctttaatccatttgcccccgggtgatgtaaggggagaacaacaagcggtgatttaagttgtcacttctgaacatccgtattgtcatatatgccacacaccctaccttgagcccagtgtcgacatgcaccttgtttgggtcttcaactaatcccaaactggggattgcagctgttttcagaaatcgagtcagcagcccaaggtctcaaaaatagctatgagctattttcttttctttttttttaatagaaatgggtcctcgctgtgttgctcaggctgatctcgagcttctgccttcaagcgatcctcccgccttcgccttccaaagtgctgggattacaggcgtgaggcctgggcctataatagttttttgattgctggtaattatttcggaggcacacggaggctctactacctggtctctaaaatgttactccaccagttcccataagccagaaattataaaaatagagcttaagaccttttgcccttcaacaatatccatttttccctgggagtggtgacaagtcgagggatctttacccataatatttatcttttcctgagagcatctcctgagagatttcctgctatcaggaaaagataattattacgggttatgtttgagagtaaaaagagcacgaaagctaatggttagatagaaaggaaagctgtggtcaacaagaggacatacttctactgcctcacagttttttttacaaggctagccttgtctctcagtattcagattccacaatggtgaactgcggaagcacctagctagagatttccacgtcatttaattttcatgacaacccagtacagtatatccatccttttgttacaaattaaaaaacaagcaaatacgttatgtaatttatgatcatactgacataagtgaactctcaactgagcaatagtcagacctaagatcaaatctcacagctgtcactaactagttgattgaccttaggaaatttacttatccatcttcatttgtcataatatggaaataagacctacttattggtattgtcatagagattaggtgagataatgtataaaaagagtcgtctagaatgtatgtaataggagcacagtaacttgtctttcttcttttctccagtaaagggagaagccaagatttcgattcatgtcttgacttccaacatgaggtctacacatttttcagcttttggttgaaatctggcaaagcttaggaattaaatttggattctttctgtgggcagacatctaaaaaggctttgtagagacgttgactgactgctctgtaaggctgcttaagttgcttggttatctgcttgcttctgtaacaggctgtgcattttaggttcgtgtactcttaaatatttggaaactgttggcctgcctcactgtctaattgtggctctaattatattcatcctagctgtcttgggctgcattaatgagaccaaaatgtaattttattcaagagtttaattcactgatgaccaactctgaaatagtgatcataggagactaggatattagggctactttttaatttaaggctgatataacagggaagcccacccttcaacactctgttctttgagagtagggttaagagacaggttaataatgctgataacagctagcacttattagggttctagtatgtgtaaggcactaagcactttatatacattatttcatttatttcatcctaacaacaattatgaatatccctatttacagaaaaggaaacctaggcacagatattacagggttgtcccaataccacagctagggaatggcaatgtcaagattcagaccttagcagatgaatgtcagaacccacattcttaaccattaggccagaaggttaggcctcagaacagttaggcacaaccatccaagcagtcagaatccaagattgggtgattccaaattaatggagaaaaagtctgttgaactggtcatgttactcccttatttgaatagcatattaaaaaagtatttcagacttttcccctcccctaagggggatacgttgctgcactatgacatacttattgtttccagcctgcaaaaactgtccttttatactttttctccccgtagtctacactccctttccatcgctctaaattccttcaatacttactctttatcttcataaaaacttttctgaaattttactttatataaggaatttaattacattgtgattttgttttgcagtcaccattactttaagtactgcaaaatctcagcattggctctgctgaagatggtgatgcatgccagatcgggaggcaacttggaagtgatgggtctgatgctaggaaaggtggatggtgaaaccatgatcattatggacagttttgctttgcctgtggagggcactgaaacccgagtaaatgctcaggctgctgcatatgaatacatggctgcatacatagaaaatgcaaaacaggttggccgccttgaaaatgcaatcgggtggtatcatagccaccctggctatggctgctggctttctgggattgatgttagtactcagatgctcaatcagcagttccaggaaccatttgtagcagtggtgattgatccaacaagaacaatatccgcagggaaagtgaatcttggcgcctttaggacatacccaaagggctacaaacctcctgatgaaggaccttctgagtaccagactattccacttaataaaatagaagattttggtgtacactgcaaacaatattatgccttagaagtctcatatttcaaatcctctttggatcgcaaattgcttgagctgttgtggaataaatactgggtgaatacgttgagttcttctagcttgcttactaatgcagactataccactggtcaggtctttgatttgtctgaaaagttagagcagtcagaagcccagctgggacgagggagtttcatgttgggtttagaaacgcatgaccgaaaatcagaagacaaacttgccaaagctacaagagacagctgtaaaactaccatagaagctatccatggattgatgtctcaggttattaaggataaactgtttaatcaaattaacatctcttaaacagtctctgagaagtactttacctgaaagacagtatgagaaaaatattcaagtaacactttaaaaccagttacccaaaatctgattagaagtataaggtgctctgaagtgtcctaaatattaatatcctgtaataaagctctttaaaatg

SEQ ID NO: 1756 - DNA, 3153 bp, Homo sapiens
ggcgggcggcagcagcctaggcagcagcagtagcagaagcagcagccgccgagcagcagcaaggactctggagtcagagtaggactgtaggaccggagcctgagtggaacaggagtggagctggcctgggagagagcggatccctcccagcaccctcaggccacccgttgcctgcactctccctgccagacctccagagaggagagactcgggacagccagccccaggttcccccagctctctccatctgcctggctccttgggacccgttccccagcctcaggatggcgtcctccctgcttgaggaggaagttcactatggctccagtcccctggccatgctgacggcagcgtgcagcaaatttggtggctctagccctctgcgggactcaacaactctgggcaaagcaggcacaaagaagccgtactctgtgggcagtgacctttcagcctccaaaaccatgggggatgcttatccagccccctttacaagcactaatgggctcctttcacctgcaggcagtcctccagcacccacctcaggctatgctaatgattaccctcccttttcccactcattccctgggcccacaggcacccaggaccctgggctactagtgcccaaggggcacagctcttctgactgtctgcccagtgtctacacctctctggacatgacacacccctatggctcctggtacaaggcaggcatccatgcaggcatttcaccaggcccaggcaacactcctactccatggtgggatatgcaccctggaggcaactggctaggtggtgggcagggccagggtgatgggctgcaagggacactgcccacaggtccagctcagcctccactgaacccccagctgcccacctacccatctgactttgctccccttaatccagccccctacccagctccccacctcttgcaaccagggccccagcatgtcttgccccaagatgtctataaacccaaggcagtgggaaatagtgggcagctagaagggagtggtggagccaaacccccacggggtgcaagcactgggggtagtggtggatatgggggcagtggggcagggcgctcctcctgcgactgccctaattgccaggagctagagcggctgggagcagcagcggctgggctgcggaagaagcccatccacagctgccacatccctggctgcggcaaggtgtatggcaaggcttcgcacctgaaggcccacttgcgctggcacacaggcgagaggcccttcgtctgcaactggctcttctgcggcaagaggttcactcgttcggatgagcttgagcgtcatgtgcgcactcacacccgggagaagaagttcacctgcctgctctgctccaagcgctttacccgaagtgaccacctgagcaaacaccagcgcacccacggagaaccaggcccgggtccccctcccagtggccccaaggagctgggggagggccgcagcacgggggaagaggaggccagtcagacgccccgaccttctgcctcgccagcaaccccagagaaagcccctggaggcagccctgagcagagcaacttgctggagatctgagccgggtggaaggtctcccaccccagggctgccctgacagtctctcttggctctctagaccactgcttgccaatcactctctttaccccatgcatgccatccttcggggctctctccctctgtctccctcctggccattctgggcttgggtatctccttgcatgcctcctcagctcaccttctctcttcaccatgagactggctttccacagactctcatctcaggccctccccttgtgcctgatacctgcactccggcttcctagactctggccctgccacaccaacacactttctatttgggctcccaacactatttctccatctcactccttgacatgtacccctttctgcttctcaagcttatttcctgctgtccctcagcctccaggcttcagtcttcccaacttcttacaccattgctttccattctccagaactcttttttcctttttacaaacacaatgataatgataatttattgccccctggtggcctcttcatcaggggtattggggttagtgacctggccagagggtgccaagaggggggcagaccagtggggatctgatcccaaagatggggtgaccccagggtcagggaggctgcccccaggcctgtatatttaacccctatgtaccaggagtaatgaatagtaataattctatttatgtaagttatgatgacgggtcaggtagagtgagctggggagggaagtggatccatttctgctaaggaaattctagtcaaatgcatctctgtatagacaaaatgttagtggagaagatcttgttaatagaatgtctatcatcagaatctcagttgatagggtttctcttgtaatgaagtctctacaaattgggttagctacatctctgctaaacagttgatggggtatctcttgattagggggatccctaatatccccagccccagccagaagctgtgaaacctcaagtcctatggaggggagaaggactggaatgtaccccatctcccttgactgcagagcaggttcctccactgccccaccccttagacaccatgaccccatcaggttaatcccctgttgccatggttatggagagcttgcagctgccatcttagatgtgctctttggggaagcccatctaacaggaggacattggtttgggggtgcacctcctgaagaatgggtggggaaggctttctctaggatcagattcaaataaatcaagtatgtattgagtgcctactctgtgcaaggcactatgctagatctggtgcctagaagccctgagaaagaacttaaagagctaggaggacagaggcccccaagctgatctggtggtgcatccacgcacccccaccctgggactttggatgctcccatctccacctccagtgacttttaaagccgcttcgtgcctttcctgtaacgttggatcctccttttctgtcccctgctgtctcaaggccccaagttaaagggttaaagccgctggagcttggggagagaacattgtggaatggaagggatcatgccctttgtggagtcttttttttttaatttaataaataaaagttggatttg

SEQ ID NO: 1757 - DNA, 4141 bp, Homo sapiens
gcggagcaggataggccaggctgagaagtgcccttgcatgggtaggcgtaggagctggctgagatcaagccatgccttccttctccggccccagagcacctggtgcagagcgtctgcaagtcctacagggagacatgccagctgcggctggaggacctgctgcggcagcgctccaacatcttctcccgggaggaagtgactggctaccagaggaaggtgaggccaggagaccagcaggaagggaacgtatcccacccccaccgggagagttcagagatggctacctgcgcacgactgggtcctggggcagggcgggacatcacagacacaggctggccaacaagcatgtgcacaccttttatgtacagttgcgaatgtgtgtatctgtctacaccccagcagatggatgagcgcttttccttagttcttgcctattaaaattgtacctggccttcatcctacctcctctaccatgcagaccttggtgcaccctccttcctcctcttccatcaacaataacaataatcagaaccctgattaccatttgttaaacaccccttctctgccaggcattgtgctaaacgctttatgtaaattatcctcagcccctaccacaaccaacctatgagggtggcatttattcctacttttaacagacagaaactgagcctagaggggttaataggtttcctcaaagtcacaaagtggtggaaccaaagtcaaattcagattcatcaggctccaaagtttatgctgccttttcgatcacactctcataccacctgctctaaacacactcgtttggcacttcacatttgcttctccaggttattgagaccttgggcataacctttgtgggggaaggggcagctgtatgtcctgttcacctcaacgagatataccttgttggagggcaaagctgtatctcatactttttggattccctcacaacagctaactcggtgtcagcagccggtaggtgctcagtgtgtgggactcactggcaggaatctgtgcatttgtgctaagaccaggcttttgaaaatgctagttgagaacataggagttcagagcctaccccttgcagtttattaggtggggctccagggctcaggaggatcacagggccacacagagcgctacagcgggaccctcctccctccctgcagtccatgtgggagatgtgggaacggtgtgcccaccacctcaccgaggccattcagtacgtggtggagttcgccaagaggctctcaggctttatggagctctgccagaatgaccagattgtgcttctcaaagcaggtgcccagggatgggtgggcaggcctggggacaaggggacagagccaagtggagggaggtggcttaaggaaatcagggggacagagtcagatcctggctttgcttgacactgtccctgcatcttctctccccactgcccaggagcaatggaagtggtgctggtttggatgtgccgggcctacaatgctgacaaccgcacggtcttttttgaaggcaaatacggtggcatggagctgttccgagccttgggtgaggggcagggagaaatgagagggaagattctgatgccaaccccaggcaaagctttgtgacccagggcaccctcttttcagggcgaattgccccctctgctctaaacacaataagggcggtgtcctcgggcaccatcgctccagccactctctcacttttctcatttccactccatcaggctgcagcgagctcatcagctccatctttgacttctcccactccctaagtgccttgcacttttccgaggatgagattgccctctacacagcccttgttctcatcaatgcccgtgagtgttgctgggcttgggtgaaggacattcaggtggcaggggcatggcagatattgaagaagagtctagaccttcagatgtagttaaatctgggaaattgctttaaatagcagaatgagccctactcagtattgctataaaataaaatgagttaaaataaagattcagaggactctcagagagggacaagagcagcataaggtggggttgtgggaagtggggagaaatgaggttgagaggaaatgagccactttcctgacagaaatgtgtctgattgttagtctatggcagtgatttcattgtagcacacatcagaatcacctggggagctttaaaaactattgctgcctgggtcccacttccagagattccagtgtacatgtgctccatgacttatgatggggttatgtcccaataaacctatcgtaagttgaaaatatggtaagttgaaattgcatttaacacgcctaacttactgaacaccatagcttagcctagcctaccttaaatgtgctcagaatgcttacattagcctacagtctggcaaaagcatataacacaaagcctattttataataaagtgttgaatagctcatgtaatttattgaatatggttctaaaagtgaacagcaggatggttgcgtgggtattcaaagtatggtttctactgaatgcaagtggctttctcaccaacataaaatcaaaaaatagtaagtcaactcatcataagactgggaccatctgtaattgataaggggtgcactgaattttaacagccacccccaggccaccaagattaagaatcactgctctgtgtgaactaattttaaggctgtatgcctataataggaagactctggatatcctatccactcccctggcatggagtagctgggctgagccagatgaatactaaatattcagagaacctagggaagtgggtcaagctgctaacctgagtttgcagatcgagactatcagtcttctggctctgccagtgagtggacacctaaatatgcccttcaaactagaagataaaaactttaaagatgacttctggatattttatagaatcagggcaaaagttagtcacagattgctgcaagccccctggtgcaggcctgggcaccttcaggaaggccacctcctatcaggagcccttttcgtacatgggggagctcttttccaactcttgttacccctatgacagaatcctagtgcctagcattgaatgagctatgtggaatatcaggttaccagggagaaggtagcttggagtcaggagatcagaaattctcatacctttcatctcttcccagttttccttgtagacagctagccaagcccaacgtccagagcttaccattatcaaaccaaggcacacacatgcacgcgctcagcttagaagacctctatccagcacagatgtccacaaagatacacccttttgttgggagttaatgtccatgttctttcttgttctcattacggtcccaccccctcctccagatcggccagggctccaagagaaaaggaaagtagaacagctgcagtacaatctggagctggcctttcatcatcatctctgcaagactcatcgccaaagcatcctggcaaagctgccacccaaggggaagcttcggagcctgtgtagccagcatgtggaaaggctgcagatcttccagcacctccaccccatcgtggtccaagccgctttccctccactctacaaggagctcttcagcactgaaaccgagtcacctgtggggctgtccaagtgacctggaagagggactccttgcctctccctatggcctgctggcccacctccctggaccccgttccaccctcacccttttcctttcccatgaaccctggagggtggtccccaccagctctttggaagtgagcagatgctgcggctggctttctgtcagcaggccggcctggcagtgggacaatcgccagagggtggggctggcagaacaccatctccagcctcagctttgacctgtctcatttcccatattccttcacacccagcttctggaaggcatggggtggctgggatttaaggacttctgggggaccaagacatcctcaagaaaacaggggcatccagggctccctggatgaatagaatgcaattcattcagaagctcagaagctaagaataagcctttgaaatacctcattgcatttccctttgggcttcggcttggggagatggatcaagctcagagactggcagtgagagcccagaaggacctgtataaaatgaatctggagctttac

SEQ ID NO: 1758 - DNA, 3514 bp, Homo sapiens
aaacagttataagaagtaacttaggagatgaacaagtttactttagctcttctttttctccctacaatttacaaaactcagataagtaaattaagggtgcacaagaggagagaaaatgagatctgatagaaaacttcaccgtgagacttcaagaatatctgcagagaaactcatcaaaaggataactgaaaatcctgaaaggtactttaagtcaggagttcatgagttttcagtattctgtgggagaaagaatctacgggaatagcagttcctgtgctccacttgaacctgcgtcaagatatttaaaagcagggaatgctgctttgaaggaaagccacagaagttggcttatgtgctgtggagacagtgtggcccccttccactcccagattgtgggaagaaacctcaagtggcctgcaagctggacgtggctggtcatcatatttcctgcatcatcagtcagaaaatggcatgcagctgtattttcactgaaccacactgtgcggggacacaattggagacactggctactttatcaaggcttaaattggaatgacatgctttcagatataaacagactgcttgaaggaatcaaagttgacttatagagccaataaaagccccttgggagaactgtacttataccttatttacacagtccctgtacagagttcctgacctgtggtaaataatttttgacgggcccaggctcaagaggagagaaattcatccaatcatataagcatctgaaggcacagataaatttgcggctgggctcaaggctttaaaaagtctaatctgagattccttatggagaaacctccagaaaagccaatttttaaaaagtctatatggattggtccattcttgcactgctataaagaaatacctgaaactggataatttgtaagaaaggaggtttgattggctcattgtttcacaggctgtacaggaagtatggctggaaggcctctggaaactttcagtcatggcagaaagtgaaggagaagcagacacgtctcacgtggacaaagaaggcagaacagagagagaagggggaggtgctgcacacttttaagcaaccagatctcatgataactcactcattatcatgagaacagcaagggagaagtctgcccacatgatccaatcaccttgtaccaggcccctactccaacactagggattacaatttgacatgagatttgggtggggacacaaatccaaaccatatcattcttcccctggctcctcccatatctcatgtccttctcacattgcaaaatataatcacctcttttcaacagtcccccgaaatgttaattcatttcagcattaactcaaaagttcatagtcaaaagtctcatttgagatgaggaaagtcccttctgcctatgtaaaataaaaaacaagttagttatgtccaagatacaatgagggtacaggcatttcataagtacacctattcccaaagggagaaatcagccaagttttggcagctccactcttgtggctctgcaagatatagcctccttggttgatttcataggttggaattgagtgcctgcagcttttccatgtgcacagtgcaagctgccagtggatctaccattttgatgtctagaggacagtggccctcttctcatagctccaccaggcagtgctccagtttgaggaccctgtatgagggccctgccaccacatttcccctctgcactgtcctagcagaggttctccatgagggcttgcccctgcaggcccctgcagcagacttctgcctggacatccaggcatttccatacattctctgagatctagatggaggctcccaagcctgaactcttggcttctgtgcacctgcagacttaacaccatgtggaagctgccaaggcttagggcttgcaccctctggagcagtggcctgagacctatctggggcccttttagctatagcaggagctggagaatataggatgcagggagcagtgtctcaagattgcacaaggcagcagggtcctgggcctggcccatgaaaccatacctccctcctaggcctccaggcctgtgatgggagaggctgccatgaaggtctctgaaacatcttcaaggcattttctccattgttttggctattaatatttggctcctctttatttaggcatattcctcccatgaaaatgaatctttcttttctaccacatggtcaggctgcgaattccctaaacttttatgctctgcttcccctttgaaaagtttcaatttgagataatctcttttctcatgcatatgaccatatgctgttagaagcagccagggcagaccttgaatgctttgctgcttagatatttcttttgccagataccctaaatcctctctctcaagttcaaagttccacagatccctagagcaggggcacaatgctaccagtctctttgctaaaggacagcaagagtgacctttagtccagttcccaataagttcctcatctccatctgagaccacctcagcctggacttcattgtccatattactattggcattttggttgcaacaatttaataagtctctaggaagattcaaactttcccatatcttcctgtcttcttctgagccctccaaattgttccaacttctgcccactatccagttccaaagctgcttccacattttcaggtatctttatagcaatgccccactcccagtattaattttctgtattagtccattctttcactgctttaaataaatacctgaaactgggtaatttattagaaaagaggtttaattggctcacggttctgcaagctgtaacaggaactataattcctgtagtattgtaggaattgtagtaggctggagaggcctcaggaaacttttaatcatggttgaaggtgaaggggaagcaggcacatcttacatggccagagaaggagaaagagagagagaagggagaggtgctacaacttttaaacaaccagatctcataagaactcattcactatcatgagaatagcaagtggagagtctgcccccatgatccagtcacttcccaccagacctcttctccaacactgggtattataattcaacatgagattagggtggggacacaaatccaaatcatatcaccatataacaaataattattcttgctgtactttatgcaaataattgggccaagtataattggactgatatggtttggctgtaccctcacccaaaacttcatcttgaattgtagttcccataatcctcatgtgtcatgggggggacccagtagtaggtaattgaatcatgggggtggttaccctcacagtcttctcatgatagtgagttctcatgtgatctgatggttctataagaggcttttcccccttttgcttagctgccaccttctccttgctgccaccatgtgaataaggatgtgtttgctttcccttccaccatgattatgggtttcctgaggcctccccgccatgctgaactgtgagtctattaaacctttttcctttgt

SEQ ID NO: 1759 - DNA, 4067 bp, Homo sapiens
agaagagctgctcagttaggacccagagggaaccatggaaaccccagcgcagcttctcttcctcctactactctggctcccagagacttccggggaatttgtgttgacgcagtctccaggcaccctgactttgtctccaggggagacagccaccctctcctgcaggaccagtcagtctgttaggagcgtctacatagcctggtatcaacagaaacctggccaggcccccaggcccgtcatacatggcggctcttccagggccactgacatcccggacaggttcagtggcagtgggtctgggacagaattcactctcaccatcaacagactggagcctgaagattttgcagtctactattgtcagcagtatggtaggtctgtcactttcggcggagggaccaaggttgagatcaaacgtaagtgcactttcctaagtcttcttcttataaggtttttaaatttaggactgaggaatcgagaattagttcatcttaaggaacagtcaagcgctagacagttaagtgaggcatctcaatggtcagattttctctgcatcggtcaggttagtgatattaacagcgaaaagacatttttgttagggggaaagttatgaagttaacactgtggatcatattcggccaagggacacgcctggagatgaaatgtaagcaacctttcagtattgtcttctgaaatttggctctgacggccagtcttgacttccagaggcttgaagaggagtttggtaaatattggtaaatgagggcatttaagatttgccatgggttgcaaaagttcaactcagcttcaaaaatggatttggagaaatatagcttaaattgctctaaactgaatgacacaaagtcaaaaaaaaaaagtgtaactaaaaaggaacccttgtatttctaaggagcaaaagtaaatttatttttgttcactcttgccaaatattgtattggttgttgctgattatgcatgatacagaaaagtgtaaaaatacattttttagtctttctcccttttgtttgataaattattttgtcagacaagtataaaaatcaatagcacgccctaagaaaaatcagggaaaagtgaagtgtacctatttgctatgtagaagaggcagcttacttgaaaatcagcagcaatgttgtttttagagtctgtaataagtaataaagtcaaaaagacacattctataggaataagggcctcacaggtagagctcattttttaaaaatcccatttgtacaatagactaaacgtgaaattatctcttattgtaatggtggaaaggtggttattcccaaaagctcaatctcagagaaatgtgtttaaatgaaaaaaagaaaataaatgcattttttaatgaccgtgggtctgtgaaaaaaataggaaatattttaaagagtatgttctttcattatcctctgttatttcttgtctacatttttattctgtcaagaaggccgtggcaccgcgagctgtagacagagccgcggtctttctcgattgagtggctttggtggccatgccaccgcgctcttggggcagccgccttgccgcaagtggccgtggccaccctgtgtctgcccgattaatgctgccgtagccagctttcctgatgcacagtgatacaaataatgccactaagggaaagagaacagaaacgtaatgggcgctgagctgggaaagccagggagaagactgatttattagagatttcagaaataaaattcacattcattatgatatctcattagtgaaaatttccattaggggattgtaaataatttaaagcttttttttttttcagtgctatttaattatttcaatatcctctcatcaaatgtatttaaataacaaaagctcaaccaaaaagaaagaaatatgtaattctttcagagtaaaaatcacacccatgacctggccactgagggcttgatcaattcactttgaatttggcattaaataccattaaggtatattaactgattttaaaataagatatattcgtgaccatgtttttaactttcaaaaatgtagctgccagtgtgtgattttatttcagttgtacaaaatatctaaacctatagcaatgtgattaataaaaacttaaacatattttccagtaccttaattctgtgataggaaaattttaatctgagtattttaatttcataatctctaaaatagtttaatgatttgtcattgtgttgctgtcgtttaccccagctgatctcaaaagtgatatttaaggagattattttggtctgcaacaacttgataggactattttagggcctttttaaagctctattaaaactaacttacaacgattcaaaactgttttaaactatttcaaaatgattttagagccttttgaaaactcttttaaacactttttaaactctattaaaactaataagataacttgaaataattttcatgtcaaatacattaactgtttaatgtttaaatgccagatgaaaaatgtaaagctatcaagaattcacccagataggagtatcttcatagcatgtttttccctgcttattttccagtgatcacattattttgctaccatggttattttatacaattatctgaaaaaaattagttatgaagattaaaagagaagaaaatattaaacataagagattcagtctttcatgttgaactgcttggttaacagtgaagttagttttaaaaaaaaaaaaaaactatttctgttatcagctgacttctccctatctgttgacttctcccagcaaaagattcttattttacattttaactactgctctcccacccaacgggtggaatcccccagagggggatttccaagaggccacctggcagttgctgagggtcagaagtgaagctagccacttcctcttaggcaggtggccaagattacagttgacctctcctggtatggctgaaaattgctgcatatggttacaggccttgaggcctttgggagggcttagagagttgctggaacagtcagaaggtggaggggctgacaccacccaggcgcagaggcagggctcagggcctgctctgcagggaggttttagcccagcccagccaaagtaacccccgggagcctgttatcccagcacagtcctggaagaggcacaggggaaataaaagcggacggaggctttccttgactcagccgctgcctggtcttcttcagacctgttctgaattctaaactctgagggggtcggatgacgtggccattctttgcctaaagcattgagtttactgcaaggtcagaaaagcatgcaaagccctcagaatggctgcaaagagctccaacaaaacaatttagaactttattaaggaatagggggaagctaggaagaaactcaaaacatcaagattttaaatacgcttcttggtctccttgctataattatctgggataagcatgctgttttctgtctgtccctaacatgccctgtgattatccgcaaacaacacacccaagggcagaactttgttacttaaacaccatcctgtttgcttctttcctcaggaactgtggctgcaccatctgtcttcatcttcccgccatctgatgagcagttgaaatctggaactgcctctgttgtgtgcctgctgaataacttctatcccagagaggccaaagtacagtggaaggtggataacgccctccaatcgggtaactcccaggagagtgtcacagagcaggacagcaaggacagcacctacagcctcagcagcaccctgacgctgagcaaagcagactacgagaaacacaaagtctacgcctgcgaagtcacccatcagggcctgagctcgcccgtcacaaagagcttcaacaggggagagtgttagagggagaagtgcccccacctgctcctcagttccagcctgaccccctcccatcctttggcctctgaccctttttccacaggggacctacccctattgcggtcctccagctcatctttcacctcacccccctcctcctccttggctttaattatgctaatgttggaggagaatgaataaataaagtgaatctttgc

SEQ ID NO: 1760 - DNA, 3396 bp, Homo sapiens
aggaactgctcagttaggacccagacggaaccatggaagccccagcgcagcttctcttcctcctgctactctggctcccagttaccactggagaaatagtgatgacgcagtctcctgccaccctgtctgcgtatccaggggaaagagtcaccttctcttgcagggccagtcagagtgtgggcaccaccgtagcctggtaccagcagaaacctggccaggctcccagacgcctcatctctggtgcgtctattagggccgctgatattccagccagattcagtggcagtgggtctgggacagagttcactctcaccatcagcagcctgcagtctgaagatgttgcagtttactactgtcagcagtacaatatgtggcctccgtggacgttcggccaggggaccaaggtggagatcaaacgtgagtagaatttacagtttccgtcgtcggttgtctgtgtcttcgattccctgtgtttatggagtgatctatggggtgactccacaatcagcctctgatgtcgttcagggaaaagaaagagagcagcctgaagtcaaagacgagaattgattgcacattttccttgaagagcaaacaagactcagtcagtgggtgagaatcagttgtgtatgcactaggttcagaaatgtcctggggaacaggacatgttctggccagcgccttggtcatttgtcagaaagggagtctctgtgggggggggaagtttaggggaaccactgtgtgtgcaattttggccaggggacccagctggagaccgagcgcaagtacttttgcctctgatgcgtcagcactcctctgtgaggatttcctgtagtcgggtgcccgggatccacgcagcttcactcccaggtatagtgcagcggtggggacagtgttccactggacactaggttgtgcctaagtcttaacatttctaaggcaaaatgacatcactgggggaaagaggcttcttcagctttcagggaggtttttgtcaaaagttgggacggaacttaaaacggtgagcaaacagacgaatcaatgggtttgagaggagaatgggattcaagggggaaatggggaagaggtagctagacttttctctgaacaagcagcctctctcatatggttggcctcaagagaggttcttgttgaggggaaagggtgagatccctcactgtggctcactttcggcggagggaccaaggtggagatcaaacgtaagtgcactttcctaatgctttttcttataacgatttaaatttggagcgtttttgtgtttgagatattaactcaggtcaattccaaagagttccagattctttcaaaaagtcagatgagtacgggatggaaaattagctcatcttaaggaatagccaaccgctagccagggggaaagtaattaagttaacactgtgcatcaccctcggccaagggacacgactggagattaaacgtaagtaatttttcactattgtcttctgaaatttgggtctgatggccagtattgacttttagaggcttaaataggagtttggtaaagaatggtaaatgagggcatttaagatttgccatgggttgcaaaagttaaactcagcttcaaaaatggatttggagaaaaaatgattaaattgctctaaactgaatgacacaaagtaaaaaaaaaaaagtgtaactaaaaaggaacccttgtatttctaaggagcaaaagtaaatttatttttgttcactcttgccaaatattgtattggttgttgccgattatgcatgatacagaaaagtggaaaaatacattttttagtctttctcccttttgtttgataaattattttgtcagacaacaataaaaatcaatagcacgccctaagaaaaatcagggaaaagtgaagtgtacctatttgctatgtagagtaggcagcttacttgaaaatcagcagcaatgttgtttttagagtctgtaataagtaataaactcaaaaagacacattctataggaataagggcttcacagatagagctcattttttaaaaatccaatttgtacattagactaaacgtgaaattatctcttattgtaatggtggaaaggtggttattccccaaggttaatctcaaagaagtgtgtttacatgaaaaaaagtaaataattgcattttttaatgaccgtgggtctgtgaaaaaataggaaatattttaaagagtatgttctttcagtatcctctgttattacttgtctacatttttattctgccaagaaggccgtggcaccgcgagctgtagacagagccgcggtctttctcgattgagtggctttggtggccatgccaccgcgctcttggggcagccgccttgccgctagtggccgtggccaccctgtgtctgcccgattgatgctgccgtagccagctttcctgatgcacagtgatacaaataatgccactaagggaaagagaacagaaacgtaatgggcgctgagctgggaaaaccagggagaagactgatttattagagatttcagaaataaaattcacattcattatgatatctcattagtgaaaatttccattaggggattgtaaataatttaaagcttttttttttttcagtgctatttaattatttcaatatcctctcatcaaatgtatttaaataacaaaagctcaaccaaaaagaaagaaatatgtaattctttcagagtaaaaatcacacccatgacctggccactgagggcttgatcaattcactttgaatttggcattaaataccattaaggtatattaactgattttaaaataagatatattcgtgaccatgtttttaactttcaaaaatgtagctgccagtgtgtgattttatttcagttgtacaaaatatctaaacctatagcaatgtgattaataaaaacttaaacatattttccagtaccttaattctgtgataggaaaattttaatctgagtattttaatttcataatctctaaaatagtttaatgatttgtcattgtgttgctgtcgtttaccccagctgatctcaaaagtgatatttaaggagattgttttggtctgcaacaacttgataggactattttagggcctttttaaagctctattaaaactaacttacaacgattcaaaactgttttaaactatttcaaaatgattttagagccttttgaaaactcttttaaacactttttaaactctattaaaactaataagataacttgaaataattttcatgtcaaatacattaactgtttaatgtttaaatgccagatgaaaaatgtaaagctatcaagaattcacccagataggagtatcttcatagcatgtttttccctgcttattttccagtgatcacattattttgctaccatggttattttatacaattatctg

SEQ ID NO: 1761 - DNA, 3451 bp, Homo sapiens
acacgcagctagccggagcccggaccaggcgcctgtgcctcctcctcgtccctcgccgcgtccgcgaagcctggagccggcgggagccccgcgctcgccatgtcgggcgagctcagcaacaggttccaaggagggaaggcgttcggcttgctcaaagcccggcaggagaggaggctggccgagatcaaccggtactgtgcagggagggagccgcagctacagaggatttcatgttcccagcacagctgcttgctggctctgctgtttcaggagtttctgtgtgaccagaagtacagtgatgaagagaaccttccagaaaagctcacagccttcaaagagaagtacatggagtttgacctgaacaatgaaggcgagattgacctgatgtctttaaagaggatgatggagaagcttggtgtccccaagacccacctggagatgaagaagatgatctcagaggtgacaggaggggtcagtgacactatatcctaccgagactttgtgaacatgatgctggggaaacggtcggctgtcctcaagttagtcatgatgtttgaaggaaaagccaacgagagcagccccaagccagttggcccccctccagagagagacattgctagcctgccctgaggaccccgcctggactccccagccttcccaccccatacctccctcccgatcttgctgcccttcttgacacactgtgatctctctctctctcatttgtttggtcattgagggtttgtttgtgttttcatcaatgtctttgtaaagcacaaattatctgccttaaaggggctctgggtcggggaatcctgagccttgggtcccctccctctcttcttccctccttccccgctccctgtgcagaagggctgatatcaaaccaaaaactagagggggcagggccagggcagggaggcttccagcctgtgttcccctcacttggaggaaccagcactctccatcctttcagaaagtctccaagccaagttcaggctcactgacctggctctgacgaggaccccaggccactctgagaagaccttggagtagggacaaggctgcagggcctctttcgggtttccttggacagtgccatggttccagtgctctggtgtcacccaggacacagccactcggggccccgctgccccagctgatccccactcattccacacctcttctcatcctcagtgatgtgaaggtgggaaggaaaggagcttggcattgggagcccttcaagaaggtaccagaaggaaccctccagtcctgctctctggccacacctgtgcaggcagctgagaggcagcgtgcagccctactgtcccttactggggcagcagagggcttcggaggcagaagtgaggcctggggtttggggggaaaggtcagctcagtgctgttccaccttttagggaggatactgaggggaccaggatgggagaatgaggagtaaaatgctcacggcaaagtcagcagcactggtaagccaagactgagaaatacaaggttgcttgtctgaccccaatctgtttgaaacctgactctgcttctctcatttgtcttcctaccctactcacataattcactcattgactcactcattcaccagatatttattgacctgctattataagctttacatcctcccatgttgtcctggcatgtgcagtatacacggtctaactcatctctccccagatctctcagaaccttgagcttgggaattgaactggggtcacctgtgtcctttcttatggactcgcaggattttagaaccctaatgcaccctggagggtagctgggccagacttctcatttcacaggtgaggagactggtgccccacagggattaagtgccttgcccaaggtcaggcttatctccagagggaggtgccctggactggggcccagatgttcagggaccctgcctacacctcatttccagtgtgggctgccttagttagttatgagaacagggaagggctgggaagagacagcctccaaggtcaacacttggagagggtttcacttgctctgaagaccctggtccaggattcgccctctcccatgccttcaagtcagcatcaggcttagggcaaagaccaggcctctgaagctgcctcttgtaattcatgcaggaagatgtcaaagtcagccccatcttggctgatcagggtgttcagccttaaccccacctgtgttctgaagtctcttaccctacctgctcaggactgagacagttattcactgaacatatttattaagcacttgctgtaggccaacagttaagaatccaataatgaaatggacagattcatggaacttagagtccaataggaaagtgagacccagacaatgacaatgagataaatgttaggaagggggaggtatggggtgacttccctgcagtcctgggggcctagatgggcccaagactgggtgagagtcttggcagagcctttgcaacaccttaagtggacaggactgggaggtcttggtggttggagccaacgtgggttccctgcggctccttagtcacctctgatagcagattgagggaggaaaacaggtaaggcatgaggaaatggccaggttgggttaacccactggtttcaaccagttcaggaatgaggttatttggccatgactggctgatcttgagctcaaggatctgcttcaaatgcacacaggcctagttgaagtttaaaccccagcaaaacattcctccctgtaaatggaaaatcctacttctacccccaccctgccctgttttttgttttttttttccccaagatcattagatgtcctcacccctcctcactgcctctcctctctgggacaggctgggacctttgaggaagataaagccttccttgactacccatcatattcagtgtccctgttcctcactcagagaggaaggcaggaccagtcaggcttatttcagtaagttccacagttctacaagactgcaggaattctccttaagggaggagagcaagcaggtgtggccccagcttctggaaatggcagaagagagggttttctcattgaatgggggtgggggctcgtgtgtcctgggaaaccccatcagtcccttcatttcttgagactcaactcctgggaggagagggtctcaagagttgtccctggaaggagggcgggggcagtctgcatctatttcaggttgtggctcttggttctaggactcttacttctctggctaagggctcagcttcttgggacttcaaccatcttctttctgaaagaccaaatctaatgtaaccagtaacgtgaggactgccaagtatggctttgtccctatgactcagaggagggtttgtcgggcaaattcaggtggatgaagtatgtgtgtgcgtgtgcatgggagtgtgcgtggactgggatatcatctctacagcctgcaaataaaccagacaaactt

SEQ ID NO: 1762 - DNA, 4319 bp, Homo sapiens
acgtgtactcgccgccgcctcgggcactgccccaggtcttgctgcagccgggaccgcgctctgcagccgcagacccggtccacacggccaggggctacgacccttgggatctgccctccgctcagctcgagcttccctcgtggccgacggaacaatgaaggctaaagacctaatagtcacaccagctaccattttaaaggaaaaaccagaccccaataatctggtttttggaactgtgttcacggatcatatgctgacggtggagtggtcctcagagtttggatgggagaaacctcatatcaagcctcttcagaacctgtcattgcaccctggctcatcagctttgcactatgcagtggaagtatttgacaaagaagagctcttagagtgtattcaacagcttgtgaaattggatcaagaatgggtcccatattcaacatctgctagtctgtatattcgtcctacattcattggaactgagccttctcttggagtcaagaagcctaccaaagccctgctctttgtactcttgagcccagtgggaccttatttttcaagtggaacctttaatccagtgtccctgtgggccaatcccaagtatgtaagagcctggaaaggtggaactggggactgcaagatgggagggaattacggctcatctctttttgcccaatgtgaagcagtagataatgggtgtcagcaggtcctgtggctctatggagaggaccatcagatcactgaagtgggaactatgaatctttttctttactggataaatgaagatggagaagaagaactggcaactcctccactagatggcatcattcttccaggagtgacaaggcggtgcattctggacctggcacatcagtggggtgaatttaaggtgtcagagagatacctcaccatggatgacttgacaacagccctggaggggaacagagtgagagagatgtttggctctggtacagcctgtgttgtttgcccagtttctgatatactgtacaaaggcgagacaatacacattccaactatggagaatggtcctaagctggcaagccgcatcttgagcaaattaactgatatccagtatggaagagaagagagcgactggacaattgtgctatcctgaatggaaaatagaggatacaatggaaaatagaggataccaactgtatgctactgggacagactgttgcatttgaattgtgatagatttctttggctacctgtgcataatgtagtttgtagtatcaatgtgttacaagagtgattgtttcttcatgccagagaaaatgaattgcaatcatcaaatggtgtttcataacttggtagtagtaacttaccttaccttacctagaaaaacattaatgtaagccatataacatgggattttcctcaatgattttagtgcctccttttgtacttcactcagatactaaatagtagtttattctttaatataagttacattctgctcctcaaacaaatgcaattttttgtgtgtgtttgaaagctaatttgagaaaatttcataggttacatttcctgcagcctatctttatccacagaaagtgttttcttttttttaaatcaagacttttaaaactggatttcctcccatcactgttttttgaaggtcctccaagtccgtgttaaggtaaatatctgttttcttcctgatgtcacagcctgagcatactctgtgcattaggaagacctgagtgcatttcccaccattgtcctttccacattatgttgtagctggctggctgtcaggcgactacaagactgagggtcttgtgccttatagatctttgtatcccccatggctgacatatagtaggtactcagtaaatggttttataatgaatcagtgaacattttgcttctatagaagtgtaccttctttgtttctatattatgaaacctctttattagaatttgtgattgattctgacagtgtatagatttaccttatattgtctttattttccatgagctactaagtcattagagatactctgaagcatagttagtttaggaaatcacttcatattgattgtattagaattatcttggaattgaagatatatccctagagcaggggaccccaacccccaggccatgggccacacagcaggaagaggtgagtggtgggccattgaggagcttcatctgtatttatggctacttcccatcactcgaattaccacctgaactccacctcttgtcagctcagtggcagcattagattctcataggagcacaaatcctattgtgaactctgcatgcaagggatctaggctatgcgctccttatgagaatctaatgcttgatgacctgaggtgtaacagtttcatcctgaaaccacccttcaccctgcagtctgtggaaaaattgtcttccacaaaactggtccctggtgccaaaaatgttggggaccactgctctagagagaggtcatgatatcataccaaccaaatggaaatgacaaatgttttatgtcaagtgttaattgcagaaataaatcttttttttttttttttggtagaaaacaaagaggcatactctgatttttatactctgtttttgcaggtgctcttttctttgaatggagatttgatgagcaagtggttaggatgcagggagagctactatgggtgatattttccttgtttaggagctgtgagttaaaattgtatcctttgtggtttatctaaggaaagtcaaatcttgacagaaaacatttttccttggaaggtcaactctcagacattgtattttggtttccctcagtcctcataacttccttcttgctgaacatattttattctcttttcagagaaggaaaataaaaaggattctaaaagtttgatgcattggaaaaatttccttgaggcatttagcaacacatagaaaatgggctttgattcttttccaaaacttttagccatagggtcttttatagacagggatagtaaaatgaaaattgagaaatataagatgaaaaggaatgataaaaatatcttttagggggcttttaattggtgatctgaaatcctgggagaagctgttcttttcaggcctgaggtgctcttgactgtcgcctgcgcactgtgtaccccgagcaacattctaagggtgtgctttcgccttggctaactcctttgacctcattcttcatatagtagcctaggaaaaagttgcaggtaatttaaactgtctagtggtacatagtaactaaatttctattcctatgagaaatgagaattatttatttgccatcaacacattttatactttgcatctccaaatttattgtggcgagacttgtccattgtgaaagttagagaacactatgtttgtatcatttctttcataaaacctcaagagcatttttaagcccttttcatcagacccagtgaaaactaaggatagatgtttaaaaactggaggtctcctgataaggagaacacaatccaccattgtcatttaagtaataagacaggaaattgaccttgacgctttcttgttaaatagatttaacaggaacatctgcacatcttttttccttgtgcactatttgtttaattgcagtggattaatacagcaagagtgccacattataactaggcaattatccattcttcaagacttagttattgtcacactaattgatcgtttaaggcataagatggtctagcattaggaacatgtgaagctaatctgctcaaaaagatcaacaaattaatattgttgctgatatttgcataattggctgcaattatttaatgtttaattgggttgatcaaatgagattcagcaattcacaagtgcattaatataaacagaactggtggcacttaaaatgataatgattaacttatattgcatgttctcttcctttcacttttttcagtttctacatttcagaccgagcttgtcagcttttttgaaaacacatcattagaaaccaagattttaaaatgaagtgtcaagacaaaggcaaaacctgagcagttcctaaaaagatttgctgttagaaattttctttgtggcagtcatttattaaggattcaactcgtgatacaccaaaagaagagttgacttcagagatgtgttccatgctctctagcacaggaatgaataaatttataacacctgctttagcctttgttttcaaaagcacaaaggaaaagtgaaagggaaagagaaacaagtgactgagaagtcttgttaaggaatcaggttttttctacctggtaaacattctctattcttttctcaaaagattgctgtaagaaaaaatgtaagac

SEQ ID NO: 1763 - DNA, 3364 bp, Homo sapiens
agttacctgtctgtccccctggacaggtatgttgggtggagcagggcgggcagtcagcgagcgtgctgcccctgtgtcatggacaggtccttgggggctcaacctggcctgttggggttggtggccctgctgttgtgttgggggaggaggtcagctgcagggctggaagcttagctgtcagggctgcggaggacctgtggggtgaggttgctgctcaagaaggaggctcttcagggaccagggaacaagagggagtgaccagcaaaccccagagagagctaatcatgccccagaactgcagcgcgcctgtgcctatggaaggagggtcccccatgtgggctgagcagggctgtccgagacaggatgtgcagccccccggtactggtgagctggggggtcctgcagccccatggctgcgaatcacaagatgcttggatttagacacttttggacttttcacatcacttgttggattccaaaccaggcacttctggctgcctccctgccttccctctctcttgcccactcacacgtgttctttttgccgctcttgtctctcacagacgttctttctcttcctctccctccccacgtcccttcccccccaccctctccctgaggaaggaaaaaattcagtctctcacaaacaaaatatctgccattccatcggagggagaactgaggcaggagcccagaatatcctggaaggaacgcaagcgagagttgaaggcctcagttgtttaatctggaaggaggactttgatgtcaccctgctccgtttatcctgggaagcttcccgctgcttcatggcttcgactctctgtgtgaaagatggctgagctcctccaggggctggaggcaagcctgagcagctccgaagggcagcctggtgatgctgcgctcctgccaagcccaggtggggtggagaaccttttctaaacaagcacttccagagacataagtaattctttgatagcttcctgggaaggcagaagggagctgtttagccttgtgggcaccagtcgtggggctctgggaggaaagcctcaggtctccgcactgaagtcatccccagcctcagagcggtggcggcttggcccgccggggtgggtcctggatgtgtttgtttagagggctctgaggcatgggtctgggctttgctttccttacttgttaagtcacatgggctgtggcgtgtgcgtgtggccgacgcctttcagaggacaccagggtactgagagggcttcacattggtgtggcctcagccaaaggctccctgcctgggcttcagattctccagctgagaagtagaataacatcatgataatttagcactatctattgagtgcattcattcatgcatctgcagtagggttttttttttttttttttttttaaatttagagacagggactcactgtgttgcccaggctggccttaaactcctggcctcaaatgatcctcctgccttggcctcccaaagtgctggattgcaggcgtgaaccactgtgcccagccttatatatattttttaacttttattttaggttcaaggtacatgtacaggtttgttctacaggtaaattgtgtgtcatgggagtttcgtgtgcaggttatttcatcccccaggtaataagcacagtacccaacaggtagttttagatcttcagcctcctcccaccctgcaccctccagtaggccctcatgtctcttggagtgggcattgagtacctgctttaggccagggacacctgtgcttggtacctagagtgaaggccttgatttcatggaacttaccatcttgtaggaaaacagaaatattttcataaacaagttgtgcaatttaagttgtgatatgtgcctccaaaaagtactggatgttttgagaacatgtaccagggatcagaactcatctggggtgtttttcattccacaaatatttgactgctttatctatcccacgtgctgtgcttagggtgttgtggaaattgtgaggactaggacatagttcttgcctctgtgagagtggaactaagctctccccatggcctttcatcgatttttcttctcttattgcattggttagaatctcattgcattggttagaatctcatactctgtttaataactaccaagtatgatactttttgtttaagaaagcttccttcaactcctggctttctgagctttgtaaaatcaggaataattattgaattttgtcacatgctgttgggatgcagatggaatgcatcattctttgctaatgtggtgtgtgatttgtatgcttgatttacattgctggatttcctagtgcaaccttcttggccctccgaaattctttgtcatgatagattattcttttaaatgtgaccgcatttgataggctaatattttactttggatctttgcatgaagtactcagtgcaagttaactgttaaagttataaaaccataagggaagcacagggctgtggaggttggggagggtttttttgaaggaagtgggcatgtgagtagggatttgaagaatggtaagactgagatcaggggttagaaacttaaggacctacaggggccagagaggtcatatgaatgaatgccacaggctcagtgggagacatctgagaggggtgggaaccggggtgcccccggggaacacacaccctgcctcaagggggcagtgccactcaaccccagccaatcactgccatgtgggaatatggccctggtgttgccacacgggctgatcattaagaaaatccagctgtctgaatttttatgtgaaacttttccaatttaaaaaattattgttaaccaattaaaatttttagaaaacaccttctttgggtgactcagacgactggatttggcctgttagtacactggcttgtgtttgctgatttagacctttaagattctgatggtggtggtggtagagaagcagtatgtcagtgataaaaggacacacgagtgagtatcatatggactcaacattgtgcctaatactttccatgcattctcttgtagaatcctcacaactgccttaggtattattccgctatcgcatagatgaggaggcaggcccagcaaattagagtcactagcccagccagggagagctggatgcaggctgcatccaaggcagagagtgcaggccaagcaaaggctcattgccaggaagctgtgcacagtgtatttcagtctggtgggagagcaatgtgggaggcacaggaagggtaagtaaagatgtgggctgggatgggaggccgaggttggtggaggccgaggttggtggatcacctgaggtcaggagtttgagaccagcctggccaacatgacgaaaccccgtctctgctaaaaatac

SEQ ID NO: 1764 - DNA, 3201 bp, Homo sapiens
gtaccgtgtggggctgcccagccggaagaccctgtaccagctgcaggcggagcggattcggcgggtggagcagctggccggtgagcgccacgggacccgctgcaccgtcccctggtgtgtcctgcctgccctacctcggcccggaggtacccttccccacgcccccccacatccccgctccagacgcgagccccaaccccggcacagaccgggacattgcccagaaccggcccaaaatggggcctggccccagccccaactggacactggaccccgaaccccgatgccggctctggtccgagccccgtctgcctgcagggccaggcgtactcgcggccggctcaccgcgcctcccttgcaggtacgtcatgaccagcgagttcactctggggcccacggccgagttcttcagggagcacaacttcttccacctggaccccgccaacgtggtcatgtttgagcagcgcctgctgcctgctgtgacctttgatggcaaggttatcctggagcggaaagacaaagttgccatggccccagacggcaacgggggcctctactgcgcgctggaggaccacaagatcctggaggacatggagcgccggggagtggagtttgtgcacgtgtactgtgtggacaacatcctggtgcggctggcggaccctgtcttcatcggcttctgtgtgttgcagggcgcagactgtggcgccaaggtggtggaaaaggcataccccgaggagcccgtgggcgtggtgtgccaggtggacggtgtcccccaggtggtggagtacagcgagatcagtcctgagaccgcacagctacgtgtctccgacgggagcctgctgtacaatgcaggcaacatctgcaaccacttcttcacccgaggcttccttaaggcggtcaccagggagtttgagcctttgctgaagccacacgtggctgtgaagaaggtcccgtatgtggatgaggaggggaatctggtaaagccgctaaaaccgaacgggataaagatggagaagtttgtgtttgatgtgttccggtttgctaagaactttgctgccttggaagtgctgcgggaggaggaattttccccactgaagaacgcagagccagccgacagggacagtccccgcaccgctcgccaggccctgctcacccagcactaccggtgggctctgcgggccggggcccgcttcctggatgcccatggggcctggctcccagagctgcccagcttgcccccaaatggagaccctccggccatctgtgagatatcgcccttggtgtcttactctggagagggtttagaagtgtacctgcaaggccgggagttccagtccccgctcatcctggatgaagaccaggccagggagccgcagctgcaggagtcctgacccgcccagactgcccccagactcccccgagacctgccagccccggcatcctggaagtcccgactccccccagacctgccagccccggcgtcctggagctgggggctacagcccagcctgagctctgggtgggaaagcagcctgccccatgcttccagcctgcagaacacagaatgaaacatgctggtagactccacgagggcagggcctctcctgtcgcctctggacacaagtggcgacagcctgctgggggctctgtggctccattcctggctgtggggtctagtcaagaggcagagggacttgggacctgggagaatggggctgagaggaggcttcgggttggggcccaagggaggtgtggtgtcatctggggagaacaggagggcatgtccctttgggagcccgccttgtggatccaccacaccccaccgagcactagaagctgcataagctacacaggatgtgcttctgcagcctacagatgcagaaccagaatgagggggacaattccacccactcgagggctgccccctcttccttagcagacgaaccagtaatgggggcaaggctggggcatcccagcccacacaccctggatgcccagcaaggccacagaaagagcctgatgtccatgatccaggtggctctgagaagcttggcctggacacctgagcctgcggccggtactcctgccttctccccatctatccccaaggcctctgcctctcagcctcttccatggtcggtttaggctgctgagttttctgtgcttccccaagaaccagtgggatcaatgccggcggcctctgtgatggttgctgactaatccgggatttcatgagtcagaggcaccacccctcaccccagctgcctgctgcttctgacggatcttggtgctcaggctgcctggctctccgagtgaggacgcagcctccatatttggtgcactcaggcatggctgggacaagccagctgccccagggttcttcccctggtgattctcgcctgctttctcatctcaggggaggcagtggcacctccctctccctgctgacatgaagagagctatgatatgccactgctgccaactcatcctctgcccccacctcgaaacccacagtccccagtggagggccactactcatccccattggtttcccaggggaggggtgttgtctggaagggcaggttcagatgcagccttccagatttagaggcactgggaggacagtggctgagtggaggcgcccagacctgggcaggcagcaggctcaggcccacaccttgtgatttttgaaaccaaagcccagaagatgatgtttacttctctctccctggctctgcccttcttactgcaaaccatgctgtgccttagggcccttctcatagctgttcctcatggccatgactggaacagggatgcaacctctttctacacaagcacagttagttgggtgaagtctttttttttgtttgttttagacggagtttcactcttgttgcccaggctggagtgaagtggcgtgaccttggctcactgcaacctccaggccagcctcagcctccctagtagctgggactacaggcacccactaccacgcctggctaattctttgtatttttagtagagatggggtttgaccgtgttagccaggatggtctcgatctcctgacctcgtgatccacccacctcggcctcccaaagtgctgggattataggtgtgagccaccgcgccgggccggttgctggcatcttaatgttctgtaggtggaatatttccaataaacacaaggtgccgtaattgac

SEQ ID NO: 1765 - DNA, 3224 bp, Homo sapiens
gaaaattaccagcttcaggggctatgacttctacggtcttaaggataagacctgggatgaagtcttggaaacacatcacaaactcccgaccgatcaattagacctgaaaaagcagcaagaggccgtgtgggaacttttcacaagtgaatgcacctattttttggaccgtttattagttcttaagatgatctttatgaatacactaagatatctgcaaactcatgaatatctcctagatgtggatttatggagactttttgcaaacctggaggagttaactcagacaagccttggttttgtgaacagtctctttggcatcatcaaggactatgtagacgcttctgagatttcctcatcactggattttatttccgtgctcacaaagtatttccgagggagtctctgtcagagccaccagacctactgcctgaactattcagctgctatcttttatcttgagagcctgaggcagagagatgactttggaatttatttaaaatggtgtgagcagaatgaacaatgcagacggctccacgtgccagagctgctagtggccccactacagaggctcactcgatatccgttgttgctgaagaatatctggaaaaggagcatggactctgctgagaaaatcatgatctactccatcaaggaaaaggtggaaaagtccatccgggaccttgaaggaaaagtgaagtggctggacaatttccaaaaatttagatatctacaggagattatagtgtggccaccgctttgggatagagataaaaggtttttcattccagagtgtttgaaacacatttttaaagaacacatggcagaaaacatcttgtcaccaaccagcagacaccttctctatgaaggaaaattaactcttgcagaaagcacaagattcctagatgtttatctgtttctcttcaatgatttcctcttagttacgaaaactaagtgcaacaaaaagaaacttggaggctcagaccctggtttaatgtgtccttctcttactcctgagttgcaagcagtaataaaagagggtggttcgtgtacagtactcgatcagcctattccactagatagattggtagtcaaaagtattgaaccactccatgtgtcagtctttgggctgagaaatgcttttcttatacaacacgaaaacagatatcgacagtgtatagcagcattcttattacaagcccaaacggaaaacatcaaaaaaacatggatggcacaaataacaactgcaatttcttgctttaccaagagtcaggaaaccaagaaaatatctttattcacattgcccgcagaatcctctgaaatttagggacctaaaacaagtggcatgtctttttagaagattatggtttaaggtataatttcattcaaagttttgtaacacttagctagtgataagctagaaggaaatttgcattttaaagaagtttcagaatttgaaattttgagctaggaaaatcctcagtatggaggaataatgactgcaacaaatttgaactctgaggaatttcttgacaaatatatactgacatccagattaccttctaatgcttccgtcaggtttgtaagaggtgtgagtgaagaaaggtgctaatttgtaaagggtgaatgatcagataaatggagtatcagaaggaaaacaatgtccactgcttatgtccaatatgaactccagcatcttactctgtatccataaaataatgaaaccaattttccttcatggcctgtcaatcagtcttaaccgctttatagtcctacctcaaacataatgataaatctttagatacaaagcttgattgttcttttaatatacaaagcaataaatagggactacatttaagtagcagttttaaaattcctattctcaaactcatctcaggtatatagtactctaacgtggaagtagaaaatcccaaagactaaattccattactttaagataggaagaaaaaaaaatctggctttcaccagttaacacttttgcatggcttttcttggcctgttgtgaagtgtacagattttcatagacatagtaaggtatctgtctcttaactttattttttgaagaatgatggtgtttgccataaaaatactttctggttttgattggtgtgtgtgtgtgtgtgtgtgtgtgtgtgttagcacagtacagtcacttaattttatttggcaggacttcaaatttcttcagaatttttatcatgaaaggcagtttgaataattattatcatggcaggatatatactattaactacattcaaggaactagttcttagggtcagattattgcatcaaagggaagtccacaaacttccatttcagaatcgtaccttttgcaatttgcaaagtgaaagtagtaaatttatcaaatttggctgcaagacaactgaagccttagctgattttgttaagctgaagaatggggtagagaggataatgtttgggcaagtcatgtgcccagtaattccttgaggaaggtgaaatttcactatgcaaacaaagcagtaaagacaagtgcagcagaaaggcttttgtacaaggcaagcactattagaatggagactaataacctctttataataatgtcagaaatttaatagaagaaaaaaaggaaaatctggaggacagtaactattgttaatagctaagaataaatgaggtggaggggagaaaaaggggagaatagacttcaagcttcaagtgaattcctagagatggcatctggatgggactgaaagcagttatgtccaggagaatacaatatagattatgcaagagaagattttataaagaaatttctggttaaaaaaaatttttacattaacaatcatcttgcaaatgtttagatataaactaacctcggaggtgagcagtggactaggatgaggtggcctctcaaattcctttagtcccatgaatccagcaaccacagacttacatgtataaaggtagttttctccctctgaatctcattaaagggagagacagactgactaaattaacaaaatatataaaacagctcaagaatatgctgtacataaactggaattctataaagctcacaaagtaacatgtctaatatacaatatattagatgtttgaggatatgcacattaaactctttggagggtttagaatgaagcacattcgaatgaagggatcacgggggtcagaacaaaaaccattctagaaccgtggctcccaggaag

SEQ ID NO: 1766 - DNA, 3770 bp, Homo sapiens
ttcctccccacgcccgagtctcctgcgcaccgccgccgaggacgcgcgcccgagcctagtccccacgccgcggcgcgcccgggctccctgctgatcccagaacaatcaaccatgacgaccgaatctggatcagactcggaatccaagccggaccaggaggccgagccccaggaggcggcgggggcgcaggggcgcgcgggggcgcccgtgccggagccgcccaaggaggagcagcgcacagcaccccggtgcggagggaggtcactgacaaggaacaggagtttgctgccagggctgcaaaacagctcgaatatcagcaattagaagacgataaactttctcagaaatcatctagcagtaaactctctcggtctccattaaagattgtcaaaaagcctaaaagcatgcagtgcaaagtgatacttctcgatggatcagaatatacctgtgatgtagagaaacgctccagaggacaagtgctgtttgataaagtgtgtgaacacttgaacttgctagagaaagactactttgggcttacgtatcgagatgctgaaaaccagaagaattggttggaccctgctaaggaaataaaaaaacaggttcgaagtggtgcttggcacttttcatttaatgtgaaattttatccaccagaccctgcccaactatctgaagatatcaccaggtactacctctgcttgcagttgcgagatgacatcgtgtccggaaggctgccctgctcctttgttaccctggccttgctgggctcctacactgcccagtcagagctcggagactatgacccagatgaatgtgggagcgattacattagtgagttccgctttgcaccaaaccacactaaagaactggaagacaaagtgatcgagctgcacaagagccacagaggaatgacgccagcagaagcagagatgcatttcttggaaaatgccaaaaaattatcaatgtatggggtagatttacatcatgctaaggactcagaaggggtagaaattatgttaggagtttgtgcaagtggtctgttgatatatcgcgaccggctgcgaataaacagatttgcctggcccaaggttctaaagatttcatacaaacggaacaacttttacattaagatccggccgggagagtttgaacaatttgaaagcaccattgggtttaagctgccaaaccatcgagctgccaagcgtttatggaaagtatgtgttgagcatcatacatttttcagactactgttaccagaagcacctcccaagaaattcctaaccttgggttccaagtttcgttatagtggcaggacacaagcgcaaacgagaagagccagtgcgttgatagatcgcccagcaccttactttgaacgctcatccagcaaacgttataccatgtctcgcagcttggatggagcatcagtgaatgaaaaccatgaaatatacatgaaggattctatgtctgctgcagaggttggtactggccagtacgccacaacaaaaggcatctctcagaccaacttgatcaccactgtgactccggagaagaaggctgaggaggagcgggacgaggaagaggacaaacggaggaagggggaagaagtcacgcccatctcggccatccggcacgagggaaagactgacagtgagcgcacggacaccgcagccgacggggagaccaccgccactgaggagctagaaaaaactcaagatgacctgatgaaacatcaaaccaacattagcgagctgaaaagaaccttcttagaaacctcaacagacactgccgtaacgaatgaatgggagaagaggctttccacctcccccgtgcgactggccgccaggcaggaggatgcccccatgatcgaaccacttgtccctgaagagaaaatggaaaccaagacggagtccagtggaatagagacggaacccaccgtgcaccacctgccgcttagcactgagaaggtggtgcaggagaccgtgttggtggaggagcggcgtgtggtgcacgcgagtggggatgcttcttactcggcgggagacagcggggatgctgcagcacagcccgcattcacaggcattaaagggaaagagggctctgccttgacggagggggctaaagaggaaggaggggaggaggtcgctaaagctgtcctggaacaggaagagacagccgctgcttcccgtgagcgacaagaggagcagagtgcagccatccacatttcagaaactttggaacaaaaacctcattttgagtcctcaacggtgaagacggaaaccatcagttttggcagtgtttcaccgggaggagtaaagctagaaatttccacgaaggaagtgccagtagttcacaccgaaaccaaaaccatcacatatgaatcatcacaggtcgatccaggcacagatctggagccaggcgtgctgatgagtgcacagacgatcacatctgaaaccaccagtaccaccaccactacgcacatcaccaaaactgtgaaagggggcatttcagagacaagaattgagaagcgaatagtcatcacgggggatgcagacattgaccatgaccaggcgctggctcaggcaattaaagaggccaaagagcagcaccctgacatgtcagtgaccaaagtagtggtccataaagagacagagatcacaccagaagatggagaggattgaccagaggaataacttagcttgcacatgaatgcagtcatgcaaaccgttaggaaaaccagagcctatatggagttccctcttctaacccaactgacttgtatctgtccgtggaaaatttcagtccagaagaattgaccttgaccattaataaagacactggcagagagatcttcccataataaatcaatctgattcagcatcactaaaccgataatgcatgaagcaacgataaaattacaaaagagcagcatttttaattttcacaaaatgtctcagttttcagctatacctgcacgttcataaccaacaatataaaccgtggtctcatgtaacacataaacaattcatgcctttcatagtttattattattaaagtctaaacaaaattgcaatttcttaggtaaccttatatttacaataaatgaagattaccctcaaatgctagaagctgtctaggtccgtccggtgtgtcagattttcctcagattagatgtgccaataaccaagtttattcagtaaacaacttgtacttgtttcatctggttttattactctcacccataaacagtaatgactctctgaccctctggaaatatgtaatgcttccaatcttgctttgtgtatctcatttaatttgttataaggtagtactgattttagcatattaatgcgatttcttccttgttgtttgctttggtctgtgttcaatccagagagcttaaattgtcattattttgggaagaaaacctgtatttttgttagtttacaatattatgaaatttcacttcaggagaaactgctgggcttcctgtggctttgttttcttagttactttttccgtgccgtgtttttttaattgatttttcttcttttacttgaaaagaaagtgttttattttcaaatctggtccatatttacattctagttcagagccaagccttaaactgtacagaatttccactgtaattaaaactatttagtgttagttataaatagccttcaaaaagagagattctccattacacgatcacctgcatcacagcccatggtgaatgtatgtttctgcatagcgaaataaaaatggcaaatgcactg

SEQ ID NO: 1767 - DNA, 3522 bp, Homo sapiens
aaatgggggctcaccagctgcccgtggacggagtgggaggaggcccccagtctccaggaggctccatgcctcaggctcagaccggcagctcgggagcccagctggcaggatgggctccggcagaggagctcagcgccattgctgcggctgtgggccagaagagagagagaaagagagggagaatccgcctcggtgtgacaggctgtgcctcagagcccgagcggcgggagagtgggcagcggggggtgtctggcagcagagaggggctcgggcctgctgggtggagcggcgctgggggacgcgggtgggccctgcgggaggcgggagctgtccaggcggggccgaggggaagggccggtgtgaaggaggcgcccgatgggaggggcgagttctccccctgcaccattccagtccactccgggtttcctgtagaggggggagccccccagggtccatctgtgtttccccacctcactcacacactcggggaccctcggctgctccccggggcgctgactgacatttttgccgaatggaggggccctgtgggtttcctgttcccatctcagcttctgctgaacagggtggacttcccttccgagtagaaccaccagaatgcggtctggccaatttcagtcatagacccaccaggcctgtgtccctgcgtgagggggtgggaaaagcccagagtgcccctacccgtcccctgggaggggtggaagggcagctcttgctccccctgcagagacgctgcgcggactgggaaggctgccagcctcgcccggtctccctgtggaccctgccctgaccccaccccagcttcctggctccctgcaccccactgggcttccctgccccacagagcctggtggtagggagacctccggatggagacagcccacagtcccggagccccaaggcaggcaccagtgagtccctcgtgacggcctcgctccctgcatcacatggaacctcgtgacccacgtgacgacgccagtgtccccgtggccccttcctgctgctggacgtgatgcagtcaatggaagcccaggtctgtcacgcaccgcctgtgcttgcccagagcaggtcccagtcaccccctctggcaccgcctgctgcacaccaggaacccccacctccagcaagcccatctgccagacgcctggcccaggaccgccccctgcccctcgactgccccctgcccctcctggtcctgacttcagccaggtgaccccctccagggtccagccctggcccctgggggactcagtggcatctggtggaaaggaccttggggattgcgcccaccctcacctgcaggagagttggcagggtggccagccacaggaatctgtggcaggagcccggggacctgcaccccaactagaaagtgtgcagccctgcaggccggccctggagagggagcaggcaggggtgaagttaggccggctgtggtgtgcgacaccgtcctgtggggccaagcgtcccgagctccagaggcaggtgcactcctggccagcatccagggtggacgagcccagaccccaatactctgaggcagggtgggggaccaggtggcacccagtggaggaaaagcccccaagagacacgcaggagcatggactcccaccccacagctggagcctgggagaggagccccatctgctgtttccctggtgcactcacatcctggccctcagcgccccctgccaggaatgtcccccacatgcagagccatgtgggtcttgcaaggaagaagaagggggccccttgcatcctccactcccgggggccccaggagggcatgggggctccagggtgcagggacagcacgttccctcaccaactccccaggaacgcccaacctccaagagcagacacagcgcctacacctgccggtacggggctccaaccccactctctcagatacgtcctccagagtcgtctcatccaccccaccctggggaggagggaaactgaggcatggcaagagacaagactaacacagcgtgggctctcccggcaccagcaccgccaggccctgtgcaggaccccagggtcatcaggaaggaaatgaggcagcccaaggaggcgggagacggggccctacccagcacccagccatctgcattgacacggctgcccgcaggatatcactgcccccatcccggggcccaccattaccagcagggagagggaggcagagggaagctggggtccaccgctggtgagcggggaggggacgggacacagaaccggccgtggcccaccccgagacggaggcgcagacaccaggcccgttctgtgctctggaggctttgggcagctgtcaggctagtggacggtgtgcagagcagatggaggcgtgaggaggcggctccggggtcacctaggttcagcagggacagagctcagggggaaggcacctcccgtcctgattcaatacatggacccctgaccctgggaaagggactgagccaggggaggcctcaggtcactgcaccatgaagttgtggggagctgcgggggcctctgggctccgagctgggcaggcacagcgtggggaccacgtgccgaggggaagaagcgtgccagggtggacgtctcagtgcacacgcaggaacatgcaacggctgagccagcccagagaggcagcggagcgtgtgcggggcggccggcggaggagcagcaggatcccaggcgggagcgcacggccttttcggaggcaggttccaggacaatactaagcgtttacatcattgcactatttgatccaggaggtcccactgtggcgtttcatcgataaacgcacatgcgaggtggagggtggctggtgtggaatgtgcccggcagccttcatagcaaaggagaattctagaaccaaccgaagtgcccctctgaagggagctggtcccgtccgttccagccgccgtggagtaacacagccagcagtttccctcctgccacgaaagctcgagactgaaactcaggatgaactgttttcagcccgggtcaccccagccctggggtggaggcccattgaggatggccgagcaggggcgggcatccaggcaggtccagcagtcctggcgggctgaggagaaggaggtcagtgctcagggagacatccgcagagggacctggcaggcagagctccagaagggagggaactgcacagacagaaagctccagaaggctgcctgagggcctctgaggcctccggagtcaggcgccatggatgtggaaggtggactcttcagcatggatgggaccctagggggctgtggacccccggcccctgggactcacaggtgggagacaggtcctctgccacgctgctcaccatgcctgtgtgttatctccccatgaaaagtcacctaggccgagcatggtggctcacgcctgtaatcccagcactttgggaggtggaggcgtgcggatcatctgagatcaggagtttgagaccatcctgagtaacatggtgaaaccccgtctctaggaagaatacaaaaattaactggg

SEQ ID NO: 1768 - DNA, 1288 bp, Homo sapiens
agctctgagagaggagcccagccctgggactttcaggtgttttcatttggtgatcaggactgaacagagagaactcaccatggagtttgggctgagctggctttttcttgtggctattttaaaaggtgtccagggtcaggtgcagttgttggactctgggggaggcttggtacagccgggggggtccctgagactctcctgtgcagcctctggattcacctttagtagctacgccttgggttgggtccgccaggctccagggaaggggctggagtggatctcagtcatcagtgatagtggttccagcacatattacgcagactccgtgaagggccggttcaccgtctccagagacaattccaagaacacgctgcatctgcaactgagcagcctgagagtcgaggacacagtgcctagccggcaagtccgtgacatgccacgtgaagcactacacgaatcccagccaggatgtgactgtgccctgcccagttccctcaactccacctaccccatctccctcaactccacctaccccatctccctcatgctgccacccccgactgtcactgcaccgaccggccctcgaggacctgctcttaggttcagaagcgaacctcacgtgcacactgaccggcctgagagatgcctcaggtgtcaccttcacctggacgccctcaagtgggaagagcgctgttcaaggaccacctgagcgtgacctctgtggctgctacagcgtgtccagtgtcctgccgggctgtgccgagccatggaaccatgggaagaccttcacttgcactgctgcctaccccgagtccaagaccccgctaaccgccaccctctcaaaatccggaaacacattccggcccgaggtccacctgctgccgccgccgtcggaggagctggccctgaacgagctggtgacgctgacgtgcctggcacgcggcttcagccccaaggacgtgctggttcgctggctgcaggggtcacaggagctgccccgcgagaagtacctgacttgggcatcccggcaggagcccagccagggcaccaccaccttcgctgtgaccagcatactgcgcgtggcagccgaggactggaagaagggggacaccttctcctgcatggtgggccacgaggccctgccgctggccttcacacagaagaccatcgaccgcttggcgggtaaacccacccatgtcaatgtgtctgttgtcatggcggaggtggacggcacctgctactgagccgcccgcctgtccccacccctgaataaactccatgctccccc

SEQ ID NO: 1769 - DNA, 4123 bp, Homo sapiens
tttagagagaaaaatgaggcagcatctccatttgcaggctgggagcatgccctgggcccaggttacagctctgtccacggggggctgtgcaagaaagagtgtgtgctttgctcctgggagccccgcccttcctcgaatattctggagatctcttttgtggtggggagacccagcaaaggctacacacacagcttgctcaaggtcaccccatgaaaagttcagctggggatcaaggtcccttttttattttggggttttttgggggctaattctgggacatggggaccttctgtcaccttctgagaagggctcttgattgtacactggtgcctgatgcctgagtgttagaattcatatcccaaacgcactttaaaaatatttaaatatctccgctctagatcacccgaatacccaaaaatagcaggttagtaacaaatacctgaaatttcctccacaccatgaaataatacacagcctttaaaatgaggatgaggatataacaatggaaaggtttccatggaaaatttttaaaaagcagatagaaaactgtatatgtgatatgatttcatgtattaaacatttatatatgtttatttatatacattcacagaagaaacgcctagataatcatgtaccaaactcttaatagtggatactttggataataggattataagtgcttttaattttcttataaatgtagtatctttgctcatttaaaaatgttttatatttgccatatatcatttctattattaggggaaatgactgaagattcaaaaaccatccctgataaaaaatattccatatcttactgaactcccaatattctttctctttctctgaggttaggtaatgtggagggcctggtaatattgtcagctttatatctctcagagatatgagactatggtgagcatagctattattatgtatagaaaagcagaataattaatagccaataaccacaccccctatttgactgccagagtgaccatctagtggaaaagatgctatgaagcatttttcttctactttccctgcctaggggctggagagacttctccatgaaggaatacagggacagtcacaggagacaggagcaccaagggattcggacatgtggctgacacagtcttctggagagccccggatggcatcagggggaaacctggcctgagacagtgccctgatggacaaggacaggaatacggtcatacctcctgcccacttgaccaacgaccaggatgagaagccaacagatgatgaatatgaattaaagttggacaactagcaagtttaaaacttggactgggacctagatcttccgattcctacagctagcctccctttccatcttctctgtggtcatcactaatgcagtttttgaccgtcttgtccagaagctgcaaaacagacaacagaagccaggactggccctgccttagatggctttcagtgcaggaaagtatcaagacagtcttgttcgtagcgtatatctctctccaccttttctgctaagcacctcatgtatgcagctgccaatgtaacacctccatttgcgtgtttaatcaccatctcaagctaatgtaaccaagcagacttcttggccttcatccctgcctcctctagtcttctcatctctctctctctctctctttttgaggcagagtttggctctgttgcccaggctggagtgcagtggcaccgtcttggctcactgcaacctctgcctcctgggctcaagccatcctcccaactcagcctcctgagtagctgggtcttcccatctctttaaaaaacaattcaattgttcagaacaaaaccctggagtcatatttaattcctcatgagggcttccctgaatacccacttttaattaactctctgcctcctcccatcacttctgttttaccccctcttttagttccttcctatcttagtttcataagagccagggccgtttccgacttctttccccgtcaagcctccttagataggacaggtcctctgcctcaccgactttaatcagtatttgctaagtaaacagagcacaggaggatcctgttgtcatcaaagagcagctctgcctccaatggcgaaaggattgttggaacctcatccttccttcaagttctggttcaaaaaattccatgctatgcctcacatggccttgcccaggtgcctgtttgatttgcctgggttgtctgttctttcttccccactgtcctcatttgccatgtggctcggtggtggctggagacctccatgctggcccctgggagcagctgctaaggctcggcgcctcaggacaccttggcacctgtggatatcgaccaccaggcttctcttctgttcatgtctctgcaagaatgagaacctgcccccataccatttgtgctgtgtaggcctcaggaggcatggactcacgcatccagcttcctgcaagccctctggtacatcgcagtgttcacccccagctttctattacagccaccacccagggactctggtgcaggctccttagagagaggccaggaaactgccgaggtgataagtgacagcaggtctcaggggaagagaggacttctctccttagtaaagaacctgtcgaggtcggaaagacactccaggctcaaagccaaatttgaaagttaggctgacagcccaactagggcagattggaggagccaggtggagagaggatgtgggggagtcaggaaagaggtggaaggagaagcctggaagagtggctccgctcctggagtatggccagcggcacttcgtcaggacctcgaccttcacccactagtgggagggtgttcctcgcatgacttgtaggatcacctgggaaacacacaaatggaagaatttaaaaatatctgctaggacaccccgtgtcccccacaactcatcacagagcaaacccatcacagagcaaactccttggctacttcttgtcttgggccgtcttttcatctggcctgtttgcctgactggactttggggtctttgttcccagcatcaaaatttcctaccagcgactttccatcacagctcccttccagtcttctggaaattgtcagatgtgcctggatttgcagggcctgcacaagatatgctgtcgatctgggatttttggggatttttgcagttcacactccaatgtgcaacagcaaccaaacggagatggaggacgtgaacatgaactactggagatgctgatgaaacgtgtgtaaggaccgcaatggtatctgtgtcctgctcgtgaaattgaccagatacagcggcttccttttgcttccgaaggcccggattgacctgacaattgatatgctttgctctatactccaactcccattgaccatggggtgaaagcaccctttctcggtcagcctcactgcttccccgcagatggagggattttctgcaggagcatgggccctgggccttcctttcccactgtctcttgaaagcctcctccagatgtgctgcctggctcagctctttgggtgacttttgttctgtctcatgtgacccatcaagattcacacagggctgtgtcccgggcagggctggagtcgacattcagggaggagatcactgttctggaacagagcagtgattggtttaattgaaatctgatagatcatcatgtaaaaagctggcatgtaagcatgctcccggagcctgcagggccctgcgcggcctcttgcctggccatcacgtagaggcggtcctcttgcatggttgggggcctcacctgcaccacgggcccccaagccaaacagtgagattgtacggagaccatcctggtcaggtcttgcagtttgcaccaggtagccccaggctatcctgccgtgcaagagctgccttctcagcacagtggagttctacggctgcctcggctgcagaggtcagctctggagccttgctgagcacctccatggatgcattttgcaaagggccgagtaagaggcattagcgtggcctgtgcttagttcctgacagcaagcgggattaaacccggattaaaggatcagccctaaaccaaagcagaccagtaataggtctcatgataaaagcagccaaataataatagtaaaaatctattcttggactt

SEQ ID NO: 1770 - DNA, 1991 bp, Homo sapiens
agctccaatccgaggacctttgatttaccttgtctgtatatagctcaatccattaaaaaatcattaggcagcagcctcaggctacaaagccttacatttgatttcttttgcatcctttaatttactgatgaaaattttgaaagagtaaaattgaaattagtgaggctttattgaaagttcattacatccacaataaattttgcttggttaaataaaattttccatgtggtgtgattatatagtacaaggaaagagattttctggggtgacttatggatacccaccttattatcttagtcctatcagatgcatagtgagttctctatctgctcctttttccactttatgcagcgaatcccatggacttcaccccccattccctctggggtgtgtttctcctaactttgttttcactccattatgtttcaatggctcctgcttcttctctttggagtttgcctggatcctgcccatcagagagatgactgctagattgatgggtcagaaatacatccatcatacagactccagaattaccaagatgattctttgctcaactacctgtagtggcaatcaacctgccggggatagcattccatggcaacagaaaagaaaacatgggcttttaaaaggtaggttcctagtatgcttgttgttgagggagaatctttttgttttggtgtgtgtcaatcaatgccctcatctaagagatgtgacaacagtgaagatgcaaaaccacaggaacctcaaaaccactaaaagctgtatatttgactcctttttacctattaaagggaatccattagtagacttcaagaacaaaatcagagtaaaattagttcactcttaggtagatcaggggtgagtcaggagaagaaagaggaagcatgtcaaaatatctactatcccaaagaactttggagaacttgccagcttgctactctgccccacttgctatttaggttctaagcactatgactgatggcaagtttgtaaactacaaggttttatatttaaaggaacctgggtctcctgaccttatttctctatctaagaagcaacaaaggacagcatatttaggaatctgcattagaatcaactaccaaggacaatttctgaggacaattgtgactatctaactgtaatctcttataaaaggacggtgacaaggtttttaaagcagtacaaaactctaaagagaattctgtgatacatatcaataatgtatcacatactattcaggatatcaaaataaccttaattggactaaatcatatgatggtagtccatgtgcctaagaaatgtgtttctgtggtaacattcatattttgttaatctaatatcagctttgatttactactgcctctttttaaaaagggtcatttatttatgaatgagtgaatgaatgaatgagacaaggtcttgctctgtcacccaggctgaagtgcagtggcatgatcatagctcccggcagccttgaccttcccaggctcaagtgatcctctcgccccaggctctcaagtagctaggactacaggcacatgccaccatgcccagctaactttttatttttaaatttttatttatctttttttcaaatagagacgaggtctcgctctgttgcccaggctgctcttgaacttccgggctcaaaagatcttcccgctttggcctcccaaagtgctaggattaaaagcgcgaggtaggctgggcatggtggctcacgcctgtaatcccagcactttgggagggcgaggcaggtggatcgcctgagctcaggagtttgcgaccagcctgggcaacaggatgaaaccccgtctccattacaatacaaaaaaactagcctggtgtggcagtgggtgcctgtaatgccagctactcaggagggtgagacaggagaatcacctgaacccgggaggcggagcttgcagtgagccgacatcgcaccattgcactccagcctgggcgacagagtgggactcagtctcagg

SEQ ID NO: 1771 - DNA, 4084 bp, Homo sapiens
attactaatttgttttctttccataagtagcaaagtaataaacttatacctagcccttctctgaattaaatattaagtaatggtggtctaagcaatgaggttgagctctgcacaccacaaatattgcaggattgatcgattatcttgttcagtttttgccttcctaaaatttaacagcaggctgcaactttttgtgagatattaattataacatatctctgactgctttgacctgatgaataaaataccatcattttgttttctccttaaggatgtgagtgacaaactgagcctccgattccctgggttatacatagtgggacaaagagacttactattcaactataagagattctttgtaagcttgttgcacggggtcctaacatcgatgatcctcttcttcatacctcttggagcttatctgcaaaccgtagggcaggatggagaggcaccttccgactaccagtcttttgccgtcaccattgcctctgctcttgtaataacagtcaatttccaggtacgtggctttcattggccgtattcagtgtctattggtacctacttatatttctgtatatagggtggcatgcacatccacctgactcccactgcacctgtgccacttacaaaatataaatgctattttcatctcttataccaagcacattttctatttcttgcctgagtcaaggatggtttagtttctggtccagtattcaagccacatcatgcctaacttgctgaattctgttttcaggattgttagatcctttatttcttgctaactccccaaaatgagtgctctgtttttctctggtttcccaacagattggcttggatacttcttattggacttttgtgaatgctttttcaatttttggaagcattgcactttattttggcatcatgtttgactttcatagtgctggaatacatgttctctttccatctgcatttcaatttacaggttggtatttccaaattccaaaaataaatgtacagacaaatgtcattagtttagattttgacataacttctgttaagtaataaaatatacaaggtggaatggctgggcacagtggctcacacctgtaatcccagcattttgggaggccgaggcaagtggattgcttgagcccagcagttcaagaccagcctggacaacatggctaaaccccatctctacaaaaaatacaaaaaaattagccaggcatggtggcacatgcctgtagttctagctactggggaggctgaagtgggaggattgcttgacctgggacgttgaggctgcagtgagtcgtgatggcactgctgtactctagcccaggtgacagagcgggaccctgtctcaaaaaaaaaaacaaaaaaaacaaagcacaacaaaacaaatatatacaaattattattgctagtgaaaattaatgtcttgtctggaaattaaatggtgatggtgggttgaaagggcataacatgatgggaggaagacaaattaaaatagctttacaatagcgctgtacgtgtgttgaattagataacttaagacttaaaaggctggataaaagcttattctttctttcccataaaacctaatactggggctagatgtggtagctcacgcctgtaatcccagcactttgggaggccaatatgggtggatcacttgagctcaggagtttgagaccagcctgggcaacatggtgaaaccccatctctacaaaaaatacaaaaattagccaagcgtggtggcgcacacctgtagtcccagctattcaggaggctaaggtaggaggacacctgagcccaggaggttgaggctgcagtgagccatgatcacgccactgcactccaacgtgggtaacagagtgagaccctatctcaaaaaaaagtcagaagtcttgatcacctaactttgcatttttaatcaatgcaatgtcaacaaatgtgctttttttccttatttgctcacttatgtaaatttgccttgtttcaaataatttaccttcccaattttgctttgcttagtctgattttaaaatgtctgttctttgagccataatggatattttggggaggccaatccagttgtaaaactttaccataaatgatctatttatagattatgaaatattaactatgttcttttttttattttattttttatttttgagacagagttttgctttatcacccaggctggagtgcggtggcacgatttcggctcgctgcggcttccgccttccgggttcaagcaattctgctgtctcctgagtggctgggactacaggtgcacaccgccatgcccggctgattttttgtattttagtggagatggggtttcaccatgttgcccaggctggtctcgaactcctgagctctggcaatccacccaccttggcctctcaaagtgttgggattacaggcatgagccaccacacctggcgaaatattaactatgttcttaggaaaaaagaaccacagtgatgcatttgccatgttctttacaggcacagcttcaaacgctctgagacagccatacatttggttaactatcatcctgactgttgctgtgtgcttactacccgtcgttgccattcgattcctgtcaatgaccatctggccatcagaaagtgataaggtataaagaatatagtcctttcccaactctgtccctcacagaaaccaaagcgtttcccaacagcacgtttcctgcaaaactctaagctcatgggaagtttggtaagaatgatttttcatgattgcttctctttaactctatctcacaaataagtcttttggaattgggagtttagtgtgcttgctttttaatacaaaaattaccaaacataaacaaaaaagggagaacagaatgagccccatatatctatctcctcagtttaacaattacagtattaacattttgtcatacaaatcagattgggttttttttctttatttaagaaaaatgtcaccttctgtagcaggatcctttgagctacaaggaacagaaagctgtgactcaaaacatctctacagtagtgcgtcatcattaatcattagtaggcttcaggcccagttgattgagcaatttaatgttgtcaagaaaggattgggctggttcttgccatctcttctctcagaaaccttcattattagcttcatatggatgctggaagatggccagagcagttctgggtatcacttcctgacctatcagtgtcggggggagataagagcctattctgtagctccttaggggccgtggaacttctcacccaagggccccagtacagtgccctcaggtctcacgtgccaaaattaggtcacttgcccattctggactagtttagcaagggaaatcaacctgcccaccgcccatgagaaatgtggctgtgaggggttggggggggcaatctgaatacaatcaatttccattagaaagaaggagagagtagaggctactgaggcaaccttcagtatccctcgggtctcccttttgcagtgccaacagtatgcagtaacaacccaggaaagaggccctactgaattttctctttgactgtacccatctggtctgaactagaaaagggcactagcttcagaggagtgggaatcttggctttgcattttctagctgtgtgaccttggaaaagttaaataaccttcccttggcttcaatatatatctccaggtaggtaggtaggtagatcgattgatcaatcaatctatgtatagatatagagagatggatatagatttatatcatcatatatatatgtcgatatagatagatagatagatagatagatagatatagccaggcactgtggttcatgcctgtaatcccagaacttttggaggccgaggcaggcagatcacttgaggtcgggaccagcctggccaacatggtgaaattctgtctccattaaaaatacaaaaattagacgggtgtggcggtgcgtgcctgtaaccccagttactcaggaggctgaggcaggaggatcgcttgaacctgggaggcagaggttgcagtgagccgagatcgtgccattgcactcaagtctgggtgacagagcgagactgtctc

SEQ ID NO: 1772 - DNA, 3336 bp, Homo sapiens
acacaggagtcctggctgagctcatggcctgaggctgcctagcggccacggggaatggttgcaatggcggaggcagaggcaggggtggcagtggaggtccgtggactgccccctgccgtgcccgacgagctgctcactctctactttgaaaaccgccgacgctctggagggggacctgtgttgagctggcagagactgggctgtgggggcgtcctcaccttcagagagcctgcagacgccgagagggtcttggcccaggcagatcatgaactacatggtgcccagtacagccttgctgtgccttggccagcccccggccagaccgggctctggtccagttgcccaagcccctttctgaggcagatgtccgtgtcctggaggagcaggcccagaatctgggcctggaggggaccttggtgtccctggcccgggttccccaggcccgagcggtgcgtgtggtgggggatggtgcctctgtggacctgctgttgctggagttgtacctggagaatgagcgccgcagtggtggggggcccctggaggacctgcaacgcctacccgggcccctgggcactgttgcctccttccagcagtggcaagtggcagaacgagtgttgcagcaggagcaccggttgcagggctcagagctgagccttgtcccccactacgacgtcctggagcccgaggagctggctgagaacaccagtggaggggaccacccgtccacccaggggcctagggctaccaagcatgctctcctgaggaccggagggttggtgacggctctgcagggtgcagggactgtgacaatgggctctggcgaggaaccagggcagtcaggggcctctctgaggacaggtcccatggtgcagggtagagggattatgacaacaggctctggccaggaaccagggcagtcagggacctctctgaggacaggtcccatggggtctctgggacaggcagagcaagtcagctcgatgcccatggggtctctggaacatgaggggctggtaagcctgaggcctgtggggttgcaggaacaggaggggcccatgagcctggggcctgtggggtctgcaggcccagtggagacctctaaggggttgctggggcaggagggcctggtggaaattgccatggactcaccagagcaagaggggctggtgggtcccatggagatcaccatggggtctctggagaaggcagggcctgtgagcccaggatgtgtgaagctggcagggcaggagggcctggtggagatggtgctattgatggagccaggggcgatgcgcttcctgcagctctaccatgaggaccttcttgcgggcctgggagacgtcgctctcttgccacttgaaggaccggatatgactggctttcggctctgtggagcccaggcttcctgccaggcggctgaggagtttctgcggagcctgctgggcggcattagctgccatgtgttgtgcctggagcacccgggcagcgccaggtttctcctgggcccagaagggcagcaccttctccaggggctggaggctcagttccagtgtgtctttgggacagagcgcctggccacagccacgttggacacaggccttgaagaggtggaccctaccgaggccctcccagtgctccctggcaacgcccacaccctgtggaccccagacagtacaggtggtgaccaggaggacgtgagcctggaggaggtccgagaactgctggccaccctggagggcctagacctagacggggaggactggctgcctcgggagctggaggaggaagggcctcaggagcagccagaggaggaggcgaccccagggcatgaagaggaggagcctgtggcccccagcactgtggcacccaggtggctggaggaggaggccgctctgcagctggccctccaccggtcactggagcctcaaggtcaggtggctgagcaggaggaggctgctgccctgcggcaagccctaaccctctccctgctggagcagcccccgttggaggcagaagagcccccagatggggggactgatggcaaggcccagctggtggtgcactcggcctttgagcaggatgtggaggagctggaccgggcgctcagggctgccttggaggtccacgtccaggaggagacggtggggccctggcgccgcacactgcctgcagagctgcgtgctcgcctggagcggtgccatggtgtgagtgttgccctgcgtggtgactgcaccatcctccgtggcttcggggcccaccctgcccgtgctgcccgccacttggtggcacttctggctggcccctgggatcagagtttggcctttcccttggcagcttcaggccctaccttggcggggcagacgctgaaggggccctggaacaacctggagcgtctggcagagaacaccggggagttccaggaggtggtgcgggccttctacgacaccctggacgctgcccgcagcagcatccgcgtcgttcgtgtggagcgcgtgtcgcacccgctgctgcagcagcagtatgagctgtaccgggagcgcctgctgcagcgatgcgagcggcgcccggtggagcaggtgctgtaccacggcacgacggcaccggcagtgcctgacatctgcgcccacggcttcaaccgcagcttctgcggccgcaacgccacggtctacgggaagggcgtgtatttcgccaggcgcgcctccctgtcggtgcaggaccgctactcgccccccaacgccgatggccataaggcggtgttcgtggcacgggtgctgactggcgactacgggcagggccgccgcggtctgcgggcgccccctctgcggggtcctggccacgtgctcctgcgctacgacagcgccgtggactgcatctgccagcccagcatcttcgtcatcttccacgacacccaggcgctgcccacccacctcatcacctgcgagcacgtgccccgcgcttcccccgacgacccctctgggctcccgggccgctccccagacacttaaccgaaggggccaccctctggcctcctgcttcccaggctcccagctccgcacaggctgatgctccccgcccccaactgtggccgcctgagctgtccccggggacgcccctgcctccctctgcgggctccagaaggcggtgtgggggatggcggtcagcagcggccgaggggggctgggctaggtcccagcctgggccgaccccaccaccaggggtcagcagagcccaggaggcgacaccgcccgcccgccgctcccagacctcgcccgagtcggctctgttgtttgaataaacgtgaacgtgaacccaggcggaagggacccgggaactctg

SEQ ID NO: 1773 - DNA, 3454 bp, Homo sapiens
ggacttagcagtgccagtggcagcagcagccatggggaagccgggcgtggaggcagcaccgggctcggagctggccagggttccctagcctatggagcacgcagccaccacaggccccaggcctggacctccctctcggcgggtggagaatgtgagtcctctgggacttgccgctcctgccatggggttgaagtctgcccgttcccccaaaggccaggaaggtgcaggttcctgcaccctgggcctaatttcagccaggagagggacttttacagctcagccaggcagggaggcgggactggtgactgcatgggagtggggccacagcccagcctgggacccacctggggaatgggtggcggtacctccccaggttgtgctacgagccaaggactggctgccaggagctcctgggggcaccgcagtgtgggccaccagcttggaagcagaggtcccaccagatctagcgctcaataaggagcagcagctgcagatctccaaggagctggtcgacattcagatcacaacccaccacctacatgagcagcatgaggctgaaatcttccagctgaagagtgagatccttcggctggagagccgggtactggagctggagctgcgaggagatggcaccagccagggctgtgcagtcccagtggagtctgaccccaggcatccccgggcagcagcccaagagctcagacacaaagcccaggtgcctggacactctgatgaccacagattccaggtgcagcccaagaacaccatggaccccgagaatgagcagcacaggctggggagcggcgtgagtgtgcagccacctagctcaggggagagggcagcaccagagaccccaagcctagggtctcatccagccagccctgtgtgccccacagctgcagggggaagtgaagtgggcgctggagcatcaggaggcccggcagcaggcactggtgacgcgtgtgtgagtggccatctcacctggggccccatcctggagcagagagaacccctgatcgtgggcctgctgagcctcacccccgtgtcttcagggcaaccctgggccggcagctgcagggagcccgagaggaggccagggcagccgggcagcgactggccacacaggctgtggtgaggctctgccctgactgcttggagacctggagggtgggggccccagaagctcagccggggtccactctcagggcacaggtggagggctgcttccaccccaggtgctgtgcagctgccaaggccagctccgtcaggcagaggctgaaaatgcccggctgcagctgcagctcaagaaactgaaggatgagtacgtcctacggctgcaacactgcgcccggcaggcagtggtgagccctgcaggagcaccctgaggcctagggagcccaagcctggcctgggtgtgctggatagcttcagggagaccccagggccccggcactgctcagcctgctggggtggggggatggttggaaaagatggggggtgggccccatgcggacccagcccaccgcctccaggagcacgcagatggtgcaggccaagcgccagccaccacggccctccggacattcctggaggcgactctggaggacatccgggcagcgcaccgcagccgtgagcagcagctggcccgggctgcccgcagctaccacaagaggctggtggatctgagccgcaggcatgaagagctactggttgcctacaggtgggccccgctgggatgggaggtgtcaggcatctgtgggtctctaagcctctgtgcctcaaaggcttggtgtgcagcaggagtggccccagacagacactagcctaccctgacagggcacctgggaacccccaagctatttttgacatagccagcttggacctggaaccattgcccgtgcccctggtcactgacttcagccatcgggaggaccaggtgaggctagagacccccagaagctccaggcccgggtgccccccacccacccactgccccacactggccccaggcctcatcctgggctcaacagagacctcagccccgggcctctgaggggcttgccttgttcagccaactgaaacgtccccaccacaaacctctgtagcacggcgggcctggggcactgctctcatccccaaaaaagagacccggtggagcctcccaggggggaacatcagagccacagtgagtgccctcatgggtgtgggggaggcctgtgggggatgagcagagagcacaacgcctgcaccctggggcccccagttgctccaccaagcccccgccagacagggtctggtcacagcaatgcactcagtggcacatccccaccctggggtccctccgtgggtcccggcgacactgataatcacaggaaagagaagaggggctgctgcaggtggagctggccttgaacacggaggatcagggagagcacacctgagggaggtttccgctgagacctggaggacgcgaggggtgggagcagggcgcctggtgaccgggccagcccttgcctctgggcctccatgttcccagctgtacaatgggcagggctccccaaggaccatttcctggggtttagggcacacccgtgtgggggtggcatccctgttgatgctggagtcactgtctgggctggccttgtggtttagccctcccccagcagccagcagaacccctgggcccgggctgtccctatatacggatggctccaaggcctgggggggggcgccacaggagcacgggggggcccatgcctccctcactcactcccaggtgtcccctcccggctctgggaacctgactcagcacggtcacgtctgtccctgtgtcaccatgccagctctcaaaaccactcctcctttcctctcccctcacaggggcctggacgctgcatcctgggcccagatccaccagaagctccgggacttctcccgcagcacccaggtaggaggcaagggctggcccaggcccatcctcacgccatgccccagctcatggcttacatccccatgccaggcagagctggaacgggagcgggcacagctgctggtccgggccacgatggctgaagagcaactttctgagctacaggagtacgtggaccagcacctgggcaggtgggcagagggagctgggtgtgaccccagggccctggtctggttggaatgaaggatgatggctgcctcaggcgctaaaggcagacctgtccacagctgggcaagtcacttaagcatggttcctctgagcaggtacaagcacgaaatcctgaggctgaggaagctggcaggtgcaggggacccctggaaagtgggggctgtgcctccagccaagccccagcatccaaggaccggcagccactaggccgtctcccaaggagcagagcagagcagagctcctcagccagcacagaaccctcccacccagccccccataaaacatgagtcaggatag

SEQ ID NO: 1774 - DNA, 4717 bp, Homo sapiens
gttattctgtgaaataaccatctgattataggtcatgtcaacttaatgaaaaccttatataatgcatttgtgacaagggttcccaagaccacccccaggtttggtgattcactagaaggactcacaggattcagcaaataatcatattcagatctttaattgattacaatgaaagagtacaagcaaaatgagagggaaaaggtgcatgtggtggtcaagtctggaggaaaccaggcacaagcttccagaagttctctcctgtggagttcccaggatctgcttaattcccccagcctcacattttgacaacccatgtgcagtgatgtctaccagtaccagaatctcattagagactcagtacccaagtgttttatatggaggttactctccctcacatgtacccacattccgaccttcagaaggaaagcagctgctcagaagtaaccgcattgtttctataaacactttagacacggtgaccagtcttagggcatggtgggaaccctcccaattccaatttcctaaacaacagccaagggccaggcttgcatgcgggtctttctgaggacggcagtctctctcctgctatatgaaatctttcctgcacaacagttttagccccaacttaacttttggtgctgttttaaaatttcattttaacagcaaataatattataagataaggtaacctggtactagtttctcttgcatgatccatcctgtgttgcaatgctggctacttttttgacttctggtgactcacaggtatttgaatggaagttaccatagcaatattaagcaattataatctgtccttcttatctctttaacctttcagtgaaagggttaaattgaataagcataataatttctgagttaaaattagaataaaaatggtcttttattttgattatgtgaatctagttttcatgtcgtgctaaatccctgtttagagttatgaaataagatattcaatcattttatcaatatttccttgcctaagcatgcaattgaatttatttgttttatgtattttctatactgcaatttgagaaatcatgcccacatgctgttactttggtctttaatgatctccaatttttagggttaccactgtgtcctgcttaaatatatcataataacagattcagtgaatatcttttattttttatttttgttctggaaatcctgggatgcacagacaatgaatatgttttttaaatcaataactctatttcttatagcagttttaggttcacagcaaaatcggaggaaggtacagagatttctcctatgttccatgcctcccacacatgcacggcctcccccatgattagtattttccaccagagtggtacatttgttacaactgatgatcctacattgacacattataatcactccaagttcatagttgacatcaggctccattcttaatactgtacattctgtgaatttggacaaatgtataatgacatgtgtctatttattatagatagaacagtttcactgccctaaaaatgctctattctctgcctgttcatctctccctttctccctagcagctgctggaaaccactgatcttttatctgtcttcatagttttacttttttcaggagagtcatatagttgaaataatacagtggatatctttttgaatagttaaaaaagtaaagttccatggtaattgaatgtagtcatttaagatgttctttgtccttttgtttttctttagcttctttgtctttgtaaggtctgatgacatatgctttacatacttaggaaacatgatttgtataggcctttgccacataatggaaagggttgaggaaaatgacaccatgcaataccacacagcacaaactggagcatcttgctccagtgaggtgggtccagatagactccctagcaatggaaggggagaagctcaagaggttgtactttaaaaaactggaatcacaaagtctttcatacttaccttgggttggaaataagaccaggcagtgaatgttatagataaatacatatgttcctcactgatcctcttcctttgagggatgagtttgaaaacagtctgtgttatgatgacatgactcacctgcaactagattctgtgtcgtgagggacggcagttttgctttgtgtgaggtgaaaaagaatttttttctcctactagggaaaggggcaagcattggaacattctggcagcaagagggcattgatagttttctttctgtatatttttcatatcatatagtactgcctggcagcctggcacaccacgccggtgtttcttaagcttctctctgaatgtgaggcgtggttccgagtggataagctcttaaaggagtgatctttccagtggttctttctgtgggaggtaaaatggcaggtgaatttgggccttgttatacgtagggcagagtatatagctacaactaaggaaaccacccagcaccttccccagaagagtagtatccagagtaacacattgagctctcttgagctcttctccactggcagctggaaagtttttgcaaggatccctgttgctggtctgattcctatgttctgctggctgctggtgatagggagttttattctaaactgaaaagttttaactgaagagctagggaggctgtgttgtgttacaacaaaataagtgcagtagttccccattaactatgggagataacgttctaagacacccccagtgaatgcctgagaccacaaatagtactgaatcacccactggtttttcctacacatacataaccatgataatatttaatgtataaattaggcacagtaagaaatgaacaataaaataaaaaattatactgtaataaaagttacttgaatgtggtctcttgaaatatattgcacggttctcacccttttttttttttttttttttttgggacggagtctcgctgtcgcccaggccggagtgcaatgctgtgatctcggctcgctgcaagctctgcctcctgggttcacaccattctgctgcctcagcctctggagtagctgggactacaggcacccgccacaaagcccggctattttttttttttttttggatttctttagtagaggtggggtttcaccatgttagccaggatggtcttgatctcctgacctcgtgatctgcccgcctcggcctcccaaagtgctgggattacaggtgtgagccactgcacccggctggttctcaccctttttcttgtgatgatgtgaagtgatacaatgcccatgtaatgagatgaactgaggtgaatgacgtgatcctagatagtcaggccttgatgttggcggcagggtacaggaggagaccgtgttgatgactaacgggtggacagcatgtgcagtgtgggtgcactgcaggacgattcacatcctgggctggatagagggtgctgacggtttcactgtgcttctcggaatggcacactaaaacttatgacctctttatttctggagttttccgtgtatatttttggaatacagttgactattagtaactgtaaccacagaaatcaaaactgcagatgtaaaatctctggatcttaactcatttgttgggtacaattcttaaaatccttaggatttccaaagtgatgtttttttgtatgctaatgatccatggctggaagcccctaggtagcttcaggatgggaactggtcaccatcctgaagacatgattgattagagtgttgagatcttctgtctcattcaggagactctggagaggagagaagagctgaaggttgtcagtcaccaaaggccagtgattaatcagtgatgccaatataatgaagctttcatcaagacccaaagtgactgggcttggagagcttccagatggctgaatgcatggaggctcctacagggtggtgtgtcctgggagggcatggaatctctgtgccacctcccccatactttgcactatgcatctcttcatctgtatcttttgtaatgtcattcatagaaaactggtaaatgtgtttccctgagtactttgagccactctagcaattcaatttaacccaaagagggagtcctgggaaccccaatttgaagacagttggccagaagttctggagtttcagacctacgactgatgtagggaggcagtttcatgggactgagccctttacctgtgcaatctgatgctatctgcagatagagtgtgagaattgacttagaggatgcccagtttgtgtcatctgcagaaatgattgcttacttgttggtggagaaaaaccctccacacgttttgtcacaggagacttctttgttgatgattgttgctgtgacgtgacagcagagaaaaacaggtcaaatgtgtcttttccacacatacagtggacaaggggtactactgtatactctgtttgaactgcccgtcatgttttggtcctgaaatcatgctctttgacactgttcattcatcacacctgttctgctaacaataccatttttagtcaatctcacagggtttggctaggataacttgtatactgcggttcacttgtagatatcaaattttataaatttattcttctttgcatttaataaatacaaagtaagggaagtaagagttcttactgcattaattatctactaataggtataattaatattaattctaataaggtcccggttatgctcccaaaggaatgctatataacaaagcatcagtcctatgcttt

SEQ ID NO: 1775 - DNA, 4184 bp, Homo sapiens
ttcttttgtttgctgtagggttcataatattcttcaagtgatcactgccgacttccaataatattatatcccatcacatgtagcataacaactctgtaataatcaacttccatttccttcatatgactaatatgacttctactatttttatcatataaacttctttcacatatattattagcccctaaatacattattgtttttgttttcaacagccaactatcttttaaagaaatgttaacaataagaaaaacaatgttgtaaatttacctacatatttatcttttctggtgctatgtattactttgatcaaattcaaatttctatcttgtatcattttccctttgccttaaaaacttcttttaacattttttatcatgcttctctggtgaagacttcttttggccttttaagtctaaaaacagtctttatcaattcttcattattcaaaagtatttttgttgtgtatagacgagtaagctggtcatttttaaaaattttttattatactttaacttctagggtacatgtgcacaatgtgcaggattgttacatatgtatacatgtgccatgttggtgtgctgcacccattaactcatcatttgtattaggtatatctcctaatgctatcccttccccctccccccaccccacgacaggccccagtgtgtgatcttccccaacctgtgtccaagtgttctcattgttcaattcccacctatgagtgagaacatgtggtgtttggttttctgtccttgcggtagtttgctcagaattatggtttccagcttcatccatgtccctacaaaggacgtgaactcatccttttttatggctgcatagtattccatggtgtatatgtgccacattttcttaatccagtctatcattgatggacatttgggttggttccaagtctttgctgttgtgaatagtgccacaataaacatacgtgtgcatacgtctttatagcagcatgatttataatccgttgggtatatacccagtaatgggatggctgggtcaaatggtatttctagttctagatccttgagggatcgccacactgtcttccacaatggctgaactagtttacagtcctgccaacggtgtaaaagtattcctatttctccacatcctctccagcacctgttgtttcctgactttttaatgatcgccattctaagtggcctgagatcactgtggttttaatttgcatttctctgatggccagtgatggtgagcatttttttcatgtgtctgttggctgcataaatgtcttcttttgagaagtgtctgttcatatcctttgcccactttttgatggggatgtttgattttttcttgtaaatttgtttgagttctttgtagattctgtatattagccctttgtcagatgggtagattgtaaaaattttctcccattctgtaggttgcctgttcactctgatagtagtttcttttgctgtgcagaagctcttgagtttaattagatcccatctgtcaattttggcttttgttgccattgcttttggtgttttagtcatgaagtctttgcccacgcctatgtcctgaatggtattgcctaggttttcttctagggtttttatggttttaggtctaacatttaagtctttaatccatcttgaattaatttttgtataaggtgtaaggaagggatccagtttcagctttctacatatggctagccagttttcccagcaccatttattaaaaagggaatcctttccccatttattgtttttgtcagatttgtcaaagatcaggtgattgtagatgtgtggtattatttctgagggctctgttctgttccattggtctatatttctgttttggtaccagtaccatgctgttttggttactgtagcattgtagtatagtttgaagtcaggtagcgtgatgcctccggcttttttcttttggcttaggtttttcttggtaatgtgggctcttttttggttccatatgaactttaaagtaattttttccaattctgtgaaaaaagtcattggtagcttgatggggatggcattgaatctataaattaccttgggcagtatggccattttcacgatattgattcttcctacccatgagcatggactgttcttccatttgtttgtgttctcttttatttccttgagcagttgtttgtagttcttgaagaggtccttcacatctcttgtaagttggattcctaggtattttattctctttgaagcaattgtgaatgggagttcactcgtgatttggctctctgtttgtctgttattggtgtataggaatgcttgtgatttttgcacattgattttgtatcctgagactttgctgaagttgcttatcagcttaaggagattttttacattttttttaaaaaagtactttaacaatattgctcttctgtcttctgactttcattgtgactgagaagttttttgttaatcttatgatttttgttctttgaataatgtcctttcttctctgaggctgtttttaagattctctttcactggttttcaagaatttgataatgatgtgcctctctgtagttttcttcatgtttctttttttcacgttcactgagcttcttggatacgtgtgtttatagctttacatcatgcttggaaataatttggtcattatgtcaattatttttttccaccaccaatcctgcaggactttaattatatatatatgaggacatttgatattttccacagttatttcatgctgcattcatttttttccgttttcttttatgttttattttaaattatttattttgatgtattaaaatttatcggtctttttgtaatgcagtgcctaatctgctgttaactccacctaatttttttaatgtttagtagtccaatgtggatcttttttatattatctatttctctcctgtgttcatgctttcctctaacttcttgaatataccttgtatattttatatgtttctaatagatgcacatttacctactaatttttttatcagtgttgtctcttggtctgtttctactaatttatatttctcttcattattagtcgtatcgtccattgcatgactattcatttttcgttgaatgccatgaattgtgattttatattgttgagttttagattttcgctagggtattacttaaaatatttggagttttgttctgagatgaaattatttggaaacaatttaatacatccaagccttgcttttaaactctttgagaataacctgtactttgaggctaattttatcccactactaaggcaatattctgcagtatctatctgatggcctctatatcaggagagcttttcactctggttttgttagtggaacacaaaacattaccatccctatgagagctcccaaaattgccagcctgctcctttctagtcattatttcctaagtcttggtagcttcttcacatacaggcacactgatcagttttcacccaaaggcttttgggaaaacctctacagctgtcctgacctctctctatctatgtagctctcttctgtctgatactctgccccacaaactctgggtgcctttgcctatatttactctaaactttatcaccttatcttggtgagactgctgggatctgtttagcttccttttacttatcccgtgaccaagaaaatctccccaggcagtgagctaggcacttgtagggcccatatcatttgcttcccttttctggggtcactgtcctgtgctgccagtcgtccatcatggccagaaacagaagtccctctattttattttcttgaaaataatggttgtacatctctgtccattgaaatagggtttttttatttttttgttttttcagtaacagttaaaaagtcattcagagccgaattggcttaattagggcaatcaaactaggagtgactaaaaaggaatgaaagttattttctcatgcagcctgtaaactaactcttttcttgccaacaggtacaggacacaatatccaatcctaggcctcctatatgatgactacgaatatataccaccaggtagtgaaacacagactattgtgattgagaaaacagaagacaaatacacttgtgtaagttcacttgggcatttttagccctattttgacgatatatgtacagccttttaaaattgaggtaaaatatcaaatgaact

SEQ ID NO: 1776 - DNA, 4660 bp, Homo sapiens
aaaaaaatcaagacaccaaacacacacaactaattagctctataaattgaattaaaagaaaatccatactgacttgctttcccatctgtccatatttgtctatccaaatgattaagggctagagaaaatacagatgatgatggctgagatgggataaaactataaattgacttggttccatttacctcccagaatcagcatacagtgacaaagtagagagaaaaggtctgggcaccacaaacttgtacttgtgctagaaatgtaggtgccttttcatttgcccagcagggctagtttaacagccagggtatcttctgggactcttccccaaatcttgctctaccgctgactagctatgtgatcttgggcaagtttctcaacctttctgtgcctttcttcctttacttataaataaggataacagaatttgcttcatagagttagtctgaggattcagtaagtagatacgtgtaatcttagaacagtgtctggcacacagtaaaactctatctttgctattgttgtttttgttataactgtatagatgttagctattattactatccacaagaatgggacatatcaattatatatattactggcctagtaattatatatacttagaatccctgatcaataaaataaattgtaatagaaatttttattcctcaaacacatttttgttcctcaaacacatttttaaataaacatgtcttgggaaagccaaagaaaaaaaaatcatacctatatccaaatatgttatattaaaaccttgttccttggcaatttcactaagcagctggatgtaatctgtatttggaatactaaggaggcttcttttcagtaagttgatcttttcaccaggagaattcctcaaggaatgccaagtacatcctaaagaatgtcctactacatttgtctgaaaaacagagatgaagatttagactcttgactaggactgggttccaacacccgtaccagtatcattaaaagtacttattaagcactcacatttaatatgttataaagcatgtttaaatggataacatttggttaattttccaatttaaacaagacaacattaaaaagtacacatttaacaatactatatgtttttaagaagcacttgcaataatatactgaaagcattttgtattttgtatagtacaaatgtttctcagtcaagttttctgatggtcacattaagaggtacaagatatctggaagcaccataagtaaatccacaaataattaaatctgcctaatggagcaatttgcagattaaaatatagaacaattttcatatctttggttttttttgtattaaataccaatcactataactgacagctatcaaacaggaaaaaaaacagaaaaaaaaactaaaaaaaacatgaaatgtgcgcgttgggtttgaggaacaagtcattcaaataaatgacaggatgtcaaaaagttcttatcagacttctatcccagaacccaactgagtatttttttcctttttctttctgcttttcctctttcctttatcctcccctatatccttcccttttcatctctgtccttagaatgccttatatttccatattagtttatggttctcaaattgctttcatatgccattaataaaaacaactactttctgaagtaagtagggttactactcttaatattgttttattaatgagcacgacagaggggaggcaatttccaaaagattttagagatggcatgatatggaattaagtaatttgttagatttaccaaataaaaatttacattatagaaactttaaaatactgtttttaaataaagaacactatttacatggttaaaaatatacatgcactaagaacaaatatataatgaagagtacagtctcttttccttaccacccattccctgaagacctctgttctatttcttagacatactgttaaacatttttcagtatcttcccataaatgttctatgcatatgcaagcacacacaatcttttaaagcaaatgataacttactcctctacatcttgttcatttttcttttatcagtgcacatatatgcactgtatttaccttacggatctccaactgtgagctttaggttgtttctagtttcttgcttttactagcaataaacactcttttgcacttgaatgagtttctctgtagaattatttctagaagtggaactgctaagtcaaagaacatgtacacttttaattttgataaatacttccaaactgatttctgaaccaatttatactcctaccaactgtcttggagggggcttgttttctcataccctcactaataccagctattatcaaattttgtagtttttgccaatctaaaaggtgaaaatattttatcttgcatgaataaagttgaatattttttctttttttcccttaatcgtttgcatttcttctactgggttgtctttttaactgatgcataagagctttttaaattttctcttttttaagagttaggatcttgctgtgtggcttaactctcaaactcttgggctctagcagtcctcccaccttagcctcccgagtagctgggactacaggcatgtgctgctgtgtgcagcagatgtgtacaaaagagctttaaaggtagtactgaaaacagttcctttatagttctatgttgaaaataatttcttcccacttttttattgtcttaatttacagatttttgctgtgcagtaggttttatgttgtcaaatgtattaatcttttaacctaggttttaagttaaaatgctttccccatgctaagatttttaaaaagaaaaactcttccatgtttcctaatatttatactgtttcaaatttttatgttcaaatctttgatccatctgaaattcactttggtgtaaggaataaggaagcattctaaatagatgtcatacacatcaacaaatatatatatatagcccccacccaaatgtggatgtaaactgtttctacatcattattgaataatccatcctctcacccactgatctgaaatctcactgttgctatatactatggtcctatgtggattagcatctacgcctggattctctattcgctcctctgactattcctggcccagtaacttgtctgacaagttcagttttacagtatgttttgttctctagtaaagcagcacacccttgctctcccaactcttccttttcagttttcttggctattcttgagggtttttttccagataaacttcaataaacgtgtatcaaggtccaaaatgaacgctggtaggtttttttttttttttcgagttggggtctcactctgtcgcctaggctggagtgcagtggcgtggatctctgctcactgcaagctccgcctcccgggttcatgccattctcctgactcagcctccggagtagcggggactacaggcgcacgccaccaggcccggctaatttttttttttgtatttttagtagagacggggtttcaccgcgttagccagaatggtttctatctcctggcctcatgatccgcccacctcggcctcccaaagtgctgggattacaggcgtgagccactgtgcctggccaaacgctggtaggttttgagtgagaccacattacatttaaatatatttacaatgttttctgctctattctttagtagacttttcctcacgtggtcctacgcatttctttctaagtttattttcatatagcctatccctgtctacaatttaaattgggatcttctatattctagttattatttgtaaataagaaaactactgacttttttctagtatattttctcagaataggattttctatttttctataaaatgaccaatgttatgaagcttcgtaagttttgtcaaagtgatacacacatacagcaaaaaatcaaatagtacagaagtataaaagcaacaacctctgccttgccccttctccaccttcaggtccccttcccagatacaataatttttagctttttatttttaattattctggttgttacctacataactctgggcaatatggaaaagttattgattttgtatattaatttcataatcagttaccttgatgaattctcttgtttctagtagtttttctttagggttttaaagggatacaatcataccatttgcagttagtaaccattttatctcctcttatttccaacttcgtactgttttctcttgtctaatttgtttttaattggtgggtacttctagaacaaggttaaataaaagtggtgttggtgggcgtccttatttctgatattaatgggaatgagtataatgtataaatatataaccatgattttggtttttttccaagtttttatcagtaatgattgctgagttttatcaaaatttttttggcatccattgagaggattatatattactctttgacacattaatgtggttaattaaagtaaccaacttattaaccttgaaatagtcttagttaaataaaccctacttgtcaatgctatatcattattttaatattgtactgaacattttacaaaggtgtttcaccataaggcatattgatctgtaatttttttttttctgttgaacttgctattgtcaggttttggtgtattatgttggttttggagaataaatttaaaagtttcctttatgttatct

SEQ ID NO: 1777 - DNA, 4533 bp, Homo sapiens
tggctatttgtacaaatggttggataacattttggattctctggacaaaaaggttcaccagctgggctgtgaagcagttacgttgttactggagctgaaccctgatcagagcaacctgatgtactgggctgtggaccgctgctacacgggctccgggagggtggcggccggctgctttaaagccattgctaatgttttccagaacagggattatcaatgtgacacagtgatgcttctaaatctgatactgtttaaagcagctgattcttctagaagtatctatgaagttgctatgcaacttttacagattctggaaccgaagatgtttcgctatgctcacaaattggaggttcagagaacagatggagtactcagccagctgtctcctctaccacatctctattctgtttcatattatcagttgtccgaggaactagcaagggcgtatcctgagctaactctcgccatattctcagagataagccagagaatccagacagctcaccctgctgggcggcaggtgatgctgcactacctgctaccatggatgaacaacatcgagctggtggacttaaaacctctccccacagcaaggcgacatgatgaagatgaagatgattccttaaaagaccgagaacttatggtgactagtaggcgctggttacggggagaaggatggggatctccacaagccactgcaatggttttgaacaatctgatgtatatgacagcaaagtatggcgatgaactggcctggtcggaggtggagaatgtgtggaccacacttgcagatggctggcccaaaaacctgaaaataattttgcactttttgatcagcatttgtggggtgaatagcgaaccaagcctcttgccttacgtgaagaaggtcattgtatatttaggtagagataaaacaatgcagttgctagaagagctggtgagtgagcttcagctgaccgatcctgtcagttcaggggtcactcacatggataatcccccgtattatcgcatcacttccagctataaaatcccttctgtcacctcaggaactacttccagtagcaatacaatggtagctcccacagatggcaatcctgataataagcccattaaagagaatattgaagagagctatgtgcacctggacatttacagtggactaaacagtcatttgaatcggcaacatcacagactagaatcccgatacagtagcagctctggaggatcttatgaagaagaaaaaagtgattcaatgccactctattctaattggcgactgaaagtgatggagcataaccaaggagagccactgcccttcccaccagctggaggctgctggtcaccactggtggattacgtgcctgaaacgtcatcacctggattacctcttcacaggtgtaacatagcagtgatccttttgactgatctcatcattgatcatagtgtgaaggtggaatggggaagctacctccatcttcttcttcatgcaatttttatagggtttgaccactgccaccctgaggtgtatgaacattgtaaacgcctgcttctgcacttattaatagtaatgggacccaatagtaacatccgaactgttgcttctgtccttctcaggaacaaggagtttaatgagcccagggtgcttacagtcaaacaagttgcacacttagattataatttcacaggcattaacgattttatacctgattaccagccctcccctatgactgactcagggcttagctcaagttctacctcttctagtatcagcttaggaaataacagtgctgccatttcacatctgcacaccactatcctcaatgaggttgacatctcagtggagcaggatggaaaagtcaaaaccctcatggaattcattacctcaagaaaaagagggcccctttggaaccatgaggatgtttctgccaagaatcctagcataaagagtgctgaacagttaactacatttttgaaacatgtggtttctgtttttaagcagtcaagctcagaaggaattcatctggaacatcatcttagtgaagttgctctgcaaacagcactttcctgttcttctcgacactatgctgggagatcctttcagattttcagggccctaaagcagcctctcactgcaactacactttctgatgttctctccagacttgtagaaactgtaggggatccaggagaagatgcacagggatttgtgattgagcttcttctcacattggaatctgcaattgatactttggctgaaaccatgaagcattatgatcttctttctgccctttctcaaacctcatatcatgatcctataatgggaaacaggtatgcagctaacaggaaaagcactggacaactcaatctaagcacaagtcccattaatagtagcagttatttgggatataacagtaatgcaagaagtaactctttgagattaagtttgattggtgaccgacgaggtgaccggcggcggagtaacacactggatataatggatggacggataaaccatagcagtagtttagcaaggactagaagcctttcctctctaagagagaaaggaatgtatgacgtgcagtccactactgagcctaccaacttgatggccaccattttttggatagcagcatctttattagaatcagattatgaatatgaatacctcctggctctcaggcttctcaacaaactgcttatccatttgcctttggataaatcagagagtcgagagaagattgaaaatgtacaaagcaaattgaaatggactaattttccaggacttcagcagctcttccttaagggttttacctcagcatctacacaagaaatgaccgtgcacctcctcagtaaactcatttctgtctccaaacatacattggtggatccttcccaattgtcaggctttcctcttaacatcctttgcttattgcctcacttaatccagcattttgacagcccaactcagttttgcaaagaaacagctagtcgaatagcaaaggtttgtgcagaagaaaaatgcccaacacttgtcaatctggcacacatgatgagtttgtacagtacacacacgtattccagagactgttctaactggatcaatgtcgtgtgcagatacctgcatgactccttctcagatacaacatttaatcttgtgacttatcttgcagagctgttagagaaaggattgtccagtatgcagcaatcattactacagattatttatagtctattgagtcatattgacctgtctgcagccccagccaagcagtttaatctggagatcataaagattattggcaaatatgtacagagtccttactggaaggaagcccttaacatattaaagctggtggtgtcacgctctgcgagtcttgtcgtacccagtgatatccccaagacctatggaggagatacaggttctcctgaaatatccttcactaaaatttttaataatgtttctaaggagttgcctgggaagaccttagattttcattttgatatatctgagacaccaattattggaaacaaatatggtgatcagcacagtgcggctggaagaaatgggaaaccaaaagttattgctgtcactagaagtacttcctcaacttcttctggttctaattctaatgccttggttcctgttagttggaaaaggccacagttatcacagcgaagaacaagagaaaagctaatgaatgtgctttctctctgtggtccagaatctggcctcccaaagaacccatcagttgtattttcttctaatgaggatttggaagtcggtgaccaacagactagcctaatttctacaacagaagacataaatcaagaggaagaagtagctgtggaagataatagcagtgaacaacagtttggtgtttttaaggattttgactttttagatgttgaattggaagatgcagagggtgaaagtatggacaatttcaactggggagttcgcaggcgctcactggacagtattgacaaaggggacactccatccctccaggagtaccagtgctctagtagcacccccagcctgaacctcaccaatcaggaggatacagatgagtcctcggaagaagaagcggcacttacagcaagccagatactctcacgcacacagatgttaaacagtgattctgccactgatgaaacaataccagaccatcctgacttacttctccagtctgaagattccactggcagcatcacaacagaggaagtgcttcaaatcagggatgagaccccaactttggaggcttctctagataatgctaacagccggctgcctgaggatacaacttcagtattaaaggaggaacatgttacaacctttgaagatgaaggatcctatatcattcttccggagggacagaccagcaagacatccccaggagcaaccactctggtaatctagaattcagtggcagaaaataaataagaagataacttccttcagaaagccatgacattgaaataatgtggtcataactctttcttcagtataccaataaaatattaatagcatgc

SEQ ID NO: 1778 - DNA, 4154 bp, Homo sapiens
tttgtatttttggtagagatggggtttcaccatgttggccaggctggtctcgaacacctgacctcaggtgatctgcccgcctcggcctcccaaagtgctgggatgacaggcacgagccactgcgccccgccaggctagcgggcctgtgtgtgtgctgtcaggcgtcgatgctgggatggtgatgtgtcccgactgcagggagaggacccgggaagctccgaggttggtgacctctcctgcccctcctgtgtgtctctccccatggctgatgtgcagccctcagtggattctgtgagtctttctagtgaatggtcaaacctgagggtggtcttcggagcagttgcacgctaacccgacgctgcttgtcgtgagctaggcctgaactgtaagtgcttcatgtgcactgagccctcgtcccaactcatgaagcaggcgctgtgctcccatttgataggggaggagactgaggcacagggcgctcatgcctcttgcccacagtcacctgactggtgggtgctggagctggtctgctgcagagccctggctctcacgtcccatgccaccctgttcccagctcctgagtgctaccgtcagctgggccagatggtgggtggctgctcaggctgtctgggcacagcggaaggctccaggggggccgggggaggggccatgacgcagtgggctcaccggtggcagggactgcacgatgtcactgtggtagatgtagccggtgtggggcagcactgaggtagacgagaagcccgacagcgtcttgcgctgggccccgagcagcatgatgttgcaggcgggcatcttggagaggttggtcaggccgccggccacacctgcggtgggagggagggaggaagggggggcggtcagaagaaagcagagaggtgggggtgagtaaatctgcctgggggctcgacgtgtgctgggcacctttacatgaagttctggttggattcctcgatggccctgccaggcgggcgacctggcccattccgcaaggggcagatgcaaaggaggctcagagagggagggcagctggcctgggggtgcagggaggaggcccccaacaggaagctgaccaccacgtttgtgctaagccacactaacgccgttccagggatggctgtgttttggaaccattttcaccaaaccaggagctccctgacaacagggcctgggtgtggtcatctctgggtttccggcacaggggagggagaaggagctgtgggtgagtgtttttcccacagacgaggctttgctgtgtgccaggctggctgacctctgtgatgtccagggagacggggtgctgaggtccaggtgccaaagcccccattctacagaaaaggatgtagctttcccaaggtcacagtgtcagcagacccccgctccatgggacccagcccggggactcacccatgatcttggcggccgtggatgccccgataatgatggacaggttgggtgcgatgaaggacatccgggactccacatactcgtagatgcggtgcttggaggcgttcagctccagcgccatgtcgcaggcctcctccagccgctccagctcctcctccgacagctgctgcctgcaggggcgggtgggcccagcctcctgggtctcccgcctgcctggtgtgcccagccccagccctctcggttctgtgtgtgtgcatgtgtgtatgtgtgtgtgcgtgtgtacacctgcgtgtgtagctccagcctaatccccaatcccattagggcccggcgcctccctcgaagcggacatacccctgggtggtggaggcggtgacgctgacgaccatgatggtggcattggtgaggatctgctgcaggttctcattgttcttgcacttgtccaggctgttgcccagctcctgggggcgagcagagaagataggggaggctcgggaactcaggaaggctcgagaacctctcttgctcagcacctcctcaggtctcttcttagggacactgggacagtcagggtctctgcactgggggcctctcctgcctccaccgcctgaagcatccacaccattcctgcctccaccacgtcaagcatccacaccatctgccctgctttcgctgacctggaaacggagcccgggcagagtggcgtctggaaagactgtggcctcacaagcctctggcctgcgtcaagtcggagtgcaaatccgcggcctcgcttccctgcaggggcttccccaccgccatcctaatcctttcctggacatgcgtggggacctcctcctctccccgccctcacgcacacctgcccctcttttccgaaacccttccttggctttctcctaagacccaaaggctggacgtgatccgacctcttccccgtcccctccttccccgcctcacttcctccccacttgttccctctccagctctctgcacttagacgtctctctcccccaaatctccgtgtgcctgccctgtgtcaaccttcggatgtcaactccaatgccaccggctccaaccacagcgggagcagcgtgggtcaggccagcggggaagccctctcgggagactggggttggaggggagccctgagaaagtcctgtccaggctccgtccctcccacgctgggcagagcagaccactgagccctcgtccactcctctccatcgtctccagaccctgaggcctctgggagggggtccgagagtgagccccgcctgccccttcacgccagcagaagcaccccaccttctctgcgctcaccttgaccgtgcggatgtaatccagtgcattggggaccaaggactccagttcagggaatctctttgagtacttatcccggatgaacttatggatgatgtctaggtaactgaagccctggcttgtggcctggcacacgggcaccagcatacagcctttctcagccgtccttaccgctaggtgtgaccaggggaattagttctggtctgtaaaacgtgagctgcagtgacatgttcttaaagaaaagaagcgccttgctggtgggaatgcggaggtgatggctggaggtggggcagtcacctcgcaccgtgaggcaggtggccgaccaacaggatggaaagagccggggccctacaggcagccaagcggccacaccatccccgagtgctcctcagactcatacgcgagagaacgcacttccttcttatttcagccactctgtgacagcaggttgttggcatccacgatgacgcggtattcaggcgcggcctccactggtcccatcactgtgaggacacggaggcatgggtcacttgtgcacctccagtaaacagggactgccacagcttgtgagatgtttcacctctgcctcctcaaccagacaccgggtgtgacggggtctgactccatccctgagcctggcctgacatcaggaaatgtcactttctgtgtcccataaccctctggagggagaaattccttggcctggcatctggaactctgcaggattctctctccggatatctgaggccctgggcctgccgctgtctttccctgggcccccttctccctttctttgcctggcacatgcattcatgctctacagtccaattcagctatcgattcttcctgacacctggggcagggtcagccagtccctcctgtggctccggtgtccccagcttggtaccaccactgatagctgtctggaacctggcctgcctcttccactagaccttgagtactttgagagcaaagacctgggcgattcaactgggtgcccaggtaaacgttaaagaaagcaagcagtgagtctcccgaaactctgccctctcactacacttctttccccagaaacctcctatggcttcctgtcatcaacaaattccattcaagaagaatgggaaggctgggcgtagtggctcatgcctgtggtcccagcactttgggaggccgaggtgggcggattacttgaggtcgggagttcgagactagcctggtcaacatggtgaagccccatctctgctaaaaaatacaaaatagccaggcatggtgttgcatacctgtaatcccagctatacatagggctgaggggggagaatcgcttgagcccgggaggtggaggttgcaatgagccaagaacacatcactgcactccagcctgggcgacagagggagactctatctcaagg

SEQ ID NO: 1779 - DNA, 3862 bp, Homo sapiens
aaaaaaaaaaacctcagttctgctcacatttatcaagaggagcttaaaatgcagaataaaatgtcgatgatttatatgttgctaactagaagaaaggtgtatcccattggcaggtgagagccactgaagctaagagggtggggggcagtagaaaggaaaggtgggagatggaagaaacagaaatgagcaagaggcgtccccgagagcgccaccagctgcgcctccctctctccggggagaactgctgtgtggcagccatcatccatagttacagtgcatgtcctagtcaccagtgagaaggcagctgtgttctctgtactctgttactgaggcagagagatgtcttctaagtgtgtgccaaacttcaaaatattttgattaaaataattgtaataaaaatacctacatacaactggccaccgtcatggcaccaaaacatcttggaatactcaatatctgggcttccaaagagttgagttgttacggtgagactttgactctgtttactgaagagattctgaattgcctgtcagttttttcaagagtcgcgcgtatgatttgtatgggtccctcaatcacagcaggacactgcacgcagcattactggctgagggacgtccttgttgaccaccggcagtgaagtgtagtggagcagttaggccgtctggggctgggagggtggcagtcgtgtttcatgctgtgtcagcgcgtcatcccattggacgggtggttgtacctaaattgagtgttgtgacactctcctgagcctctgttgtttcctccccaggagaagtccttgtgttcctggacagccactgtgaagtgaatgtgatgtggctgcagcccttgctggccgccatccgtgaggaccggcacaccgtggtgtgcccagtgattgacatcatcagcgccgacacgctggcctacagctcgtcccctgtcgtccgcggagggttcaactggggactgcacttcaaatgggatcttgtccccctttctgagctaggacgagcggagggagccactgcaccaataaagtcaccaacaatggctggaggtttgtttgccatgaacagacagtatttccatgaacttggacagtatgatagtggcatggatatctggggaggagaaaatttggaaatatcatttcggatctggatgtgtggcggtaagctcttcatcatcccttgctctagagtaggacacattttccgaaaaaggcgaccatatggatctcccgaaggccaggacaccatgacacacaactctttgcggctggcacatgtctggttggatgaatacaaggagcagtatttttccttaagacctgacctgaagacgaaaagctatggcaatatcagtgagcgtgtggaactgagaaagaagttgggctgtaaatcatttaaatggtatttggataatgtatacccagagatgcagatatctgggtcccacgccaaaccccaacaacccatttttgtcaatagagggccaaaacgacccaaagtccttcaacgtggaagggtaagaaagctgttttttccaagtggcttatgaaaagcgtttgatatgaaaagttttgaggtgtccataagctatgacaggtgacactgtggacttaacagagtgtaatgacaggcttcagcttgcctttcattatattctctttatgggaacttctctacgcaagtgtaggacctcaagtgtagatccttgccttgccggcatagctgccttctgtgagggtaagttatgtgacgctttccaagagcgcagaggcatatgggaatacaccccggacagaggccatggaagtgtcaacttcgtgtgtcagaggccaggccaacaagtggagaaatggggcagtgatctgctatttgctcttagctctgggaaccaaatcacagagcagaggtggtagtgagggtcagagtggggacatggatttcatgcctggtgttcccagaagtcatctgagctcagcagaaagcacattgatcaaccacatttccttagctgtctttgtgtcttaaactcattacagttatatagtcacagttaaattgtaggggtccggccataaaatcatccccttctcctgagtcatctcttagagttggcttctaaaagctaagggcaggtactgtctgtgttgcccagtgtcccttcttttatgaagaaggcacttctcccagagcagtgtcaactctccctcagtggctaggaggaagcctagagctttcccccttcctcttctctctaccctataataagacaaaaacaaacccagtatcaggatgtttagtgtcaggtgtttttctctaagtaggagagagcagtgtgtgcccatgtagttgatcgcttaccattattatttcttgctgtttgtctcaccctcgcagttctgtgatagttgtcaccggtgtctctccagtgtagcatgcatattgcatttcattgtgtacttttttatacatgttgttcttatatccctgacttcatttgaaggttctttagggcagggatgacattttaatttctttcatctgctgtagattagtaaacatgtatatgtagctagaattcctagctgacactgtctgcatgttaaaactgctaataacttttggagttataacttttgtctatcttgatgctcctgtgttctgaggctagaacttaggaattaaaaatgcatatatttttatgagccttggaattcgtacctccggaataacctttcacattttgcctggaaccacctccaggcttgggaggcgtctctgggattgtttcccacattctgagctgtgccttctcttacagctctatcacctccagaccaacaaatgcctggtggcccagggccgcccaagtcagaagggaggtctcgtggtgcttaaggcctgtgactacagtgacccaaatcaggtgagtgacacctcggggctcacagccagtgtccgcaaggaggcttccagtgtagggaagctgctgccagtcactcctgaggacatcagtgtctactattctggcttttcttaacccatttctgtgtagtgttgcgttattggaacgctaagcttatgggggttatctatatcctagtgctcaaggtcaccgccagggtctgatttttcaccgaaaaaaactgcaacctccagcataaatgggttaaaaggaagagagtggccttagatgacacctcagtcagctactttcgtctcctttgtatgtttttcctatctctgctcgtcgtcatagagcattttagttgtttacaccattatttgtactttctaatattatgcggaataaattgtgacttacgagccataggaatttgttagaaatggccaagggaagcactacagaatttcagttgattccattcacctaatttcatttcagcttatgtatgtctcctaaataatattaaaacgggcctaaaaatcagcaaataacttcagtttagaacggtaatttcaaactcgtttatgtctgataaaatagcataatggaacagcagtctaatctcataaattgtagtgtctcatttctattttagtggtgggttggtgtcactcagaaaggaaaaaaaaagccacttgggcttttgggtaaataatgtgtgctgtgatgtgtgctgtgagatgtcatccagcgctccaccagaagaggtcacgcccactgtctcaggtgatacgtgtgttgaaaatgtagtttaaaagggatttctggggcccagtgcagaggctcatgcctgtaatcccagcactttgggaggatgaggtgggcggatcacaaggtcaggagttcaagaccagcctgaccaacatgatgaaaccccatctctact

SEQ ID NO: 1780 - DNA, 3094 bp, Homo sapiens
aaataaacgtggcgggacgtatgtgtcatggcgctctccatctaaagtctgtgcagcttccggagagtggcgggttgattttctcactttggactggtttttacttcccgacttctggactcatctttcaagaggactttagactaattgcagataattaagagaatatgccttctgcatcctgtgatacactactggatgacatcgaagatatcgtgtctcaggaagattcaaaaccacaagataggcattttgtaagaaaggatgttgtcccgaaggtacgaaggcgaaatacccaaaaatatttgcaagaggaagaaaacagtccaccaagtgacagaaaatgcatccgatgcagatttatggctcctgaacagttgcactgtaaaaaacccagctgaagaccactttagaaactcaattaaaaaagctcaagaggagaacaagaaaatcgtactggctggatgcgttcctcaagcccagcctcgccaggactaccttaagggactgagtatcattggggttcagcagatagatcgtgtggtagaagttgtggaggagacaattaaaggtcactctgtgagactgctgggtcagaaaaaggataatggaaggcggcttgggggagcacgattggatttgccgaagattaggaagaatccactgatagaaatcatttccatcaataccgggtgtctcaatgcttgtacctactgcaaaactaaacacgccagaggaaatttggccagttatccaattgatgaactagtagatagagccaaacaatcttttcaagagggtgtttgtgagatatggttgaccagtgaagacacgggggcttatggcagagatattggcaccaatctccccacactcctgtggaaactggttgaagtgattcctgagggagcaatgctgaggcttggcatgacaaatccgccctatattttagagcatctggaggaaatggcaaaaatccttaatcaccccagagtctacgcttttctgcacataccagtccagtctgcctccgacagcgtactcatggaaatgaaaagagaatactgtgtggctgacttcaaaagagtagtggattttctgaaagagaaagttcctggaataactattgctacagatattatctgtggttttcctggagaaacagatcaggattttcaagaaacagtgaaacttgttgaagagtacaaattcccaagcctgtttattaaccaattttacccaagaccaggaactcctgctgcaaaaatggaacaagttccagcacaagtgattggtgaaagacaacaagtgttagtaacagaagaatcttttgattccaagttttatgttgcacacaatcaattctatgagcaggttttagtgccaaagaaccctgcgttcatggggaagatggttgaagtggacatctatgaatcaggcaaacattttatgaaagggcagccagtatctgatgccaaagtgtacacgccctccatcagcaaaccgctagcaaagggagaagtctcaggtttgacaaaggacttcagaaatgggcttgggaaccagctgagttcaggatcccacacctctgctgcatctcagtgtgactcagcgagttccagaatggtgctgcccatgccaaggctacatcaagactgtgcgctgaggatgtccgtgggcttggctctgctgggtcttctttttgcttttttttgtcaaggtctataattagaatacaactaatggaaacatctataaagaagaatacatttctaattaaaatcttcaatgaacaggaaagcgacatctccattctccaagggcaataatttgtactggtcatgctgcctccttctcagccactcttcttaatgaggctccccctgtctcacattgagttgggcccattggttatttgacctaaaacctaatcacggctaccatagcacatccttcaaattaaactgcttttggtttacttttagcaagaaatgcaagcggttgcatttttttctgtttgtttcaatctctaatctttaagtcagaacctaattgtacagtggctctggccatcttttcctcatgtggaagaattttctatctttaataaactttttctttgttttttttttccagatggagtttcgctcttgtcccccaggctggagtggtgcagtggcacgatctcaggtcactgcaacctctgcctcctgggttcaaacgattctcctgcctcagcctcccaagtagctgggattacaggcatgcgccaccaagcccagacaatttttttgtgttttcagtagagacggagtttcaccatgttggccaggctagtctcgaactcctgacctcaagtgatccgcccgcctcggcctcccaaagtgctaggattacaggcgtgagccactgcgcccggcctctttaataaatatttttaagtgcatcttccccttcaggctttgtttggagtcccagtgctacaaacattgtatttttcacagcagatgtgttcctgaaaagtgtatagaaacctgttctgggaacctgaatgcttttggaatgcacggggagagtctgccagctaaaggactcctggcaacattctgtgaaatatgaaactggaaaactggatttgtcgaaaactaattgtgcccattttctcacatttttgatccattggggttttttttttgtttttgtttttttttttttttgagtcaaggtctcactctgtcaccctggctggagtgcaatggcactatcttggctcactgcagccttgacctcctggactcaagcagtcctcctacctcagcctccctaatagccaggggctacaggcatataccaccatgcccaactaattttttaattttttgtagagatgagtgtcactatgttgcccaggcttgcctggaactcctagcctcaagcagtcttcttgcctcagcctcccaaagtgctgggattacaggcgtgagccactccacccagcccagattaaatgtttttatttctacctgccatcattggtctttactaagtgaagtgacttctttctttaacaataaatagaattggtatactaagc

SEQ ID NO: 1781 - DNA, 3284 bp, Homo sapiens
attcagttactgaaggtaaacttgatatctcccaggacgatagtgaaattacacaaatggaacacaatctggcatccagaaggtcatcagacgattgccatgatcatcaaacaaccccatctttgggagttagaacaattgaaataaagcccagtaataaagatcctttcagtggagagaatataactgtcaaactaggaccttggacagagcttcgacaagaggaaatacttgtggataatttactacccaactttgagtccttagaatctaatgatgaagagacttccagtgatgtgaaaagtagttgcagctccaaacctaacttggatactatgtgtaaaggcttccagagtcctgataaatctaataactctacagggacagcaattacattaaattcaaaactgatttgtttaggcactccttgtgtcatttcaggttccatttctagtaatacagatgttagtgaagatagaactatgaaaaaaaatagtgatgtattaaatctcacacagatgtattcaggaatccctacagttgaaagtgaaactcatctgggtacaagtgatcctttttcagccagtactgatatagtaaagcaagggcttgtggaaaattattttggttctcaaagcagtacggatatttctgacacatgtgctgttagctacagcaatgcacttagccctcagaaggaaacttctgaaaaagaaattagtaatcttcagcaggagcaggataaagaggatgaggaggaagagcaggatcaacaatggttcaaaatgggtactatgaagaaacagattattcagctttggatggaacaataaatgctcactatacaagcagagatgaactaatggaagaaagacttacaaaatctgaaaaaataaacagtgactatctgagagatggtataaacatgcctactgtctgtacttctggttgtttgtccttcccgtctgcaccacgagagtctccttgtaatgttaaatattcttccaaaagtaaatttgatgccattacaaagcagccaagcagtacttcttacaacttcacttcttcgatttcctggtatgaaagttcaccaaaacctcaaatacaagccttccttcaggcaaaagaagaactgaagctactaaaacttcctgggttcatgtacagtgaagttcctctgctggcatcctcagtaccttattttagtgtagaagaagaggatggttctgaagatggagtacatctgattgtctgtgtgcacggtttagatggaaacagtgcagatctccgattagtaaaaacttacattgaacttggattgcctgggggaagaattgattttcttatgtctgagagaaatcagaatgatacttttgctgattttgatagcatgactgatcgtcttttggatgagataatacagtatattcagatatatagtctaacagtctcaaaaataagctttattggacattcgttgggcaatttaataattcgttcagtgcttacaaggccaaggtttaaatattacctcaacaaacttcatacctttctgtctctttctggacctcaccttggtacactctacaacagcagtgctcttgttaatacaggtctctggtttatgcagaaatggaaaaaatcaggttcgcttttgcagctgacatgtcgagatcactcagaccctcgccaaacttttttatataagcttagtaacaaagcagggcttcattatttcaaaaatgttgtgctagtgggatccctacaggatcgctatgttccttatcactctgcccgcattgaaatgtgtaaaacagctttaaaggacaaacagtcaggacagatctattcagaaatgatccacaacttgcttcgacccgttctgcaaagcaaggactgtaatttggttcgctataatgtcatcaatgcattgcccaatacagctgattcactcattgggagagctgcacatatagctgtcttgattcggaaatatttttagagaaattctttctggttgctgccctcaaatatttccaatagtataaaagcattgttagcgactggacaattacctcattcaacaatgtttcaaataatgtattatattaaaatgtagatgctgataagttctaagaaatatttatacctttttatatggaagataatttatatcatccatgtttagtgctttttaaacatcaactttactttctaggtaatatggctgtgcaatatttttttaattttatctttttacttttctattactttttcatatattttgctacctaagtatttcagtgaaactttaagcccatacctgtgtctgattgtttattattggctttccacaattcttacatcagactacattatattagagaccattattgctagaatagcatgggatttaaaattttctaatactgggggtattatttagttaattataaatttttcttttcacattttactgtgttttaactggaaataaaattatggctgctacaatatattttttgaaatcaacttctgtagttctaaaatacaactttatcatacaatcaaaccaggtagttcatataaaacagtgtaatacaagttttctataaagtcattactgttgcttaaacatatttcatgcctattaaaatatattttctactggtgatttcaactttatttctcatactgacttttattactggaaatgttcctgtacatgttggcagcagataaagatttttgaatgtttgaatgccctctgccttgatttggttggaatttttgctaaattggtaatgttgcttgaactttatgactacattttcttttaacttttttcatggacttccttatatgtacataataattaaatgttgaaatttatgaaatacttttatgaatttagataatttttaaatattgttaaaatttattgaactaaaaagtaatgtaaataaaataattcatgttaaagatggaacaaaataattaactttacatgtttggtgatacagatgcaaatgtttttgatatatggagatgttgagtcttttgactttactaaaggtgctgaatagcattaaattcactattttccttttctgttttacttgtgaaaataaaaatgcactaaggttgggtagaagttctgtttgcactcactaattgtgacagacagaggtttttgtaagtatttattgtacaattgatgcatgtttatttttagcgttgttattgcctctggtgttaataaatgaacaaatggctatctggag

SEQ ID NO: 1782 - DNA, 4910 bp, Homo sapiens
aactcaactttatataatgtgtaagatatttagaaggtaaaccatgcattcttagttaagataaaaacacaagaactttcctctgctcgtatttcaggaatacgtctgctgagggacacgttctacaaaacaatgaagtttgctgcatcaactgcattttcctttcatgaaaaatttctctgtaccatgcagtggtgtttgacagcatgttacccacagtagaattactttcaagatctgagtcaatcttctcaaaccctgccgctgctttatcaactaagtatgcactactgtaaatctttgatcacttcaacaatgttcacagcatcttcgctggtagatttcctcttaaaaaaccacattgctcattcacaagaaccaatgcctcagcaatttacgttttctcatgagactgcagtaattcagtcacatcctcaggctccatgtctaattctagttcacttgctagttccaccccatctgcagttacttcctctactgaagtcttggaatgaacttcttccaaactcctgttcatgttgcattttgacctccttccatgaatcaccaatgtttttaatggcatctagaatggtgaatcctttcctgagggttttcaatgtgctttgcccagatccatcagaggaaccactgcctgtgacagctaaagccttatgaagtgtatttcttaagtaaaagtaaaacttactccttgatccatgggctacagaatggatgttgtgttagcaggcatgaaaacaacaacagtctccttgtacaactccatcagacctcttgggtgaccaggtgcattgtcaatgagcagtaatattttgaaagaaatctttttttccgagcagtaggtctcaacagtaggcttaagacgttcagtaaaccttgctgtaaacaaatctgctgtcatctgccgaggctttgttagtcattggcagggtataggtagatttagcttcagattcaagggccttaggattttctgaatggtaaatgagcactggcttcaatgtaaggtcaccagctacattagtccctaacaagagcgtcagccttcgaagcctggaagccaggcattgactgttctctagctatgaaagtcctatatggcatcttctgtttcatctgcattgcaaaagtgtagtgtagccacctttttcaagatcatagctagatcttctggagaacttgctgcagcttctacatcagcacttgctgccttaccttgcactttatgttatggagatggcttctttccttaaacttcatgaaccaacctctgcaagctttcaaattttcttctgcagcctccttacctctctcagccttcaaagaattgaaatgagttaaggccttgctatggattaggtttggcttaaggaaatgtggctggtttgatctttatccagaccactcaaacattctccatatcaggaaataaggctgttttgctttctttttttttttttaaagaaatggagtctctctctgtcacccagaacagaatccagtggtgtgatcatagctcactgcagcctcaaactcctgggctctagcgatcctcctgcatcagcctcctgaggagctaggactacaggcatgcaccacacacagcttgctttcttatcattagtgttcaatggagtaacacttgtaatttccttcaataactttttctttgcattcacagcttggctgtttggtgcaagaggcctagctttgggcctatctcagcttttgaatgcctgcttcactaagcataatcatttctagcttttgatttaaagcgagagactttcgactttttctttcacttaacacttagaagccactgtactgtagggcttttggcctcatttcaatattgtatctcagggaacggggagcctgaggagaggggaagagagacgggggaacagtcagaacacacacaacatttatcaattaagtttgccatcttatatgggcacaggtcatggctccccaaaacaattacaacagtaacatcaaagatcacagatcaccataaaagagagagtaataatgaaaaagcttgaaatgttgggagagctactaaaatgtgatgcagacacacaaagtacgcacaagctgttggaaaaatgctgccgactgacttgcctgctgcagggctgccacaaactgtaaaaatgcagcgcacctgtgaagcgccacgaagccacacatgatggggtgggacacgtctgtgcatggctggggaaacagtcacccttgtgggtgtacagctcttcagatgttttgcattagaatgcaggcataaagtcccttatgtatttttaatttccaagcaacaataatttaaaaatcagttggagagtgtcagcaggtgcttctaggttctgtgtggtgagcccccaggtcctggcgtgtagggctctggatgtctctgtacacgggatagaaacatggtcacgtgggaatgccaatatgacttattgcttattgagctgtgcaggcttttctgctttatcaattacgcctccaggaagctgtgaaagaaagcttcatccatctcccacaggatttgtctccatatttgtgacacataataaaatgttatgtactctttatgtaattttactctcctactcatggctgcttatcacttgtgacaacatgttaatttttccagtgcggtccttgtagactgtttttctttttcttttttttttttttttgaggcggagtcttgctctgtcacccaggctggagtacagtggcacaatctcagctcactgcaatctccacctgccgggttcaagcgattcttgtgccttgcctccccagtggctgggattgcgggagcacgccgccacgcctggctaatttctgtatttttagtagagatggggtttcactatgttggccaccatgtacaaaggtacagaaattggctgggcgtggtggcgggcacttgtgatcccaggtgcttgggaggctgaggcacgagaatcgcttgaactcctgacctcaggtgatccgtctgcctcagcctcccaaagtgctgggattacaggcgtgaaccaccatgcccggcctagactgtatttcttcaaagatcacaggctgcttataaaagtaccctgccttcccaattgaggtgatttctgacagctaattaccaaaagacatcaccgtcttacgatagcaactcaacacagaaagtctgatggaaagccattttatttttctctaaattttaaaatagaagactttaatggaaaacatttagtaccatcatgtcaccctgaatgccagcaatacctcgacttttacacacgcaggaagcctagtaaaagccccgtcagtagtacacatttctctatggtccttcaacagttttgcatatacaaaattttctgctattttgctttagcaaacagcaataaacttttgtgtttcctatatgacacctaatatccagtcctacagtaatatagttagaaaaataaaaggcttaaaaatttcatagtacgagttcatggtgctaataacagaatctctttaaacataagatcattttaagcctcttacataaccaccttctggtttcatttgaaatccttaagaattaaaatctagtaagattgttaaatcaacgtacgtcaatcattcattttcacttgccttgggagagttaattcccactgtccactgaatgaatgcctttcaaatattaataaatatattacagtatttacaagcattcttatacactccgacactgacagggagttaagccatggagagggaagcacaggtttcccaatagtgtgacttcatgacgtatgggacaaaaggaaccggtgctcaggcctggagggagctgagatgagagcagggatgatggttcagatacgcacacatgctctaagacacatcagactctagctgagaccagccagacatttcttttgttgttggattagaagtaaaactgaacaagaaaccaggacacggaaggaagaactggaagctatgcctaaagtcagaccaggctaaggattttaaaaccaagctccacaagctcttagtgaattaccctgtggaaactatgtagctgacgtgaagtgtggaggggggtggtagaaaggggggttaaatgtaagactttgttttggcaacaaaaaatgatagtaatttgatttctacaactttaactgtgccatgtgccctttcttaccccactttctgcagattgtttcatatgaacgtaccctccacgtgacctctttaatgcacttggcaaactccgttaatgctgttgaagaatgtatgttctgtgctgtggtaagaggtgatcgtaatgcccaaatcatccaatacactatcataaagtgaagtgaaagacatgtactagatgtttgctttgtgaatgtgaatgaaagtcttattttgggggtgtagtttcttatgttttaataaaaacagtagtcattattttaaaaagcacattctcctaggtgcatatttatatacatatacaaataccatttccttcccccttgtgcccttctgggtagtcattttaaaaactcaagcctggggtcatcaaaaggggtagatttatactcccacctaactgtctggagtatagagttcagatagtctcttaggaagttttataaatgagattcacccagtacaattctgaaagctcttaaacaggagtctttaaaataatgtaaacacttaagtaatcaataagggttctctggtggcccacttttacatgcaaatacagaccaactgttaacatgcattattttagtcaactggtaaagtttatttcataagtataagtaattttaagccttttactaaactgtaaatttcaatccattaaaaactactaccgg

SEQ ID NO: 1783 - DNA, 3778 bp, Homo sapiens
cacttaagacacttatgaagtttcttgttctgaaattgctgtactgcaatgaagaagaggagaaaggttacttcaaatcttgagaagatccatctaggctatcataaagattcttcagaaggaaatgttgcagtggagtgtgaccaagtgacctatactcattctgcaggaagaccaactcctgaagctcttcactgttaccaggaacttcctccctctccagatcagagaaagcttttaagttctttgcagtataataagaatttgctaaaatatttaaatgatgataggcagaagcaaccatctttttgtgatttacttatcatagtggaaggaaaagaatttagtgcacataaagtagtcgttgctgtcggcagtagttattttcatgcgtgtttgagcaaaaatccaagcactgatgttgtcaccctggatcacgtaacacattcagtttttcagcatttgcttgaatttctttacacatcagaattttttgtgtacaaatatgaaatacctcttgttttagaggctgcaaaatttttggacattatagatgcagtgaagttgttaaataacgaaaatgttgcccctcttcattcagagctaactgaaaagtcatcaccagaagaaacactaaatgaattaactggaagactatcaaataatcatcagtgcaaattctgtagtagacatttttgttataaaaagtctttagagaatcatttggctaaaacccataggtcccttttattagggaaaaaacatgggttaaaaatgctggagagaagtttctccgcaagaagatcaaaaaggaatcggaagtgccctgttaagtttgatgacaccagcgatgatgaacaggaaagtggtgatgggtcagacaatttgaatcaagaaaattttgataaggaaaagtcagatagaaatgattctgaggaccctggaagtgaatataatgctgaagaagatgagctagaggaggagatgtcagatgagtactctgacattgaagaacaaagtgaaaaggatcataatgatgcagaagaagaacctgaggctggtgattctgtaggaaatgttcatgaggggttaactccagtggtcattcagaacagcaacaaaaaaatattgcagtgtcctaaatgtgataaaacatttgaccgaataggaaaatatgagagccacacccgtgttcacacaggtgagaagccctttgagtgtgatatttgtcaccagcgctattcaacaaagtctaacctaactgttcacagaaagaagcacagtaatgaaacagaatttcataagaaggagcacaagtgcccttattgtaataaacttcatgcaagcaagaagactttagccaagcatgttaagagatttcatcctgaaaatgcacaagaatttatttccattaagaagactaagagtgaaagttggaaatgtgatatttgtaagaaatcttttactcgaagaccacacttggaggaacatatgattctacattctcaagataaaccttttaagtgtacctattgtgaagaacattttaaatcacggtttgctcggttaaagcatcaagaaaagttccatctgggtccttttccatgtgatatatgtggtcgccagtttaacgacactggaaatttgaaacgtcatatagaatgtactcatggtggaaagagaaaatggacttgctttatctgtggaaaatcagtacgagaaagaactactttgaaagaacatttgagaatccacagtggagaaaagcctcacctttgtagtatttgtgggcaaagttttcgtcatggaagttcgtatagacttcacttacgagtacatcatgatgataaaagatatgagtgcgatgaatgtggaaaaacatttatccgtcatgatcaccttacaaagcacaaaaaaatacattcagattgatgttcaggaagtgctaagagagccaactctgtgagcacaataatgggaaagagccatctctatgagcacggtagaacaggtgaaaaagctcatcagtgtgaagaatgtggaaaatgttttggtcgtagggatcatctcactgttcattacaaaagcgtacaccttggagagaaagtgtggcaaaaatataaagcaacatttcatcaatgtgatgtttgtaagaaagtttttaaaggcaaatcaagtctggaaatgcattttcgaacgcattcaggtgaaaaaccatacaagtgtcaaatttgcaatcagtcttttagaattaagaaaacattaacaaaacacctggttattcattctgatgcccgacctttcaactgtcagcactgtaatgcaacatttaagcggaaagacaagctgaaataccacattgaccatgttcatgaaataaaatctcctgatgatcctctcagtacttctgaggaaaaacttgtatccttgccagttgagtactcatctgatgacaaaatctttcaaacagaaacaaaacaatatatggaccagcccaaagtttatcagtcggaagccaagacgatgttacagaatgtatctgctgaagtatgtgttccagtaactctggttccagttcagatgcctgacactccgagtgacctagtgcgtcatactaccacacttccaccatcttctcatgagattctgtcaccacagccacagtcaactgattatccacgagcagcggatttagcttttctggaaaaatatactcttactcctcaacctgcaaatatagttcacccagttcgacctgaacaaatgctagatcctagagaacaatcttatcttggaacattactgggccttgatagcactactggtgttcaaaatatttctacgaatgagcatcattcatgagtaaatctaaacattccacagatttttggatggttatatgctaatggtagagatgatagcttttaaatttgtggggctgctattttcttgttttctctagtttctcaagtcctcagaacagtttcaaatcaagaaaactatgtgtctctgtttactgaacatgaatatttggacaaaatttctggcataatatttgaagtgcacatttttgtgatttttaaagattatttagtgctaacttttaatggtttcttaaattttttgcaattattagctgctgatattatggaagtattttttttaatcatcagtggaaatttttattcttctttagtctcattcctctccttcttcttcctagcccttcttacaaacaagtttgaggaccatgtagcctttaagaaggaattaagagtacactgataattgcaactgtttcttatcctaagattcaatattacgttatacaaatttttaaaattgaaattaggaatttggatttacaagaatgccttggatatttctgtgttgtctttccattcatacataattttaggttatcattatcctttggacttttgatatactcaaagccagaaagcttaactaatgtaagattagctattatttgtaggactgaaataataatccagataattggtttttgcctatacttcaattgttatgaataagaaaggcaaacataggtctgggcattaaattatacaaactgaaaatgtgttacaagaaaaatatgagagttttaactagatgtttttcaaggtaagttcaccttttgtactttactatttatttcagaaatgttgacaatacaacatagcatatgtcttcatctcactaagaaaagagcagttgtaactcaatgaaatttaattaaacatgctactttgatttc

SEQ ID NO: 1784 - DNA, 4123 bp, Homo sapiens
tcacatgcacacgcacgtgcacattaaggctttggtggaaagagtggccctctaataacttgttttttaatagctggagttccacatgaaggagaagagagaggacctccagattagctggtctttcatcagtgtgccggaaatggccgttaatatccagcccaaagcactgggggaggaccaggtggctgagacaagtgcgatgtctgacgttctcaaggacatcttgaagcatttggctggttctgcctctccatcagtggttctgattaccaagcccacgactgtaaaggaagctcagaacttacagtgtgctgcatctactgctcaggaatcctgtcctcctaaacctccaagggctcacgagctgaagctactggtgaggaacatccacgtcttgctgctcagcgagcccggtgcctcaggccacattaatgcagtgtgcgtcgtgcagctgaacgatcctgttcagaggttctccagcaccctgacgaaaaacactccggacctcatgtgggaagaggaattcaccttcgagttgaatgccaagtcgaaggagttacacctgcagatttcagaggctgggcgatcctcagaaggtctgctggcgacggcgacagttcctctggacttattcaagaagtagccttctgggccacagagcttcacgctgaccagcgggtctgcctgcggcagctcggtgctgggctcggtcacggcagagttctcttacatggaacctggtgaattgaaatcctggcccatccctccccctgttcctgctgcaaaaatagaaaaggaccgcacggtgatgccctgtgggactgtggtcactactgtcactgctgtgaagaccaagcctcgcgtcgacgtggggagggcgtccccgctgagctctgattctccggtgaagactcccatcaaggtgaaggtgatcgagaaggacatttctgtccaggccatcgcctgccgcagcgcccccgtcagcaaaacactctcttcttcagacacagaattgttggtgttgaatggttcggatccagtggctgaagtggccattcgacagctcagtgaatcttcaaagctgaaactcaagtcgccacggaagaaaagcactattatcatatcagggatctccaagacctcactatctcaggaccacgacgctgccctgatgcagggctacacggcctctgtggacagcacccaccgggaggacgccccatcccatccggagagggcggcagcctctgccccgccagaggaagccgagtcagcccaggcatcccttgcccccaagccccaggaggacgagctagactcctgggacttggagaaggagccacaggccgcggcatggagcagccaggtcctgctggaccccgacggtgatgagctgtcagagagctccatgagtgtcttggagccgggcactgccaaaaagcataaaggaggaattctaaggaaaggtgcaaagctgttcttccgccggcggcatcaacagaaagacccaggcatgagtcagtcacacaatgaccttgtgttcctggagcagccagagggttcccggaggaaaggcatcaccctcaccaggatcctgaacaagaagctgctctccaggcacagaaacaagaacaccatgaacggtgcccccgtggagccctgcacgtagggcctgaggtcatcacctccaagccagaagacgtgcacccatgttaactaccctcaccaggacgcagccagtgtgtccgccggatgtccagatgccccgcttgtcttgctgggtttcttccaaccatctcgtcatttaaagggaaaacaaaatctgagtctccagccaggaggcttctcccagagaggacaaaaaagcccaacttgccaccagatgctaaatgagacttgacagctgcagagcttgggctgtgctcatagctaagggttagggttcaatattagaaggagattaacattataagtgaaataatatgctctaatagattgtggagggcaggtttgagggacttagtttacctattctacactaacaagtgttgttttgggtccatgcctggaccatgtcacaaaaaggaggtgcccccctgtgctgtcactgtgaatggaaaggatgggtcacctctcttcatctgctgcttggaataaaaaatgcagctggccctgagtacagggaagtggaacataggcaggattatggattaatagagaaattttgataagaatggagacgctacgacagatgtaggaagtcatctacctttgatattagccatagaacttgaacactaactatatcctatgcatagtatgcagaacacttttctaagtttactttgagcctacttgcaagtggaagatatatatattctcacatggtttttacatttttctctatcgtattaaaagctctaataatgctagtggagcagttgacatccagggttttttttcctgcctgtcatacttgctaaacaagagcacagcgggcctgtcagatggagtcaggagccatacgtgaccgctcgtagaacacagtaaccaaacacatacatggattttgccaagtgctgccagtagccaaaacaaagtctttttagggcaatagaggaaattattttgtgtctcaggtgtcagtcttaggaatggaagtttaataacaaatgggccaaactcgcaggacattccttctatgagcgcttcagaattttgctgtgaacagtcctcttggacacaggttggggtgcccttgtttgggtttgttttggtggaaaacatcacaaacctggcacaccatttgaatatccctaatatcattccagtcgctttcctcatcagttgcctttctatttcagttcattcacagatctcacttctgaatgtgccacttccagtagacatgctggtcaaagagcagtcatcattggggtgaagtgttcttgacagtttaatatgattcacttttctccaaagacatgtaaaaggctgttacgaaagcttggcttctgtcatggagacggaaatgggcaagcttccttccgtagcctcttgttaatccttaaacattaaatatttcgggggtaatagagccactggtgagtaaaaacctatataaaaaccaaaattataggattttttcttttttagtaaaaaccggtatcaaaaccaaaattataggatttttttcttttttagtaaaaacctatataaaaaccaaaattataggattttttcttttttagtaaaaacctatatgaaaaccaaaattataggatttttttcttttttagtaaaaacctgtataaaaaccaaaattataggatttttttttcttcttttttagagagagagattagaaaacgacattaggaatttcactttaaaatgcgcattacaaacttcttaggtgttccaggaattatcaagtgactttaaaatgacttttccaacctgctttgtttttaaaaattatattccagttttaatcattgtaaaaaaagcacctggagtttcaaaacatgtgaatactaccaagtttctgtccccaaagtcaggcatcactgttagtcttttgggacagatgggacagatgttcactttaatgttttacttgaagttttactgctctttgccatgtggtaaaaagaggctgagacatatttaagaattccaagaggatattatgtgtcagaatttcagacactgatgagaagtttttaattgttcttttttatttgattttggaattcaggtgcactctattcaagtgcaaggatatcagaagtttttttttatttaaaaaatttttttttcgagatggagtttcactctgttgcccaggctggagtgcaatggcagcttactgcaacctccacctcctggttcaagcgattctcctgcctcagcctcccaagtagctgggattacaggcacgcgccaccacacctggctaattctatttagtagaaatggagtctcaccatgttggtcaggctggtctcgaactcctgacctcaggtgatccacccaccttggcctcccagcgtgctgggattataggcatgagccaccaggccggccccaggattttatattaagccttcttgctctc

SEQ ID NO: 1785 - DNA, 3403 bp, Homo sapiens
cagtcaaatgctgccgtcggcccgagtggcgaggtgtcaggtggcttgtctccccttcaccatgggtagacctggcagagcaccctgttggcatgagcagaagtgctgtcacgttgatcacccaggctcaccgcctacacacacggttagagaaatgggtgtgcttctgtcggaacttaaaaacatggcagatcaacccgtgagaacagagttctttgcacggctgtgtgagctgggaagagacgacaggcagaaaaggtgctgcagggggtgtgtggaggtggagcttcagcctctcctggctgtgtgctggataagccttgaaccacagggtccaagttgactcatctgtaggttgtcttcagcccccaaatcgcaattccatgatgaatgtgtacattttacacatgtgcgtatgtgttattaagtgtcaggctggtgtggcagagctgtcctggcagaacatgcgtgtgtacatccctgcaggctgtcggggcatgagctctagtgtgggctgtattgcaggagcatcagcagagaagggcgagatcttcactctacctctcactagccctgggcacttcccactgcctttgtggacttctgtttgctcttctgtagaatgggataacagtgccagtcctgcttactatttagggttatgtgatgcttgcagatgtacagggaaagcactgctgatgggagctgctgaagtttctaggggaggtgaaggtggcgcctcctcccctggtctaagtggtagatggtgcagggagaggagaatttcattctgtggcagcagctgatagattccaggtctttaatactacctgggaaaccttaacaaagcagtcagtcaccaaaactgacctagcttctgagcattgctaaccatgcttttagagaaacaggaagtaaaaaggatctttaaaatctttttttttttttttgagatggaatttcactcttgttgcccaggctagagtgcaatggcgcgatcttggctcactgcaacctccgcttcctgtgtgcaagagattctcctgcctcagcctcccaagtagctgggattacaggtgtgcaccaccatgcctggctaattttttgtatttttagtagagacagggtttcaccatggccaggctggtcttaaactcctgacctcaggtgatccgcccgcctaagcctcccagagtgctgggattacaggcatgagccacccaccgcgcctggccataaaacctttaaagatgtaagtaaaatataatacaggtgaactcggcaaataaggggggttacctgccctcctcttctcttctcttttctgttctttttttttgtttgtttgagacagagtcacccaggctggaatgcagtggcgcaatcttggctcactgcaaccccccgcctcctggattcaagtgattctcctgcctcagcctcccaagtggctggaataacacccagctaattttttttgcatttttagtagagacggaattttgccacgcaggccaggcttgtcttgaactcctaaccttaggtgatccacctgcctcggcctccccaaagtgctaggattacaggcgtgagccaccatgcctggcctttgtactatttattaaactctgcatatctaaatgattttactcaagtctatcatgtaattacagccctaaaactacatttcttatgctttaaaaacttgtaggaagtccaagagaaaaggaaaactacttgactacaagcctagggttttttgttttttgtttttttttagaaaatggcctccagaaagtgggaaattattgatcacttgacaacagaagggatgtgggtttctaggcgccctgcctcctcggctttggatgttttgcctttcacttttcttcttctttcttttttttttttttttttaatactacaaatatggttattgttgagaaagtcttggagtgagtcatggttacaaaaactgagcgtaacttctgtcacttttcctatacctcacaaactagccaaaatgctgccatatcagcttctggagccaggcctgccctttgcccccgccaagcatccacctccccagacccttagcgctgcactccaggacccccttccacctccctcctgtgcttttggttctgcatattggctcacaaggcactgatggtggtgccatataataggatatcattttgtttcacagaatcggcagcctgttcttttatgagagaggaagccacagcagaaccaagtaagatgccaggcttctcagatccacttgaagaaaaaggagtatttcctttacctagttttgtgaatatttttcccgcttctctcattcagtcaacatttgagttcagacttaaactttatattgaagaacacagtgctttgcacagtaatgttagtagctgttatcatcatttgggaattcgtatcatattattaagagcaactctttcactaataagaaagctaaataaactgagaattgcccaatcctaagtcacccacagttttacagatatcccagtccaaaaaaaaataagacaagcctgataataagtatggataaggaagtctccagaagatacactgtcagatgtgtaaagcaagttttacacagttctgtgcgtgaaagcctggtgtccccaccagccaactgtgggaatccaggacatagagcaggaatagctgctgcttatttactgctctaattacctcttcggttccatttgcggtcgctagttccttccatcaagcaaagtgaaaattgtcaaaacggctgtttttccctcctggaaaacagaaaaaagaatatggcaagatgttaactgtggcatgacagtccgggattctggacacgacctacataatcttccttgtatctctttgtgacttggtttcctcatctgtaaaatgagaaatggggatcctgtttcctgtcccagcccccttcagggtggttgtgagaagcaaatgaggccgcaacagagtcatactctgtcaacccaggctggagtgcagcggcgtgatctcggctcactgcaacctctgccttctggattcaagcgattctcctgcctcagcctcccgagtagctgggattgcggacgtgcatcaccacgcctggctaatttttgcatttttagtagagacagggtttcaccgtgttggccatgctggtctcgaactcctcacctcagatgatccgtccgcctcggcctcccaaactgctgggattacaggtgtgagccaccgcgcccggccggaattttttacatcgttttctacaaggaaacctgtaggaagtgtcagggactctggaaagaacataatggcctcacctgtgaagagctggctgaaaaagacgacatcaagtaccgtacctctattg

SEQ ID NO: 1786 - DNA, 4435 bp, Homo sapiens
gttattaaacctgtttctgtgggtagacagatactctgggaggagaaggccttctcaggttttccttacctgggagtgttcaccgttttatgcttggcttgttgcaaagtgttgctgattaatgcagcggcgtcaacagtgtgacctcattcagagtttcactcatgtcccaggccccatggtaagcgtgtcacagtcactggcttcagacacatggtcttaccagctttgactttttttttaaacgagagtgctaaaatcactgccattgtgtttctggccgtaaagtggcagagccaggaccgcaccaggtgcctggtgcccagcctgcactcccccgatgctgggtcagaatgcttacccctgaaggagccctgcggtggacgctgtgggtgcaagcagctggcccagtgtcggggcgccaggctcccagcagcaggaggggctgctgttcctgtggtgacgtgttgcttgcagccagctcggtcaagaactgggtcactcatgcccttgaatgtcacatttgttttggcttcaggtcagatgcttttagtgagggcagcagagtgtgtcccgggatatgtggctccctcggtgtggtcctcaagttttgcaatgagaggtctgttaatttcatgtgggtgatgcagccctgtgcaggcgccgacatccaggtgtgccgaagagttctctgcgacatccaggtgtgccgtagagttctctgcgacatccaggtgtgccgtagagttctctgcgacatccaggtgtgccgtagagttctctgcgacatccaggtgtgccgtagagttctctgcgacatccaggtgtgcgttagagttctctgcagaccgcggtgcctgtggagcactcagctgtggccacaccgcggccgggacactggagtagcgccgggtggtgcttatatcacgctcgccttttgcttctccctgtgcatggcaggtcattcctccgggacagccgagctgggccgaccaggagtaccggggctccttcacctgtcgcatttggcagtttggacgctgggtggaggtgaccacagatgaccgcctgccgtgccttgcagggagactctgtttctcccgctgccagagggaggatgtgttctggctccccttactggaaaaggtctacgccaagtgcgtgtgctgggggctgaagggcctggcctggggcaagtgggagctgccactaccatgggctgccccaggagggtctctgctcactctgggctgcagagcccccttcagttctgagggtctggcagctcattctgtgagtcaggctgacaggccaggtgcagagattcttcttttgggcctgtggtttgcccactccctgctttcccttcccttgttccaaagcccagcgtggagtcgttctccacagagaacatgtgtgccgtcctccttattttatcggccccagcaagaaagatgcttctttatatttgttgtggaatggttgggacaggcagactcattgtgtagtcgttggggaggagtgaggctaccccagcataccaacacttgtgtatcacggtgcttgctggctcaggggaccaggaccctcaccatgagtcataattgaatagccttccctcttagaatgcatttgtcttcttgccaaaggcaactggactgacaggcaggcagggaagctggtgaacatgggaaggctggctggtgacatcagtgcccagtgagcccttccatcccaagggctgttttaggaaaagcagggttggagcttgagagccaagggatgtgggcatccatagcttccacgcctcctgccctgctcctgtgcccacaccggatgccagagagtttctgtgtgtgggcagaggactgcagggcgctcacgcttgctgcgaagtaaggcgtttgaaggtgaggctaagccttgacttggtgaggatgaggaagaaggcagaagggagtaaagaggtgggattgaggcagcggttggacgatttggggtgctacagaccatgggaatcagagagggggccatgctcaatgccagaggctcactcccatggtgattgtgtcccctagggtccatgggtcctacgagcacctgtgggccgggcaggtggcggatgccctggtggacctgaccggcggcctggcagaaagatggaacctgaagggcgtagcaggaagcggaggccagcaggacaggccgggccgctgggagcacaggacttgtcggcagctgctccacctgaaggaccagtgtctgatcagctgctgcgtgctcagccccagagcaggtgcccgggagctgggggagttccatgccttcattgtctcggacctgcgggagctccagggtcaggcgggccagtgcatcctgctgctgcggatccagaacccctggggccggcggtgctggcaggggctctggagagaggggggtgaagggtggagccaggtagatgcagcggtagcatctgagctcctgtcccagctccaggaaggggagttctgggtggaggaggaggagttcctcagggagtttgacgagctcaccgttggctacccggtcacggaggccggccacctgcagagcctctacacagagaggctgctctgccatacgcgggcgctgcctggggcctgggtcaagggccagtcagcaggaggctgccggaacaacagcggctttcccagcaaccccaaattctggctgcgggtctcagaaccgagtgaggtgtacattgccgtcctgcagagatccaggctgcacgcggcggactgggcaggccgggcccgggcactggtgggtgacagtcatacttcgtggagcccagcgagcatcccgggcaagcactaccaggctgtgggtctgcacctctggaagggtgtgacacttggcaccacactgttccctgtcccttcatggatgtggcccacatgatgttcctttcctcttgcaaaagaagttgctggaaggcccactgtccagcagcccccaggttgcctgggccacggtgcctttgtgggcccagctacaaggaggacttgcaggctcgtgtctgggacagatactggcgccagggccaagtgaagcccgggattggtgggcatctctagctggtccctgagagagggtggagggtgctgacaggccttggcgctttcatctgtcaactccagaggcccttgtgcttgcagcagggaggtcaaggccagggcgtctgaccccggccgctcctccacactgagcctcctgcacgtgctcacaggtagagaagcggcgggtcaatctgcctagggtcctgtccatgccccccgtggctggcaccgcgtgccatgcatacgaccgggaggtccacctgcgttgtgagctctcaccgggctactacctggctgtccccagcaccttcctgaaggacgcgccaggggagttcctgctccgagtcttctctaccgggcgagtctcccttagcgccatcagggcagtggccaagaacaccgcccccggggcagccctgcctgcgggggagtgggggaccgtgcagctacggggttcttggagagtcggccagacggcggggggcagcaggaactttgcctcataccccaccaacccctgcttccccttctcggtccccgagggccctggcccccgctgcgtccgcatcactctgcatcagcactgccggcccagtgacaccgagttccaccccatcggcttccatatcctccaggtcccagagggtggaaggagccaggacgcacccccactgctgctgcaggagccgctgctgagctgcgtgccacatcgctacgcccaggaggtgagccggctctgcctcctgcctgcgggcacctacaaggttgtgccctccacctacctgccggacacagagggggccttcacagtgaccatcgcaaccaggattgacaggccatccattcacagccaggagatgctgggccagttcctccaagaggtctccgtcatggcagtgatgaaaacctaacagggtggccccctgtgccagctcaggtgactggagcccgagggcctgacaggttcccagcagctgggccggccagccttgcactgtgggggctggtcctgagtcttggcctgcctcccagccctgccagggggctgcggcctaggggtccacgggaagcctccgtcaggagagacgcagccctgggggccagctggtgctgcaaggaagggtgggaagcttgctggcttctgttgcgccactgagacggcagagaccccaggaccccagagcttcccaggatccctcccagatcctctgctgactccatatggaggcctcacacccagagggtagggcagcagatcttctttataactatttattgttcgaatcacttttaggatgtaactttataaataaacatgagcgctgatgatttgc

SEQ ID NO: 1787 - DNA, 4246 bp, Homo sapiens
gtggccatggcgggggcgctccggcgggggcgggccctgggctcccgcccttcgggtcccacagtttccagccgccgctctcctcagtgcccggtggcccaggagggcctgggagcccgaagccgtccccgagtcgctcctaggtcactggcgcgatgcgggccgtcctctcggctgatgggttggaagcccagcgaggctagaggccagtcccaaagtttccaggcatcagggctgcagcccaggagcctcaaggcggcccggcgggcgactggacggccggacaggtcccgagcagccccgcccaacatggacccagacccccaggcgggcgtgcaggtgggcatgcgggtggtgcgcggcgtggactggaagtggggccagcaggacggcggcgagggcggcgtgggcacggtggtggagcttggccgccacggcagcccctcgacacccgaccgcacagtggtcgtgcagtgggaccagggcacgcgcaccaactaccgcgccggctaccagggcgcgcacgacctgctgctgtacgacaacgcccagatcggcgtccggcaccccaacatcatctgtgactgctgcaagaagcacgggctgcgggggatgcgctggaagtgccgtgtgtgcctggactacgacctctgcacgcagtgctacatgcacaacaagcatgagctcgcccacgccttcgaccgctacggaccgctcactcgcgccctgtcacactgagtccccgccagggcctcccgaggatcccactaaggggcatcttccagggagcgaaggtggtgcgaggccccgactgggagtggggctcacaggatggaggggaagggaaaccgggccgtgtggtggacatccgtggctgggatgtggagacaggccggagtgtggccagcgtgacgtgggctgatggtaccaccaatgtgtaccgtgtgggccacaagggcaaggtggacctcaagtgtgtgggcgaggcagcgggcggcttctactacaaggaccacctcccaaggctcggcaagccggcggagctgcagcgcagggtgagtgctgacagccagcccttccagcacggggacaaggtcaagtgtctgctggacactgatgtcctgcgggagatgcaggaaggccacggcggctggaaccccaggatggcggagtttatcggacagacgggcaccgtgcatcgtatcacggaccgcggggacgtgcgcgtgcagttcaaccacgagacgcgctggaccttccaccccggggcgctcaccaaggtgccgggggggctgggctgcgcctcatctgcttgcttctgtaaccccttccacgtacccccttggccttggggggtcaggcaggactagggtgccagctgcacccacgagtccccagccctgaaggaaggggagggactggtgggtggaggtgggtggggtcaaggagaagagggggttgggtgtgaaggaacccagaggagggtatgtctctgggagctggaatgggcaggttagggcctccctctgttccaggacaccaggaaggcaggacagcttcgtgggcgggagggaggcggctgggctaagatgctcctggttagtgccgtatgggggccgatgggggtggctggttaggacagggaggtggatgcttggcctagagtggtgggggaggtagtgagggctgcctgggaagcaggatggcagggagggggctggaggtggtggcggtggcagcttggatggccctgggaggggcaggcccggggcaaagcgtcagagctcagctctggatctggggtcctggataccaggcacctttgaggaggcgccgaagggagtcatgagacgggcttgtagagtgagttccctgcatatgagggctcaggtggggcagagtgggcccgtcctgcaccccatggtcctggggccccacccccacgctggctcacgggccctggccatgttgcctgctgctggtcagcgtacagcttcccagggccagccacctcggcttcacacctgcccagagctggcttctgtctgcctggacactcctcccatggctctggggctagggacacccagggctgccttggacacctggggctctcgtccagccagagcctctggcagtgcctggggtcggggtcggggccggggccgagtcaggcctgcctgtctcgtggagctcagcaggttgccctcctgttgcatgagcctgggcagccacacacagctggggggcccctcacgcccctctttgtcgctcagcaccactccttctgggtgggcgacgtggtccgggtcatcggcgaccttgacacagtgaagcggctgcaggctgggcatggcgagtggacggacgacatggcccctgccctgggccgcgtcgggaaggtggtgaaagtgtttggagacgggaacctgcgtgtagcagtcgctggtcagcggtggaccttcagcccctcctgcctggtggcctaccggcccgaggaggatgccaacctggacgtggccgagcgcgcccgggagaacaaaagctcactgagcgtggccctggacaagcttcgggcccagaagagtgacccagagcacccgggaaggctggtggtggaggtggcactgggtaacgcagcccgggctctggacctgctgcggaggcgcccagagcaggtggacaccaagaaccaaggcaggaccgctctgcaagtggctgcctacctgggccaggtggagttgatacggctgctgctacaagccagggcgggcgtggacctgccggacgacgagggcaacacggcactgcactacgcggccctggggaaccagcccgaggccaccagggtgctcctgagtgctgggtgccgggcggacgccatcaacagcacccagagcacagcactgcacgtggccgtgcagaggggcttcctggaggtggtgcgggccctgtgtgagcgcggctgtgacgtcaacctgcccgacgcccactcggacacgcccctgcactccgccatctcggcgggcactggagccagcggcattgtcgaggtcctcacggaggtgccaaacatcgatgttaccgccaccaacagccagggtttcaccctgctgcaccatgcctccctcaagggtcacgcgctagctgtgagaaagattctggctcgggcgcggcagctggtggacgccaagaaggaggacggcttcacggcgctgcatctggctgccctcaacaaccaccgcgaggtggcccagatcctcatccgggagggccgctgtgacgtgaacgtgcgcaaccggaagctgcagtccccgctgcatctcgccgtgcaacaggcccacgtggggctggtgccgctactggtggacgctgggtgcagtgtcaacgccgaggacgaggagggggacacagccctgcacgtggcgctgcagcgtcatcagctgctgcccctggtggctgatggggccgggggggacccagggcccttgcagctgctgtccaggctacaggcctcgggcctccccggcagcgcggagctgacggtgggcgcggcggtcgcctgcttcctggcgctggagggcgccgacgtgagctacaccaaccaccgcggtcggagcccgctggacctggccgccgagggtcgcgtgctcaaggcccttcagggctgcgcccagcgcttccgggagcggcaggcgggcgggggcgcggccccgggccccaggcaaacgctcgggacccccaacaccgtgacgaacctgcacgtgggcgccgcgccggggcccgaggccgctgagtgcctggtgtgctccgagctggcgctgctggtgctgttctcgccgtgccagcaccgcaccgtgtgtgaggagtgcgcgcgcaggatgaagaagtgcatcaggtgccaggtggtcgtcagcaagaaactgcgcccagacggctctgaggtggcgagcgccgcccccgcccccggcccgccgcgccagctggtggaggagctgcagagccgctaccggcagatggaggaacgcatcacctgccccatctgcatcgacagccacatccgcctcgtgttccagtgcggccacggcgcatgcgccccctgcggctccgcgctcagcgcctgccccgtctgccgccagcctatccgcgaccgcatccagatcttcgtgtgagccgcgccgtccgccgcgcccgagctgccttcgcgtgcccccgccctgtgttttataaaaagaaagattctcgg

SEQ ID NO: 1788 - DNA, 3751 bp, Homo sapiens
cttttgacccgttgcctgtcctgttctctgttgtttccccagcatctagaacaataggtgcctgacacaataggtgcttcgtaaatatttattattattattattattttagagacagggtcttgctctgttgccccggctggaatacagtgggatgatcatggctcactgccatctccaactcctgggctcaaacgatcctcccacctccgcctacagagtagctgggactataggtacacagcaccaaattttctgtagagacgggggtcttgctttgtagcccacactagtgttgaactcctggcctcaagtgatcctcctgccttgatgggattacaggtgtgagccaccacacccagcctaaatgtttatttcattggtcagtgtcagaactaggattggaatttagattgttaatctcttgccacaagataggaaaatggagcaagatgaggagaaaaaagcatttaatgggagagaacacccttgtctgaggtcagggacctgggaagcaagcacgactttgccactgtcactgtgtgttacttggacagtgccttattttcccatctgtgaaataaaagagctggataagaaccttagttttgagatcctgtctcccttaaaagctgaagacaaaggtaactgatccaagggcagacaagggatggtaccatcatctccagcttggactcccactgctgacaaaatttgtcccttcaaagttgagatagctaccatggggaagagcacttagttctatactgaatggctccaggcattttcatgaaagctctttcagctttggggaagaatattcatccatatctttaccccatcatattagtgtctaagccctgcaatcaggcatgtcagccacgtgatggaatgggagggctgcagggcagcactgtccagtagaaacgaaatgcaagccacatatgtcattttaagttttctttttttgagatggagtttcactccatcacccaggctggagtgcagtggcacgatctcgcctcactgcaacctccgcctcccaggttcatgtgattctcctgcctcagcctcctgagtagctgggattacaggcatatgccaccatgcctggctaatttttgtatttttagtagagatggggtttcaccatgttgatcaggctggtctggaactactgacctcaggccacccgccttggcctcccaaagtgctgggattacaggcatgagccaccgcgcccagctaatttttgtatttttattttatttatttatttattttttgggagacggagtcttgctctgtcacccaggctggagtgcagttgtgcgatcttggctcactgcaacctcagcctcccaagtagctgggattacaggcatgcaccatcatgcccagctaatttttgtatttttagtagagatggggtttcactgtgttggccaggctggtcttgaactcctgacctcaggtgatccaccggcctcagcctcccaaagtgctgggattataggcgtgagccactgcacccgtcctaatttttgtatttttagtagagatggggtttcaccatgttggctaagctggtctggaactcatggcctcaagttatctgcccacctcagcctcccaaagtgctgagtaagccaagttttctaatagccacattagacaagtaaaaggaaacaggttaaattcattttaacatgttttacttaacccaatgtatccaaaatagcatttcaacatgtcatcggttttttagttttttttttttttgagatagtgcttcgctttgttgcccaggctggagtgcagtggcacaatctcggctcactgcaacctccaccttccaggttcaagtgattctcctgcctcagcctcccgagtagctgggattacaggcacccgccaccatgcccactaatttttgtatttttggttagagatggggtttcgccatgttggccaggctagtctcaaactcctgacctcaggtgatccacccacctcggcctcccaaagtgctaggattacaggcgtgaggcaccgtgcctggcgtcatcggtattatttaaatgaattatgttacgttcttttgtgctgtcttcaaaatctgttatatattttacacttacaccaaatctcaattaccatggtacatttttatctgaaatgcttgacctttattttgatttcataaaattcatagttggagaagtagattcacatatccaagttgttccaattatataatagttttccaaaaactgagatgggtgtccattttttttttaagtaaagatgcaggtctggttatgttgaccaagttgctgggttgttttgttttgttttgagacagagtctcactttgtcacccaggctggagtgcagtggcatgacctcagctcactgcaacctctgcctcccaggttcaactgattctcttgcatcatcctcctgagtagctgggactacaggtgtatgccaccatgcctggctaattttggtatttttctcagagacggggtttcaccatgttgggcatgctggtcttgaactgctgacctcaggtgatccgcccacctcggcctcccaaagtgctggtattacaggcatgggccaccacacctggcctcagctgttcaattaaaagtaaatacaacttaaaattctatgtttcattggcagtagtgcaacattaatactgagtagccacatgtgattagtggctatggtattggacagggaaggtacagaatacttccatcaacatagaaaattctatcagtctagctctaggggcagatagtccttccactgacttgggcaagtcactctacaaatggcatctacctcacatggttatggtgagaattcagcgtatgtatgtacatgcaggcacacaatatgcacacagacacataacatagtacaccctttcctgaaaagcctgacacatggagctcaaacatgagtgccacccacccctgggcagcaccaagatggctctagtctgggtgcctttgtctcacccccatgcctttgctcggagtgtgctcctcatttttctgccactttgaccctgtctctgatttggtcctgtctgacatcactgctatatgctttgctcctctcaatttcctctgccctcatgccagcaggagtcatgccagagatcatatctgagaaagcaagacaattttgtgtgtgtgtctgtgcccatagaggagtgctggttgtgttgatatagttgtagattggttgtgtttacacagttgtatatattgacacccttgagtgttatgacttcttttgggggtggtcgccttttaaatcataacttttaatgggattccattttagtctttgtgaagacataaggttgttggcaggcatctgtccctgggagcatccaagcagaaaagactaagactcccttgtagacagatcactggccgccactgaagtgtgtctgcatggcaccacagggctggaagacccttgaaggcaggaattcaaggaaatgtatgatgaattttggcattgccatcaaaagcagaacaggcatggaaaacttgggtgagtgggcgagacaacctcctcaccacagcagagttccatccatgcctggataatgatggagggatttgtgtccactgcagtggggaaccatgaaggacacatcaagggtgtggttggcctgtggtgctctttggaggaatgaataaaaatgaatagaaatcct

SEQ ID NO: 1789 - DNA, 3252 bp, Homo sapiens
attaggcacccaggggcccatggtcacattagaagttaaaggcagcaggattctgctgtatctggattccaatttctcactgatggctaagccactagatggagttacaaaaggggaagaaaaagaacccctcctctgggaaacagcaggagaaggagccctgcctggtgaaaacttgcttatagacttcacagaacctccccgtgccggaggttattggttcatgctagtgcttgtttgcaccttttcagggtgttatgtcttggatccaccacagtcggctaacactggcagctcaggacaagtgaaccagccagcaggacccagatcatccaacctggctgatccttagatgagaccgagttgctgctgaggacaacagccctgctctagtcactctggaggctgactagtctacgcacggctgaaacttgaggacttgtcaagcaagtaatgtagctaaaatcttaagactagtggttttcgtgtacactaactgttttactattgttctgtcgctgtgctcaacctttttcccaggtaaggaccttttttgtccttgctggatatgaatatgctgtacattgttttgttgttaccccccttaaccatgtagaagaaacacctacagaaggtgtccccactgtacacatactacttggtcagggaacagtataactagaaccctattgcactatacttattatgagtgtacagggacttgcttaggaacttgtacttataatcaaaccacctattcaacctgtgacccaggaaatggccagccttatatatgctatgaccctaagtgtttacctgggacttggtttgagattcataccgagtcaaagggaggaagttttgtaagttgaacccaagcctctcttcccgggggcggggggtggggtggctatatccatatactttgatatttgtcagttaacatccatgaaccagagattgtgaactatctcacaatctctggtcctacagggtactatacaaactgccagtacaaaattgcatgtgcaccccgtttgcccctccgaggccctagcgatagcttgctggaaccgcacaacgcagttcactgaccgatcatcaccgaggctaaagccaatcttgctcatcaaagtgccagcaaaaccggattgtaagacaagcacttgcaatcctgtaaatcttactatcttaaagccagatctacctatatagactgcaggttactccatggcattacaaagctacagtcaaaaaactaaaataactttgtatattctaaagaggactcaaaccaagcggtcagctcagcagcaattccgagtctttaagtcattctttgagcatataaaccaaaagttaccagagcctcctcctttagccaaaaacctatttgctcagctggctaaaaacattgcatgcagcctaggcatttcctcatgttatgtttgtagaaggactaacatgggagactaatagcctcaggaagcaaaagagttaatgcctcaagataactttactctgactctctctttccccaaacagacacgcacaagttcaagcgtctagctcttaaaaacttctattattagcagatactgtgttgctccctagggaaaagtttttacagacccagtaggagaactaacctgcttaagacagcaatattataatgaaacattaaggaaaactttgtggcagggcagagatgactacaaagcacctcatccaaatctgttctcctgtttctcttctctaaaccacacttggtatcaacttgaagctccaaatacttggcaagcaccccccgtctttattggatctgtaggctacaggcatattgacagttgccagttaaatggacagaggtgtgcttagaacgattagaccatctttcttcctactcccactgcaacagggaaaaacttcaaggtaccctgtctatgatgaagttagaagaagaaacaaaagagatgcagacacaaagaggtataaaaataagagattgaaaaggcacaaattagccccctgaaaaaataattccatactataggccagctacctgggcacaagataggtcatagggagaccgcactcctatctacatgcttaaccgtatcataagattgcaggcagaacttgaaatcatcaccaatgaaacaacaaatgcattagatgtactggcccagcaaaccacaacattgagaaacgctacctatcagaacagattagctttagactacctcctagcccaggaaggaggagtatgtggaaagttcagtctaactaattgttgcctggacatcgatgacagcggaaaagcaattatagaaataactgcaagaatgagaaaattagccagtgttccagttcaaacttagaaaaggtgatccccagattctctctttggagactggttttcattttttggagagttcaagactttaataggagtagtgctggccacactgggaagctgcataatactccattgtctcttacctttccttgttagaagtattcaatcaactatagaggcaatagtagccaggcaaactacaactcagctaatagctctgtgtaaatatcaacctttgtctaaagaagaaaacttgtctcttcaggcagaactaagtaatagtgatgccttttattaaacttatttcataaaaggcatcaaaggggagaaactgaggcagaaatttaaataataataataataaatactgcatttcttcactccaagaaaagtaaaagctaaggcccagaatatggcaaggcaaaggctaaaaagaaaagaacaagttttcctcttgcctagcagctcactttaaggaaagttagaagataacgctgtccaaatagccaaggccaaaggaatgggctccagacacccccctcccttccagagcaagcttgaaagaaaaaaaagaaagacaggttcttttactgttactcttttcccaggcttcttaagcatgattagcatgattatgttttacaaatgtctgtatttagccagttcttatttttcttttaatgcagctacaaggccactggctaggtcacaaattatgttatgctatagattacgtgacctgttactgtatgattaactgcttttattttgctactgtttttattttgcttctgtaagaccgcttataaaaaccctgctctttgttcagggctcagctttcggatgtgaatcctctgagccggtgcgtacctaaaataaacaaatcctcctgt

SEQ ID NO: 1790 - DNA, 4091 bp, Homo sapiens
tatgctcctgatatattttggatgaattctaatcactgctactacaagcatcctaaagttcaagaaaaagctttatggcgacgtcgagaggtgttagtagaggcagagttggatgaatcttatccaaaccccacttgttatcattgtaagaataaatgtttacctggtaaagttcctgcagagcatattactgatattgaagattttcatcatttgcgttttaggtataagtatacgtgtgatgatcctgactacccatggtctgattgggtgaattatgatgttttcttggctactatgacaactaaatttaatgagtttcgtaagagagagagtattatgtttcagcgtcgtatagctcagaataatgccgtaactcttccatcgagttttaatatgaatggtgcaagcataaaacgagaatggatagcagcagttgctgaacgtactcgcatgcgtaagtcttatgttaatagagttgctgaggcagtgtcaggtgagttgcataatgctttgtctgtaactaaagataaattagaatctacttttaagaatttgtttgtatggactgatgaaactagacctaatgataattgtgaagattgtgctattgtaaaaatgaaatgtgctaaatgtaagtattgggcttctgatatatgtattgagaaatttaagaaagaaatggctcctgctgattatgatttcgatgatcctttctttgcagatataaaaagttattctggatcgtcatcatctgtaggcgttattcaagatatattagaggctagtacatcgaaagaatttcaaggtcctggtgcagtaaatattatgggaacttttcttgaacgtaacgatttacaagtgtctcccatagtgatatcttggttactggatttaccaaatcaataccccgctaatattattactaattttgttggatttttaaaacaaaatatagttgcgattaatcgtgaactaattaaatatatgtctatatcacgaggtataaaaatgtttaagtatgtgtgtaaaacgattgcttgcgattaccatgatcctgattattataatattcaatatgtcaatggttcttttacgatgtgttgtgaaccgcctttagagctcaaacaattgttagaacctgttatagataagatggcgtttaatagattattatcgtctaaatgttattgctttgcagataatagatgtagtttacagttaccttgggctgtgcgagaatgtgtgaaaaagtgtctagccacaaaagataaaaaagaagcttggatgcttggtctacttcagcctgtgaaagaattacccgaacaattcttttcaaagatgtggcaagaatttagcatcgcttttactaaattaagtgaatggcttccaaaatcgggtcaaatgatttgggatttcgtcctttctgccaatggtatattaagtgtgctttctgcagttttaattggaacagctattgctaggaattgtaaatcgatgcataatgaagataagattgttgagggtataaataatgttaaccgcagagtttttgaaagtaatgcatataatttggtaccagctactgtaaagagcgttaaacctgcttctgtaaaattccaatcgttatcgcaacagaccgtggtatgtgacaaattattggaagataatattgttactatgttattatcctcagagaatgaaaatggtcatgtctgtacaaagtcttatcagtgtttaatgttacgcaataagactatgtgtatacaacgccactattatgacgaatggatacgtatgccttttaacacaaaattttatcttcaatgtaagaaaacggtatctgcagcatacccttacggttatcaaattttgcttaagaatttgaaagtgatatgggggtccggggttgatgtagatggtagttatactagcaatgttggattagttgaattacctatgagtgtacctagttttaaagatttaacaaaatttattgcaaaagaagttgatcatgagtatgtaaattcgcaagaatgttggatatttgatagtattgaacgcaaacggtgtaaagtgcctattaccgtcgattataaacatacgacttcggatgatagtggaactgtgcgtttaaaacaggcttataaatacccatattctaaggtaggtatgtgttgtagtgttttattatgtgcttcattggaacgccctataatagggctacacttttcaggtagtgcccgttttggttatagtgagtatctaacgtatgaaagttttaatgaaaatattcctactcgcgtagataaagaatacgtatttgaatctttttctcataaactagaagatgttgaattgtctaaattatcgttcgatactatgctttatccttgcggagtggttcctgctgaattacgtcaacatcaaagcggtaagacacaaattattccttcatcaatacatggtacgtatcctgtcacttcggaaccgaatcctttatcatgttctgatcctagattacctaaaggatgttctcctcttaaattaggaatagagcatatgggtcgtcctgtcttagattttccaactgatctaatagaaaaagcaaaagaggatttggtagaagtcgtgttaacaaatgtacatccaattcgtaaggttggtttagtgtctgaacaagatgctgtatgtggtaatacacaagtgaaaggttttgagccattggaatggtctactagtgaaggatttccgttgagtgctttgcgtcctaaaacaacaaagggtaagaaatggttgtttgatttagaggagacacctgaaggttataagcttaaaaagatgcatccagaattgtacagaactttgaaacttgaatataatttacgtgtgcgaggaattcgcgttcctactgtatttacagattgtttaaaagatacgtgtatatcaactgagaaatgtcgtatacctggtaaaactagaattttttctataagtcctgttcagtatactattgcctttaagatgtattttggagactttcttgcgtcatatcaaaatgcaagattgtctgcagaacatgctataggaattgatcctaattcacacgattggagtgaattagcatcatttcttactcaaaagggtacgagcataatagcaggtgattataaaaattttggaccaggtttaatgttaacgtgtgttaaggctgtatgcgatgtgattattgcgtggtatgagttacatgatcctgatgtagaacgtatgttgattcgaagagttatactttctgagttgttgcatgctaagcactttgctttaaaccttatttatgaagtttctgctggaatcccttcaggatcgccaataactgcacctttaaattcattagtcaactgtatgtatgttcgatgcgcttggttagatataatcaaagagccattattacattttaggcgagcgtgtaatatggttacttatggtgatgatatttgtatttgtgtaagtccattatatattgataaatttaatactttaacattacataatttctttgctaaatataatatagttttcactgatcaagataagagtgataatattataccatttagaacattagatacggttacgtttcttaaaaggggattccgaccccatccaacattaccttccgaaatgttggcacctatagatatagagagtatttataagtgtacaaattggattaaaaataagggagatcctacagaaaacacgctacaaaattgcgtgcaggctgtggaattagcatttggacatggaaagtatgtgtataccgaaattcgaaataatttacttaacgtttgtcgagagacagtaggtaagactttcgagagttacacatgggatgatatgtctgacagatgctatcgtacataatagtttattcttttaaagattatttttaataaattacattaatagcaatacacatagcggatcggcggaaatgtatagacagacctactagagaaggggcttgcattgtgggcaacctagtcttcttctgggtatgtgtgctgcacttaatgtgtacatcataaaat

SEQ ID NO: 1791 - DNA, 3530 bp, Homo sapiens
agtctccggcggcggtgtccggcgcgcggctgagcgagcgagcgagcgtgcggacggagcggcggcctgctgggcgggctgagcggcgcgcgcggcggagagacgcgaagcgagggacgcagtggcggcggcggcggcggcgacaggttttctacttacaaaggacaatgactactgatgagggcaccagtaacaatgaagaaaacccagcagccaccgtggttgagcagggagaagatatcactacgaaaaaagatagaggagtattaaagattgtcaaaagagtggggactagtgaggagaccccaatgattggtgacaaggtttatgtccactacaaaggcaagttgtcgaatggaaagaagtttgattccagtcgtgacagaaacgagccgtttgtctttagccttggcaaaggccaggttatcaaagcctgggatattggggtgtctaccatgaagaaaggcgagatctgccatttattatgtaaaccagaatacgcttacggctctgctggcagcctcccgaaaattccctcgaacgcaactctctttttcgagattgaactccttgacttcaaaggcgaggatctatttgaagattcaggcattatccggagaatcaaacgaaaaggagaaggctactcaaaccccaatgaaggagccacggtggaagtccacctggaaggctgctgtgctggaagggtgtttgactgccgggatgtggtgttcgtcattggcgaaggagaagaccacgacattccaattgggatcgacaaggccctggagaagatgcagagggaagagcagtgcattttgtatcttggaccacaatatggttttggagaagcggggaaacctaaatttggcatcgaacccaatgctgagcttatgtatgaagtcacactgaagagcttcgaaaaggccaaagaatcctgggagatggacaccaaagaaaaactggagcaggctgccattgtcaaagaaaagggaacggtgtacttcaagggaggcaagtacatgcaggccgtgattcagtacgggaagatagtgtcctggctggagatggagtacggcttgtcagaaaaggagtccaaagcttcggagtccttcctgctcgcagccttcctcaacctggccatgtgctacctgaagctcagagagtacaccaaagctgtcgagtgctgtgacaaggcccttggactggacagcgccaacgagaaaggcttgtacaggaggggcgaagcccagctgctcatgaacgagttcgagtcggccaaaggggactttgagaaagtactggaggtgaaccctcagaacaaggcagcgagactgcagatctccgtgtgccagaggaaggcgaaggaacacaacgagcgggaccgcagggtgtacgccaacatgttcaagaagttcgcagagcaggatgccaaggaagaggccagcaaagcattgagcaagaaggcagtagaaggagcggccggcaagaaacacgagagtcagaccatgggagaagggaaggccgaaggccacgtatgacgccacgacaaggagggaagagagtcctaatgaactcggccctcctcactgggctcgcccccaactcaggactgaacagtgtttagtgtaaggtttgttacagtctctgtgattctggaagccaatggcaagccagtagcttcccaaccaaccacagctgctgccgggggtgggcggggactgccggggaaacagcagagaaggccgctggtgtggagagaccaagccagcagctcagtcctgctcatttcagtctgtcaccttttgatgtccagcgcagcatcccttgtgaccctggggcccagctgctgtgggttcttcactatggtcactgcagaaaccgttgagaaaataaactcagtggatctctgctttcctattggtgggcatggcagggatctctgctttcctattagtgggcatggcagggcaggcgatgagatctcctgtggcactgactcgcctgacacaagcccacacaaggggcgcccaggtccacagctgaatctcggactgcttgcctgccctccaagctcccctctcagacttgagtgtggctttctgtcctctccagcatgtccatgggctctgtcgttcctctacacccttcactagtgacagcaggtggggctttcctggtcagttttctgtttcgggtgaatttctgaggtgtggggagcagtcggagtgagttatcttccccgctgcccctcttcagaatgttagctctgctcggctcctccccgttctctgccctgcagtgaagagcctaaggcttgctcttgtcctaggcctagagtggacgacttccgtctccgtctccagctaagactgatgagttactctttattactatggttacctccttgtcagcgtgtgtaccacttttgagaaggaacttcacactcctctatcgtgcaaacatatttttcaatttttactttgtagcttgggttttgaaaggcaaactctgggaggtttaaagcaggcaactaattactcttcagagtgaggtacctggaggtggacaggcagatacctcgctcatcctgcgcctcagcttcttgttctggtgggagcggtgagcctgtatactacatcagccaaagtctccagaacttgggcactgaattagggcaaatcttaagtagttttggagttggattttagtcctacaggtgagttatgggtttgagcagggcttgctcctcacccctgtggggaacacccaccagcccaaggatccatgcacagccctctccccgccctaaggaccaccgcactcaagacgtgtggctgtagtaagtcggtcagtcatcacgtcaggaccttaccaccaacgggtcacttgtttcccggagttgagttttagtctgcatgcagcaggtgggatagagctgtgcagagtctgtgacgtggctgagaccctcgagttcacactttgcacttctgcctccttgcgttgttttagagccctggctcccccaggaggtactgagccggagccgacttggtgtgcagtgcagtgtcggcagttgtattgaccagaattgcaggccagggaggctgtgctggaatttgagcctaactagttaggtttttacaggaaaacttgttctaacttgggcgaccctcaccagctgtctccaagtgtatactgtgggcctaggagactggtgtgggacgggagggtggtcagggttccgagccagaagtggcaaagtgcccagcccactggattgtgcatgctcttgactcagtcattcagacacttagtacggaaatcagaagatgtcttcacaccctgagcctggagagagtggtgggtaagcagatgacattgagattttggtttttaaaaaatcacttagactctgcgagtaatggcgacacacacctttgatcccatgacttgggagaccctatctcaaaacaaaacaaaaaaaaaaaaaattacttagatgcattttgtgttccttaaataaatttttt

SEQ ID NO: 1792 - DNA, 3577 bp, Homo sapiens
agtccaatatgcaaagcaaagaagggaaaatgccctatttgaagtggggaaaaggaggtcttgctttatcgtctagcctctcagcgtccagctttaaaccactgatcaattcccttctctcaggagggggagctgtgagccagagagagttggctatccaaggtctcacagtcggttaccaggtagggatgaggctagaaccaggtgttttgattcccaattctattgtaggagtgatgatcaagcatattttaactgtaatccttttttcaaatgagacttcagcagattggattcgtatggtggtaggaccaaggctattttttaagacacccagaagatccactgaaccacttgaaaactatgcaagtacatgtcataggccagggaggaacctatgccaggcatctctcaataaagtaaaggatggaatttcaggcaaacatataaactaaaaacaactggcacctacaggagcactcaggttgccagaaattctcttgctcccctttgaggagaagtaggcaatggcagccccgtgaagtctatcagaggctcagtgaagacatcaaatagaaggcctttgtcctctgggtcctggggtgacatgcaggcacctctgtctcctgtcctgtagcaagtactttctaagtcctgtggaaagactggtgacccaggcagcagatgctctgcaatcctccgtctgccgtattctaaggcaggagagtggactgtacactttaggagaattttgcgcagagagtgagacaactacccagaaaattcagttaaccattctggttacattgggcttttaacgtaaatgtaccttacctaatttcccaaaagtgtctttgacattcaagctatttttattccctcattgtaatatagtctccctaaagtagttgttatcttaagatacttaagatattttcatgagatactgataagtgccctgatttatacagcagttattagctgttatacaatgaatcggagtgtatattttacaggaaaattactcattaatatctactacataataattttgacattcattcagcacaaagctcgcctgattccaggaaagccctgcaatttaatgttaatatttctagtaacttgttctaacctcttaggtataggatagataaaaatgcctatgtaaattgagattttgaaaaacaatatctagattcatataaaggctgtgtctgttgtgagccaagtgatgtgaaaaagcataagggatagtcaggcaattcaggggcttaagtctctcttactgagagaaaaagcaagaaggctacaataaatataggatctttcccctaactctctttattgtaagcttcatttaatcttagacaaaatagtttttgtttttaatctcttactgaaaagaatagtaaaactgtcccgggttttgtctggtgaatctgttgagtttggttgtagtccctgggctgtgggtcttagtcctggagtcctgctgcatggatgagaggagtaggaagggggaggacttggcatgccctgagggcctgctctgccagactccttgtcaggtgcctggctagtctgcaaaatcacagagtgccccatgtccagccacggctcggcaagactgggtgtcactgggcgagtgggttggggactgacacatggctgggtccctgaggccagcctgcatattgctgcatgcatagctgtgtttatccaaattacttaggggaatttaaatccttgctgttgtggtgtagtaagtgtcagtaagttgagagaatctgtatttttaaaaaaacatccaaagggaatatttgatataggcaaggatggaaaatactggtatcgtttaattccaaaacctactactgaagactttcatttaccttttgtttttaaggttggggtgtaaagtgagtcagtcctgactgcctctctgtgctcttcagattgacctgcttcagttgtctctatcatcgctggtgtcagtgttagatgcagagcttacaagctaaaaaaatattcaggctgcaaatacttatgaatctgtagggttagtgttccctacagactccgttttttaaatgaagggatatatattttataaagttattccttggagcaaaaaatgaagaggaaatttgcttaggcatgcctctattcctatcacattttattctagttgtttattgaatcacctgcctcatgcgttggatgctagttcttttagggtagagattttgtttttgtctctgtgtccgtacccaacatagtacctgacatatataatatgtggccagtaaatgttggctgaaagcttgtatgaatgagtgagaagttgataaacttagtcaaagaagtggaatagttgtcttttccactcttccctgaagctgtatataaattaatgatttttttttctctcccaatgataggcaaaggaaaatcctctaaaaacaagccttgaactcatcaccagatactttctggatcactttggaaatacggctaacaatttcactcaagataccccaatccctgcactctcagttccaaagaaaaataacaaagtgccatcaagatgctcagagactacactggtaaatatatatgacctttcagatgaagatgcaggatggagaacatcattgtcagaaacaagcaaagccagacatgacaatcttgatggagatgtacttggtaattttgtatcatctaaaaggcccccgcacaaaagtaagcccatgcagacggtcccgggtgaaactcctgtgttgacttctgcatgggagaagatagacaagcttcactcggagccttccttggatgtgaagaggatgggagagaattccaggccaaagtctggtctgattgtgcgaggcatgatgtctgggcccatcgccagctccccacaggtggggctgttgctctttctgttgttatgggactggaggctgagaactgggctgggcttaaggcacgcctgggtttatttggggtaccccacagggcagtccgagaagagggtctgtgtgtggggtgggaagaacagtgcctctgttttctccctggctctactgtcaatgacacgtggggccttgagcaggcctcctttcctgcccttagcttacccattttgtttgtgaggtggatgccatggttttctgttcctctgctgggtaagaatacctactcagctttgcctttgcagttcaggagtggagaacctatccaggttcagagagcatctttaggctgagtgtggtggcttacacctgtgatcccagtgctttgggaggccgaggtggaagaattgcttgagcctaggagtttgagaccagcctgggcaacataaggagacacttgtcccaccgccccatctctacaaaaaatcaaaaggttaggcaggtggggtgatgtgcatctgtagtcctagctactcaggaggctgagtggggaggattgcttgaacctgggaggttgaggctgcagtgagctgtgatcatgtgactgtactctggcctgggcaagactgagaccctgtctcaaaaagaaaaaaaaaaaaaag

SEQ ID NO: 1793 - DNA, 3392 bp, Homo sapiens
tctgatgcagcttcccaaaggtaacagatgcaaatatgaaccaatacatatatatttctttccctcttttttttttttgagatggagtcttgctctgtcacccaggctggagtgcagtggtgttgatctcagctcactgcaacctccgcctcccaagttcaagcgattctcctgcctcagcctcctgagtagctgggactgcaggcgcgcaccaccatgcccagctaatttttgtatttttagtagaaacggggtttcaccatgttggccaggatggtctcgatctcttgacctcgtgatccagccacctctgcctcccacagtgctggggctatagccgtgaggcaccacacccagcctttccctctttttacacaaaggatgtatcaacataccatgaaaactgcttttgtcattccgtaatatattttacagttattccatactgactctcaaagagcttccactctttgagaataaatagctatatattatatcattgcatagatgtgccatatttaactaggcctctctattgggacatttagttttttcctaatattttgctgcacgaaaaataataccataagggctaagctaattattcattcatagatattgtggaagaatatagaatacaatttctataagtggacctgctgggttgtagcatatgcacatgtagaattttgatagaccctgggaaacttccacctccccacaaacgccatgtgaattttatactcccaccagcaatgtgaaggctatttctacagttccgaattctgcacacaggtgtcccaggagcaccacagttaatgtacaggggtgcatcaggatattttaaaattttgagcgaaacagcaacatttgtcagacactgcatgacagatattgctacaagctagaattacgtgctcaaggtagttcacattttcaatactggatctcaatgtattccttctttttgaggcagggtctcactctgtcacacaggctgctggagtgcagtggcatgatctcggctcactgaaacctctacctcccaggctcaagtgatcctcccacctcagcctcctgaatagctgggaccacagagatgcaccaccacacccagttaattttttgtattttggtagagatggggattcaccatgttgcccaggctggtctcgaactcttgagctcaagctatctgcccaccttggcctcccagtgttggaattacaggtgtcagccactgtgcctggttattattcctttttaaaaaattttttaaatcaccaaaatgtcatgaatatattccttttttttcgagatggactcttgctctgtcacccagactggagtgcagtggcgaaatctcagcttactgcaacctccacctcccgggttcaggcgattctcctgcctcagcctcttgagtagctgggactacagtcgcgtgccaccatgcctggctaattttttgtatttttagtagagacagggtttcaccgtgttggccaggatggtctcgatctcctgacctcgctatctgcctgccttggcctcccaaagtgctgggattgcaggcgtgagccaccatgcccagccaaatatactccttttaatgacataaatctttgcaaagctaggttttgatggttcctgtggtaaagtaccacacaaaaattagtgaacaggaaatgaggagggcaagtgtccagtctaattcccaggtttaagtagttgtacacatcccattaataactgtacttaagaatgaaataaaaatatcttctttcaacttaagtgtattatttattcaaatggctaataagcttaatgaatactcattaaattgtttaaaattaactagttaataagtgaaacttttagggatttcttttggctcagaagcactgtgaaaaaattactcaaacactaaaggtgtcaattcaaactttctgatctttgctaatttgataggggaaaaatggcaacttagtgtagatttatctggcatttctcttatgtgaagttagttgtttcttatgattaagaagcatttgaattttactttttatacattatctatatctttgtccagttttttattgggttaatggctttcttcttgatttctgggagctttttatatattagggtaattggccatttctgactgtttcaggtatttcccccagtttgttgttttctttttactttaacatgggctttgccctatagatctttaaaaatttagctgaatttattgttttctagacttctgggttttgtcatacttagaaaggctttccctattacaggattataaatttaaaagccttccatggtttctctctctctttttttttttttttttgagacggagtctcagtccagtccaggctggagtgcagtggcgcaatctcagctcactgaaacctccacctcttgggttcaagcgattcttgtgtctcagcctgagtagccaggattacaggcacgtaccaccacgcctggctaatttttgtatttttagtagagagggggtttcgccatgttggccaggctggtctcgaactcctgacctcaagtgatctgcctgccttggcctcccaaagtgctggaattacaggcgtgagccactgtgccttcccatggtttcttatacttattttaacaatgttatttttgctttaaccatttcaaatatcaaatttctggtagatctgagatactttcaagtttataggacaactggcatctcaaacttgaagtatccaaaatggggctctcttgtcatctccaaccttggtcctcacctgcttttcctctattccaacagttactcaaaataaaaatttaagacttgtctttggcttctctttttcttcatcaatgccttcacactccttaccctgaacatccaatctagcagcaatttgtgttttttctgggaaggaggggagtccaaaatatatattgaattaatctatttcttgctttctctacagccaccaattaccctagttatgggcccatcatctcacctggactatcatgggtctccctctgttgcccaggctggagtgcagtggtgcaatctcggctcactgcaacctctgcctcccagattcaagcgattctcccacctcagccccttgaatagctgggattacaggtggtgtctggtgtttgtccagcaaaaaccataagttcttaagagaattgtggaagtgaagatgttaaagacagctcttgattcctctcttaatttctgtagtaagacttcatcttcagcaggcagctgaaaatacaaggtaaatttctacatgtaaattttagactactggatcctataaaatgtatgtggcctcataaaataactgtatgccaccgcctcg

SEQ ID NO: 1794 - DNA, 3515 bp, Homo sapiens
actaacaaaagatggctacgagggtaacatgttcggaggcctcagcggggcaacagtcattgactccctcgataccctctacctcatggagctgaaggaggagttccaggaggccaaggcctgggtgggagagagcttccacctgaacgtgagcggagaagcatccttgtttgaggtgaacatccgctacatcgggggactcctctcagccttctacctgacaggagaagaggtgttccgaataaaggccatcaggctgggagagaagctcctgccggcgttcaacacccccacgggaatcccaaagggcgtggtgagcttcaaaagtgggaactggggctgggccacagccggcagcagcagcatcttggcggagtttggatccctgcacttggaattcttacacctcactgaactctctggcaaccaggtcttcgctgaaaaggcaagtctcctccccacccttcttcctgcggagcagagggatgagcgtgcggctgccacagggttttcagaggcgagtgggtcctccctcatggatcagcaggagggcagtggggagcccgggagcccaagctaccactaaggtagcaaatagtagctacctataccccaacgccaggtggcagggaaggtgagcacgcagagtcaataagattctacagagggaaaaggagagacaagattctgccggggaaaaggttctcactggtctgcgtgagctcagtggcaaccacccatatgtgaaatctggagaaagtgcaactgaaatctaggcaccaccttgcattggcaggaattggccacccactgcagaagtcccctttccagagacatttagcttttccatgtgagatctgcctgccttcttccctgtgcctgtttagctcatgccatcagcaggctggcatggcaataccctgccatggcagatgccctgactgttcattcctgctgtttaaggccacatggggagcttagaacaccaatcagccctgacagctgctcatacctggccttgggcagtccccactagctagaagtgtcgctgtaggtccgacctcaaatccaaagaagggaagtgctcacacctccctcatatggcactcaggctccagcagctacagtccctccctgagggctgcctggggagatggaagccctgcccatcctctggagccctccaaggagaactctgtggcagtgccactcccaaagccttgtcttccccctggaatgcccgcctcttagaccagtatgggagctgggagatgactgatagattcccacctctatgccacggctcccagcaggcaactgggagatgatagattcccacagctaccccatggctcccagtatcatgtcgccatccagcctcaaagcattacctggcacagctgtgaggaaacagatttctgggcttcactccagggccaggcatctacatttttaatatgcattcatgtgctttttgacgcatggtttgggaccactacttactcaatgtaggagtccacctgagtgtccttaagaagctcaagaagagctgttcagcctcttcttgattactttctctgacaaggagctcactgccgccacccttagacagtccgtcctcctggcagcccttccttcaaaagtgttttccttacattgagagggactctgcctccctgaaactcccccatttgaaagttcgtggaatgagttcaacctcacttcctggtagctcttattttctgatcctttcccacctccaagtcccatcccccaacctccctgttgccattgctcttaaatcagactcctctaggaaggttctgaccagctccgaatggagtgggacagggagctcactccagtccctggttattctggagtaatagctacccctgcctgagcacccgctatgtgctgggcactttataatggctctactcttcccaacaaccctatgaggtgggtcttcctggagttcccatatttacagaggaggaaactaagactcagagaggtcaagtcacttgccctgggccttccagctggtcagtgataaagccgtgattcaagcccaggatgtgctggctccttccagaccagattgatagagcaggctgcaggcttttgctctagagtccatccgtctatctctgtctcctctacatttacatactctggctattttcatcccccaatcatgcctcccacagaggcaattattggcagtcaacaaattggcccaaattctagaagcgcccgcaccctccaggggagctaatttggcctgcttcactgctcaccaccaggacagtcgagagtaacgcaggtacaagcacattcctgtccccgtaatggacttcgttaacataaatggatatgaaatctgacgtggcaaagccaagtgctgtcacctggaaaggaaggtctgcctgcagaaaggtggctctcccgcactcccggccccgtacacacataactctatcaacatgagacagtgtggtcccaagggcctttctctcccaaggggtcttgtgctggctaggacgtgctgagtaggatttaaccactgtcggagagcaggcactatagataaagccctcttgaattccacttctcaccttcatagccccaaaggttgcaaacccagcctctttctgctccagctggggcaggctgtgctccatggtcacggccctgatctgtgttggcccagtgctgccctgtgttgggcaggaatatgtatggtttatgttgtcagaattcattcacgtcctggctctgccacttaaggaccaggtggccatcagcaagtcaccagacctctctgagattcaggtttcttgtctgttacactgagataatcccttgtcggttatgagggttggagataatgtatataacggatctggctcaaaggaactgaaaaaggataacaactgttattgctttttataattattattatttttatttaaacactgaaacacctgttaggacatggggttattcaggagcccaagcctctcccccgaaataattccagggcatcagataaaatagcatattactagattgggccatatgaaactgccaatattggacctttttttgattgccttatatacttaactgttttttaaatggccagaatacttaagcattctgaatacttaagttagcaacacttagcactaagcagtttttaagaatacaatacattgttatgaactacagtcatcatgtcttataccatagatctcttgaacttattcctcctaactgaaattttatatcctttgatcagcatctccccaacccttggtaaccaccattctactctctacctctacttcttttttttttttttttttttgagacggagtctctctctgtcgcccagcctggagtgcagtgagccgagatcatgccattgcactctagcctgggcaacgagagtgaaactctgtctcaataaataaataaataaataaaaaataaaaaagtgtgaactt

SEQ ID NO: 1795 - DNA, 3530 bp, Homo sapiens
agtcagtcagtctgacggtcagtggatcggtgggtttatctcaaggcctgagtagccggtaacaaacgagggttcccgggattggaccgacgcagccatgcctctgcgacttgatatcaaaagaaagctaactgctagatctgatcgagttaagagtgtggatctgcatcctacagagccatggatgttggcaagtctttacaatggcagtgtgtgtgtttggaatcatgaaacacaggtaggaatttttcaggactttattagaaataaaatactatgtgagactgtgtttataatgaaagagaagaaatattataacagaatccagaatctatatgcaaactgctttctcaagttggtacaaagtattttaaatatgaaggaactaacatttatgaggggatagtttgtaggagaaactgtcctgggtatgttatatacaatatttaaatataacaactctgacttaggtagtattagctcttttttgaaattgagaaaactgatggtattatagaatcacttgctaaagtatttaatcgttagttttccattcagtgaatactctatcttaagaatgatatcgttaaatttatttttttcccagatgcccaatataatgatacacagataaatctttcactcagccatatagattatatcagggaaatatttatagtcagcttttgattatacacacatcttacagattgtctgcctgaatgcttgactcattctctttcacctgagtaaataacatatccttcaaattagtttgtctcatattttccagtcttcctagactgtatttaagagtacaaagcatatagttagcactatactatacagttgtgtctacttatatagtaattatccttaacgtccaaagttaagttcttgaaatccaggtaaaattcgcatttgaggaatttaaaatggcaaaatgacatcaaggaaccaaagccagaagtaaacctaaaaacacctttatacttttatactcactgtaatgaaacagaaatgactgtacactaaactcataccctgtattagtctgttctcacactgctgtaaagaactacctgagactgggtaatttatgaaggaaagaggtttaattgactcacagttccacaggcttaacaggaagcatgactgggaggcctcaggaaacttaaaattttggcagcaggtgaaggggaagcaagcaccttcttcacatgatggcaggagagagagagcaaagtgggaagtgccacacacttttaaaccatcagatctcatgagaagtcactatcacgagaacggcaagggggaaatccacccccatgatccaatcacctcccaccagggtcctcctccaatttgacatgagatttgggtggggatacaaatccaaaccatatcatagtccatcagtgacattttatataaattaacattttgttttctgctgtatctcagtacctataacattacctggcacatagtaaatgctcaataattatttgttcaaccaatgaataatatgcatttcacttatcactagttcagtatttgtgttctctacaatttcagatctttatcttgtgaattgtttttgctttgatgcaaataactgtttttttttttttgctttttgtttagttcttgagatgtttaaaatatttctgattttatgtttaacagatacgttggtgtcctctctctctgattattcctagggattccctcttatcagctacatttacctatctcagctctatcacttgatcatcgtatgttctaaagcccaggcgtacttttcttatctttctctaggctttattgtaatatatctctgctttatctgcatttccactttgcctcctttttctcttctatacctttttctgccctatgacaggaccatctgcttcccctttcataattcatctcagtggtaatttcatgtttaatttccttctttcctctaagaatggaggttctgtgaggacaaggattaccctcatcttatttcccactgttggtccagtgcatgaggcactacctgatacactgtcaggctcctggtagatagtaagtctttgttgaatgattaatctgtctttgattctccctgttttttccctgtgtttatatcaccaacagcatttaccactcctatattgagagcaaattcttgagagagccaaaaaggtttttggaagtaaaaaggtttttagatgtacttgaatttcaaataaggagatgctatatattctttgaggtggtacatgcagtggtttaaaaaacatagtattttaggatttgaagccaacttgctgattaaattatataggcaagccttttaaccatgctgagcctctttatttatctgaagtgaagatgatattattgccttgcctacatcacaggattgtcaaaaagataaaataaaattagataaaattgtgtatgaaacctataaagtaccatataagtattagtcattagttatactttcctaatctacgttgagtatttgtatgtattgtgtgtgtagcttttcttactctttatttgcatcagtcatagcccctaacatggcgttgaaccttggctatttcttctgcagctgctttatttttactgctcagcagatccctggatttgttggctcctcatgagcttttgtggatttttctgccgtgttatagatcgcatgttgtgtctactctcagtttctgtatcatagtcagctggtagtgattctacaggttagagttgaagtgcctactcattcagcctttgtctaaagaatctttgaactctggcttgaaaagtcagagtaggacagttcttatgaaccggtccctattacttttttagtgcacatggttaatcaatcagtaagattatattgtgtttcttagttatttcatttttgctctctgatacaaaaaaggattagaaaatgatagtttgactttcagacttttaagaacaggcatcaaagaaggagaacaaagaggtaccatgatctctgctctttctaggagggtctctacctttatcctatgtgtataattccattctgagcagctcggaggaacatataagtcacggtgttttcatattttattaaaaagaaataataacatttgtatggaatcatattgctaaagcatgcaaaagaattgtaccttattcatgagtcacttttatgggtttcaatttcaaaaagactgactaggtgcagtggctcacgcctgtaatcccagcacttgggaggctgagacgggtggatcacttgaggccaggagttcgagactaccctggccaacatggtgaaaccccgtctgtacgaaaaatacaaaaatttgcttggcatggtggtgcacacctgtaatcccagctacttgggtaactgaagcatgagaatcacttgaacctgggaggcggaggtcgcagtgagccaagattgtgccactgtactgcacttcagcctgggtgacagagtaagactgtctcaaaaaaaaaaaaaaaag

SEQ ID NO: 1796 - DNA, 4237 bp, Homo sapiens
agttgctaagtggaaaatggaggctgaattttacatggtgattcttacctgcttgatcttcaggaactcagaagggtttcagattgtccatgtccagaaacaacagtgtcttttcaaaaatgagaaagtggtcgtgggctcatgcaacaggaccatccagaaccagcagtggatgtggactgaggatgaaaagctccttcatgttaaatctgcactgtgcttggccttcatcagaaatgctgcagaaaactacagccaaaacagcagcgagaggcagcatcccaatctgcacatgactggaattacagacacatcatgggttttgtcgactactcagcccttctccagcaccactgaagagactggactggcggagccagagagatgtaacttcaccctggcggagtccaaggcctccagccattctgtgtctatccagtggagaattttgggctcaccctgtaactttagcctcatctatagcagtgacaccctgggggccgcgttgtgccctacctttcggatagacaacaccacatacggatgtaaccttcaagatttacaagcaggaaccatctataacttcaggattatttctctggatgaagagagaacagtggtcttgcaaacagatcctttacctcctgctaggtttggagtcagtaaagagaagacgacttcaaccagcttgcatgtttggtggactccttcttccggaaaagtcacctcatatgaggtgcaattatttgatgaaaataaccaaaagatacagggggttcaaattcaagaaagtacttcatggaatgaatacacttttttcaatctcactgctggtagtaaatacaatattgccatcacagctgtttctggaggaaaacgttctttttcagtttataccaatggatcaacagtgccatctccagtgaaagatattggtatttccacaaaagccaattctctcctgatttcctggtcccatggttctgggaatgtggaacgataccggctgatgctaatggataaagggatcctagttcatggcggtgttgtggacaaacatgctacttcctatgcttttcacgggctgacccctggctacctctacaacctcactgttatgactgaggctgcagggctgcaaaactacaggtggaaactagtcaggacagcccccatggaagtctcaaatctgaaggtgacaaatgatggcagtttgacctctctaaaagtcaaatggcaaagacctcctggaaatgtggattcttacaatatcaccctgtctcacaaagggaccatcaaggaatccagagtattagcaccttggattactgaaactcactttaaagagttagtccccggtcgactttatcaagttactgtcagctgtgtctctggtgaactgtctgctcagaagatggcagtgggcagaacatttccagacaaagttgcaaacctggaggcaaacaataatggcaggatgaggtctcttgtagtgagctggtcgccccctgctggagactgggagcagtatcggatcctactcttcaatgattctgtggtgctgctcaacatcactgtgggaaaggaagaaacacagtatgtcatggatgacacggggctcgtaccgggaagacagtatgaggtggaagtcattgttgagagtggaaatttgaagaattctgagcgttgccaaggcaggacagtccccctggctgtcctccagcttcgtgtcaaacatgccaatgaaacctcactgagtatcatgtggcagacccctgtagcagaatgggagaaatacatcatttccctagctgacagagacctcttactgatccacaagtcactctccaaagatgccaaagaattcacttttactgacctggtgcctggacgaaaatacatggctacagtcaccagtattagtggagacttaaaaaattcctcttcagtaaaaggaagaacagtgcctgcccaagtgactgacttgcatgtggccaaccaaggaatgaccagtagtctgtttactaactggacccaggcacaaggagacgtagaattttaccaagtcttactgatccatgaaaatgtggtcattaaaaatgaaagcatctccagtgagaccagcagatacagcttccactctctcaagtccggcagcctgtactccgtggtggtaacaacagtgagtggagggatctcttcccgacaagtggttgtggagggaagaacagtcccttccagtgtgagtggagtaacggtgaacaattccggtcgtaatgactacctcagcgtttcctggctgctggcgcccggagatgtggataactatgaggtaacattgtctcatgacggcaaggtggttcagtcccttgtcattgccaagtctgtcagagaatgttccttcagctccctcaccccaggccgcctctacaccgtgaccataactacaaggagtggcaagtatgaaaatcactccttcagccaagagcggacagtgcctgacaaagtccagggagtcagtgttagcaactcagccaggagtgactatttaagggtatcctgggtgcatgccactggagactttgatcactatgaagtcaccattaaaaacaaaaacaacttcattcaaactaaaagcattcccaagtcagaaaacgaatgtgtatttgttcagctagtccctggacggttgtacagtgtcactgttactacaaaaagtggacaatatgaagccaatgaacaagggaatgggagaacaattccagagcctgttaaggatctaacattgcgcaacaggagcactgaggacttgcatgtgacttggtcaggagctaatggggatgtcgaccaatatgagatccagctgctcttcaatgacatgaaagtatttcctccttttcaccttgtaaataccgcaaccgagtatcgatttacttccctaacaccaggccgccaatacaaaattcttgtcttgacgattagcggggatgtacagcagtcagccttcattgagggcttcacagttcctagtgctgtcaaaaatattcacatttctcccaatggagcaacagatagcctgacggtgaactggactcctggtgggggagacgttgattcctacacggtgtcggcattcaggcacagtcaaaaggttgactctcagactattcccaagcacgtctttgagcacacgttccacagactggaggccggggagcagtaccagatcatgattgcctcagtcagcgggtccctgaagaatcagataaatgtggttgggcggacagttccagcatctgtccaaggagtaattgcagacaatgcatacagcagttattccttaatagtaagttggcaaaaagctgctggtgtggcagaaagatatgatatcctgcttctaactgaaaatggaatccttctgcgcaacacatcagagccagccaccactaagcaacacaaatttgaagatctaacaccaggcaagaaatacaagatacagatcctaactgtcagtggaggcctctttagcaaggaagcccagactgaaggccgaacagtcccagcagctgtcaccgacctgaggatcacagagaactccaccaggcacctgtccttccgctggaccgcctcagagggggagctcagctggtacaacatctttttgtacaacccagatgggaatctccaggagagagctcaagttgacccactagtccagagcttctctttccagaacttgctacaaggcagaatgtacaagatggtgattgtaactcacagtggggagctgtctaatgagtctttcatatttggtagaacagtcccagcctctgtgagtcatctcagggggtccaatcggaacacgacagacagcctttggttcaactggagtccagcctctggggactttgacttttatgagctgattctctataatcccaatggcacaaagaaggaaaactggaaagacaaggacctgacggagtggcggtttcaaggccttgttcctggaaggaagtacgtgctgtgggtggtaactcacagtggagatctcagcaataaagtcacagcggagagcagaacagctccaagtcctcccagtcttatgtcatttgctgacattgcaaacacatccttggccatcacgtggaaagggcccccagactggacagactacaacgactttgagctgcagtggttgcccagagatgcacttactgtcttcaacccctacaac

SEQ ID NO: 1797 - DNA, 4561 bp, Homo sapiens
tgtgggtttccgggtgatctcaacccctgagtgccctgcgtagctacaggggttccagttactgaaaggggccacctgggaaggatcctgccctgctcttgtccatttacccaaaaagcctaaggctgccaggaggctgaggggcctgtcctccaggtgtgctccttcccacctgctgaagctgaggcgctggagatgttgcctggcacgttctacccaggtgacaggaccccactctgtccctgtctccgtgccctcttcaagggaccccttccaaatgcctcagtggccaccctcccgagggtcccccggccctgccccccagcacaggcaggtcccccagcccctctgtcccagttcaggtgagtgggctgacgtggtgtgctccccccagcacaggcaggtcccccagcccctctgtcccagttcaggtgagtgggctgacgtggtgtgctctggtgtctccaactttgctctggcccctttctccccctcccccaccctggcatggcaaatcattcgttcactgccagtggatctgccactagacactctggcatggtttgggcgtctccctcgccttcctgggtgatctgcagccagctgccctgactcggtgacctgccttgtgatggttttctctgtgttgctgtttcagaagcccggagatcatgagcaccatctcaggtacacggagcacgacggtcaccttcactgttcgccccggcacctcccagcccatcaccctgcagagccggccccccgactatgaaagcaggacctcaggaacaagacgtgccccaagccctgtggtctcgccaacagagatgaacaaagagaccctgcccgcccccctgtctgctgccaccgcctctccttctcccgctctctcagatgtctttagccttccaagccagcccccttctggggatctatttggcttgaacccagcgggacgcagtaggtcgccatccccctcgatactgcaacagccaatctcaaataagccttttacaactaaacctgtccacctgtggactaaaccagatgtggccgattggctggaaagtctaaacttgggtgaacataaagaggccttcatggacaatgagatcgatggcagtcacttaccaaacctgcagaaggaggacctcatcgatcttggggtaactcgagtcgggcacagaatgaacatagaaagggctttgaaacagctgctggacagataaggacggctgctctccacctcgcagactgctcttgttataagtagagatgggctcgtgctgaaacatctgaatgccaagcgaagtctgtgagcatcaaccccactccatgggtttgtctcctggtacccaaagaaatactgagttgtgtccacaacatggctgggtcttcagacccctggctcaccatgtgggtgtcttgggcagtttctatcacacatgggacaaggggagggagtttttctaacatggaaaaagattcccagcctgccgcccagcatgcaggtggcctcgctttgcagggtccgagaggctccccgtcaattttgcacgggatcctagctcttgtaggcagacaccagtgcactctagatacctcctgagacctccgtcctctgctttccgggcagctctcaccaccccaggccccggcatgaggcctttcctcagtcctgtggcctctcagaggacacctgatgctcacctgcccctctttctcctgcacttggcttgcagtgagatgctcccagatgcatttgtccagtgccccatcatgggcctgaaaggcagagaaactttttcctacacagattcttttccccatctcctcctgtggtttgcatccatggctctttggccatgaggttcctggcagtgctgggagtttggatgggatcgtgcccagctttgcttagctttctttatttctgcaaatctgttagcataattccaaggtggccaagcagatgtcacatggagttagtcaaagcacaaagtcacgattccacaatggaggggagacctggccaagggagccagccagcgtgcaactgcccaagctccaggtctccaggacaagagcagttgtctgccatgagcacccatccaggatggagaataagggcttctctgcctctcagaattctttttaattgaagatgtcttgagctctgcaaagatcagagcaggtgagcatccactttgacatgaaggacaagaagacgcatggctcatggcgggcacatgcggctgccagtgagacagcgtctcctctgggagctgggcgggcacagcatcctcagttctgtgcccagccaagggtgagcatctctgctgagacagtccttttgctctcggaggccagggaagatggtacttagaggcttttcccctatcgctctgggtgtctaggaatcccaccagcttgtcttaacagtacaacagcttctttgaggacccagtgggtatggagtatagacagaacccagggttgagaacagaaggtgggcggcaggatcagagtgaaagcagaggcgtgaggagaggaaagcagggaggtctcctgggctgccaggtcagcctctctggcaaggctttcttgagccccgcccctttctttccccggagtccctccaccccataacaatacctcgaatttccaaaagaggtcaccagatgcacatgggccgcaaaacacacagtcaggcttccagcacattctcccccatttggaggatactcgaatgtcaggtttttggttttattattatttcagaactagctcagcccatctctaattataaaacatggttttgttttttttttttcctttttttcttgattaggtctggaacagctctagaatgaacacataaaatttagcaatttaaaatctttctttactgcaagtttaaatagttgtacagatagtttataagcacaatattttaagaaaaaaaagtggctggtctactaggcagcctttgtgccacttcagtgctagaaagttaaagaaaaaaaaacttttgtgatttaataatactatttctgtggaataattataaaagtatgacctttttaaatcaaccttatttggatgcatctgaaccagcagagctgtgttatattttctatctttgctagaacttcgtcattgaaggacaatttcttcaaagtggttacaattcataatgcagcagtttctccaaaaacaaaaacaaaacacacaccacacacacgcgcttttccagtcacacacccctgatgttggaaccaagtttttggaccttctgttccaaaaccttttgcaggtcaatctttgtatttgaaatgatccaatccaacttgaagtcaattgaatattaaggcgctttacttccgtgtgctttcagtttttccatcatgagatgaatgagcattactctagataaatttcaagacaggatactacaggtggcctgctgaggctgccccatattttagaaaatgtaaaaatggtggtttggccattaatttgtcttccatttgatgataccgcaaaattccgtgagtccattcctttggcatggcactttccctgggcctacagttggtattacctctgtgctcagtgccaggcaaaacactagctcaaaggagagtcaaggaaaccgctggcagacgataaccagtcgaaactcgtgacttcggtttgttgaactttggcagccagttggtgagggccagatgttattccctttcttaaagatactccaagccacatgccactaaccacaagcaagctggctgcaagactaaagagctgataacatagtttatttttacactgtcttattatagagaagtaatagacctatcagtacctgcactgaccaacaaataaacacatgttgccaagatgaatcggtctctatctctatctgcttattttggtactgaaagcaatagttcctcattcaaatcaccacccactgttctccccctttgggacatgttaggacgaggccctattccatgcccctctttaatggtggaacaaatgttaaactgctcatctaaagatcatgttgatattattccaggttttaagatcaacttttgttacatactgtaatttaaataaactgcatttacatgcctagtttctgtaatattgtgtatacaaaacccaaatctctcaaaatgtaaattatgtatacctgccaagataccttttccagggtgtctgcgcacattttaagttaattcacataatataaaaattactcaatgtgactgttgatttgctgaactttacatatcacaaagtgaattatttgtgatactttagttaataaaatggtaaatttttttctcagttattgaacaagcaagcattatccagttgatctggcaatgactttttgtgtgtgggccacaatattgattttcccattaacaatttttttttgttttttaaatactaatatgtttcacactatagtttgtgtaacaacacgtgttcgcattatctatgttgctgttacttttgtgcttttattctttttagactttat

SEQ ID NO: 1798 - DNA, 3733 bp, Homo sapiens
acaatgctgagaacacctgcagcctgcatttcagccaagtctggcctcccattgtattcgattggactttctgccttgagcaagaaaaaggaattgtttatcagatttgccaaaggatctccggggaggtggagaaagacaggataaacaaacctacaacaagcaagggtaagcaaagcactgggagacttggattatttgtgactgtccgaggtaatctttcaacctgacacaaagtaagtaaaagctgagagagagaagcaaatgttagcatggaccaagtcagtttcccagcggttcatgagggaaccgatattagatcatcttgtccaaactctggtcctaggctgacacagaaatcaaattctcaagactggaaagactttcaatcaaacaacaagggtttaaaagatgactgtcctagaaaaatcttacaaagaagatggtcttaccacttgcgtagcaaatgttccattgcgcactttataatttcatattttgtaataactacgcaatgggtaagctggttacctgcaaatcatatcaaaagcgataatcttggttttacttctctaaccaatgtaagcaaagcaagcacgtctgatatagcgatataatacaacttcatggttggtatataggaacaaaaattaaattaacgcgcttatttccagggcctcagaaaatagtttagcggtatcatatattgtgttttcttagtaaataattctgcaggaaccccttctttttctttcctttgtatagagccccaactagtggaatattggaaaactgcacttaaagagaaaacatttaaataggagatgaccacaggtctctcttcctcaggttaagagccagtaagatcgtacagacactgctcattttggggtgtggagatatggacaaggcgctgaattaaaaggggaggggtgtgtgaaactggcttatacttagctcctcacaggcataaagggcaaactcgtactgatgaaaacaagtgcaatctctggcatttgaaatgagtcaatgggctatatctatcactagtttgagaaaggaaaatatttattgagttcagaacttatcttcttgaagatatcttttccaaagaaagaggaagatatcctgtgacacaagattgtatatgttggaggaaagagacctggtttcacaaattagatgagaaggcagttggcaacattgtcccactggtgcagaacagaacagaacaggtaacactgtgcctgtgctggggtcggtgagaaggaagggagaaagcaggtggaggcagcaaagtgaagggaaggactcccacacaaacaactaagagtcaaatatagacacctggagaagtgatttatgacacagattttcctgaaggaatgaaatcttaggggttctcgggcttttaactttgttcctttctttgtttgttacctctccatttcaaggaatctcatgcttgtagatttttttaggagtcttggctcccttgccaaaaagcaccaataaaatgcaggcagcctggaaaggttataaaaatgcaagatgaattcatcaatcagacaaggtcttgtctgtacgtgcaacagggggttcacagacaggcttcagggacttggtggagctccctaacaagatgtgtaacttctgtgtgtgtgcattcttctggattttatagcttttatcagattctcaaaggggcctgtaacccaaaagaagaataaggaatataactgtatagaaatctgcacacagaccaaaaaaaagcaaaactcacactcacattttaatggatgcccctcagaatgatcccagactccatgaaattctgctcttagagaagccaaacagagatatcagattatttcagtacatcatgagtcagactgtagccttctcttttatcatgcaatgactctttgaacagagagctgcaagacgttttttgttgcattttgcactgctgtgatggcatagggcacccttctcaaacctcaacgtgctgtccttgagcaggttccaagctgattaacctccattaaccagctttcttcaccgtgcattaaacaaacaagatgaattacgctcaaagatccaaaagcagcagcaatcatttttgttagtttttcttaatagattaagcagtggaaaatagaaaaaaaaaaatgctgaactttgggacttgaagacttactcagcacatttggttgttatcaaaattaaatcatgaaagcagagttttttataccacttcatgtttgtggtggttattaaataaactctccagtttttcatttcttttgaaaggggatttgtttaaatactacttatttgaagattattaagtctccagagttcagggataaccagggcgataatgccatggtgatgctatctaacttcttttatggcatcagctttcccatagattttattcaacaaatgacttggttgtgaagaaaagctgtttattaatctgtctgtcttagccttcacctcccaaccagacagttaatcgtccaaggggagtttgagggataactagagaacacacatcatctataagtaatcccctcgtcagatggcatgtggtccaatgtcactatgattttccttctgagctgttaactcccattcttcctgcctcagagaggcataaatgtgtttttaaaattcatgaaaaacaagatgtgtagctaatctaagaaataatgtaaaacttgcctgcattggaggaggggagtgggggggggggccttctgttgcttttgagactataaggaatttatgtgattggtcgatgtctttgtgtccttattggaatgattagacaggtcttcaggaaaacagttttcaaaaactgaggtttggcattttttggttttttaatttgactccctacccaagaccatttttaaaaagtatttcaaatataaccacaaactgttcaaccaactgaaaatgaaagtaggccacttagaggtttttgtctaaactaaagcaaaatgtcttgagctaataattttaaccattgggagtttgctggtcataaaagcagttactttggaattaagaaataataattttaagtattacatcagaatttgtaatttttcttttacgggatatacagattatagttggttttgggtcttttgggtttttttttttttttctttccttccccttaggactaaactgaccttcctgagcagtgaaaccccagacttggacttgggccagctgcctttcagcacatcattaagaacttgtggagatgctgtttaaatgtgaattttccagcactccttcaccagacagatagacagtgctaaagcagtcggggcatgtttgacacatccaatttttaaaagcaagaaaagagaaaaaaacttaaaaaatatgtatatcaaagtgaaagttaatgaataatgaggccatttgtcagatacgcacaacacctttcaagacgctctagataatagcaaatctgcgagtcaatttaaaggatgaacaaggcttcaaataaagatgtcttcatgatttccgaagaaagcaagcattccagaaataaagggagaccactcacaccccctatattctgatgacttaggatcccctcaggtattgtcgaggtccactatgggacctgattaacccaaagagtattatgatacatatgcataccaaaaaaaaaaaagaaaagaaaagaaaaaagagaaggcag

SEQ ID NO: 1799 - DNA, 1603 bp, Homo sapiens
agctctgggagaggagccccagccctgagattcccaggtgtttccattcagtgatcagcactgaacacagaggactcaccatggagttgggactgagctggattttccttttggctattttaaaaggtgtccagtgtgaagtgcaactggtggagtctgggggaggcttggtacagcctggcaggcccctgagactctcctgtgcagcctctggattcacctttgattattatgccatgcactgggtccggcaagctccagggaagggcctggagtgggtctcaggtattacttggaatagtggtgacatgggctatgcggactctgtgaagggccgattcaccatctccagagacatcgccaagaactccctgtatctacaaatgaacagtctgagagctgaggacacggccttgtattactgtgcaaaagaccagcagcagctctttgattcttttgatatctggggccaagggacaatggtcactgtctcttcagcatccccgaccagccccaaggtcttcccgctgagcctctgcagcacccagccagatgggaacgtggtcatcgcctgcctggtccagggcttcttcccccaggagccactcagtgtgacctggagcgaaagcggacagggcgtgaccgccagaaacttcccacccagccaggatgcctccggggacctgtacaccacgagcagccagctgaccctgccggccacacagtgcctagccggcaagtccgtgacatgccacgtgaagcactacacgaatcccagccaggatgtgactgtgccctgcccagttccctcaactccacctaccccatctccctcaactccacctaccccatctccctcatgctgccacccccgactgtcactgcaccgaccggccctcgaggacctgctcttaggttcagaagcgaacctcacgtgcacactgaccggcctgagagatgcctcaggtgtcaccttcacctggacgccctcaagtgggaagagcgctgttcaaggaccacctgaccgtgacctctgtggctgctacagcgtgtccagtgtcctgccgggctgtgccgagccatggaaccatgggaagaccttcacttgcactgctgcctaccccgagtccaagaccccgctaaccgccaccctctcaaaatccggaaacacattccggcccgaggtccacctgctgccgccgccgtcggaggagctggccctgaacgagctggtgacgctgacgtgcctggcacgtggcttcagccccaaggatgtgctggttcgctggctgcaggggtcacaggagctgccccgcgagaagtacctgacttgggcatcccggcaggagcccagccagggcaccaccaccttcgctgtgaccagcatactgcgcgtggcagccgaggactggaagaagggggacaccttctcctgcatggtgggccacgaggccctgccgctggccttcacacagaagaccatcgaccgcttggcgggtaaacccacccatgtcaatgtgtctgttgtcatggcggaggtggacggcacctgctactgagccgcccgcctgtccccacccctgaataaactccatgctccccc

SEQ ID NO: 1800 - DNA, 3252 bp, Homo sapiens
cttagcaatttcaagcatcatacacttattagctcacaatttccatggtcctggaccccaggcactgcttagctgggtcctccgttcagggtttcactaggctgcaatcaggatgccagctagggctgcagtctcatctgaaggcttgactagtgaggagtcagtttccaagcttattcagttcattaacaaagtttatttcctcatggtgttgacagagggccctagttttgtcctggctgttggcagagtttactttcacatcctaagaccacctgcagctttccacccatacccttcttcaatgtggccacttactctatgcaaccagcaaggagagcctctcttctcagagaggcccagtcttccctttagggtttttcacttgattaagtcaggctcatccaagatgatccagcttttgattaacttgaaattaacttatttgtaatcttttatctgcagaattccttcactgtggcaatgtcacatgatctaatcacaggagtgacacactgtcatattcataggtctggccaatactcaccagagaggactacatagaacatgaacaccaggggttgggaatgatagggactgttttaggaatctgcctatggtaggaggtctattagatgccctctgtcttacagatgacacctcttattctcatcccccaaaaaccctctaaatatgttttaattttgaaagtttaaaattaaatgtaaaatggttttccttggagcaaacagctaggactccaattacgaggctgttcctatttaaagggagaaattgttctggtttgagctgcacaagtaattacgttggttatttgctctacatctagttatccagacctggctgaagtgcttccaccaaacggagttattttccatttttgcaagtgctccatgagcaaatgtgtataatgaaaaagaaaaattctggaatgtagaagagaaggacaaaaggaagatgccatatgttgtatggcattcaaagggtaatttcccactaactgaaatcaagtcagtgaacaaaccaaacccctacctgtcagtgttaaacgtgtaagggccaccgccatctctgcttgcacccctctagccatctctgcactttctttctttcctttctttgtactgccaatgggatgggtgttcatttcctaactggaggcataaacatgtgcctaactggaggcagaaatacaggcagtgaggtgactgcatctctgtcccagggcatgctgtgtctctgatacccagttattcaaggaccactgagagaatttaaggaatcctgcaagaaaagagtatccactgcttgggagtaacttgaccctccatgaacacacgggatctggatgacctttgcaattcctttggggatgcagggagcagaattttagaactctaccacacccccacttgctgctgaatattagaataatatataaaattcctgtcacctggcccaccacagtcattctctaagctgtgaaatcagaaaacaaaatacttcttagaaccataaaatgtggaataatttgattctgctgtgatgtgttaacaaatggaatctttgctcagggagacctctctgactccaagctcagatcaccacagagctgtcgtctcttacgccttcaaaggtctgtagagtaaagcttcctattatgatgtagtctaacatgaagggcacggtagcagagactttctgaaggagtgaggttgcttgggctgtatttactggtgcaaagtggaagcacagctaatcatagaagtcaaattccttgtaggacttttttttctgccttggctttgagtatctgatgtttttattttggatctaagcacatcctgtcatccttgttaacttgtatagatggcccctgcctggcaatgatgaccaggcattactaagcacatttaggccttgacctctgtaattaaattctaaaacagacagcagtgcattctgaaggacatggaaggaatgggtgcatcctccagtgcgtgataaaatagcagtaacaatggtgttacagacgaactttcctccaggagttgttacaaagcagagtgactggaagaaaaggtacctcaccacatcttttcaaaaaagcctttgcagagaagatgaggataccaagataccttaaggaacagaaggaagatatttcacatatctgggattaagagagggttgggagtaggaagtaaggtgcaactgtcaatattgcagttcccacctggaagtcattagtggaaaaaaactcgcctcaaatctcccagcaaattaacacttagaacatttcctttcaccagaatgtctgcagtaagctgtaatttacagcggtgcaattattgacaatggccaagtctaactgcatacttgtcccaggcatgggaaaaacagtatttgtcacttgcagagatgtaacatcagaattacttttattttggttgtttcaaaacacagcctaaaaatctgctccattatttattggtttataatattttcatctctctttcctttttgaaacctagagaagtccaacactacgtttcttaagtatggtattttctggggtttaaacagaattgttaccaaaggatgctgtggagtttcataatgttatgttttcataatgttaagaaaggaatgatgttttgagctatgtccctaggggcaatgctgttcctacacgatcctgtcttactcatcagatcaacatttccttggagaagctgaggacatgcaatgtgttaatgagaccttgtttgaagaatcaaaggagcctgtcattaaccagccctcttgcaatgataccaatgcctgtgtccctccagattgaaaataagttgaaaccttattcccaatgtgagggtatctggaggtggagcctttaggaggtgattaggtcatgaggatggattcctcatgaatgggattagtgcccaatagaagagatcccaaagagatccctcacctcttccactatgtgagacacagaaggaaggtgtcatctgtgaggaagtggctgtgaccagacatcaaatctgcaggcaccctgatcttggacttcccaggctttagaactatgagatataaatctctgttgttgataacccccccagtctatggtattttgtcatagcaccctgaatggactaaagatgctcctaaagttgagaatatctgaaattataattatgtagccagttattcttctagaccaaaaag

SEQ ID NO: 1801 - DNA, 3486 bp, Homo sapiens
aaaacactttctgagagtcctggacctcctgtgcaagaacatgaaacacctgtggttcttcctcctggtggtggcagctcccagatgggtcctgtcccagttgcagctgcaggagtccggctcaagcctggtgaagccttcacaaaccctgtcgctcacctgcgctgtctctggtggctccatcagtggaaatgatcattcctggaactggatccggcagccattcgggaagggcctggagtggattggatacatgtttcagagtgggaccacctactacaacccgtccctcaagagtcgagtcaccatatcactagacaggtcccggaaccaattctccctgaggttgacgtctgtgaccgccgcggacacggccatgtattactgtgccagaggttactctgatttggcttcctcctacttccacatggacgtctggggcaaagggaccacggtcaccgtctcctcaacacccaccaaggctccggatgtgttccccatcatatcagggtgcagacacccaaaggataacagccctgtggtcctggcatgcttgataactgggtaccacccaacgtccgtgactgtcacctggtacatggggacacagagccagccccagagaaccttccctgagatacaaagacgggacagctactacatgacaagcagccagctctccacccccctccagcagtggcgccaaggcgagtacaaatgcgtggtccagcacaccgccagcaagagtaagaaggaggtcttccgctggccagagtctccaaaggcacaggcctcctcagtgcccactgcacaaccccaagcagagggcagcctcgccaaggcaaccacagccccagccaccacccgtaacacaggaagaggaggagaagagaagaagaaggagaaggagaaagaggaacaagaagagagagacaaagacaccagagtgtccgagccacacccagcctcttggcgtctacctgctaacccctgcagtgcaggacctgtggctccgggacaaagccaccttcacctgcttcgtggtgggcagtgacctgaaggatgctcacctggcctgggaggtggctgggaaggtccccacagggggcgtggaggaagggctgctggagcggcacagcaacggctcccagagccagcacagccgtctgaccctgcccaggtccttgtggaacgcggggacctccgtcacctgcacactgaaccatcccagcctcccaccccagaggttgatggcgctgagagaacccgctgcgcaggcacccgtcaagctttccctgaacctgctggcctcgtctgaccctcccgaggcggcctcgtggctcctgtgtgaggtgtctggcttctcgccccccaacatcctcctgatgtggctggaggaccagcgtgaggtgaacacttctgggtttgcccccgcacgcccccctccacagcccgggagcaccacgttctgggcctggagtgtgctgcgtgtcccagccccgcccagccctcagccggccacctacacgtgtgtggtcagccacgaggactcccggactctgctcaacgccagccggagcctagaagtcagctgtgagtcacccccaggcccagggttgggacggggactctgagtggggccataaggagctggaatccatactaggcaggggtgggcactgggcaggggcggggctaggctgtcctgggcacacaggccccttctcggtgtccggcaggagcacagacttcccagtactcctgggccatggatgtcccagcgtccatccttgctgtccacaccacgtgctggcccaggctggctggcacagtgtaagaggtggatacaacccctcgccgtgccctgaggagtggcggtttcctcccaagacattccccacagctgggtgctgggcacaggccttccctggtgtgaccgtgaatgtggtcaccctgaacagctgccctctctggggacatctgactgtccaagaccacagtcagcacctctgggagccagaggggtctccagagacccccagatgtcaggcttgggctcagtgcccagcgaaaggtcagccccacacatgcccataatgggcgcccacccagagtgacagcccccagcctcctgccaggcccacccttttccgcccccttgaggcatggcacacagaccagtgcgcccactgcccgagcatggccccagtgggatgtggtggccacgaggggctgtacacacagcaggaggctgtccgccctgctcagggcctgctgcctatgccccagctgtccagccaagggaggcatggaagggcccctggtgtaagctggagccaggcacccaggcccccggccaccctgcagagccaaggaaaggaagacacccaagtcaacaaggggcagggctgagggctgtcccaggctcttttggcccgaggggctgccagcagccctgacccggcatgggccttccccaaaagcgaccctgtgaggtggcctcacagagaaccccctctgaggacagtgtctgaccctgcctgcctcacacagatgggccccacagcagtgggcaacctggggggcagcagcccaacctgaccctgcagggactgccccctgcagcagcagctgcttctcagtcccccaacctccctgtccccgccagagggtcttccccgaagctgcagccccaacccatggctgcccacctggaaccgggactccctgtccactgccccctccccttcggggccccatctgtgctggggcccaggttcggcctacagattcccatcattgccatggcctcctgaccttgcctatccaccccccaccaccggctccatgctgaccctcccccaggctcccacgcccagctggccggccatccccaggcacagacagtctgggatctcacaggttagcctggaccatccacctggccagacctgggagaggctggaagctgccctgccaccatgctccagggccccaggttgcagtactatggggtgagggtgtgtgtgcacacctgtgtgtacctaggatatccgagtgtacccttgtgcccccaagcacaagtctccctcccaggcagtgaggcccagatggtgcagtggttagagctgaggcttatcccacagagaaccctggcgccttggtcaaggaagcccctatgcctttcttgcctcgatttcccctcttgtctgctgagccagcaggggccacgtcctgggctgctgtgaggaggaagcaagttggtgctaggaggggctcctgtgtgtgcatgggcgggaggggtgcaggtatctgagcaccccggtctccacttgagagagcagggcaggagctccctgacccacccagactacacacgctgtgtccacgtgtctcccattatctgtggcagaggatccggcttctttctcaatttccagttcttcacaaagcaatgcctttgtaaaatgcaataagaaatactag

SEQ ID NO: 1802 - DNA, 3326 bp, Homo sapiens
tgaagcaaatggcttgctcaactccttgctggatatagtttccagcctcagcgccttgcttgccaaagcccagcacgtctttgagtatcttcctgagtttcttcacacatttaaaatcactgccttgctagaaaccctggactttcaacaggtttcacaaaatgtccaggccagaagttcagcttttggttctttccagtttgtgatgaagatggtttgcaaggaccaagcatcattccttagcgattctaatatgtttattaatttgcccagagttaaggaactcttggaagatgacaaagaaaaattcaacattcctgaagattcaacaccgttttgcttgaagctttatcaggaaattctacaattgccaaatggtgctttggtgtggaccttcctaaaacccatattgcatggaaaaatactatacacaccaaacactccagaaattaacaaggtcattcaaaaggctaattacaccttttatattgtggacaaactaaaaactttatcagaaacactgctggaaatgaccagccttttccagagaagtggaagtggccagatgttcaaccagctgcaggaggccctgagaaacaaatttgtaagaaactttgtagaaaaccagttgcacattgatgtagacaaacttactgaaaaactccagacatacggagggctgctggatgagatgtttaaccatgcaggcgctggacgcttccgtttcttgggcagcatcttggtcaatctctcttcctgcgtggcactgaaccgtttccaggctctgcagtctgtcgacatcctggagactaaagcacatgaactcttgcagcagaacagcttcttggccagtatcattttcagcaattccttattcgacaagaacttcagatcagagtctgtcaaactgccaccccatgtctcatacacaatccggaccaatgtgttatacagcgtgcgaacagatgtggtaaaaaacccttcttggaagttccaccctcagaatctaccagctgatgggttcaaatataactacgtctttgccccactgcaagacatgatcgaaagagccatcattttggtgcagactgggcaggaagccctggaaccagcagcacagactcaggcggccccttacccctgccataccagcgacctattcctgaacaacgttggtttcttttttccactgataatgatgctgacgtggatggtgtctgtggccagcatggtcagaaagttggtgtatgagcaggagatacagatagaagagtatatgcggatgatgggagtgcatccagtgatccatttcctggcctggttcctggagaacatggctgtgttgaccataagcagtgctactctggccatcgttctgaaaacaagtggcatctttgcacacagcaatacctttattgttttcctctttctcttggattttgggatgtcagtcgtcatgctgagctacctcttgagtgcatttttcagccaagctaatacagcggccctttgtaccagcctggtgtacatgatcagctttctgccctacatagttctattggttctacataaccaattaagttttgttaatcagacatttctgtgccttctttcgacaaccgcctttggacaaggggtattttttattacattcctggaaggacaagagacagggattcaatggaataatatgtaccaggctctggaacaagggggcatgacatttggctgggtttgctggatgattctttttgattcaagcctttattttttgtgtggatggtacttgagcaacttgattcctggaacatttggtttacggaaaccatggtatttcccctttactgcctcatattggaagagtgtgggtttcttggtggagaaaaggcaatactttctaagttctagtctgttcttcttcaatgagaactttgacaataaagggtcatcactgcaaaacagggaaggagagcttgaaggaagtgccccgggagtcaccctggtgtctgtgaccaaggaatatgagggccacaaggctgtggtccaagacctcagcctgaccttctacagagaccaaatcaccgccctgctggggacaaacggtgccgggaaaaccactatcatatccatgttgacggggctccaccctcccacttctggaaccatcatcatcaatggcaagaacctacagacagacctgtcgagggtcagaatggagcttggtgtgtgtccgcagcaggacatcctgttggacaacctcaccgtccgggaacatttgctgctctttgcttccataaaggcgcctcagtggaccaagaaggagctgcatcagcaagtcaatcaaactcttcaggatgtggacttaactcagcatcagcacaaacagacccgagctctgtctggaggcctgaagaggaagctctcccttggcattgctttcatgggcatgtcgaggaccgtggttctggatgagcccaccagtggggtggacccttgctcccggcatagcctgtgggacattctgctcaagtaccgagaaggtaggcactgggcctcattctgccttctcttcccacaatattgtgttgcaggaaatgcattgctactgtacagtagaatcaagttgtatcccagtgaggctacattatccttttcagaaaaatataaatttttaaaagcacttatagggatatattcgttagataacatctctatagtgcttagaattgcttactttgtgtttgaccttttaactcaataacagcaatgacatctatgtacattatacattatcatacatgatttcaaggaaaattgtcttcttctggaagcatagtttcttagaagaggcatcccagatcataggacaagcctcccttgtctcagatgaagaaatgaaggctcagagagacgggcatgtgatttacttgtagctacagagaaagtttcctgaactgagggtggatgttgaacctcttgtccatgtttctcacatctattattgtttctttccaatttaggacatttgatgggcagttactaatttccaacttctgattctttctgcaatcctgacagctaggaagcattgttctatgtattttctgtgagaatactcccttttggaaagaaacattgcaacagtaaaacacatcttggtgctggtaaataagtgtagaggcatcagtggcaggattaatacagattctcataaaatgttattttgctttttcttttgccttttgagtataaattttcttctgacttaacctaaagtctccatttccctggaggtgaactaggatttgcaaaggaagaaataaagg

SEQ ID NO: 1803 - DNA, 3270 bp, Homo sapiens
gtgcatgggtttggagccagagtaccttgcccacagaaatggaagtctggggacccagttggatttctacaacctccagccttagcggcacccttttctctgatccgggaggggaagagaagccatagggttccccagtttatgcccaccctcgtctggcctcctagcacgagcagtcagtccctcccctggaaggaaaggctgaagggaccacccaagcgcttggtccaactcaccccgtttctgcaggcctgctcgttcagcgctcgcacccaagcccgctgccagttctcccggaaagacttgaaggcgaagagtgacgccaggaggccccggactcctggctcctcggcggcgccagcccgagtcgcccgcagccgcagcagcgagcgccacacgcccagctcccgcagggaacccgcgggttccccggctaaggcgggtcccgggccccggtccccgcgggcccgcgccagccacaagccccgggcatattgcagcagccaggcgaacaccgtgagcagcgaggcggcgaagaggatcagcaaggccgcccagcccacgtcccgctgcccccagcccggatccatgctccgcgcgggctccgatcccggtcccggctggggctcagccgctgccccgggggagcatggcccgggcgggccgcggggaggaggtgggctcccccggggctgggcgcgcggggtcgggggctctccgcgactgagtgcccaggactagtgggtgccacagggcgaggagaggaggtcctcgggggtcgcgatgccggggtctctgtctccgtggtccgggtctctcctagcttggtcagcagtcggacccgttagtcgccggccagtgcccgactcctcccaccgcgcgggccccgccggaccctggaggggactggtctgcagagacgctggggctcgcgggccggcaccggctccgggagggctgcgtgcgcagagctgacactgacaacaccgccggcgccccgcccccacccgcccttaaaggagccgcacccgcgccgggcggggccaggacagcctggcgctccctcgctggaggagggcgggagggctagcagcgagcggaggaggttccggggtggaaaataggcgggatctttgatcacctcgccccatcttgcaatcgcggtgctcccacactcagctcaaggtttcctgcaagaaacaggcgcgtctccacaccctcgtccctcctccccaccccctgcctttcaatagccatcttcctggagccggaggcatcccagattaagggagaggtacgggccctttaagcttgacctatggaggcggacggagctaaaactgacgtggaaccggaatgtgagcggtgtcagacacgtggtacaaggaggcattcatcttggaaccgggcaattggcatttccgctctggattggtgtgggaagagcctgcctgtggggagcggccactccatactgctgaggcctcaggactgctgctcagcttgcccgttacctgaagaggcggcggagccgggcccctgaccggtcaccatgtgggccttctcggaattgcccatgccgctgctgatcaatttgatcgtctcgctgctgggatttgtggccacagtcaccctcatcccggccttccggggccacttcattgctgcgcgcctctgtggtcaggacctcaacaaaaccagccgacagcagatcccagaatcccagggagtgatcagcggtgctgttttccttatcatcctcttctgcttcatccctttccccttcctgaactgctttgtgaaggagcagtgtaaggcattcccccaccatgaatttgtggccctgataggtgccctccttgccatctgctgcatgatcttcctgggctttgcggatgatgtactgaatctgcgctggcgccataagctgctgctacctacagctgcctcactacctctcctcatggtctatttcaccaactttggcaacacgaccattgtggtgcccaagcccttccgcccgatacttggcctgcatctggacttgggaatcctgtactatgtctacatggggctgctggcagtgttctgtaccaatgccatcaatatcctagcaggaattaacggcctagaggctggccagtcactagtcatttctgcttccatcattgtcttcaacctggtagagttggaaggtgattgtcgggatgatcatgtcttttccctctacttcatgatacccttttttttcaccactttgggattgctctaccacaactggtacccatcacgggtgtttgtgggagataccttctgttactttgctggcatgacctttgccgtggtgggcatcttgggacacttcagcaagaccatgctactattcttcatgccccaggtgttcaacttcctctactcactgcctcagctcctgcatatcatcccctgccctcgccaccgcatacccagactcaatatcaagacaggcaaactggagatgagctattccaagttcaggaccaagagcctctctttcttgggcacctttattttaaaggtggcagagagcctccagctggtgacagtacaccagagtgagactgaagatggtgaattcactgaatgtaacaacatgaccctcatcaacttgctacttaaagtccttgggcccatacatgagagaaacctcacattgctcctgctgctgctgcagatcctgggcagtgccatcaccttctccattcgatatcagctcgttcgactcttctatgatgtctgagtcccttgatcattgtcctttacctcacagtctctaggattcctgactcaggctgacctctctctctggtcccagactgcctccttgcccaggcctctctcactcttcatactcctccagattttgttctcagcattttcctttctctgtgatcattggcatcctgggcgtttcttgccctctgctgactactgattggattttacctatggctttctgcaacttgctactctctccctctccatcccatctttgcagcctcatagggtgggatacagcagctttttttgcagttatccacactcacatttcagagtcctgactctcaaggaaccactggtttttgggatagaacttgggccagggctaggaacacaggctccacggtgacatgtcatttgattgtaaattaagtgttctgattagtaagaactaagcagggggccacatgctctcaatggagacaataaagtgttgtctttttcttattg

SEQ ID NO: 1804 - DNA, 5084 bp, Homo sapiens
atttccttatattctcaataacaaagtattgtcaaacatttctttgttgataaattgagtagttacaatagtatttcatggcttaaatttatatttttcttatgaatgagatgagcatctcttcatgttttatgttttatgtttgttttgatagacagtcttgctctgttgcccaggctggagtgcagtggtgcagtctcagctcactgcaacctccaccttctgggtccaaacaattcacccgtcttggcccccgaggaagttgggattacaggcatgcaccacatgcctggctagtttttgtgttgttagtagagacggggttttgccatgttggccgggctgatcttgaactcctggcctcaagcaattcactctcctcagcctcccaaagtgctgggattataggcgtgagccactgtgtctagccatcttttcatgtattgaatagccatttgtattctcttttctgtaactctctattaatattctttactcatctgtattagtgtgatagggatgccataacagaatatcccagaatagatggcttacacaacagaaatttatttctcacaattctggagactagaaatccaagttcaaggtgttggcaggttcggtttttcctgggacctctctcttcggcttgtagttggccaccttttcactgtgcccccacagtcattcctttgtctgtgttgtctatgtcctaatctcttcttataagcacatcggtcatactgtattagggttcaccctaacaattccattttaacttaattacctctttagatgccctgtctccaaatacagtcacattcagaggtactcgggattagaacttctacatatgaatgttgtgggaggacagaattcagccctaacattctaccctctggcctctcaaaattcatgtccttctcacatgcaaaatacattcaccacattccaacaataccagaagttttaacccattccagcatcaactgtaagtccaaaatccatctaaatattatttaaatcaggtatgggtgagacttgagatatgattcaccctgaggcaaaattcttcttcagttgtgaacctgcaaaaccagagaagttatctgcctccaaaattcaatggtggaacaggtatggaatagacattgccattccaaaagagagacattgggaagaagaaaaaagtcacaggtcccaaacaagtccaaaacctaacagggtaaattccattagattttaaggctcaagcataatactctttggctcagtgctctatcctctgggcccactggagtagcagccccacctccttggccctgagcggcagttctgccccctggaaccaaggaggaaaccacctcaccctacccaaggcttgtgccctctaggcctatggtggcagtggcagctctgcctacttctgaactgcctgtggggtcactcttcccttttcttgaaggataatacatatttgcagctgtacagctgtattgacttatttcataaaatcccagaagcctgacacactccttcatttgtcctgtctctgtcccttacagtccagactggcagcatttctgctgaggtggtcaaatctcataacctctttagcaaacattgccaagccacaatctttgtgttctctccagacacactttctcgtttttcgcaatatgaataggtgacattttttcaaagctttaagttctggctccatcttgcttgacaattccttatttaacctctctctctcttctcacattttatataagtagcaaggagaaactaggcagtgccttcagctctttgattagaaatctccacagctaagtacccaaatttatcacttaaacattctgctttccacaaaacactagaatacaacgtggccgagttctttgccactttacaacaagtatgccctttcctccagtttccagtaacatatttctaatttctgtctgagacctcaccagcaacacatttaatatttatatttttaccaacattctgctcatgatcacatatgtatatctctaaggtaatagcagcattccctgcagtgttcctattttctttctgagtgctcacccaaattttcgttaacattcatgtttctacccagagtctcttgaagacaatctaggatttttctagcacacacctcaaaattcttccaatctccacccatcagcccattccaaagccacttcacatttttagatttttagagcttcatcccacttctggtatcaaaatctgtgttagttttctagggctgccataacaaaatactgcagactgactagcttaaacaacagaaacgtattccacatttctccagaacacaattctggaggccaatgaaggtatcagcggcttggtttcttctgcggcctctctccttggctcccacatggccactttctctccatgtcttcacatgggtgtccctctgtctatattgtctgtgctctaatctcatcttcttataaggataccactcatatcagactagggcccaccctaatggccccattttaacttaattacttctatctccaaatatagttctatcttcaaatacggtcacattctgaggtgctagaggttaagacttcaacatctaaactttgcagagacacagtttagctcataacaccatctttctatcagataatttgaccgttttcattgatttgtagggtattctgtatctattaaggaaatggaattctgtgcagttaatagaattagaatgaatcaactccacatgtgttgacaaatgacgtacaataatttccaagatatattgttaattttttaaggttcaaaacagtgtgtaaagtatgcatatatctgtctatatctagaatacctctggaaagatcaacaagaaacccataacagtaattgcctccaggaatagtaattcttggggagatgaaataaatggctggaggctagaaagcttacttttttcattatgtagctttggtattttctcaattttttttaatgtattacctattcaaaagaagaaatattgggccaggtgcagtggctcatgcctgtaatcccagcactttgggaggccaaggcagacagatcacctgaggtcaggagttcgagaccagcctggccaacatggtgaaacttcatctctactaaaaatacaagaattagctgggtgtggtgctgtgtgcctgtaatcccagctactcaggaggctgaggcaggagaatcgcttgaacccaggaggcagaggttgcagtgagcagtgatcacgccactgcactctagcctgggtaacagagtgagactctgtctcaaaaaagaaatataacttaataaaacattcacacatgtgcacatacatggtgagcagtggagatggaacaaaaggaaaggagaagacaaggaagaagatctagaagcacaatgcatcctaaattcagaccaaagacacgggcaactcaaattctagaagcagaggtccccactccatagcgtttggggctgggccattcacctatttattcattgaacattcatgagtgtttttcataaggcaggctgggtgttagatgttcagacacaggaatcagccctgtcatcaaggagttcttacactggtcggggagagagagaagtaatcagactattagtcatgctgagtcatggtgataacacctgtagcggatgttatgggagtacagaggagaggctgtcaacccagcctgcagagaagatgtccctgcgacaggtaacgctggcctctctctgctgcccccaactcccctattgtcactcccttcttctctcagcgctttcctgctggcaaaaggatctgagcatcttcccatgctgttgtccctgcagagcagctgcaggagccccaagtcaccatgaagtctgtgaaggtgtctgagaacttctcctgtaacatcactctaatgtgctccgtgaagggggcagagaaaagtgttctgtacagctggaccccaagggaaccccatgcttctgagtccaatggaggctccattcttaccgtctcccgaacaccatgtgacccagacctgccatacatctgcacagcccagaaccccgtcagccagagaagctccctccctgtccatgttgggcagttctgtacagatccaggagcctccagaggaggaacaacgggggagactgtggtaggggtcctgggagagccagtcaccctgccacttgcactcccagcctgccgggacacagagaaggttgtctggttgtttaacacatccatcattagcaaagagagggaagaagcagcaacggcagatccactcattaaatccagggatccttacaagaacagggtgtgggtctccagccaggactgctccctgaagatcagccagctgaagatagaggacgccggcccctaccatgcctacgtgtgctcagaggcctccagcgtcaccagcatgacacatgtcaccctgctcatctaccgtgagtctctgggcagggcacccatcaccagattccttctctgaaagctttctcctctgctgccttctccaccttccgcttctccaagggtcttccctcatactgaaatgcctcagaccactaggacagctgttcagttcacaccagttgattcataggaggcaaactcatgactagctgctggacaagtctacccgccaaagtgcccctggctctaggctgccagttaggcctccaccacccaactttaggtgcttgccccggtccttctgcactgagtgtcagaagggactaggaggccaggtgcggtggctcacgcctgtaatcccggtactttgggaggctggggcaggtgaatcacctgaggtcaggaatttgagaccaggctggccaacatggtagaccccgtctctactgaaaacacaaaaattagctgggttcggtggtgggcgcctgtaatccaagctactctggaggctgaggcaggaaaatcgctcgaaccccaaggggcggaggtttcagtgagccgagatcgtgccacttcactccagcctgagagaaagagcaagactccgtct

SEQ ID NO: 1805 - DNA, 3064 bp, Homo sapiens
cttctggtgagccttccccatcctaggctggctccctggacgggaccttcctttttttttttttttcctccctccatttcactctgtcacccaggctagagtgcaatgatgcaatctcagctcactgcaacctctgtctcccaggctcaagccattctcacgcctcagcctcctgagtaactgggatgacaggtgcgtgccaccacgctcagctaatttttgtatttttagtagagatggagttttgccacgttggtcaggctggcctcaagttgatccgcccaccttggctgggattacaggggagagccaccgcgcccagcttattttttgtatttttagtagagatggggttttgtcatgttggccaggctggaccagaacacctagcctcaggtgatctgcctgcctcggcctcccaaagtgctgggattacaggcacgagccaccatgcctggctgggcccttccttttgtctagaggccctgggatgcagcccgctgacatcttccttgaaatctcacacaaccactttctcttttggggtcagcctctcccccatgcctggctggggcataaaaacatatggtattttctcaacagctccctgcttttctttcctttccagaaacaggcccacagcagcccttcttgagaactctgaggactctcatgactttttttggttctttttttttttttttttttgagaaagggtctctcactgttgcccaggctggagtgcagtggcatgatctcagctcactgcaacctttgcctcccaggttcaagcgattcttatacatcagcctcccaagtagctgggattataggcaccggccaccatacccggctaattttttgtatttttagtagagacggggtttcactatgttggccaggctggtctcaaactcctggcctcaagtgatctgccctcctcggcctcccaaagtgttgggattacaagcgtgagccactgtgcctggcctctcatgacttttgagagggcctgaccaaccctccacctggcccagtgactgtagcctagatgtcagccaggggcaccctgctccttaaaatctagataagatgctctttgcttcccactcagggcaagtcctgggcaggctgtccacctgcatgagttccagtaggttgggtgttcttgtggctgcctctggctctgatttctctttcagctaaagtcttgttcttgcctccgtgtctcctgtctgttcccttacctgtaccctgcctcaggcccaaattgttggacacaagacttgcttaaagtttcctctaaaccagctctaaacagaaggctgttaggtgtggcagactttgtcttttttctccaatttttatgaatcaataacctgttaaagcgctcagcaggaccagtctctgcaagacctttccttaggaggaagttctgttatgggacaaagatgtccgcaatcactgttcctgacttaggcttcctgagtctcatcacctgaagctctgagtttgtctggccctctttgtcccctgctccccattgcttcctccccgactcccactttcttcgatgaccaccaccagcactgctgcccccaccaccttaaagcctccttcccagcaaggctttgagaggccacctggtcaggacagtgagttaagctcattaatgaggttctgggtcctcgcagctctgtaattttcatttctgcacctccccagtctgggtgacacaggagactgaccaactatgggtatttccagcctctgcccactcctcagaagcccagcacagctcccagtgtctcctagcacgtaaggcactggctaaacattggatggtccagctcagctttgtgctgtagcggctctgtccacaattataaaatggaaacgtcagagggctcaaggccccttagacctcctcattcatttgacaagcgttttttgcacattcattttgtgttaggaagcagccaagtaatggggcacaaagatgaaaaacaaacagacaaatatgtggtttctgccctgacggagttgacacaccagtgtgagagtcagacatcgatcatataatctcaaagtgctgggattacagatgtgagccactgcacccggcatactttgccattctttttctaatgtattggatgcttaattaatttagaaatttcttattttctaatatatgcatttaaggctataaacttcccttgaagatctactttagctacatctcatcagctttgctatattgtttttttcattattgttgatttgcttttcccgttattatttatttttacctatatttcatttataaatgcattacaaattttccagatctgtggggcttaactttttgttgtttattattttaattttaaatttattgtggcccgagcactctgtctgtgtagcatggcaggcagcacgttggtcccccgaggacatctgcgcccctgaactgcatgttaatatggcaaaggggagttaaggctgcagatggaatcaaggttggccttgcaatgggtgattattctgcattatccaggtagacccagtgtaatcacaagcatccttgtaagtggcaaagaggcagaggagacagcgccagagaggcagctgcatgagaaggatcaagatgttgctgactttgaagttggaagaagaaggccatgagcctcagtatgtgggcggcttctagaagctggaaggggcaaggagatggatttgacccttcagcctccaggggcagctgtacctgccatcactgattgtagcctggtgaggcctgttttagacttctgacctgtagagctgtaacataatacatttgggttgttttcaaccactaagtttgtggtaatttgttgtagcagctgtagaaaatgaatacatatgaatcctctggcatttgtttgagatttgctctatggcctagtatgtggttgtaaatgttccatctgtgcctgaaaaaatgtatatttctaattcagtagtctctgcttttttttttttattttgtaccccatcaataaaatgattttcagcatgt

SEQ ID NO: 1806 - DNA, 3248 bp, Homo sapiens
agtggcagcagcagccatgcggaagccgggcgtggaggcagcaccgggctcggagctggccagggttccctagcctatggagcacgcagccaccacaggccccaggcctggacctccctctcggcgggtggagaatgttgtgctacgagccaaggactggctgccaggagctcctgggggcaccgcagtgtgggccaccagcttggaagcagaggtcccaccagatctagcgctcaataaggagcagcagctgcagatctccaaggagctggtcgacattcagatcacaacccaccacctacatgagcagcatgaggctgaaatcttccagctgaagagtgaggtgagcagccgtgtgaaccagcctcagtgcatgggggacggggggtgcaggcccaggacacgtgccctgcatgggcatgcacacgcacatggcatctgtgggtctcagcctgcctctgagtgctgcgcgcccctgagcgtgcaccgggtgaatgttcacctaccccaggtggcccgcgggcaggtgcacctgctcatgccagttgtcccacagatccttcggctggagagccgggtactggagctggagctgcgaggagatggcaccagccagggctgtgcagtcccagtggagtctgaccccaggcatccccgggcagcagcccaagagctcagacacaaagcccaggtgcctggacactctgatgaccacagattccaggttaccatgagcatatggagagcctggctgggaaaggccagagggaagcctcagcaggggcctcagtgaaactggggctcacccaccccttagctttccctgccctcccttccattcaggtgcagcccaagaacaccatgaaccccgagaatgagcagcacaggctggggagcggcgtgagtgtgcagccacctagctcaggggagagggcagcaccagagaccccaagcctagggtctcatccagccagccctgtgtgccccacagctgcagggggaagtgaagtgggcgctggagcatcaggaggcccggcagcaggcactggtgacgcgtgtgtgagtggccatctcacctggggccccatcctggagcagagagaacccctgatcgtgggcctgctgagcctcacccccgtgtcttcagggcaaccctgggccggcagctgcagggagcccgagaggaggccagggcagccgggcagcgactggccacacaggctgtggtgaggctctgccctgactgcttggagacctggagggtgggggccccagaagctcagccggggtccactctcagggcacaggtggagggctgcttccaccccaggtgctgtgcagctgccaaggccagctccgtcaggcagaggctgaaaatgcccggctgcagctgcagctcaagaaactgaaggatgagtacgtcctacggctgcaacactgcgcccggcaggcagtggtgagccctgcaggagcaccctgaggcctagggagcccaagcctggcctgggtgtgctggatagcttcagggagaccccagggccccggcactgctcagcctgctggggtggggggatggttggaaaagatggggggtgggccccatgcggacccagcccgccgcctccaggagcacgcagatggtgcaggccaagcgccagccaccacggccctccggacattcctggaggcgactctggaggacatccgggcagcgcaccgcagccgtgagcagcagctggcccgggctgcccgcagctaccacaagaggctggtggatctgagccgcaggcatgaagagctactggttgcctacaggtgggccccgctgggatgggaggtgtcaggcatctgtgggtctctaagcctctgtgcctcaaaggcttggtgtgcagcaggagtggccccagacagacactagcctaccctgacagggcacctgggaacccccaagctatttttgacatagccagcttggacctggaaccattgcccgtgcccctggtcactgacttcagccatcgggaggaccagcacggcgggcctggggcactgctctcatccccaaaaaagagacccggtggagcctcccaggggggaacatcagagccacagtgagtgccctcatgggtgtgggggaggcctgtgggggatgagtagagagcacaacgcctgcaccctggggcccccagttgctccaccaagcccccgccagacagggtctggtcacagcaatgcactcagtggcacatccccaccctggggtccctccgtgggtcccggcgacactgataatcacaggaaagagaagaggggctgctgcaggtggagctggccttgaacacggaggatcagggagagcacacctgagggaggtttccgctgagacctggaggacgcgaggggtgggagcagggcgcctggtgaccgggccagcccttgcctctgggcctccatgttcccagctgtacaatgggcagggctccccaaggaccatttcctggggtttagggcacacccgtgtgggggtggcatccctgttgatgctggagtcactgtctgggctggccttgtggtttagccctcccccagcagccagcagaccccctgggcccgggctgtccctatacacggatggctccaaggcctggggggggcgccacaggagcacggggggggcccatgcctccctcactcactcccaggtgtcccctcccggctctgggaacctgactcagcacggtcacgtctgtccctgtgtcaccatgccagctctcaaaaccactcctcctttcctctcccctcacaggggcctggacgctgcatcctgggcccagatccaccagaagctccgggacttctcccgcagcacccaggtaggaggcaagggctggcccaggcccatcctcacgccatgccccagctcatggcttacatccccatgccaggcagagctggaacgggagcgggcacagctgctggtccgggccacgatggctgaagagcaactttctgagctacaggagtacgtggaccagcacctgggcaggtacaagcacgaaatcctgaggctgaggaagctggcaggtgcaggggacccctggaaagtgggggctgtgcctccagccaagccccagcatccaaggaccggcagccactaggccgtctcccaaggagcagagcagagcagagctcctcagccagcacagaaccctcccacccagccccccataaaacatgagtcaggatag

SEQ ID NO: 1807 - DNA, 5437 bp, Homo sapiens
attatcttctggcctctggagaaagatagagtagctcgctgattggatcctgaggttgaaataactccacatctcactgcgctccgactagagcaacgagaagagtgtctggaatgcttgggagacattttaagcaggacaaatccagccttaggctagactgcacctgtccacagcccagcccaggcccatggaaaagaatagtaaaacctttgtctttaagcacatagaatatgtgtgaaacccagaaggctagaaaagaaagggaagtggaggagaaaaggcactgggactccagctgggagtatgaagactacgggagtgtacggaaaaggaaccttacagtgctggatggactctacagagaaaatgacctggatcccaggtactgggccaagggacagcatcagccctacagaaaaagggattgtggatactgggattttgaacagagtgaaccaagctatatggactgtggggaagcacatgaaagtggaaagggctgtgtgtaccacggaggtcatgatggttataggagtccagaaaatgtagattatgagagtctcagccctgggacgaaggataattcacctacgagaagcccagatgtgacctcgaaagctggtggatacggggaggcaaatggctactcagactgtaagaatctgaattataatcctgaggactctaaaaaagctgaacagttgactgactgtaggggtttggatgattcttcagcgaatttaggtcaacctcagttgtggtatatagaccatgagaatgttaaccataatcttgaggattgttgggcaactaatttttattgtagagaacacagcaatttatatcatgttcctgggagttatcctgatggtcagcctgtgagcttttcagattcgaatggtgtcaatgaagataaggaatttatcaaataccatgaaggggacaggaatgttcatcaaaatgacaacatgtatcccaaagcaaagactcatattatggatcagggtgattttgatacagaaaataaaggctatgatgctttatttgcaaactgtgcatataaatctcgtaattccagagggacagattctctccatcaaatggagaatttggagtataatggcactgacataccaagaacaaaggcacatgggggcagcaggatccttctggatggtctgcagactcagtgtaccagggagaacaaggaggacatcatttggggattcctcagagctcgtcattagagaagaacatctggcatttagaggaagagaaaaaattaaatggcccagagacttggagaaggaatagttgcctccgccgcacagcacccagcaccctgaggcgctcagagttcgtgcaaaacaggaagaaaacccaagaaatgacgctcctctcctcccagtcttcatcactggtggccccttctgggtctgtgtctgccgaaaatccagagcagaggatgctggagaagagagccaaggtcatagaagaacttcttcagacagaaagagactacattcgggatctggaaatgtgtattgagcggatcatggtacccatgcagcaggcacaggtaccaaacattgattttgagggactttttggaaatatgcagatggtgattaaggtctcgaagcaattattggctgctctggaaatcagcgatgctgtaggacctgtgtttcttggtcaccgggatgagcttgagggaacatacaagatttactgccagaatcatgatgaggccattgcgctgcttgaaatctacgagaaggatgagaagatccagaagcatcttcaggactccttggcagatctgaagagcctatacaacgaatggggatgcacaaattatattaacctgggctccttcctcatcaaaccagtacagagagtaatgcgttacccgctgttgctaatggagttgctgaattccaccccagaatcccacccagataaagtgcctttaaccaatgcagtccttgcggtcaaggaaatcaatgttaacattaatgaatataaacggcgaaaggacctggtcctcaagtaccgtaagggtgatgaagatagccttatggagaaaatttccaaactgaacatccactccatcatcaagaaatccgaccgagttagcagtcacctgaagcatctcactggctttgctcctcagataaaagatgaagtaattgaagaaacagaaaaaaacttccgaatgcaagaaagattgattaagtcttttatccgagacctgtctctctacctccagcacatccgggagtccgcatgtgtgaaagtggtggctgctgtgagcatgtgggatgtgtgcatggagagaggacaccgggacctggagcagtttgagagggtgcatcgctacatcagtgaccagctcttcacaaactttaaggagaggacagagcggcttgtcatctcccccttaaatcagttactgagcatgtttacagggccccataagctggtacagaaacgctttgacaagctcctggacttctataactgtacagaacgggcagaaaagctaaaggacaagaagaccctggaggagctgcagtcggcccggaacaactatgaggccctgaatgcacagctgctggatgagctgcccaagttccaccagtacgcccagggcctcttcaccaactgtgtccacggctatgctgaagcccactgtgactttgtgcaccaggctctggagcaattaaagccactgctttcgttactcaaagtggctggcagagagggaaaccttattgccatcttccacgaagagcacagcagagttctgcagcaactccaggtttttaccttcttcccggagtctcttccagctaccaagaagccgtttgagaggaaaaccattgaccgccagtctgctcgaaagccactcctgggcctgccaagttacatgctacagtcagaagaactccgggcctccctcctggccaggtatccccctgaaaaactcttccaggcagaacggaacttcaatgctgctcaagacttggatgtctcacttttggaaggtgacctggtgggtgtgattaagaaaaaagaccccatgggcagccagaaccgctggctgattgacaatggagtcaccaaaggcttcgtgtacagctctttcctaaagccctacaatcctcgccgcagccactccgatgcctccgtgggtagccactcctccacagagtctgagcacggcagctcctcccccaggttcccacgccagaacagcggcagcaccctgaccttcaaccccagcagcatggctgtatcctttacctcggggtcttgccagaagcagcctcaagatgcatctcctccgccaaaagaatgggaccaaggaactctcagtgcatccctaaatccgagtaattcagagagtagtccttccagatgcccttcagacccagactctacctcccagccaaggtcaggggactctgcagatgtagctagagatgtaaagcaacccactgccacgccgaggagctaccggaacttcaggcatccagaaatagttggctactccgtaccaggacgaaatgggcaaagtcaagacctcgtcaaaggatgtgcaagaacagcccaggctccggaagacagaagtacagagccagatggcagtgaggcagaaggcaaccaggtctattttgctgtctacaccttcaaggcacgaaacccaaatgagctgagcgtgtcagccaatcagaaactcaagatcctcgagtttaaagatgttacaggaaatacagagtggtggttagctgaggttaacgggaagaagggctacgttccctccaattatatccgcaaaaccgagtacacctgagcccacgttgcctgccacccagccttgctgcctttgctttcagtccgccgagggttctggcggcccaccgagagggcgcctgctcctgagacacaggccctgtctgcgttgcttaaccatggcatggtggagcacaccacagatcttgttctcctcgattgggttgtaaaccttgatgctcactagaatctctagaatttgaaatggaccctggggctttgcaaatgacttagtgactatgagaagagagacaagtcttggagctggcttttggaaaggagaaacttgcagtcagaagcccagtgtcctatgtatgcaggaagctgtgctctagcaatagacagtgttggtaatggttgtgctgtacggcgtttggggtggccccatgttccatgctcagctgaccggatgccaactcagatgaaaagaattcatggctctgggcaccccgtgaggcagtgcttgcacatggctgggagtttgtcgggattgaaccaaacctagtgcttcaaagctcctgggacacctccagtgtccagcacacattctcatacatactgcccctaatttctaaagtccctaaagcactacattctgtaaccttgtttcttttactccattcccagattagttatgcaaaattcaactgcgttctacttttagaagtgtttagggtctttattttctgttgacccttcatctgaaagattctcttcccttgttaggtacaatcactgcccccccccttttttttttgagatggggtcttgctatgttgcccaggctggtcttaaacgcctgggctcaagcaaccctcccgcctccctgctgagattacaggtgtaagccaccataccgcaacctcaatgacacctttctgatggtctttacacagtctgtgatgtctggtggcccccctgccctggactcaataattgatagattttcctagagtaacagtatgagagctccagccattccattaaaagtattagttctgctttgagctgaaaccagttgagcctaatggaagactggatgtctttcttcttcatccaagcaccctaatgactgtttagttacatccatagatgcagacaacataacacctgtgacttacttgaattgggataagccattccagaagtagcttatcctagacttggaaataagatttttttcaccactaacttccatgcttcagagatgacattcaaagccagattcccaagtgcctgatcatacctcccagtctcaggaagatatttgcttaccccttagaccaagaatcttaagatcttccccagctatgaagcctatcttggaatgggaaaccatgaaatttgtcttttaaaagaaagggaagaaatagccttacagcccctgttccctccaagtgcacatttagccttaaaatcctgggagtcgggagacaccgtggagtccttacatccacagtgtctgctggtcgtggtcagaaggcagtaatgcaagagtccttttgtgaagagtgtttctatgtagagatgtttatatttaagtagttcttttataaataaaagcatttctaatggc

SEQ ID NO: 1808 - DNA, 3300 bp, Homo sapiens
cagacgtgtgcctcagtatagtgatccaaaaagaccttttgatttgatctgctccaaagaaatgaatcatatgtttcacataaaaaggcatagtatttctgctggtacagacgcttacaagaaaacaaaaccaatacagaacttgttccagaagccattatatgatcattgcagtgctaataactataaaagcatggaacctgaattagaaaatgtgaggtcttctccaccacgtggtgacagaacatcaaaagtatctctaaaagaagaattacagcaagatatgcaaaggtttaaaaatgagataggcatgttaaaagtagagttccaggctttggagaaagaaaaagtccaacttcaaaaagaggttgaagaagaaaggaaaaaacacagaaataatgaaatggaagtatcagcaaacatacatgatggtgctactgatgatgctgaagatgatgatgatgatgatggattaattcaaaaaagaaagagtggagaaactgatcatcagcaatttcccaggaaggaaaataaagagtatgctagtagtggtcctgccttgcaaatgaaggaagtaaagagcactgaaaaagaaaaacggacctcgaaagaatctgtgaattcaccagtgtttgggaaggccagtttactaactggtggcctgctacaagtggatgatgacagcagtttaagtgaaatagatgaggatgaaggaaggcctactaagaaaacatctaatgaaaagaacaaggtcaaaaaccaaatacagtctatggatgatgttgatgacttaactcagtcatctgaaacagcctcagaggattgtgagctaccccactctagttacaagaattttatgttgctcattgaacaacttggaatggagtgtaaagattctgttagcctattgaaaatccaggatgcagctctttcatgtgaaagattattagaacttaaaaaaaatcactgtgaactacttacagtaaaaattaaaaaaatggaagacaaggttaatgtactacaaagggagctatctgaaacaaaagaaataaaatcacagttagagcatcaaaaagttgaatgggaacgagaactgtgctctttgagatttagcttaaaccaagaagaagagaagagaagaaatgctgatacgttgtatgaaaaaattagggaacagttaagaagaaaagaagagcaatataggaaagaagttgaagtgaaacaacagcttgaactgagtctccaaacactggagatggaattgaggactgtaaaaagtaatttgaatcaggtcgttcaagagcgaaatgacgctcagaggcaactttctcgagaacagaatgccagaatgttacaagatggaattctgaccaatcacctttccaaacaaaaggagattgaaatggctcaaaagaaaatgaattctgagaattctcatagtcatgaagaagaaaaagacctatcgcataaaaatagcatgttgcaggaagaaattgctatgctaagactagaaatagacacaataaaaaatcaaaaccaggaaaaagaaaagaaatgttttgaggaccttaaaattgtaaaagaaaagaatgaagaccttcagaagactataaaacagaatgaggaaacattaacacaaacaatatcccagtataatggacggcttagtgttctgacagctgagaatgcaatgctaaattctaaactggagaatgaaaagcaaagcaaggaaagactggaagcagaagttgaatcataccattctagattggctgctgctatacatgatcgtgatcaaagtgagacatcaaaaagagaactagaacttgctttccagagagcaagagatgaatgttctcgtttacaggacaaaatgaattttgatgtgtctaacctaaaagataacaatgagattctttctcaacaactatttaaaactgaaagtaaactcaatagcctagaaattgagttccatcacacgagagatgccctcagagaaaagactttgggtttagaacgggtacaaaaggacctaagccaaacacagtgtcaaatgaaggaaatggaacaaaagtatcaaaatgaacaagttaaagtgaataaatacattggaaagcaggagtctgtagaggagagattgtctcaactacaaagtgagaatatgttgcttcgacaacaactggatgatgcccacaacaaggctgacaataaagagaagacagtgattaatatccaagaccagtttcatgctattgtgcaaaaacttcaagctgagagtgaaaagcaaagtcttctgctagaagaaagaaataaggagttaatcagtgaatgtaatcacttaaaagaaagacagtatcaatatgaaaatgaaaaggcagaaagagaagttgttgtgagacaacttcaacaagaactagctgataccctaaaaaaacaatctatgtcagaggcttcactggaggttacgtcacgttatcgtattaatttagaagatgagacacaggatttaaagaagaaattaggtcaaatcagaaatcaattgcaagaagcacaggatcgacatacagaagctgtcagatgtgctgagaagatgcaagatcacaagcaaaagcttgaaaaagataatgccaagttaaaagttacaatcaaaaagcaaatggacaaaattgaggagcttcagaaaaacctgttaaatgcaaatttgtctgaagatgaaaaggaacaattaaagaaacttatggaattaaaacagtcactggaatgtaatttgggtcaagaaatgaagaaaaatgttgaattagaaagagagataactggatttaagaacctcttaaaaatgacaagaaagaagttaaatgaatatgaaaatggagaatttagtttccatggagatttaaaaactagtcaatttgaaatggatattcagattaataagctaaaacataagattgatgatcttacagcagaactggagactgcaggttcaaaatgtctacatctggatacaaagaaccaaattcttcaagaggagttgttatctatgaaaacagtacaaaagaaatgtgaaaaactacagaagaataaaaagaagttggaacaagaagtgatcaacctgagaagtcatatagaaaggaatatggtagaacttggtcaagtcaaacagtataaacaggagattgaagaaagagcaagacaggaaatagcagaaaaattaaaagaagtcaatctatttttacaggcacaagcagcatctcaagaaaacttagagcagttaagagagaaacaagatttgcctgattc

SEQ ID NO: 1809 - DNA, 3183 bp, Homo sapiens
ttatactttctgagagtcctggacctcctgtgcgagaacatgaaacatctgtggttcttcttcctcctggtggcagctcccagatgggtcctgtcccaggtgcagctacaggggtcgggcccaagactagtgaagccttcagagaccgtgtccctcacctgcggtgtctctgatgactccatcagtcgcggctattattattggagttggattcgtcagcccgccgggaagggactggagtggattgggcgtgttgcaattactgggaccaccttctataatccttctttcaagggccgagtcaccatttctaaagccagttttagaaaagaaatttccctggagttgaactctctgaccgccgcagacacggccacatatttttgtgcgagagagatgggaccccgacagtggggtttctcgtcgaatgatgcatttgaaatctgggaccacgggattttggtcatcgtctctccagcttccaccaagggcccatcggtcttccccctggcgccctgctccaggagcacctctgggggcacagcggccctgggctgcctggtcaaggactacttccccgaaccggtgacggtgtcgtggaactcaggcgccctgaccagcggcgtgcacaccttcccggctgtcctacagtcctcaggactctactccctcagcagcgtggtgaccgtgccctccagcagcttgggcacccagacctacacctgcaacgtgaatcacaagcccagcaacaccaaggtggacaagagagttgagctcaaaaccccacttggtgacacaactcacacatgcccacggtgcccagagcccaaatcttgtgacacacctcccccgtgcccacggtgcccagagcccaaatcttgtgacacacctcccccatgcccacggtgcccagcacctgaactcctgggaggaccgtcagtcttcctcttccccccaaaacccaaggatacccttatgatttcccggacccctgaggtcacgtgcgtggtggtggacgtgagccacgaagaccccgaggtccagttcaagtggtacgtggacggcgtggaggtgcataatgccaagacaaagccgcgggaggagcagttcaacagcacgttccgtgtggtcagcgtcctcaccgtcctgcaccaggactggctgaacggcaaggagtacaagtgcaaggtctccaacaaagccctcccagcccccatcgagaaaaccatctccaaaaccaaaggacagccccgagaaccacaggtgtacaccctgcccccatcccgggaggagatgaccaagaaccaggtcagcctgacctgcctggtcaaaggcttctaccccagcgacatcgccgtggagtgggagagcagcgggcagccggagaacaactacaacaccacgcctcccatgctggactccgacggctccttcttcctctacagcaagctcaccgtggacaagagcaggtggcagcaggggaacatcttctcatgctccgtgatgcatgaggctctgcacaaccgcttcacgcagaagagcctctccctgtctccggagctgcaactggaggagagctgtgcggaggcgcaggacggggagctggacgggctgtggacgaccatcaccatcttcatcacactcttcctgttaagcgtgtgctacagtgccaccgtcaccttcttcaaggtgaagtggatcttctcctcggtggtggacctgaagcagaccatcatccccgactataggaacatgattgggcagggggcctagggccaccctctgcggggtgtccagggccacccagatcccacacacgagccgtgggccatgctcagccaccacccaggccacacctgcccccgacctcaccgccctcaaccccatggctctctgtctttgcagtcgccctctgagccctgacacgccccccttccagaccctgtgcatagcaggtctaccccagacctccgctgcttggtgcatgcagggagctgggaaccaggtgtcccctcagcaggatgtccctgccctccagaccgccagatgctcacacaaaaggaggcagtgaccagcatccgaggcccccacccaggcaggagctggccctggagccaaccccgtccacgccagcctcctgaacacaggcgtggtttccagatggtgagtgggagcatcagccgccaaggtagggaagccacagcaccatcaggccctgttggggaggcttccgagagctgcgaaggctcactcagacggccttcctcccagcccgcagccagccagcctccattccgggcactcccgtgaactcctgacatgaggaatgaggttgttctgatttcaagcaaagaacgctgctctctggctcctgggaacagtctcggtgccagcaccaccccttggctgcctgcctacactgctggattctcgggtggaactcgacccgcagggacagccagccccagagtccgcactggggagagaaggggccaggcccaggacactgccacctcccacccactccagtccaccgagatcactcagagaagagcctgggccatgtggccactgcaggagccccacagtgcaagggtgaggatagcccaaggaagggctgggcatctgcccagacaggcctcccagagaaggctggtgaccaggtcccaggcgggcaagactcagccttggtggggcctgaggacagaggaggcccaggagcatcggggagagaggtggagggacaccgggagagccaggagcgtggacacagccagaactcatcacagaggctggcgtccagccccgggtcacgtgcagcaggaacaagcagccactctgggggcaccaggtggagaggcaagacgccaaagagggtgcccgtgttcttgcgaaagcggggctgctggccacgagtgctggacagaggcccccacgctctgctgcccccatcacgccgttccgtgactgtcacgcagaatccgcagacaggaagggaggctcgagcgggactgcggccagcgcctgcctcagctgtcagggaggactcccgggctcactcgaaggaggtgccaccatttcagctttggtagcttttcttcttcttttaaattttctaaagctcattaattgtctttgatgtttcttttgtgatgacaataaaatatcctttttaagtcttgt

SEQ ID NO: 1810 - DNA, 3626 bp, Homo sapiens
atactttctgggagtcctggacctcctgtgcaagaacatgagacacctgtggttcttcctcctgctggtggcagctcccagatgggtcctgtcccaggtgcagctgcaggagtcgggcccagcactggtgatgccttcacagaccctgtccctcacctgcagtgtctctgctggctccatcagcagtggtgattactactggacctggatccgccagctcccagaggagggcctgaaatggcttgggtacatctcttccagtgggaccacctactacaacccgtccctcaagagtcggcttacactgtcaatggagacgtccaccaaccgtttctccctgaggttgacctctatgacggccgcggacacggccgtctattactgtgcgagaggactgcgctccgggtacttcgatctctggggccgtggcaacgtagtcactgtctcctcgacacccaccaaggctccggatgtgttccccatcatatcagggtgcagacacccaaaggataacagccctgtggtcctggcatgcttgataactgggtaccacccaacgtccgtgactgtcacctggtacatggggacacagagccagccccagagaaccttccctgagatacaaagacgggacagctactacatgacaagcagccagctctccacccccctccagcagtggcgccaaggcgagtacaaatgcgtggtccagcacaccgccagcaagagtaagaaggagatcttccgctggccagagtctccaaaggcacaggcctcctcagtgcccactgcacaaccccaagcagagggcagcctcgccaaggcaaccacagccccagccaccacccgtaacacaggaagaggaggagaagagaagaagaaggagaaggagaaagaggaacaagaagagagagagacaaagacaccagagtgtccgagccacacccagcctcttggcgtctacctgctaacccctgcagtgcaggacctgtggctccgggacaaagccaccttcacctgcttcgtggtgggcagtgacctgaaggatgctcacctgacctgggaggtggctgggaaggtccccacagggggcgtggaggaagggctgctggagcggcacagcaacggctcccagagccagcacagccgtctgaccctgcccaggtccttgtggaacgcggggacctccgtcacctgcacactgaaccatcccagcctcccaccccagaggttgatggcgctgagagaacccgctgcgcaggcacccgtcaagctttccctgaacctgctggcctcgtctgaccctcccgaggcggcctcgtggctcctgtgtgaggtgtctggcttctcgccccccaacatcctcctgatgtggctggaggaccagcgtgaggtgaacacttctgggtttgcccccgcacgcccccctccacagcccaggagcaccacgttctgggcctggagtgtgctgcgtgtcccagccccgcccagccctcagccagccacctacacgtgtgtggtcagccacgaggactcccggactctgctcaacgccagccggagcctagaagtcagctgtgagtcacccccaggcccagggttgggacggggactctgaggggggccataaggagctggaatccatactaggcaggggtgggcactgggcaggggcggggctaggctgtcctgggcacacaggccccttctcggtgtccggcaggagcacagacttcccagtactcctgggccatggatgtcccagtgtccatccttgctgtccacaccacgtgctggcccaggctggctggcacagtgtaagaggtggatacaacccctcgccgtgccctgaggagtggcggtttcctcccaagacattccccacggctgggtgctgggcacaggccttccctggtgtgaccgtgaatgtggtcaccctgaacagctgccctctctggggacatctgactgtccaagaccacagtcagcacctctgggagccagaggggtctccagagacccccagatgtcaggcttgggctcagtgcccagcgaaaggtcagccccacacatgcccataatgggcgcccacccagagtgacagcccccagcctcctgccaggcccacccttttccgcccccttgaggcatggcacacagaccagtgcgcccactgcccgagcatggccccagtgggatgtggtggccacgaggggctgtacacacagcaggaggctgtccgccctgctcagggcctgctgcctatgccccagctgtccagccaagggaggcatggaagggcccctggtgtaagctggagccaggcacccaggcccccggccaccctgcagagccaaggaaaggaagacacccaagtcaacaaggggcagggctgagggctgtcccaggctcttttggcccgaggggctgccagcagccctgacccggcatgggccttcccctgaagcgaccctgtgaggtggcctcacagagaaccccctctgaggacagtgtctgaccctgcctgcctcacacagatgggccccacagcagtgggcaacctggggggcagcagcccaacctgaccctgcagggactgccccctgcagcagcagctgcttctcagtcccccaacctccctgtccccgccagagggtcttccccgaagctgcagccccaacccatggctgcccacctggaaccgggactccctgtccactgccccctccccttcggggccccatctgtgctggggcccaggttcggcctacagattcccatcattgccatggcctcctgaccttgcctatccacccccaaccaccggctccatgctgacccccccccaggctcccacgcccagctggccggccatccccaggcacagacagtctgggatctcacaggttagcctggaccatccacctggccagacctgggagaggctggaagctgccctgccaccatgctccagggccccaggttgcagtactatggggtgagggtgtgtgtgcacacccgtgtgtacctaggatatccgagtgtacccttgtgcccccaagcacaagtctccctcccaggcagtgaggcccagatggtgcagtggttagagctgaggcttatcccacagagaaccctggcgccttggtcaaggaagcccctatgcctttcttgcctcgatttcccctcttgtctgctgagccagcaggggccacgtcctgggctgctgtgaggaggaagtgagttggtgctaggaggggctcctgtgtgtgcatgggcgggaggggtgcaggtatctgagcaccccggtctccacttgagagagcagggcaggagctccctgacccacccagactacacacgctgtgtccacgtgtctcacattatctgtggcagaggatccggcttctttctcaatttccagttcttcacaaagcaatgcctttgtaaaatgcaataagaaatactagaaaaatgatatgaacagaaagacacgccgattttttgttattagatgtaacagaccatggccccatgaaatgatcccggaccagatccgtccacacccgccactcagcagctctggccgagctcacagtacaaccacaataaactcttgttgaatg

SEQ ID NO: 1811 - DNA, 4760 bp, Homo sapiens
aaggaaaaggcatgtaatgaacttgattctacgaaacagaagatagactctcacactaaaaatataaaggaacttcaggataaactggctgatgttaataaagagttaagtcatttacacactaaatgtgcagaccgagaggctttaataagcactttaaaagtggaactacaaaatgtgctgcactgttgggagaaagaaaaggctcaggcagcccagtctgaaagtgaactgcagaagctttcccaggctttccataaggatgcagaggagaagctaaccttccttcacaccttatatcagcacttggtagcaggctgtgtgctcataaaacaaccagaaggcatgctggataaattctcttggtctgagctttgtgcagtcttacaggagaatgttgatgccctgattgcagacctcaacagggctaatgagaagataaggcatctagagtatatctgtaaaaacaagtctgacacgatgagagagcttcagcagactcaggaagacacctttaccaaagtggcagaacagatcaaagcccaagagagctgctggcacagacaaaagaaggaactagagctgcagtattctgaactcttcctggaggtgcagaagagggcacagaaatttcaagaaattgctgaaaaaaacatggaaaaattgaaccatattgagaagtcacatgaacagttggttcttgaaaattcgcacttcaaaaaactgttatcacagactcaaagggaacagatgtccttgctggcagcctgtgcattaatggctggtgccttatatcccctctatagccgatcatgcgccttgtctacacagagagattttctccaggagcaggtcaacacctttgagttgttcaaactggaaattagaactctagcccaggctttgtcaactgtagaggaaaagaagcaagaggaagccaagatgaaaaagaaaacattcaaaggattgatacgtatatttcggaaaggtgttattgctgttttggcagcaaacagactcaagattttgggccaatcatgtgcctctctttttacctggatggagagtttcaaagaaggcataggcatgttagtgtgcacaggagagccccaagacaagcataaatttccaaaacatcaaaaggagcagttgcgttgtttacaagcgctcagttggctcaccagttctgaccttcttgctgcaataatcagttctatggctgaattacaagacgtcattggtaaagcagatccaaattccagaatttgtggacatttactcataggtgcagccaagaattcttttgcaaaactcatggataaaattagtctggtaatggaatgtatacctctgcacagtagcaggagtattacatatgtagaaaaagattccctggttcagaggctggcccatggacttcataaagtaaacacactggccctgaaatatggtttgcgtggccatgtgcccattacgaaaagcacagcatcgttgcagaagcaaatacttggatttacacaaagactgcatgctgcagaagtggagcgccgctcactacgcttagaggtcacagaattcaaacgaagtgtgaatgaaatgaaaaaggagcttgacaaagcccagggtctgcaaatgcaattaaatgaatttaagcagtctaaattgatcacccatgagaagtttgaaagtgcatgtgaagaactaaataatgcattacttcgggaagagcaggcacaaatgctattgaatgaacaggcacaacaactacaggaattgaattatagacttgaattgcactccagtgaggaagctgacaaaaaccaaactcttggagaagctgttaagagtctctccgaggcaaagatggagctgagaagaaaagatcaatctctgcgtcagctcaatagacatcttacccagctggagcaggacaagcgtcgactggaggagaacatccatgatgcagagagtgccctccgcatggcagccaaagacaaagaatgtgttgctaatcacatgagagcagtagaaaatacgcttcacaaggtcagagatcagatctcgctgtcatggtctgcggcaagtaggaatgacttcaccctacagctacccaaactgcacctggagacctttgcaatggaggggctcaagggcgggccagaggtggtagcatgccaggctatgattaaaagtttcatggatgtctaccagcttgcaagcactagaatcatgacattagagaaggaaatgacatctcatcgaagtcacattgcagccttgaaatcagaacttcacacagcttgtttacgtgaaaatgcaagtttacaatcaataggatcacgagaccattcaaatctctccattccttcaagagctcctcttcctgctgacacaactggtattggggatttcttaccattgaaagctgaacttgatactacttacactttcttaaaggagacatttataaatactgtgccccatgctctgacatcatctcactcctctccagtgactatgtctgctaatgccaacagaccaactcagattggattatgacttcatgaaattaaaaaatggaggaagagttaacagtacaattaaaattgttttgaatgggaattttcttatcagttgacttttgtttcagcagaagtggcagtggatttaaaaaatttgtgcgctatcttgatgtattctggtagctctgtctccttgaataaggaaatagccaacttttttctctccaagttttatttgttatcacagttgctcatttttatgtaacatatttttaaatgttaaggaatgacacattttgggtaatttccctcagacttaaaaaaatcaataagccattttagtctctatctatcaaagttgtttcatacttgtctattttaaagcaggactgcaatgctttaataggattgagagagctatttgaaatgtatgccaatgattcctgtcatttcatggcagcccggccatggttcactgagccccctcttctctcttgtcagctcaactgaagacaagcatttagttgcaaactttaagcaggttgtgcaaaacagaaatgatgtgactgcttctcctcctgcacaataatgtcactcctggtcaatgtgagaaggtcaggttgctccttgtaaagctacatgataccacttgcccatttgaacaagttaagttaactgctgaatctggtccctgaaggcactgaaaactcattcttttagcaagtctgcatttgataagaaagtagagcaattgtgctggaggatttctgtggtatgtttaggcacttcataaggacagttcccacactaggatagcaggtaatatatttagtataagctgaaaaacttcaaggtaatggctgttttgaccttcaaaatagactccttttttgtttttgttgttggtaggacccaagagtgacacccatctttgatgctgacagaatttaaaacaaggccattgccctgcattttctgccttgtagcacacaaaagtaaaattgtatgtcaggccgagatgtcggggagctgacaagatgccccagtgacatttcagctagaaagagcaagtgtcttgcaaccaagtggtcaaatatcaaataataggtcaagcaggaaggagctgagttctaaccacaaagaggtttctggtaacttacttgacaagcttttgggtgctttgtggcttgacaaagtgatgttctgttgggtatcgctagacagactgttctttatcgccttcagaagatcagacattgacattgattaaactctttaacccttaaaggttaaatccttgcagtttgcatcatggtaagtgaagaacaaaagaatatttgtagtaagaatttgtttttgtatttatcatttaactccctagtgctattaacttctgatgtgaactatagcttttgacaaagagtcttgatacataatctattttttatattatttttcattatggaatctttcattatggatacattagagtataacagtatgtattacagaagtttttttgtcttatctttacagtgacatttgattcaaatatacccaactgctgagaatttttttattggccttggtaaataagattttatactaactatttattagtagccaaattagccaagtgatttatgccatctgagggaacacagcagtattactgtcgtactgtgtaacacatcctattcttgtaatactgaaccactataattagctttatataaaactttagaaagcttatatggagtaaaattatatctttaaccaaatttctcttaattctttccttggaattatttttaatatgacctgtgtaacatgacctgtatgaaattcaacttgcaaatttattataacatggaagtgctatttattgtttttatacagatcatataatttctgcacatttcagaacacctttctctgctgttccaaacaatgattaggatattgttcatacagaaattgatagacaattttttagttcatgtgatatcactgagcttacaattctcactagagaagaacaaggttactatatgtaacctctatgtctaagtgtttgtgtgtgtgtatgcttgtgttgaatctgttttcagatcctactgattttagaggaacaagcagctttgtaaaatgtgccttggaaaggccttggtcttcttgccttgattttataatctgttaatgggataactccaaaaataaatgtgtatgtgtctccat

SEQ ID NO: 1812 - DNA, 5266 bp, Homo sapiens
agcctcggctcgtgggtgccggaagtggaggcggttggtggggttggcggggctcagcgacgctgcgcgggtggcggtttgcgaactgcgggtggactgtgtagtgaccggcgtcccgctgtctcgccccgtggcgggtgagcgagggtgcgtggtgcgcggcggcggcggaacgaacgcggtgcgggcggggcgcccgccgcagggcccatggcctcctgcgcgagcatcgacatcgaggacgccacgcagcacctgcgggacatcctcaagctggaccggcccgcgggcggtagaagagcctcatgctcatccttggtcctgcctacatcagtgtttatggaacgagagatgaacacagggccctcctcctcatggacatgctttgctcagccccagtgcagagagcccacggccatccagtgcctacaatggggacctcaatggacttctggtcccagacccgctctgctcaggtgatagtacctcggcaaacaagactggtcttcggaccatgccacccattaacctgcaagagaagcaggtcatctgtctctcaggagatgatagctccacctgcattgggattttggccaaggaggtggagattgtggctagcagtgactctagcatttcaagcaaggcccggggaagcaacaaggtgaaaattcagcctgtcgccaagtatgactgggaacagaagtactactatggcaacctgattgctgtgtctaactccttcttggcctatgccattcgggctgccaacaatggctctgccatggtgcgggtgatcagcgtcagcacttcggagcggaccttgctcaagggcttacaggcagtgtggctgatctggctttcgcgcacctcaactctccacagctggcctgcctggatgaggcaggcaacctgttcgtgtggcgcttggctctggttaatggcaaaattcaagaagagatcttggtccatattcggcagccagagggcacgccactgaaccactttcgcaggatcatctggtgccccttcatccctgaggagagcgaagactgctgtgaggagagcagcccaacagtggccctgctgcatgaagaccgggtgagggggctgacatggcgaagaggcgccagagaagccatagtgtggggttgggctgcacactcacctccctgtgccttccaggctgaggtgtgggacctggacatgctccgctccagccacagtacctggcctgtggatgttagccagatcaagcagggcttcattgtggtaaaaggtcatagcacggtaagcctgtgactgcctgcctcccctgccctccccacttcctcatatccatcttctgttccctatatccacagctgcccgggcagctttactagcatcctgcccgtggggactctgagctcaaattggccctcacctgtgcagctttctccttatctagcagcaccctgcaggtctggccttctctaggaaccctgttcatttagtcagtcacacaagcatgccagtcccaccgtgagtcagcccagctcattgccatcctcacttgggaggggcttgttctcacctctagtcagcaaagctttttgggttctttctagtgcctcagtgaaggagccctctctcctgatgggactgtgctggctactgcgagccacgatggctatgtcaagttctggcagatctacattgaggggcaagatgagccaaggtgtctgcacgagtggaaacctcatgatgggcggcccctctcctgcctcctgttctgtgacaaccataagaaacaagaccctgatgtccctttctggaggttccttattactggtgctgaccagaaccgagagttaaagatgtggtgtacagtatcctggacctgcctgcagactattcgcttctccccagatatcttcagctcagtgagtgtgccccctagcctcaaggtttgcttggacctctcagcagaatacctgattctcagcgatgtgcaacggaaggtcctctatgtgatggagctgctgcaaaaccaggaggagggccacgcctgcttcagctccatctcggagttcctgctcacccaccctgtgctgagctttggtatccaggttgtgagtcgctgccggctacggcacactgaggtgctgcctgccgaagaggaaaatgacagcctgggtgctgatggtacccatggagccggtgccatggagtctgcggccggtgtgctcatcaagctcttttgtgtgcatactaaggcactgcaagatgtgcagatccgcttccagccacagctgaaccctgatgtggtggccccactgcccacccacactgcccacgaggacttcacatttggagagtctcggcccgaactgggctctgagggcctggggtcagccgctcacggctcccagcctgacctccgacgaatcgtggagctgcctgcacctgccgacttcctcagtctgagcagtgagaccaagcccaagttgatgacacctgacgccttcatgacacctagcgcctccttgcagcagatcactgcctctcccagcagcagcagcagcggtagcagcagcagcagcagcagtagcagcagctcccttacagctgtgtctgccatgagcagcacctcagctgtggacccctccttgaccaggccacctgaggagctgaccttgagccccaagctgcagctggatggcagcctgacaatgagcagcagtggcagccttcaggcaagcccgcgtggcctcctgcctggcctgctcccagccccagctgacaaactgactcccaaggggccgggccaggtgcctactgccacctctgcactgtccctggagctgcaggaagtggagcccctggggctaccccaagcctcccctagccgcactcgttcccctgatgtcatctcctcagcttccactgccctgtcccaggacatccctgagattgcatctgaggccctgtcccgtggttttggctcctctgcaccagagggccttgagccagacagtatggcttcagccgcctcggcactgcacctgctgtccccacggccccggccagggcccgagctcggcccccagctcgggcttgatggaggccctggggatggagatcggcataataccccctccctcctggaggcagccttgacccaggaggcctcgactcctgacagtcaggtttggcccacagcacctgacattactcgtgagacctgcagcaccctggcagaaagccccaggaatggccttcaggaaaagcacaagagcctggccttccaccgaccaccatatcacctgctgcagcaacgtgacagccaggatgccagtgctgagcaaagtgaccatgatgatgaggtggccagccttgcctctgcttcaggaggctttggcaccaaagttcctgctccacggctgcctgccaaggactggaagaccaagggatcccctcgaacctcacccaagctcaagaggaaaagcaagaaggatgatggggatgcagccatgggatcccggctcacagagcaccaggtggcagagccccctgaggactggccagcactaatttggcaacagcagagagagctggcagagctgcggcacagccaggaagagctgctgcagcgtctgtgtacccaactcgaaggcctgcagagcacagtcacaggccacgtagaacgtgcccttgagactcggcacgagcaggaacagcggcggctggagcgagcactggctgaggggcagcagcggggagggcagctgcaggagcagctgacacaacagttgtcccaagcactgtcgtcagctgtagctgggcggctagagcgcagcatacgggatgagatcaagaagacagtccctccatgtgtctcaaggagtctggagcctatggcaggccaactgagcaactcagtggctaccaagctcacagctgtggagggcagcatgaaagagaacatctccaagctgctcaagtccaagaacttgactgatgccatcgcccgagcagctgcagacacattacaagggccgatgcaggctgcctaccgggaagccttccagagtgtggtgctgccggcctttgagaagagctgccaggccatgttccagcaaatcaatgatagcttccggctggggacacaggaatacttgcagcagctagaaagccacatgaagagccggaaggcacgggaacaggaggccagggagcctgtgctagcccagctgcggggcctggtcagcacactgcagagtgccactgagcagatggcagccaccgtggccggcagtgttcgtgctgaggtgcagcaccagctgcatgtggctgtgggcagcctgcaggagtccattttagcacaggtacagcgcatcgttaagggtgaggtgagtgtggcgctcaaggagcagcaggccgccgtcacctccagcatcatgcaggccatgcgctcagctgctggcacacctgtcccctctgcccaccttgactgccaggcccagcaagcccatatcctgcagctgctgcagcagggccacctcaatcaggccttccagcaggcgctgacagctgctgacctgaacctggtgctgtatgtgtgtgaaactgtggacccagcccaggtttttgggcagccaccctgcccgctctcccagcctgtgctcctttccctcatccagcagctggcatctgaccttggcactcgaactgacctcaagctcagctacctggaagaggccgtgatgcacctggaccacagtgaccccatcactcgggaccacatgggctccgttatggcccaggtgcgccaaaagctttttcagttcctgcaggctgagccacacaactcacttggcaaagcagctcggcgtctcagcctcatgctgcatggcctcgtgacccccagcctcccttagctgctaagcctgccttgcccaggggtgggatggcactgaaggccagcagacaggcctaggctggggcagggtcacggctggcctttacctgctcaggcccccatctctggggtgtttgggggtcagggagcagggagcactggccgtggtctacagcgtgtggtagtcagaaggtttagctgggcccagggcaggtattgcgcctgcttgggttctgccatgcctggagcatgaccctgagatcgtgacaccacttgagtggaattttccatgttcctttttacctctaatttggatctttttgtttttgaaaaacattgagaaattcaattaaatgcttttggaat

SEQ ID NO: 1813 - DNA, 5021 bp, Homo sapiens
atcagccgctctccctgactaggggtagctagcggcctccctcctttgggttctgtatccctacttccattaccctcggctcctcccactcctcgggggctccgtgctttccgcgggtctgtccgggggctccggaccctcggcgcagctgagttgatggcttccggagaactggcatagctgcagaatatgagtagtgtcccaagaagagtgctttgcctttggcacaaggatcagaataaaggtgaattgctattacatagggtttttcggtaaaagtcactgaaaattatttgccatacagtaaccagagacctccaactaggggcccccaaactgtatcctgcctgtagaacctgccaggtaaaggtatatttttgctttttaatttagccagaagcaatttttaaagaaaatatgtctcctctgaagatacatggtcctatcagaattcgaagtatgcagactgggattacaaagtggaaagaaggatcctttgaaattgtagaaaaagagaataaagtcagcctagtagttcactacaatactggaggaattccaaggatatttcagctaagtcataacattaaaaatgtggtgcttcgacccagtggagcgaaacaaagccgcctaatgttaactctgcaagataacagcttcttgtctattgacaaagtaccaagtaaggatgcagaggaaatgaggttgtttctagatgcagtccatcaaaacagacttcctgcagccatgaaaccgtctcaggggtctggtagttttggagccattctgggcagcaggacctcacagaaggaaaccagcaggcagctttcttactcagacaatcaggcttctgcaaaaagaggaagtttggaaactaaagatgatattccatttcgaaaagttcttggtaatccgggtagaggatcgattaagactgtagcaggaagtggaatagctcggacgattccttctttgacatctacttcaacacctcttagatcagggttgctagaaaatcgtactgaaaagaggaaaagaatgatatcaactggctcagaattgaatgaagattaccctaaggaaaatgattcatcatcgaacaacaaggccatgacagatccctccagaaagtatttaaccagcagtagaggaaagcagctgagtttgaaacagtcagaagagaataggacatcagggcttttacctttacagtcatcatccttttatggtagcagagctggatccaaggaacactcttctggtggcactaacttagacaggactaatgtttcaagccagactccctctgccaaaagaagtttgggatttcttcctcagccagttcctctttctgttaaaaaactgaggtgtaaccaggattacactggctggaataaaccaagagtgcccctttcctctcactaacagcagcaactgcagggcttctccaatttgggaaatacctgctatatgaatgctattctacaatctctatcttcactccagtcatttgcaaatgacttgcttaaacaaggtatcccatggaagaaaattccactcaatgcacttatcagacgctttgcacacttgcttgttaaaaaagatatctgtaattcagagaccaaaaaggatttactcaagaaggttaaaaatgccatttcagctacagcagagagattctctggttatatgcagaatgatgctcatgaatttttaagtcagtgtttggaccagctgaaagaagatatggaaaaattaaataaaacttggaagactgaacctgtttctggagaagaaaattcaccagatatttcagctaccagagcatacacttgccctgttattactaatttggagtttgaggttcagcactccatcatttgtaaagcatgtggagagattatccccaaaagagaacagtttaatgacctctctattgaccttcctcgtaggaaaaaaccactccctcctcgttcaattcaagattctcttgatcttttctttagggccgaagaactggagtattcttgtgagaagtgtggtgggaagtgtgctcttgtcaggcacaaatttaacaggcttcctagggtcctcattctccatttgaaacgatatagcttcaatgtggctctctcgcttaacaataagattgggcagcaagtcatcattccaagatacctgaccctgtcatctcattgcactgaaaatacaaaaccaccttttacccttggttggagtgcacatatggcaatttctagaccattgaaagcctctcaaatggtgaattcctgcatcaccagcccttctacaccttcaaagaaattcaccttcaaatccaagagctccttggctttatgccttgattcagacagtgaggatgagctaaaacgttctgtggccctcagccagagactttgtgaaatgttaggcaacgaacagcagcaggaagacctggaaaaagattcaaaattatgcccaatagagcctgacaagtctgaattggaaaactcaggatttgacagaatgagcgaagaagagcttctagcagctgtcttggagataagtaagagagatgcttcaccatctctgagtcatgaagatgatgataagccaactagcagcccagataccggatttgcagaagatgatattcaagaaatgccagaaaatccagacactatggaaactgagaagcccaaaacaatcacagagctggatcctgccagttttactgagataactaaagactgtgatgagaataaagaaaacaaaactccagaaggatctcagggagaagttgattggctccagcagtatgatatggagcgtgaaagggaagagcaagagcttcagcaggcactggctcagagccttcaagagcaagaggcttgggaacagaaagaagatgatgacctcaaaagagctaccgagttaagtcttcaagagtttaacaactcctttgtggatgcattgggttctgatgaggactctggaaatgaggatgtttttgatatggagtacacagaagctgaagctgaggaactgaaaagaaatgctgagacaggaaatctgcctcattcgtaccggctcatcagtgttgtcagtcacattggtagcacttcttcttcaggtcattacattagtgatgtatatgacattaagaagcaagcgtggtttacttacaatgacctggaggtatcaaaaatccaagaggctgccgtgcagagtgatcgagatcggagtggctacatcttcttttatatgcacaaggagatctttgatgagctgctggaaacagaaaagaactctcagtcacttagcacggaagtggggaagactacccgtcaggcctcgtgaggaacaaactcctgggttggcagcatgcactgcatatttgttactgctgcccacctcacctttcctctgctgaaggaggatttggaattctacttgatgcgggagcaacaaacagctcagggccaaaccaaaagacaaaaattggagtaacgtagaatgctccatgctattttatggaaactttggtctcacatccgtagctgattatcctctttttctcctatgagtggcacttcttttgtcttaggaatacatgttgtaaatatatatctgtgtatgtgtgtatacacacacacagacacacacacacacacacacgggatgaatggagccttaaagagttaggatgagccaccagaatatgcctgctcaaaattaatagcacagcagtttggagaagaaatgaaggtgtcaaagagtccattcacctgagaaatgtgtgaagacatacttatcagttggcttttagcttttatgttccttgagtagtttcactcaagtctgtaaccttttgtgtttccttattagtaaaattcactggaaagccagctcttcatgttacactaatgacagtttgttctctttgcaagagaggggcattactgtcacctgacttgaggagctgttttgttgttgttgttgtctgcaaatttcatgaatttgtgatgtctttgctgtttacatgcagtcccaagaaatggattgttggtgctttggaatatgttacagtcccacatttgatatttcttatatactttgttttctctaaggagatttcttcacacagtatgttcatcatatatcatcatcattattatggtggtaaagatagaatcttttttcttttttgtcattctgccatggagcagcattaccctaatggattgcaaccaaaactttaaacaagtagaaagataatatttctccaattgggactccccagcaggaatacttagggataaggaagaatgctagcatctctgtctctcaaacatagggaggataagaagagtgttcttctggtaaagctaaaattctggaccactgaagctaaaagccctattgcaagtatgaaattaagtacttgagctataggacaaaccttgggcatttaaccatttactgtctggctttgcccttaaaatagggttgcaattaaaatgtgattggcttaggtaatcccaaaaactaacaaataacaaaggtgcataatttatttatctactttttaggtgctctgagttgaggcaaagtagagcggcaacattaagtgctatgctagtcacttagctgacgtaaccagcttggttaagcagcttatgaaaccatataaagaattcttttgaggatggaattctgtccacaaaataattttgtgagcccagatatcattaggatcacacagagttaaatatagaaaaatgaaaccatcattatattctttcgtgttttttcttttattataaacaaggggattattctttagttctcagaggtagggacaaaaccacatcaggttttcagaaggaaaaaacgtttaaaaacccaccatcacatgagagaatcacttgaacccaggaggcagaggttgcagtgagctgagatcgcatcattgcactgcagtctgagtgacagagtgagactccatctcattaaaaaaaacg

SEQ ID NO: 1814 - DNA, 3967 bp, Homo sapiens
ctccagccttgggttcccgcccgggcctcgccgcgcgccttccgctctccacggggcctgcagcccgggacctgctgcccgccacccgctacccagggcttcctgccggccgccagcgccacctgaccctccgacgagagcccagcactgcccaacccaggccttctgtagggtcccctcctctccacgtatggccccattatccccacgtggtccccctcctccccatggctgccccatgcccatgtagggtccccgttttccttgcgtgggttcttcgtcctccccatgtggggtcccggccctctccaggcttctggaaggccggtgagctggagacaagcatggtcagggagccccgggaaggctgagcaacggcaggaaagggacgggctcagcgcatttctgggaagtaaagtggcgggatcccgaggcagcaggagtcctggcacccaggaccacagtttgagaggcctggcgcaaaatgaaaatgcagggctcctgctcagcagtaactcagacgtcaagatggcgacagcagagcttccacccaagcccggagccccgccaggtgcaggccgcacacccgcgaacccgccctgctgcatctgcgagtggggcgcccagggaggcgaggggctctgggggctgcctggagaggcctgaccccttcctttcccggaggccgctcccgagctatgccaaacccgggctgccgcggcgctgccacctgctggccacctcgggcccctgccgcgtccctcggagagaaggaccttgtgtggagtgggcaagcggcttggtggcccggacctcaccttcacagaagagaagctagccggggagggagttcacatcggctacagcaccccagtgacggtggcagcacgttactgtcgctcttgaactgtcctgtgccttacatcagtaaggtagagatgatgaccccccactacaggcaggtaaaaatcaaggtgaccccaagaaaatggctcctcctccaaaggaggtagaagaagatagtgaagatgaggaaatgtcagaagatgaagaagatgatagcagtggagaagaggtcgtcatacctcagaagaaaggcaagaaggctgctgcaacctcagcaaagaaggtggtcgtttccccaacaaaaaaggttgcagttgccacaccagccaagaaagcagctgtcactccaggcaaaaaggcagcagcaacacctgccaagaagacagttacaccagccaaagcagttaccacacctggcaagaagggagccacaccaggcaaagcattggtagcaactcctggtaagaagggtgctgccatcccagccaagggggcaaagaatggcaagaatgccaagaaggaagacagtgatgaagaggaggatgatgacagtgaggaggatgaggaggatgacgaggacgaggatgaggatgaagatgaaattgaaccagcagcgatgaaagcagcagctgctgcccctgcctcagaggatgaggacgatgaggatgacgaagatgatgaggatgacgatgacgatgaggaagatgactctgaagaagaagctatggagactacaccagccaaaggaaagaaagctgcaaaagttgttcctgtgaaagccaagaacgtggctgaggatcaagatgaagaagaggatgatgaggacgaggatgacgacgacgacgaagatgatgaagatgatgatgatgaagatgatgaggaggaggaagaagaggaggaggaagagcctgtcaaagaagcacctggaaaacgaaagaaggaaatggccaaacagaaagcagctcctgaagccaagaaacagaaagtggaaggcacagaaccgactacggctttcaatctctttgttggaaacctaaactttaacaaatctgctcctgaattaaaaactggtatcagcgatgtttttgctaaaaatgatcttgctgttgtggatgtcagaattggtatgactaggaaatttggttatgtggattttgaatctgctgaagacctggagaaagcgttggaactcactggtttgaaagtctttggcaatgaaattaaactagagaaaccaaaaggaaaagacagtaagaaaggtatgtaaggctttatgagattatgcaatgaactcaggagctagactgctagggaaaatgctttgtaacccatttcccttggtttcctcttatttttttaaatcatttttttcctttggtttcctcttaatgtgggaattaaatgagctacagtgtttacaagagtacttggcactgcttgtcagtgttatagtgtaaattcctgagttaggcaagcaagagcacttttatacagaacaagaattattagatgcacctaaattaacgtaaagggatctttcttcactgaaactagattaggtccctaattactccctatatacagttgtaatgttttgaattggtacgttcactttttttgttatgcgcgtctactctaggttgaactccagtgtacctaacagagagtttgacatcagctgtgacaacatggagggaccacttgtgtgttgacactgctatatctccatatttagcaccgagccttgtacattataggatctcaaattatttgttgaatagagctatgtgtgtttttcccctctttttgttgttgccccccacctttggtttttcaggccacagagctcatttttgtttttttaatctagagcgagatgcgagaacacttttggctaaaaatctcccttacaaagtcactcaggatgaattgaaagaagtgtttgaagatgctgcggagatcagattagtcagcaaggatgggaaaagtaaagggattgcttatattgaatttaagacagaagctgatgcagagaaaacctttgaagaaaagcagggaacagagatcgatgggcgatctatttccctgtactatactggagagaaaggtcaaaatcaagactatagaggtggaaagaatagcacttggagtggtgaatcaaaaactctggttttaagcaacctctcctacagtgcaacagaagaaactcttcaggaagtatttgagaaagcaacttttatcaaagtaccccagaaccaaaatggcaaatctaaagggtatgcatttatagagtttgcttcattcgaagacgctaaagaagctttaaattcctgtaataaaagggaaattgagggcagagcaatcaggctggagttgcaaggacccaggggatcacctaatgccagaagccagccatccaaaactctgtttgtcaaaggcctgtctgaggataccactgaagagacattaaaggagtcatttgacggctccgttcgggcaaggatagttactgaccgggaaactgggtcctccaaagggtttggttttgtagacttcaacagtgaggaggatgccaaagctgccaaggaggccatggaagacggtgaaattgatggaaataaagttaccttggactgggccaaacctaagggtgaaggtggcttcgggggtcgtggtggaggcagaggcggctttggaggacgaggtggtggtagaggaggccgaggaggatttggtggcagaggccggggaggctttggagggcgaggaggcttccgaggaggcagaggaggaggaggtgaccacaagccacaaggaaagaagacgaagtttgaatagcttctgtccctctgctttcccttttccatttgaaagaaaggactctggggtttttactgttacctgatcaatgacagagccttctgaggacattccaagacagtatacagtcctgtggtctccttggaaatccgtctagttaacatttcaagggcaataccgtgttggttttgactggatattcatataaactttttaaagagttgagtgatagagctaacccttatctgtaagttttgaatttatattgtttcatcccatgtacaaaaccattttttcctac

SEQ ID NO: 1815 - DNA, 3714 bp, Homo sapiens
gtgccggcgagcagcttgagtcagggtctccggggagacgtcctcaggtccctgtggagcggccccgaagcctcgggagccagcttcactagacaagaggcagaggtagagaatgcggctgtggtgggtaagtgagtcactgcgtgaggcagtcttttcaaagcaggaatgcgatgttaattctggggcattgatgttttacaatgcctgatcaagataaaaaggtgaagaccacagaaaaatcaactgataaacagcaagaaatcaccatcagggactattcagatcttaaaagacttcggtgccttttgaacgtccaatcaagcaaacaacagcttccagccattaacttcgatagtgcccaaaatagcatgacgaagtctgagcccgccatcagggcgggtggacatagagctcggggtcagtggcatgaatccacagaagctgttgaacttgaaaattttagtataaactacaagaatgagagaaatttcagcaaacatcctcagcgtaaactatttcaggagatctttaccgccttggtgaaaaatagactcataagcagagagtgggttaatcgagccccatctattcattttctgagagtgttaatctgtctgaggctactaatgagggatccatgttatcaggaaatactccatagcttgggtgggattgaaaacctagctcagtatatggagattgtagccaatgagtacctcggctatggagaagagcagcacactgtggacaagctggtcaacatgacatgtaagtgttattgcagggacacagccatttttgtggacttgctagaaaaagcagtatggtgtttgcagcaggaaacaaggatactttaaatatttattaatgttcgcacacacagctcaggtgttgagcatccaggccaattgttatattcagtggcaacatacagccagaagaaagatgtttagattacaacctttaccttgaaaagcacaatttatttaatgcaagagaggcttccataaaagcaaattttggtaaaatctatttttgcgtctttttatttctgttaaaatgtcagagactatccagttttttttctataaagttgggttaatcatgattgcctacctcatagaatctgaaacatccagagcatgaaaaagaaaaataacaacaaaccttatctgatgctgcgaatgtgaaaacattggactgtgagtgtgaggtattccttagtcactcaatcttctcccgttggaggctcttcccagccctgctgtcctgcactccagctttgatgagtcacagacgtcctgccgtgtgggatgcctgtccgttttctttgtgtgactggactggctcttcatatctgcttgtggagcagcacagtgattctcagatccagggagagaagagtttatggcaagccctgggcactaggaagtctctttgaggatgactattttcctcagctgaggaaacgtgcaggttcctctcatttgctggccttccctctcttctttataagttgaaatcttcacagagaggatctttgaagaataggcctcactttgaactggtaatgatgttaaggaacttcaagtggaaagagaggtttgccttttttggtatttttatatttcattattacaataatattagaaaataaataccagtggagcttgaggagtaattcttggggtaaaaaagtagccatgctgctcctgcatctgttgttccttttgtgctgtgttccctttgacctttctctgcctgcccatatgcactgcagatctgtgctcctggaagtactccccctttaatctctggatgcctctttgcgctctttctttcctttatagatatttttcaaaaacttgctgcagtcaaagatcaaagagaatgggtcaccacaagtggagcccacaaggtgagtggcccctgaaagagttaatgcttcagctccctatggcaatagttcacattagggaagttcagagcctttgcggttaagtcatgtgtaattagaatccacaaacctaccagcctggcctgagattgtggatctttgtcaacccttttatattctttaccagcattacaagttaatagagatataataaatacaagttttctggaactctcttcttttttttcctatgccatttaataccaactaggtttattacttaaatattatttgaaaagccccagctatgtataaattcaccctaggtgtgcatttataaataagtcaacagaaataaacaaaatgtacatatgtatacatataaattccatatggcatgtggggctatattagtttgaaccatatatgattgccattgtaggtcaaaacagactatatttatagcaaaactgtttagactgtagccatgtggagccaagtttcagaaacctgttgagtttcatatcccgggaagccactttctagtgtatatgggagcaagattgcctaaaatgtgttaacacatgctgctcatggtctagaggatgattctaggtgatacacaggtcaacattttttgtttcagtagccagctatttcacaggtattattgcttacaattggaaaaaatttttttgagttaacattaaagatgttagttgaatatggcaaaaaatgtgaaaatgatatgtaatggattgaagtttgggaaacattagaagacagagaagaaagagagaagaaaaagaggaaaggatcagacaaataaagataatgataacttcattaagataaaatgaaatcataaaggcaaaaaatccatatactggaaacataaaaattaccttagccgttgttgcgcaggttgcagctctgacctgagacattttgggaggcacttttcaggggcactccgcattctgaaaatgtagagaattttccaaataagaaaatttgccttaacgagaattcagggaaagccactgacaagctacagacttccagctaagtcatgttagttaggatgatgcttgggagcatcagtgatgcactttcaacatcaattagaaatctgggaggcaaatggaatgctcgatagtattcatatcttgtttagtttggcaaaagaatgaaagtttcaatattttgttgaaaaatcgtttcataatttggaaagtgcctagcacaatgcctggctcaaagtgagttctcaatggctgatcactaccactattgtaatttatgtcattaatcttcctggttcttcccagcgtgggatcagaagggggagagaatacttgggcacatggaaatagaaggatgtatgagaaccaggctggtcatgtagcttgatgccttttcttcctgtcctgggcaaggaatggctacaagaggttactgtcaagagttccaaagtaaggagagatggactcctgccatctgtaaagaactggatattttgaatgtttaataaaactctttttaagataaacttttatattgactgcaaaaaataaaaaggaagctgcataaggcttgatagggcataatttttttcactattctatgggtaaagccataataaaataaacaacttgattatattgacaaaaagtgtttataaagatatatttaatgccatgaaaaaatttcagtagataacattaagaaaaaaaacataagagagagcagctttaacattatatatagtttgtgcttaattgtatatgcacatacattataaactactaagc

SEQ ID NO: 1816 - DNA, 3834 bp, Homo sapiens
ctctagagcagacaccctcttgcagtttgggacatacttgattcctgcagcctacgtgaactgaggcctactgccctgttccgttatggactgagggtagatttgggagtgagccttcttttccttcttctgttaaagtcactttgaaaccccaagttgtattggcttccttctgtgttttataaatgtccacctcagtcccttgctctcgtgcttaaagatatcactcggctgaaatgttcacctttgatgctgacttagggttggaggcagatatggccatcccagagacccactggcagctgaatgtcccaacactcaacgtccatggtccccgccatctactctggttttaaccattacccacatgagcagccactgctgttcactgtcccttgccccaggtgccccctgctcctccaggcgccccctgctcctccaggcccccactgctcctccaggtctccctgctcctccaggcccccattgctcctccaggtctccctgctcctccaggtccccctgctcctccaggcccccactgctcctccaggcctctctgctcctccaggcgccccctgcccctccaggcccccactgttcctccaggtccccctgctcctccaggcctccctgttcctccaggcgccccctgctcctccaggcccccctgctcctccaggcccccactgctcctccaggccccccagactctttgccaaacccttgtagccatttccacctattccaagccaccagtgaccttgcaattggacaaaatcgccagcagataaatggcactcaaatggaatggaattcagaagtctggagcagggcttctggaggataacagatgggaaggcagcctttcctccagcctcacattcccatgccctcgtggctttggtaaagtcagctgagctcctggaattcaccaagacccaggggaacaatgatgagcaagagttgtcctgggcctcgaggagcctgtagtccagtagagaatctgggaacttagataacctgcagtacaatacagataaacacacatatggaagtgtttaggccatctttcttcaaatgtaagggttttgcttgaaaatacagccttttgatttaaaaggtcatcagaaaaataggtgagaagagctaagaaaattttggaaaagagaaaactgaggaaggatttatactatctgatattggaaaattttgtaaaaactaagaatgagagcactgtgttatcggatgaatggacaatcagtgaaatagacagaaaacccaaagcaggtgcaagcccacttcctcactcatttattatttcactcagctccctgcgtgccaggcactaaattctgagcactgagggaaagcagtgaacaaaaaagaaaaaagaatttctgttccaagtgaggagagagacgaacatgtgaaaattatagtatgtgcaatggtacaggaatgctggtgagggccaggaatggctggaggtgtaaagaggtagccaggtaaggccttttgaagaagataatatttgagtcaagacctgagggggtgaaagaatgagccatgtcaatgtcaggggaagagcattctacagagcagtcagctcgtgcaaaggccctagggcaggagtaggcctggtgagttggagaaacagccaggagggccatgtgtctgcagtagaatttgaagcagaaagtagttcagttcaaggcacatttgctacttgcctgcctagagtccggcactgtcctaggcccaagggattcaaatacaatccaatggggaagacagtcacagatcaaagtaattcagtagttgggaggttctgatttagaggaaaggcaagggtaggtagaaggaggagacactgggaggtttcctggagagatggcccagggttgagtccaagtcttacctttctcattgaaatgatgctccagggtccaaagccaatgagaagctcacagctaatgcagagcagcggccgctctggaagcagcctagtgtccccgttcagcagcgccacagctgcgctcccgccaagtctgaatctgaccacacctgcttccacctcccaggatgccagccagtgccagcccagcccagacttcagccatgatcggcagctcaggctgttgctgagccagcccatccagcccatgatgcccgggtcctgtgacgcaaggcagccctcggaagtcagcaggacgggacggcaagtcaagtacgcccagagccagaccgtgtttcaaaatccagacgcacaccccgccaacagcagcagcgccccgatgcccgtcctgctgatggggcaggcggtgctccaccccagcttccctgcctcccaaccatcgcccctgcagcctgcacaggcccggcagcagccaccgcagcactacctgcaggtacaggcaccaacctctttgcacagtgagcagcaggactcgctacttctctccacctactcacaacagccagggaccctgggctacccccaaccacccccagcacagccccagcccctacgtcctccccgaagggtcagcagtctgtctgagtcgtcaggcctccagcagccgccccgataatgccccggcactgaagtcgggacacaatcagctttaaccaatggatgaggggggtggccacaggagatggggagaggagtctgaactaaacccctggcttttgtgcacactgcatacgtttcagaactcctggatggtaaccatctctggagtgcagcgcttgctgcagtggaaatgatcaggaatactgaccgtgtttctcttgcctccgaggttcttgggcacactctatagccatactggacaggaaccaggtgccccgtgtaggcatcgtcggtcggtttgccgtcagagatggcgcatctcgctgcatcccccgagagtacaccggttgctctagccacctgcggcccgcccatctgcgctagctggccttcacgctcttgatcgtctttcctttgtattggagaaggactgggtcagagatctgttggagagagagaataaagagattatttttcattatttttaaatggttgtttttgttttaatttgcacagctacacagaggaaataacttaggcactttctgttttttttaaaaaaataataaggtctcatggcttcatttagagaccacagtaacaacagcagcccaccaatcagagaagctggttgttattaaccaagctacagattcacactttctggcctaaaccctaatgggatgaggcttttcaccccaggccatgctggtggtgattttttagcccctaaataaaacactggactatttcctgtttacttcattgattgcaactacaaaggtggactcaaagcaaagcacaatcatgccagccaacattccagaattctgctgagaactccaagtctgtgaggggagaggttttacaagccagacaggcctgggggactgcagtccccaaggagaccctgccacatgctggccctttgagtgagaatgctgcatctttctacatatcttcatgagaatactgagaattggattttccttttcaaaatgcactttgctttttttgtatgttttgttatgttgagatgtttctaaagaaaagattttatgtaattataagatgaagcgtagtgaattgtacagctgttgtaataatgacctatttctatataaaataaaattgtatggcttatgtgtaaattattttgtatctgagataccagttccttttcccaaatataaaagtataaaagttttcttgtgtttttctgtgagtgaaaattttgtaataaattaacaaatttg

SEQ ID NO: 1817 - DNA, 3429 bp, Homo sapiens
cttcgagccaaagatgcggcgaagctggaagatggctctgtctggggggctgcggtgctgccgccgggtactgtcctgggtgccagtgctcgttattgtcctcgtcgtgctctggtcctactatgcctacgtctttgaactctgcctggttatttacctcatactctaccatgccatctttgtgttctttacctggacctactggaagtctatctttacactcccacagcagccaaaccagaagttccacttgtcctacacagacaaggagcgctatgaaaatgaagaaagacctgaggtccagaagcagatgcttgttgatatggccaaaaagctaccggtttacacaagaactggaagtggagctgtacgattctgtgaccggtgtcatctgatcaagccagaccgctgccaccactgctctgtctgtgctatgtgtgtgttaaaaatggatcatcactgcccttgggttaataactgcattggattttccaactacaaattcttccttcaattcttagcttactctgttctctactgcctgtacattgctacgacagtcttcagctatttcatcaaatactggagaggggaattacccagtgttcgctctaagttccatgtcctttttcttctctttgtggcctgcatgttttttgtcagccttgtgattctctttggttaccattgttggcttgtcagcagaaacaaaaccaccttagaggccttctgcactccagtgtttacaagtggcccagagaaaaatgggttcaaccttggcttcatcaagaatatccagcaggtgtttggagataagaagaagttctggttaatacctattggttccagccctggtgatggacactccttccctatgaggtctatgaatgagtcacagaacccactgctagcaaatgaagaaacctgggaagacaacgaggatgacaaccaagattatccagaaggctcatcatctcttgctgtggaaacggaaacatagcagttttcacatttcctgcatctctcagacaggactcaccatctctgcctcccatgaggcttacagagttcaatgttggaaatcattgtaatcttcaaaataagtcaccgtgttggattgaaagcttcaaaatttgaaagaattccatcaaatacttgctgtgtaaatgtttctggactttatgttatttaatttactgactgaaatccaatttggaatttggtagcagttaattcaagccaattttttttgtttcttcatttcccctcccccaatccatgaaagcctaaatgtaaaatatatcttttcattcatcttatcaggtaaaaggaaattcagaaaatttccttagagtctttaattcccccacaaagattattaatcacatatatagggcctttttggtgttgaagggaatcaaactacatttgctgcttgtgtgcgtgtgcatttgtgaacacgtacagcatatctatacaaaattctgctatagtgtgaaaatcagggctaaaaacctgaagcctttgtttaattatgcttttcctctaaatagcaacttaaatatttgctagactttgaatcatcgctatatcaagtatctaaaatttgggagggtgaatcagtacactgtgaccaaggtcctcaaattggaatttgaacaacaatgtaaaacctgttctgtcacaaatgttcctgaaagcaccacagctactcaagaagatcaaatccaggacataaactttattgaacataataaccagtgttttttaaagacttttttgtcagggtgcagtaaaattctccaattacttttattcatttatctgcttcctagttttattttagcctttatgagttattttatgatgaaagaaaatctataagcctaagttatggcccataggttttgttaagggttttcagagtgattttcaggtttaatttcactgcctttcataagggtaaagtttcacagctgacattagcctgaggattagcactaaagagctgtgttttcatagcaggggctattgtacagacagtgataaccaaatagtaatatgccagttctttcttctttttttagcttcagtagtagctaagccgttaatacagtttgcatcaatttccccatttatttataatcagcctttcttttagtcctagtgcctgaatcaatgagtgagaatactagtactgattctttacaataataatatcttaagagtattgatatctttcattttttcatccagcagtctagtgcccagctgctgacaataaaagctccaactcttttagagatcagtggaatttagaagcatcttacaggtatcaaggaattgagcttctagagggatggtttggcttactaatttatcttccctgaaatatgtttgagtaaaaaagagttgcctgccacaatttagtgttggggttccagtggagctgagaaagtgaacaatccagctacttaaagcaacaacaaaacctgttcatctggatccctaggtaattttgaccaaggtgagacttttggcataaattaaatggattgtggtcagcattacatttgagagaatactagacatgactacacttattagggctagtgactttctcaaactcagaagctaaaaagcagcctagatgactatgcacacactgggtttcaagatgaaatcttcttatatattcagatggaaaaaaatttccccttacactctttctcaaaatactctcatttcggtttttcctgaaaccttatttggccattcccatggttttatgacagacaagccttgtcttctattcatatagatatgcacctttttctacatgtatggcctttacttactacacagcaagtaggcctcaaagtaatcttcctctttcccatcaatcatcttctgccaagcattcaggcagagcagctgttaactgtgattcaaagtcagaaaaacatcaagaacttctttgatgcatagggtgtatcagcactcagctcccacagaagtcaagtcacaaaatatagtgtcagttaactataaggaagttccggagaggtaaagctcaggaaagatgtaatgcaaagctgattgtttaatgtcttacagatttacactgtctttaaaaggccaaataaggctgggcgcagtggctcacacctgtaatcccaacattttgggagcccaaggcggccggaccacctgaggtcgggagttcaagaccagcctgaccaacatggagaaaccctgtctctactaaaaatacaaaaattagccaggagtgttggtgcatgactgtaatcccagctactcaggaggctgaggcaggagaatcgcttgaacctgggaggtagaggttgtggtgagctgagatcgtgccattgcactccggcctgggcaataagagtgaaactctgtctc

SEQ ID NO: 1818 - DNA, 3748 bp, Homo sapiens
gattttctgctccggttggtgagcgcgcctgcgcgttgacggcgattttgcgttctgaggctgcagcgtcggcatcttgagctgccggttcgcgagttcgaggccaggttccgcctgtcgtgggttcgcaccccggacgcgatgctattcgacaaggtgaaagcgttctcggtgcagttggacggcgcgaccgcgggcgtcgagcccgtgtttagcggcggccaggccgtggcgggccgggtgctgctggagctgtcaagcgccgcgcgtgtgggtgccctgaggctgcgcgcgcggggccgcgcccacgtgcactggaccgagtcgcgcagcgcgggctcgagcacggcttacacgcagagctacagtgaacgcgtggaggtcgtgagccaccgcgccacgctcctggcgccaggtacggatggaggacccctgctccaacaccagttgtgtgcctcccaccacctggacggcggtacctccgtcagccctgggaccccagcgcaaccgctcagtcgcctcctttttctcctacctgcagataccggggagaccacgacgctgcctcctgggcgccatgagttcctgttcagcttccagctgcccccgtaagtcctctggggtgcagggttgccctaagcctgcagccccttccagattggtacctccaatactggatatctgggcacctctgagccccaagactctccccctgggaggcccccggagtgtctgtgtctccttctccctgcctgcttgtctctgtatcttgtcccctgaagtcccgtccctccaccctaggaccctggtgacatccttcgagggcaaacacggtagtgtccgctactgtatcaaggccaccctgcaccggccctgggtcccagcacgccgggcaaggaaggtgttcactgtcatcgagcctgtggacatcaacacgccagccctgctggtgagtggccacccttggggaggtaggttgggagtattgtaggaaggggcctgcctggctgctgggcgacaccaaccaataagatggaggtcataggtgggccctggcagggagggaggcaggtgtgggaatgcgtgtggaatccactgggatctgcacccatttgccgtgtgactctgggcaagtgtcttgaagccctctctgagcctcagatgcctcttctgtgaaatagaccagagctagggcttaccaagtgtgaattacacaccaaacacttggcttatacatttcatttctggctttataagatgggttgtgttcctggctctatttaacggatagttcctggattgttaaaaagaaaccaagccctgcccaaagtcctccctcagctgggggtggtttggaagctccacagcgactgtggtttgcacaaagtgactcatccatgtcactttcctctacaccgacaggcacctcaagcgggggctcgggaaaaggttgcccgatcctggtactgtaaccgtggcctagtctccctttcggccaagatcgaccgcaagggctacaccccaggtagcaggcggaccggactgggttgggacgggggctggtgttggggttgcaggaggggaaactgaggccccactgctccttgctgcaggagaggtcatccctgtctttgccgagatcgacaacggctccacacgtcctgtgctgcctcgggcagccgtggtgcagacacagacgttcatggcccgaggcgcccgaaagcagaaacgggcagtggtggccagcctcgcgggcgagccggtgggccccgggcagcgggcgctgtggcagggccgggcactgcggatccccccagtgggtccttccatcctgcactgccgcgttctacacgtggactacgcactcaaggtagggcatcctgctggccctgggggacagtgcctacattcaccctgtattccctcagactgggggaagctgaggcctcagtctccccaggcataggagggaggtgggggttggggaggctgcctgggcaccctcccttatggttccttcctccaggtctgtgtggatatcccaggaacgtccaagctgctgctggagctgccactggtgatcggcaccattcccttgcacccttttggcagccgttcctccagcgtgggcagccacgccagcttcctgctggactggaggctgggggccttgccagagcggcctgagggtaagctcccaccctgcttgcatgcagagggtgggtggatacacggagaggtggatgccgggtcaactctctcaccacgagtcccccggaatcccaaccaaaggacatacagcctggcagccccagagctggcacaagccagctcctggcccctggtcccttggagcagggctctctcctgccaacctcacccaccctgtctctcgcttccagctcctcctgagtactcggaggtggtagccgacactgaggaggcagccttggggcagagccccttcccgcttccgcaggaccccgatatgagccttgaaggcccgttcttcgcctacatccaagagttccgctaccgcccgccacccctgtactctgaggaggatccaaacccacccttgggggacatgaggccgcgctgcatgacttgctgaacggcacagggacccctcgaggaacaaggttgcacaccagctttcagccaccatgactgtggggagtggctggaccaagggctgacctccccgactgcatcaaagttggggaaccgagtctcagagtgaggcgggggcctttcggatatcacatgggacagaggaagagcccggctggaatctgacttatctggaccgctgtccttgtgaggcattgaatgcccagtgcagtatccgagagactgtttaataacctgtcttcccagccaattggtggtgctggaatcccctaggagccttcagtctgggagaaacagagccagacatagacagttccagcatcacagaaccagaagaagagacctgcaactgtgagagtccagacaggaagcagagaaggcgtccttgcggaaagggcattttagctgaggctttggagtacgaataggagctcagcaggcagacgaatgaggaataaaggtcagagaaggtcagagctgagtgacgtttggaatccaccccgtttattgtagaactgggggttcagagggcaggtgcctcagagttgaggccacacagtgaggtctggtgggtgaaaggacccaggaacgaggcgttcaggaaagcaggttgtcagagctatgtggagtctgtgggtggcaggggcagctgctccagcctttgaagactttgaaagccagagattcctggcgcaggcttggacttcctgggagctcctccaagtacccaggggcatcagagctgcctgggtgttacatggcccagggaacccaggttcagggtaggacaggcaagaccagatacccaatgtgcaaagtgaaaacactgggctccctgttaaacgatgaagaattcaagacagtgacagcattacgtcacccctggggacagaggtcagcctaaggtgacacacggggactactgtgcttccggaggctccctgtgtcctggaggagaagagcattagagggggcagctggacaagctcccaactgcagagtcccagccctggctggggcagggccccggcctgggactcagcatttctgatatgccttaagaattcattctgttttgtacaattattttttaaaagtaaacgtgtggagaaag

SEQ ID NO: 1819 - DNA, 3909 bp, Homo sapiens
agagtctgaggactatccagggcctgactgccagctagccagccatgggccaggattattactctgtgctcgggatcactcgcaattcagaggatgcccagatcaagcaggcgtaccgcagactcgcccttaagcaccacccgttgaagtcaaatgagccgtcttcagcagagattttcaggcaaatagcagaggcctacgacgtgctgagtgaccccatgaagagaggcatctacgacaagtttggagaagagggcctgaagggtgggattcctttggagtttggatcccagaccccatggacaactggttacgtcttccacggcaaacctgaaaaggtgttccacgagttctttggtggaaacaaccccttcagtggtaagaggtcttcctcccccaccttgccttatagagaaaggacactgctataagtgatgttttcgttgagtagttttgtttttatttttactttattattttatttacttattttttttggagatggagactcactctgtttcccaggctggagtgcagtggtgggatcatggcttactgcaacctctgcctcccgggttcaaatgattctcctccctcagcctcccgagtagctgggactacaggcgcacgctgccacacccagttaatttttttatatttttagtagagacgaggtttcaccatgttgcccaggctggtttcgaactcctgagctcaggcaatctgcctaaggccttggcctcccaaagtgctaggattacaggcatgagccaccgtgcccggcctatttttactttaataaatatatataaaacacattgcaaaagaaaaagtaaaacagaattcattgaaaaagaaatacattccagccctccattttctttttctttctttcttttttatttttattttttagatggagtcctgttctgtcacccaggctggagtgcagtggcatgatctccgctcactgcgacctccgcctccggggttcaagcggttctccctgcctcagcctcctgagtagctgggattacaggcacccaccaccacacccagctaataattttatattttttagtagagacgtggtttcaccgtgtctgccaggctggtcttgaactcctgacctcagctgatctgcccacctctgcctcccaaagtgctgggattacaggtgtgagtcaccacgcccagcactttgggaggctgaggtggctggattgcttgagtgtaggaattcggtgccaacctgggcaacatggccaaaccccatctctacaaaaaaatgtgccaggaacggtggtgtgtatctgtggctcctgcctcagccacccgagtggctgggattgcaggtgggcaccagaatgcctggctaatttttgtattttgagtagagatggggtttccactcaagactggccgggctggttttgaactcctgacctcaggtgatctgcctgcgtcatcctcccaaagtgctgggattataggcatgagccaccatgccaggtctaatttattatttttaattactgtcttattgatgggtagtttcttcccagtcttttgctaatattgtatttgtgggaagatacctcttgtctcttttgcagttaaaacagttcttgtgctatttatagtttccctaatatgcttgtctccctacctgtctcagttcaaaggagccaagtgagtctacagggcatcgctcattgggaaaggtcaggctcagggtctgggcttcctcaggcagtgcccagaagctatactgccatagtgctccaccccaagggttcctgagtcccatctccctgcagggttgaggggctgggcttcctgtggactggctattggggtgtttactgcctggtacactgtaggtctgggtgaacaagtgaattcagcaatgcaacaggaggaccagaagattcaggcctcttgattgcccatcgcatcttagagggacatagtgtagtcacctcaccatccctgcctaaggtcatttcaccattctagcctgtgaagttcattccatggcattaaccatgagaggcagaatatgaaaactcttaaccatagcgcccctcgagtttacagcttatgaggggcttccacatctagcgatgcggcgtggcacagtggttaaggacacaggttccgtagtcatattgtcctgtggttcagatcccaactctactgcttactagctacgggaccttaagcgttttgtttgggctccctggaccaatgaaataataatgtaaggttccaaaaatagcacctgacgcatagtaagctctcagcaagttttagctcttcatcttaatggtggaaggcaggtcaggcattattaccccatcccacagaccaagacactgaagcccacggatcacacagcacatcaggggcagagccaggatggggctgtctttgcactgggaggaaggatgggggcagcaagaggggttatgggtgcagagctgggcaggggcaaaagaaattgaggaaagaggagtttggggaatgccggtggcctctcaaattgttagggaccaaccctttccctcccccatctcagctgacagctttatagaaacttgagtctggggtctttagcaatcttgggctgggctggacagcgaagggttacggagtctggggaagagtagagaggactggcaggctctcaccttcctgccgaggactaccagcagtctcttctggcactcctgagcgcggccaccagagggagtgcctccctttcctgagacagccagagttacggtatccgagttgtgaataagagagacggggaagcgttgggcggggtggggggggaatgtcccaaggggaggtgaagcagtgggaaatggcaaaggatgataatcactgcatctgcagttgaagacagctccttggcttggccagtctgagaggtggttataggatgctgggtgttacacaggacactgaagaggttggggagcatatctggatagggaggctgtgtgtgtgtgtgtgtgtgtgtgtgtgtgtgtgtgtgtgtgtgtgcgcgcgcgcgcccccgcgcgcgcatgtctgggtctctggatacaatttctcttactcctccccctacctcctgcagagttttttgatgcagaaggaagtgaggtagatttgaactttggggggctgcagggccgaggggtcaagaagcaggacccccaagtcgaacgggatctctacctgtccctggaggacttattctttggctgcaccaaaaaaattaagatctccagaagggtgctgaacgaggatgggtactcctccaccatcaaggacaagatcctgaccattgatgtgaagcccggttggaggcagggcacacgcatcacctttgagaaggaaggggaccagggccccaacatcatcccagcagacatcattttcatcgtaaaggagaagctacaccctcgcttccgcagggagaatgacaacctcttcttcgtgaaccccatccctcttggcaaggctctcacctgctgcactgtggaggtgaggaccctagatgaccgtctgctcaacatccccatcaatgacatcatccaccccaaatacttcaagaaggtgccaggggaggggatgccattgccggaggaccccactaagaaaggggatctcttcatcttctttgacatccagttccccacccgcctcacaccccagaagaagcagatactgcgccaggcattgctgacatgactgtggtgggctggagcaggggtgagaggaggctagccgggcctcaccccacccctacccgccacagcctcagggtgtgcaggggagcctgctgcacagatatgatacaagggtgggatggcgcagggcttaaactgacataataaagatctatttcctgtc

SEQ ID NO: 1820 - DNA, 3305 bp, Homo sapiens
aatgttggcttaaaagtgtcctggactctggtgtcagctctggactggcagcttgcattgcccgcccacctgaatccccaggctgctggtcatggaaaagcttctgggtctctcatgtcagactctcggctgaccacaaatgatctgcacattgtcccctacctggaagacatgtctgagagagaagatcaaaaccccacctctacttctgaaagaaaccagccagcgttcacctggcaggaagtgggatcagggatctgcatgggcttccccctgcagcaggcggaggctgcccttgcctgcccgttgcccactaagctattttggccctggaagggggcccattcctcctccatcagatactctcttggcagagctgacagtcaaggtggttcgagtttctacagtcaaggggcaggcatctgatccaaggtaggaagcttgtgttcttccttgaggaacccagcactggctttgcccgacagcagcaccctcatagaaccctttggttccagccaccccaacccgcacggctgcatgagggctgtccattctgagcctagccctgctaccctccctctgagaagtgaagtcggctaggcttctgggtcgggtggggacttggagaacttttgtgtctaactaaaggattgtaaacacaccaatcagcgctctgtgtctagctaaaggtttgtaaacgcaccaatcagcactctgtcaaaacggaccaatcagcactctgtaaaatggaccaatcagcactctgtaaaatggaccaatcagcaggatgggggggcggggcaaataatggaataaaagctggccaccccctgcggcagcggcaacccgcttgagtcctgttccacgctgtggaaactttgtttttttttctttgcaataaatcttgccactggctcacggtttgggtgaggcactgcatttatgagctatgacactcactggaaaggtctgcaggttcactcctgaagtcagtgagaccacaaacccaccgggaggaacgaacaatcttggacgcgccgcctttaagagctgtaagactcactgcgaaggtctgcggcttcacttctgaagtcaggaagaccacgaacccaccagaaggaagaaactctggacacatcttaacatctgaaggaacaaactccggacacaccgtctttaagaattgtaacacttgctgtgagagtctgcagcttcattcttgaagtcagggagaccaagaacccaccagaaggaaccagttccggacgcacttccagccagatgagtggctctgcagacttccaaaggagccgctttctgtgcaagttggaccaagtctgtttctcctgtccatgaggataagggtcctggatatcctaggtcgcctggtggaggggccctcgggaatccaatgatcaccactgcaagtcagcctcagcaccagcactcagatgcagcggtggctggcctcaggcttcctcagcccaggtgcatggcctctcgctcagctctttgtggctcagtcattcatcactctgatcaaactcatcttgacaaaggacaaagcaataccttcgatcctgctttttagcagccatcctggcagcctgtgactgctcagcctcccaaaggcaggaccaggtccaggacccacccaaattcctggacagagctcgactgtcagcttgaggcttcctgggctgggccaaatgcaaagaaacccaggggtcctctgcatcctgagcctggcgccaacctgcagtagcaacatgagtgaggcccaggagcctgccaggactgggtttacgccccagagccgccactcactactcatcagctggacaaagagcttctctgagtttcagtttccagatctgcaaaataggtgtaacaatccctgtgtctgagcatctgcagggagatcaaattctcgtctctggaacatgacagcttccaaatctgagccatcctgtcacttctcttgggtcaattggggtttccacgatgtcaccccatcagactgtcactaacatggcctgagagccctgggctcggggactgccagcatggtaggtttccctccccgtactcctgccgttacttccctgatgagaccatcccccagagaagggaaaggagggcagtttcgttcatttagtgcagagcctgggaggtgggaggagcctgggctagcttcatttttttgaggttcttggtatgctacagatgagaaggttgcagtgattgtggtataatttcagtgttctcacaacaaattagaacacagcatacttgtggtgttgacaggacaactgcagaactcagtacatttcctggggagttctgagtggtgcagtcttagggcaggatacaagctttgggtctcaggatggctgtccacttctgctggatctggggtgcacccttacagtctgaatttctagaaaaaggcataatcaaaccccctgcagaactttcacgggatcccattcaaataaaacagggtggagggacacgttgagatgtttggaaatatctgaataagggtgggatatggggttattttagggaattcattgttcatagggaattcactgttcattgtcccagccgtgatagcatggaagaacagcccaaagggtcataagatagttcaggaaagagctttacaagtcaaagtgacagagcagcaggtccccaacacttttgacaccagggaccaggtttagtggaagacaatttctccatggactggaatcaggctgggggtggttttgagatgattcaagcacattacatttattgtgcactttaattctattattattaacttgtaatatataatgaaatattatacaactcaccataatgtagatcagtgggagccctgagcttgttttcctgcaactagacagtcccatctggaggtgatggaagacagtgacagatcatcaggcattagattctcataaggagcacgcaacctagatccctcgcacacacagttcacggtacggctcacgctcctatgagaattcagtgctgctgctgatgtgacaggaggtggagcttaggtggtaacgtgagcaatggggagcagctgtaaatacagatgaggcttcactcgctcaccagcctgctccgtgaggttggggacccgtcagatacagcatttatgaccacatgataaccacagctgaatccaggtggtgggatacacagctgcttcattgtaccaatctcaactttttcatgtatttgaaatttttcattagaagagagtaaattttttggattgctactgc

SEQ ID NO: 1821 - DNA, 4539 bp, Homo sapiens
aaggtcaaagtaaaattttaagatcccttgtgcttgtatagacctctgtcaggcagcactgacagaggggacacccctcaccctgagtggggaatcaacctgcagaagaggaatgtcccaccggtttgggagcaaacagcaggactgggtgggctcagggataaggatgatggtgtggagggagccggctgtctaacctctgaccccattaaccacacccctttcctccccacccccaacctataaagcacccaagcctacaaagtgctgaagatgtggatgcactgctgctgggcatggcctcccagatcgcagagcgagaggaccatgtgttggttgaagatgtgcggggtgagtctgaggctgtccctgcaggttgtgaactcctggcctctgggaagaggctcagctggacttccagaaccagatttctggcctgggccactggagttttcccgcacagaccacctggccagctgcctgcagcggggccgggatctgggcctgccctcttacaccaaggccagggcagcactgggcttgtctcccattacccgctggcaggacatcaaccctgcactctcccggagcaatgacactgtactggaggccacagctgccctgtacaaccaggacttatcctggctagagctgctccctgggggactcctggagagccaccgggaccctggacctctgttcagcaccatcgtccttgaacaatttgtgcggctacgggatggtgaccgctactggtttgagaacaccaggaatgggctgttctccaagaaggagattgaagaaatccgaaataccaccctgcaggacgtgctggtcgctgttatcaacattgaccccagtgctctgcagcccaatgtctttgtctggcataaaggagacccctgtccgcagccgagacagctcagcactgaaggcctgccagcgtgtgctccctctgttgttcgtgactattttgagggcagtggatttggcttcggggtcaccatcgggaccctctgttgcttccctttggtgagcctgctcagtgcctggattgttgcccggctccggatgagaaatttcaagaggctccagggccaggaccgccagagcatcgtgtctgagaagctcgtgggaggcatggaagctttggaatggcaaggccacaaggagccctgccggcccgtgcttgtgtacctgcagcccgggcagatccgtgtggtagatggcaggctcaccgtgctccgcaccatccagctgcagcctccacagaaggtcaacttcgtcctgtccagcaaccgtggacgccgcactctgctgctcaagatccccaaggagtatgacctggtgctgctgtttaacttggaggaagagcggcaggcgctggtggaaaatctccggggagctctgaaggagagcgggttgagcatccaggagtgggagctgcgggagcaggagctgatgagagcagctgtgacacgggagcagcggaggcacctcctggagacctttttcaggcaccttttctcccaggtgctggacatcaaccaggccgacgcagggaccctgcccctggactcctcccagaaggtgcgggaggccctgacctgtgagctgagcagggccgagtttgccgagtccctgggcctcaagccccaggacatgtttgtggagtccatgttctctctggctgacaaggatggcaatggctacctgtccttccgagagttcctggacatcctggtggtcttcatgaaaggctctcctgaggaaaagtctcgccttatgttccgcatgtacgactttgatgggaatggcctcatttccaaggatgagttcatcaggatgctgagatccttcatcgagatctccaacaactgcctgtccaaggcccagctggctgaggtggtggagtccatgttccgggagtcgggattccaggacaaggaggaactgacatgggaagattttcacttcatgctgcgggaccacaatagcgagctccgcttcacgcagctctgtgtcaaaggggtggaggtgcctgaagtcatcaaggacctctgccggcgagcctcctacatcagccaggatatgatctgtccctctccctgagtgagtgcccgctgttcccgcagcgacattgagactgagttgacacctcagagactgcagtgccccatggacacagaccctccccaggagattcggcggaggtttggcaagaaggtaacgtcattccagcccttgctgttcactgaggcgcaccgagagaagtttcaacgcagccgtctccaccagacggtgcaacagttcaagcgcttcattgagaactaccggcgccacatcggctgcgtggccgtgttctacgccatcgctggggggcttttcctggagagggcctactactacgcctttgccgcacatcacacgggcatcacggacaccacccgcgtgggaatcatcctgtcgcggggcacagcagccagcatctctttcatgttctcctacatcttgctcaccatgtgccgcaacctcatcaccttcctgcgagaaaccttcctcaaccgctacgtgcccttcgacgccgccgtggacttccatcgcctcattgcctccaccgccatcgtcctcacagtcttacacagtgtgggccatgtggtgaatgtgtacctgttctccatcagccccctcagcgtcctctcttgcctctttcctggcctcttccatgatgatgggtctgagttcccccagaagtattactggtggttcttccagaccgtaccaggcctcacgggggttgtgctgctcctgatcctggccatcatgtatgtctttgcctcccaccacttccgccgccgcagtttccggggcttctggctgacccaccacctctacatcctgctctatgtcctgctcatcatccatggtagctttgccctgatccagctgccccgtttccacatcttcttcctggtcccagcaatcatctatgggggcgacaagctggtgagcctgagccggaagaaggtggagatcagcgtggtgaaggcggagctgctgccctcaggagtgacccacctgcggttccagcggccccagggctttgagtacaagtcagggcagtgggtgcggatcgcttgcctggctctggggaccaccgagtaccaccccttcacactgacctctgcgccccatgaggacacgcttagcctgcacatccgggcagcagggccctggaccactcgcctcagggagatctactcagccccgacgggtgacagatgtgccagatacccaaagctgtaccttgatggaccatttggagagggccaccaggagtggcataagtttgaggtgtcagtgttagtgggagggggcattggggtcaccccttttgcctccatcctcaaagacctggtcttcaagtcatccgtcagctgccaagtgttctgtaagaagatctacttcatctgggtgacgcggacccagcgtcagtttgagtggctggctgacatcatccgagaggtggaggagaatgaccaccaggacctggtgtctgtgcacatctacatcacccagctggctgagaagttcgacctcaggaccactatgctgtacatctgtgagcggcacttccagaaggttctgaaccggagtctattcacaggcctgcgctccatcacccactttggccgtcccccctttgagcccttcttcaactccctgcaggaggtccacccccaggtccggaagatcggggtgtttagctgtggcccccctggcatgaccaagaatgtggaaaaggcctgtcagctcatcaacaggcaggaccggactcacttctcccaccattatgagaacttctaggcccctgcccgggggttctgcccactgtccagttgagcagaggtttgagcccacacctcacctctgttcttcctatttctggctgcctcagccttctctgatttcccacctcccaaccttgttccaggtggccatagtcagtcaccatgtgtgggctcagggacccccaggaccaggatgtgtctcagcctggagaaatggtgggggggcagtgtctagggactagagtgagaagtaggggagctactggtttggggcaaagtgaaacctctgcttccagacttcagaaacaaatctcagaagacaagctgacctgacaagtactatgtgtgtgcatgtctgtatgtgtgttggggcggtgagtgtaaggatgcagtgggagcatggatgctggcatcttagaaccctccctactcccagacctcctcctcttctgggctccccactgtcagacgggctggcaaatgccttgcaggaggtagaggctggacccatggcaagccatttacagaaacccactcggcaccccagtctaacaccacaactaatttcacccaaggttttaagcacgttctttcatcagaccctggcccaatacctatgtatgcaatgctcctcagccctcttctccctgctccagtagtctcccttccaaataaatcacttttctgc

SEQ ID NO: 1822 - DNA, 3534 bp, Homo sapiens
tttagaagaccaggtggaactctgtgctaagaagcttgaaagagcctcacaattaattggaggactgggtggagaaaaatcaagatgggcccaagctgcagatgaccttcagataacatatgaaaatttaactggcgatgtcttagtatcagcaggagtaatagcttaccttggtgctttcacttctggctttcgacaaacatgtacaaaagattggagcatgttgtgcaagaagaaaaaaatcccgtgttcagaggagttcttgttgagtaaaaccctgggtgatccagtaaaaattagagcttggaatattgctggtttaccaacagatacattttccatagataacggagtgatcgttaacaactgtaggcgttggcctttaatgattgacccccagggtcaagccaataagtggatcaaaaactctgaaagagaaaatcagcttagtgttattaagctatcagattcagactatatgagaacattggaaaactgtattcagtttggaactccacttctattagaaaatgttggtgaagaactggatccatctttggagcctttactactcagacaaacttttaaacaaggtggcattgattgcatcagacttggtgaggtcattattgagtattcctttgatttcaaattttatatcaccacaaaactgagaaacccgcactatatgccagaactggctacaaaagtgtctttgctcaatttcatgataactccagaaggacttgaagatcaattactaggtattgttgttgcaaaggagagaccagaattagaagaggaacgaaatgccctgattcttcagtctgcagctaacaagaaacagctgaaagacatagagaaaaaaattttagaaacattatcatcatcagaaggaaacattttagaagatgaaagtgcaattaaagtcttagactctgccaaaatgatgtccaatgaaataacaaagaaacagcagattgcagaaaaaacagaactcaaaatagcagagtctcgagaaggctatagacccatcgccaaacactcgtcagtgttattctttagcattgcagacctggctaatattgatcccatgtatcagtactctctcacgtggtttgtgaacctttatatcaactctattcatgacagtaacaaatccaagattttggaaaagcgcctacgatatttaaatgaccacttcacatacaacttatattgtaatatatgccgatcactatttgagaaggacaagctgttattttcctttttattatgtgccaatcttcttctggcaaggaaagagattgaataccaggaactgatgtttcttttaactggaggagtaagtcttaaaagtgctgagaaaaatcctgatccaacttggctacaggacaaaagctgggaggaaatctgtcgggcaagtgaatttcctgccttcagaggactcaggcaacatttttgtgaacatatatatgaatggcgagaaatctatgacagtaaagagccacataatgctaaatttccagcaccaatggataagaacctaaatgaactacagaaaataataattcttcggtgtttaagacctgataagataaccccagctataacaaactatgtaactgacaaactagggaaaaagtttgtagagcctccaccatttgatttgacaaagagttacttggattcaaattgcaccattcccttaatttttgttctatctccaggagcagatcctatggccagcctgctgaaatttgcaaatgataaatctatgtctggaaataagtttcaagctatttcactgggacagggacaaggaccgattgcagcaaaaatgattaaagcagcaattgaagaaggaacttgggtgtgcctacagaattgccatcttgcagtgtcctggatgcccatgttggaaaaaatatgtgaagattttacctctgaaacctgtaactcatcctttaggctttggctgacaagctatccatcttcaaaattcccagtaacaattctacagaatggagtaaaaatgactaatgaacctcccacgggtcttcggctgaatctccttcaatcatatctcactgatccagtttctgatcctgagtttttcaagggatgccgtggaaaggaactggcctgggagaagttactgtttggagtttgtttttttcatgcccttgtgcaagagagaaagaaatttggtcctcttggttggaatattccatatggatttaatgaatctgacttgcgcatcagtatccgacaactgcagttatttatcaatgaatatgatacaattccatttgaagctatatcttacctgactggggagtgtaattatggaggaagagtgacagacgattgggacagacgtcttctattaaccatgctggctgacttttataatctgtacatagttgaaaaccctcattataagttttctcccagtggaaactattttgcacctcctaaaggcacttatgaggactacattgaattcattaagaaacttccatttactcaacaccctgagatatttggattacatgaaaacgttgacatctccaaggatcttcaacaaacaaaaaccctctttgagtccttgctcctcacccagggaggctccaaacagacaggagcctcaggaagtactgatcagattctgttagaaattaccaaagatatcctcaacaagctccctagtgatttcgacattgaaatggcactacggaagtatcctgtgagatatgaagaaagcatgaatactgtgttagtacaagaaatggaaagatttaacaatttaattataactatacgtaacactctacgggaccttgaaaaagctattaagggtgtggttgtgatggattctgcattggaggcactctccggtagcttacttgttggaaaggttccagaaatatgggccaaacgttcatacccaagccttaagcccctgggaagttacatcacagatttcctagcccggttgaactttttacaggactggtataattcaggaaaaccttgtgtgttttggctgtcaggtttctttttcactcaggcctttttaactggagctatgcagaattatgccagaaaatataccacccctattgatttgctaggatatgaatttgaggttatcccatctgatacatctgacacatcaccagaagatggtgtttatatccacggactgtatctcgatggcgcacgctgggaccgagaaagtggattgcttgctgaacaatatcccaaacttctgtttgacctgatgcccatcatatggataaaaccaactcaaaaatctcggattataaagtcggatgcctatgtctgtcccctctacaagacaagtgaacgtaaaggaactctttccactacgggacattctactaactttgtcattgcaatgttgttaaaaacagaccaacctactcggcactggatcaagcgcggggttgctttgctttgtcagttggatgactaaattggacaaatttataaaacatccaaaagttt

SEQ ID NO: 1823 - DNA, 3457 bp, Homo sapiens
tttagtatatgcacagaattgtggaacagtcacaatcaatattagaacattttcatcactccagaaagaaacctcattcttactagcagcacctccaaatattcccccaccccgctcagcaaacactaatttagtttccgtgtgcctctgcctgctctgtacacttcatgtaagtggaattatgaactaatatatggtctttgtgactggcttctttcacttggaatgttttcagagttcatccatcttatagcacgtatcagtactttattttttattgctgaatcgtattccattttatggatgtagcagattttgtttatccgttcaacagttggtggacatttgggttttccaatttttttttttttactattatgaacatttgtgtacaagtttttgtgtggacaaatgttttcattttcctgattacacacctaagagtggaattggtgagtcataagataactgtgtttagcttcttgaggaagtgccagattattttccctagtggctgcaccattttacattcccaccagcagtggatgaggctgccagtttctccacatttttgtgcatgtgaagtggctgtctcatcgtggtgtttgccttttcttaaggactcaaaagtttgcagatacaggcattcacttgccattttcttaaggtagagttgaaagtactgctgccagttcatcatctgaaatgagggctgttttctttcctgtttaattggattgcaactatttgcctttcctaaagatgaaatagtgtgcttcctacattattctgacaacattcctttaattgttaatttcagatgaatttctgaaaactgcttttatcagaacagatttacttaaatgaaggcaatagccgcaaggggtcactgctctagatatttacttctgcataggaaataagtaatcctttatagatggaatttttttttcttagttgtatttttgtatctttacatttgtttataacttatctatgctttttttgttgttgtgattattttactgttgacatggaagttctcaatctgatcatttggttatatcattgcttcttctagtaacttcatatccagtgattaaaccttttcactgctgttcacataatgaaccgttgtgattattgaatacttaaatgaggatatgtaagctgtattaaagatagtgttatttgcaaaggcattgactattgcacaaaaaattttaaaagaaaatatctcttttcaggaattgtactctcagagatgttgagaaaagatacatgggtcttggaagataattactcaaaatatgcagggaaggtagtatatctttctattttaaatgtattaagtattcctggaactatagcagtgagttggaaatggaggattgtccaagtaaaaaacatttattaaggctttaatgaaatctacctattttatggtatataatctcattaattgtccacttggaaagaataataacagatatttatttattggccagttactatgggccacaaattatgctgagctttttttaatttcatttcattttattttattttttgagatggggtctcactctgtcacccaggctggagtgcagtggcgcaatctcagcttattgcaacctctgtcttccaggcccaagcaatcttcccacctcagcttcctaagtagctgggaccacatgcatgtaccactacacctggctaatttttttttgtatatttggtagagacagggttttaccatgttgcccaggctgctaagctttttatatacagtatatagaaagagttggttttcttaaacaatatttatttctcataataactctatgaaagcaggtatagacttcttgctttctagggttggtatcttgcttgttgaggacctacccttttgtgttgccgaatttttcattgtttgagttctgtcttttgtttcagaaagccatggagttttgaaattattgttatatcattatttgttacataattatttctacttctagaatctcatgctaacttggaagtgtcttctcagcatcaagcctgatatggaggggcagctacaccctaatacgctccaaaactagttatgctttgttttatacgtaatgcttctgttattagacaagtggtttccaaatatcagaagcagtgctaggacttaaaggaaaagggggagtgttttttcttctaatagaacttttgagcagtgatgaaaggaaaacaagaagactcaaaagattataaatctcaggcacgaattagtgttctgccaattaggaacattctgattgcttgacaaggtctatattttgctgatgaggagtagaagcctgtgggaggtgggggtggaagcagcagaaggaaaagagtagcaagtatttagtaaaatgtattcatcatagtggataaaaatcaagctttggggaaaaaggtcaaactccttcaatgatgctgtacatctgtacctttactccatcctatagcaaatatttgtataactgcacagaagaaattggacaatattccttgaaaaattcttagaaagttcaactttccaagttagtatcaccccaaggaaaattatatgagtaggaatacctaatttctagccatactctagttccagttagcttctctaagtagctggaactgcaggcgtgtgccaccacacctggctaattttttgtatttttggtagagaaggggttttgccgtgttgcccaggctgctaagatttttatatatagtatatagaaagagttggttttcttggccaggcatggtggctcgcacctgtaatcccagcactttgaaaggctaaggcaggtgaatcacctgagctcaggagttcaagaccagcctggccaacatggcgaaactccgtctctactaaaaatacaaaaattagccgggcatggtggcacgcacctgtaaccccagctacttgggaggccaaggcaggagaaccacttgaacccaggaggtggaggttgcagtgggccaagattggccactgcactccagcctgggtgacagagcaagactctgtctcaaaaaagaaagagttggttctgttaaacaatatttatttctcataataaccctatgaaagcagatacagacttctggctttttaggattggtatttcacttgttgaacacctacccttgtgtcagatgtatagcaggttaacaaagtcaatacagtgatacacttgacataatctttgttctgagtttttttcccaattatagtaaaattggaggtcttaactgttctacattagataaatatatgcatttgttttaaagagctaagcaatgagaatcttacaactagagctgaagttcaagaaataaatgtccaatgattaaattttttccactgctgttcacatcatgatttgttgtgattaatgtatgtggatgaggacat

SEQ ID NO: 1824 - DNA, 3716 bp, Homo sapiens
tttgaaggatggcctgtttctcactaagcatgtaaaatgtttagccctgtcatctgctgtccactcagcagcgagagggattctttaaaaatactaagtcaaatgggttcagaattctccagtggcttctcatctcattgcttaattgcctgtacagatctggctctttgttgccccgcctgtgatctcttctcccaccactgtccctcactttctctgttctgttcagtggacctcctgtattacatagtatgcactcacactcgtcactatttttttctgtgcttgccttcctctgttacatgtattcatctcctgcctctgatatgcaagttccttgagggcaggaactttgttttgtttactgctgtattactaactcttagaacaattatgacacatagtaggcgctcaaatatttttgaatgaatacattaaatttggtaagttgatatttattacagaggatatcctttaaatccagatatttctaataataaaagctaatagttattgagcatttgccatgtgccaagaacaaaggtgacaacattgttatgttcaattttcttatgaggaaattgggcacagaatgccaagagtgtgccacagatagcacatctagaagatagtctagatttaaatctagatgatatactttcagaatatgtatttagcagtttatgctaatcttttacaagacatcatgtaaacaaaaaaattgttatacaggcatacctcagagatattacaggtttagttccaaaccactgcaataaagtgaatattggaataaagcaagtcatacaaatttttagtttcccagttcatataaaagttatgtttccactatgtggtagtctattaaatgcacaatggtattatgtttaaaaaagtacataccttaatttaaaaatatcttattgctaaaaagtacagccatctgagctttcagcaggtatttatcattctgctggtggaaaatcttgcctccatgttgatggctgctgacttatcagggttgtgggattgctgaagtttggggtggctgtggcaatttcttaaaataacaatgaagttttctgcatcatagattcttcctttcacagatgatttctctgtagcatgcaatgctgctcgatagcattttacctaaagtagaacttcttttataattggagtcaggctgggcgtggtggctcatgcttgtaagcccagcactttgggaggccaaagtgggcagatcacttgaggtcaggagttcaagaccaacctggccagcatggcaaaatcctgtctctactaaaaatacaaaaattcggccactttccatcttttctaagcatatttttaatacttgggatcattctctctatactgtttcttattcaacattaagttatcattttccctgtgttgaataatattcttaggaaaatgattgttagctcttgatagttatattagtgtatgatttcccttgctaattatttcaattgtttccagctatttgttattataaatcaagattttgtataaatcttcatacttctgtttttttcttaatagaatgttctaaaaataagtcaaaggatataaactttttaaagatttttgtataaatcttcatacttctgatttttttaatagaatgttctaaaaatagaataagtcaaaggatgtaaacctttgaaagattttttatacacactagctcttgacaacttgttaagtaggatttaacaataggttttgtaggaatgtttttaagttggctgtttttccccagtctactcttactgtttctacatctctggggaaccagagccaatagtcactgaatatatgtctcaagaggaaccagtgcagagtaattgatttctaataaaatcactgtaaaggaattttattggggctaaagaagtatagatagatggtcaagaagttattagttctctgttctatgaacctaaaaatttattgtggtaaagttcttctgtctgttttcgtctggtagatatgcagcagcctatgaatgtgatgactcaaagttttggagctgtgaacctcagttctccatcgaacatgcttcctgtccggccccaaactaatactttgatagggggacccatgcctatgagcatgcccaatgtgatgactggcaccatgggaatggcccctcttggaaatactccgatgatgaaccagagcatgatgggcatgaacatgaacatagggatgtccgctgctgggatgggcttgacaggcacaatgggaatgggcatgcccaacatagccatgacttctggaactgtgcaacccaagcaagatgcctttgcaaatttcgccaattttagcaaataagagattgtaaaagaagcagattgaatgaagaatttttagctgtgcagataggtgatgttgggatggaaaatgctaatcaactaccctttcttttatcaagtaattaaaataaatctacataaagaaccaaaaaggctgttttataaaagtgaaatatccagtatttcagagggccaggcaagagcacttcagatgaggcagtcaaaatcatttttttccagtgaggatagaccacaagtgggtggtgagaccattgaaagcctttatcaactgaagagtccatttaacagcataatttgtgggaagactggaatagggctgaataaatgtgtttgaatctctaattttatactttcttttcctgaggaacttgatttttctgtccctggatcgccttgtcataattgggtctgttccttttactaccactcttgagtccatatatgaaatcattaaagttggatgatcagttttttataaaaatatatatttttgtccaagaaaaaaaaaaagcatacatatgtgattatggctaaatcaaaggtaactggaatgtatatacttttgctaatgttccagcaacactgctattatactatccaaatttttattgtaacaaaacctctttaagcaattggtgattgccatgggacttttcccatgtcttctgctgtaattatcctgtgcagaactaggaagaaatttttttcaggactgctctatggtttcctttaaaagaaaaaaacttctgtttgtttttagcagtcattattcacaatttgcagtgattaacttggcaaggcttccttccgtgtttatccctgtagccatcatttaagtcaggaacagtcagaaaaatatttattttattttttttttgggtgtctgcaaaggtaaaaatccattaaaaccttaagttaaatataaatgttacaactcaatgtttgcttttagattttatacagtatttgttttgttttggttttgagtgtatataatgcagcattagcaatatggttccaatagaggagttaaatatatattgttaaaggagacctgtagcagtcaaagattttattgatttaatgacaaaggaaattaatgaaaatgtttttgtttttctgctgtaattctgcattaagctcacatgaaaatcatgattctagagtttggaatgcaaaattaattgttttaccctcaagctgggaatatttttcaaaataaatactataatatagatatcaaattattacctccccatgttatgttgaaaatttttttattaaattgataaaactttatttccattatattcataatgttctgctatacataacattaaaatgttcatt

SEQ ID NO: 1825 - DNA, 3764 bp, Homo sapiens
ggccttttttttttttttttttgtagagacgtggtcttactacattgcccaagctgggaaatacggtgaaaccctgtctctactaaaatacaaaaaattagccaggtgtggtggcgtgcacctgacgacaaagcgagactccatctcaaaaaaaaaaaaaagaaccaccacttgggtttctgggccaagcccgcccacaagcacatggaaatgagctaagttgggtctgcccagagcagagcctgtgactaggatgagggggcaagagtttgggcaagtgagcccaggaagcaggagtgagggagcaaagcaggaaaagccaatacagggtgcgtggctgaggtcgctccctggcccttggaaccacaggaccctggagaagccagggaatagcccccagatggaggagaaagccttggcccaaaatgcccacctccttgatggaggttaccccaaggttccccacaaagaagctggagaaggttctgaggcgaatacagagaatgatgtggcctggaggtgggaggagctggaggggcaggtcaagagagaggtgggggacaggtgctggcagcacacaggcagccatcactgtggcaaaagggatatgcaccgcccgagtcttctgctcttggagccagacactggacagaagcaagtgcagagagcacaacccagggtgaacccttctgtgtcctgaatgcgcccagttcccaggccccgctaaccagtgtgggagtgatgccagccaggaactgcttcccatgcgattatagagtcaaggcctgtggcttgtggtccacactcaaggagcaggctaaaattcctcatgtcctcccctgtgagtgcccccccacatgctggtcactcatgggttccaggccactggtcagttcttttccatttcagaaaaagagcaataaagtacaggggtgacaaaggtgttctcacaccctcttaccgtcacgttgatcgtctcgtacaggccctgggctctggctgttcccccaagaagagcctgagctatagaaataaagaggtcggagtggatgtctgcgccgtccctccggaacacagggcttttctgcaccctgaacgtaatgaaaatttccctttttcccacaggcatcctcacggtctggccatcctcgactcctgcaggcacagggatcatcactcgctttttctgcttggcttgtcctgctcccctgcagaccacacagggcgatatgatgatggagccgcggccaccacatctcctacacgtggaacgcatcacaaaagggcctgtgttgatggtttcctgataaaaacaagaaaaatggtaacctaagtacgcaggtaaactgatgggtggttctgggaccacaatgtgcgtaagaaaaatgtctctttaaggcttgttttttatgtgcatgtgcactcaaacacactgcctaggaacccaggtgcagggcctcaatctgttcatctgattttctagaacacacaaacttctgcactccagatcatcaacttgaccacacgacactgaaaaatatgataccgcctgtctacagaagtacctgaagactcctgggagctgaacagtacatttaaaaaagattatttccccttgaattaccaaagcaattgttagaaaaataaagaagaaagtgacaactggatgcaatcccccgccccgcccccggagctgctgtgctctggttgctgagcctgtggtatcagggaaagaggagcacaggctcgtctcctcagggtcacgggggaaagacagccaggctgagttcaccaactcccccaattcccagcatacgttctctgggagcagtgccacaaccagctcttctcagtcagtggtgcaagccgtgggaggtggagtctcgggcagagccttaccatgccggagccgccacagtagtggcaatgctgcaccttggtgccgggctcgttccccttgccgttgcagcgctcacacgtgtccatgatgttcacggtgaactccttgttgaccccctttgcagcttgattgaatgtcaactccatgaagtattcctgaggctgatcaaacacggtctggaaatctccaaatgaagaggatgagaactcgccaaagatcttcctgaacagctcctcggggtccacagtggggcctcccttccagtagctatgctgggagccgctggccccaggatcgaagcctgcagagccgtaggcatcgtactgcttcctcttcacctcatcactcaaaacctacagtgaaaggcagagccactgggcatcccaggtctaccaaggcccaggaatacagacaagagttcacagcaaataaggcagccataacatttattaagtggccctgtgtgcaaacacatcctatgaggttggggtgggcctgtgactagcacctagaagagggatgagatgaccaaactgaacgctaagtgtagggcgtgaagtgcttccaaaagtctcacgaactctcccgccgtcgcgcatgctgggaaaatgtttgtgttgatcctcgcttgacctcacaggcaccctggattcttcacagattcacacttcacctctctcctcaggggacattacctcgtagagaatttatgcttcctacccttaccttcatcgaaaggttttctgcaagccagaacaaccggagtaacagaagtaacagcaacgacaatagcagtggtgcaatcctagctcactgcagcctcaacctcccaggttgaagcaatcctcctgcctcagcctccacagtagctgggtctacaggtgcacaccaccagtcctggcaaattgttttaagtttttgtagagacagggtcttgctatgttgcccaggctgctttcaaactcctggcctcaagcgatcctcccacttcgacctcccaaaatactgggattacaggcatgagccactgggcctggcccacaaaactgttaataaggactaactacctcaaaaagggggattagggagggacaaggaaaaatgtagtattcactttgtatctttttttttttttttgagacgggagtcttgctctgtcgccaggctggagtgcagtggcgcgatctcggctcactgcaacctctgcctctcgggttcaagtgattctcctgcctcagcctcccgagtagctgggattacgggcgcccgccaccacgcccggctaattttttgtatttttagtagagacagggtttcaccgtgttagccaggatggtctcgatctcctgaccttgtgatccacccacctcggcctcccaaagtgctgggattacaggcgtgagccactgcgcccggccacattcagttcttatcaaagaaataacccagacttaatcttgaatgatacgattatgcccaatattaagtaaaaaatataagaaaaggttatcttaaatagatcttaggcaaaataccagctgatgaaggcatctgatgccttcatctgttcagtcatctccaaaaacagtaaaaataaccactttttgttgggcaatatgaaatttttaaaggagtagaataccaaatgatagaaacagactgcctgaattgagaattttgattttttaaagtgtgtttctttctaaattgctgttccttaatttgattaatttaattcatgtattatgattaaatctgaggcagatgagcttacaagtattgaaataattactaattaatcacaaatgtgaagttatgcatgatgtaaaaaatacaaacattctaattaaaggctttgcaacac

SEQ ID NO: 1826 - DNA, 3334 bp, Homo sapiens
atgactccgggcggtcggagaaggtctgccgggagtacacctgccctctgcctgaagcgtccccaagtgtcccgggcccgcgtcgttgccggatgcacaatgctgacacccttcccgggggcttccagtgtattctgcctcctcttgtgttcccgttgccacccttagctccctgactcttccagccaccttcccctcctccctcttccctgaggtgcctcctcgggcgattccagagcgcccatcttcccagtccgggcaaaacccggagaggtggaatccctcgcccggagcgccccggcggccactgggcatgctccgttgtcaggcaagttcggggctgcaggcagcttgcgcgccgggcggattccagctgcggtcgcgcgtactcctcctcccaagtagggagcgggcgcatgatggcggccgcggcggcagcggctgcggggagctccagcagcggcggcggcggcggcggcagcggcagcggcagcagcagcggcagcagcagcagcgacacgtccagcaccggcgaggaggagaggatgcggcgcctcttccagacgtgcgacggcgacggggacggatacatcagcagaaatgacttgctaatggtctgtcgccagctgaatatggaagagtctgtggctgagatcatgaaccagttgggagcagatgaaaatgggaagatttcctttcaggatttcacaagatgccgcatgcagcttgttcgagaaattaggaaggaggaagtagatctttctgcaaagtcagacaactcctgtacaaagaagctgagggatagaattgcttcctggcccacgagcagtgacaacagtttgggtgccttatcagcagccagggagagctgggaatacgactctggtgccagggacctccagagcccggatgtgcagagccagtcagccctccagaagctgctcgagtatggcggaagctctttgcatcagcaggctgctctccacaaactgctcacacagtccccgcacattggcaactctgtaggaggaagctatctagagctggccaacacactccattcagcagccctggcatcactaaagggagatatagtggaacttaataaacgtctccagcaaacagagagggaacgggaccttctggaaaagaaattggccaaggcacagtgcgagcagtcccacctcatgagagagcatgaggatgtccaggagcgaacgacgcttcgctatgaggaacgcatcacagagctccacagcgtcattgcggagctcaacaagaagatagaccgtctgcaaggcaccaccatcagggaggaagatgagtactcagaactgcgatcagaactcagccagagccaacacgaggtcaacgaggactctcgaagcatggaccaagaccagacctctgtctctatccccgaaaaccagtctaccatggttactgctgacatggacaactgcagtgacctgaactcagaactgcagagggtgctgacagggctggagaatgttgtctgcggcaggaagaagagcagctgcagcctctccgtggccgaggtggacaggcacattgagcagctcaccacagccagcgagcactgtgacctggctattaagacagtcgaggagattgagggggtgcttggccgggacctgtatcccaacctggctgaagagaggtctcggtgggagaaggagctggctgggctgagggaagagaatgagagcctgactgccatgctgtgcagcaaagaggaagaactgaaccggactaaggccaccatgaatgccatccgggaagagcgggaccggctccggaggagggtcagagagcttcaaactcgactacagagcgtgcaggccacaggtccctccagccctggccgcctcacttccaccaaccgcccgattaaccccagcactggggagctgagcacaagcagcagcagcaatgacattcctatcgccaagattgctgagagggtgaagctatcaaagacaaggtccgaatcgtcatcatctgatcggccagtcctgggctcagaaatcagtggcataggggtatccagcagtgtggctgaacacctggcccactcacttcaggactgctccaatatccaagagattttccaaacactctactcacacggatctgccatctcagaaagcaagattagagagtttgaggtggaaacagaacggctgaatagccggattgagcacctcaaatcccaaaatgacctcctgaccataaccttggaggaatgtaaaagcaatgctgagaggatgagcatgctggtgggaaaatacgaatccaatgccacagcgctgaggctggccttgcagtacagcgagcagtgcatcgaagcctacgaactcctcctggcgctggcagagagtgagcagagcctcatcctggggcagttccgagcggcgggcgtggggtcctcccctggagaccagtcgggggatgaaaacatcactcagatgctcaagcgagctcatgactgccggaagacagctgagaacgctgccaaggccctgctcatgaagctggacggcagctgtgggggagcctttgccgtggccggctgcagcgtgcagccctgggagagcctttcctccaacagccacaccagcacaaccagctccacagccagtagttgcgacaccgagttcactaaagaagacgagcagaggctgaaggattatatccagcagctcaagaatgacagggctgcggtcaagctgaccatgctggagctggaaagcatccacatcgatcctctcagctatgacgtcaagcctcggggagacagccagaggctggatctggaaaacgcagtgcttatgcaggagctcatggccatgaaggaggagatggccgagttgaaggcccagctctacctactggagaaagagaagaaggccctggagctgaagctgagcacgcgggaggcccaggagcaggcctacctggtgcacattgagcacctgaagtccgaggtggaggagcagaaggagcagcggatgcgatccctcagctccaccagcagcggcagcaaagataaacctggcaaggagtgtgctgatgctgcctccccagctctgtccctagccgaactcaggacaacgtgcagcgagaatgagctggctgcggagttcaccaacgccattcgtcgagaaaagaagttgaaggccagagttcaagagctggtgagtgccttggagagactcaccaagagcagtgaaatccgacatcagcaatctgcagagttcgtgaatgatctaaagcgggccaacagcaacctggtggctgcctatgagaaagc

SEQ ID NO: 1827 - DNA, 3401 bp, Homo sapiens
agacggggtggcggctgcagcccgggtagggccaggagacccggtccacgtttgcaaacgcagccgaacgcccaggccgacccgtgccgcgccactcttctcgccgccccgatggcgttccggggctggaggcccccgccgccaccgctgctcctgctgctgctctgggtgaccgggcaggcagcgcccgtggcgggcctgggctccgacgcggagctgcagatcgagcggcgcttcgtgcccgacgagtgcccgcgcaccgtgcgcagcggcgacttcgtgcgctaccactacgtggggacgttccccgacggccagaagttcgactccagctatgacagagactccactttcaatgtgtttgtgggaaaaggacagctgatcacagggatggaccaggctcttgttgggatgtgcgtaaacgagagacgtttcgtgaagattcccccaaagcttgcctacggaaatgaaggagtttctggtgtgatcccccccaattcagtgcttcattttgatgtacttctgatggatatttggaattctgaagaccaggttcagattcacacctatttcaagcccccgagttgccctcggaccatccaggtgtctgattttgtgaggtaccactacaacgggacgttcctggacggaactctgtttgattcgagtcacaatcgcatgaaaacatatgacacgtatgtgggaattggctggctgattcctggaatggataaagggctgctggggatgtgtgtgggtgagaagcgcatcatcaccattcctccttttctggcctatggagaggatggagatgggaaagacattcccggtcaggcatctctggtgtttgatgttgcattattggacctccataaccccaaggacagcatttccattgagaacaaggtagtacctgaaaactgtgagcggataagtcaaagtggggactttctcaggtatcattacaatggcacgcttctggatggcaccctctttgattccagctactctcggaaccgcacgtttgacacgtacattgggcagggctacgtgattcctgggatggatgaaggtctacttggtgtttgcattggagaaaagcgaaggattgtggtcccgcctcacctggggtatggagaggaaggaagagggaatatccccggctcggctgtgctggtgtttgacatccatgtgatcgacttccacaacccttcggactccatcagcatcacctcccactacaaaccccctgactgctcagtgctgagtaagaagggagattacctcaaatatcactacaatgcctcacttctggatgggaccctgctggactccacgtggaatttaggcaaaacttacaatattgttctgggatctgggcaagttgtgttggggatggacatgggtctcagagagatgtgcgttggcgagaaacggacagtgatcattccgcctcacctgggctatggggaagctggcgtggatggagaagtgcccggcagtgccgtattagtgtttgacattgagctgctggagctggtggctggccttcctgaggggtacatgttcatatggaatggtgaggtgtcacccaacctctttgaagaaattgacaaggatggcaacggagaagtcctcctggaagagttctcagagtacattcacgcccaggtggcatctggcaaagggaaactcgctcctggctttgatgctgagctgattgtgaagaatatgttcaccaaccaggaccggaatggagatgggaaggtcacagccgaggaatttaaactcaaagaccaggaagccaaacacgatgaactctaaacctggcatgaaccagatggtgccagggagtacgtgacaccaagccacctgtgtggcaagacgtgcagtgagggtgcaagggtctctcagaagttgcatcattagccagtagtaggtgggtcacatagtacctggtgtacacatcggggtgggttgatatatggggtgagaagtttgggctgatcgccagtgatagtaaacaaaatctgtgcagagggccttagcatgggatgtgtccagtattgaaaaggctgcactgccaaccatgatttgtgagccttctgggaaattttgttattaaaggaatatatagtgtcagacggaagttataatcatcttggaggaaccataagaaaaggtgtccagggtatctatataaagagggttaaatttttttttaacttgctggttaaaacattttagaaatattctagagatgggcaggagagtcaaagggcttgcttgccccagcagagttcccagcagacagccatggctcttcccagcagcctgtgcaaattctgatgatggccccacccccgcacacgcacacgcacatcatgcttttccagctcatcacaccccgccccactatgggcctaccattaatagtgtataacttggaggttaaaagagccttttggacagaaaactgggccaggaaaaggcatctcagaccacaaatagagaatttgattcctcatttgccacataagtcatctgcttagcttttcctttccttttttttttttttttttttttctggaggcagagtctccctttgtcgccaggctggagtgcagtggtgccatctcggctcactgcagcactgtctcggctcactgcagcctccgcctcccgtattcaagcgattctcctgtctcagcctcctgagtagctgggactacaggtgtgcaccaccacgcccggctaatttttgtatttttagtagagacggggtttcactgtgttggccaggatggtctcaatctcgacctcgtgatccgcccaccttggcctcccaaagtgttgggattacaggcgtgactcaccatgcccagccacttagttttttcttattcccacctttctatcccatagaacactcttttttatcttccctgaaccatattgatgagataaatagggctgggggctgggccccgctggtcactcaacagagtatttcccttggccgagatggaagttttgtcccaatagatgagctgctgagcatcaacaaggtgacatttttctgctgcccatttgtgtcctggagacggtggtaccctgaaggcagaggccagctgccgcaagacagcaatgacagtccacctgccgacctgattcctgcatcatggaataaccacatggctaccttctatcctctgttcccaaatggtggtggcacttatcctgaagtcgtcaatgatttccctttgaaactactttattttactaatttaaactattttgtactgatgtagccctgaggtagttcatgaaaatgctgtgcactcattccatggaataaatgttggaaagctgatcttttctgatataaaatgttgaatgat

SEQ ID NO: 1828 - DNA, 4586 bp, Homo sapiens
aaaggaaggagggtgactgcagagaccggccctgggcagcggtaccaggggcacagggagcctggcccggcccattgtcactggaattcatgccatgcagacttctacatcaaagggaaacaaggtcgggagggccgaggggtccacggcactccgcacccacggggccaggctggcacaacgccccaacgctgcaatcctgggaagagtcacacgcgccctcccgggacccacgtgaccatcaagggagtgtggaggacacatccctcgggggtgacgcccctgcagatggagtttccccatctgtgccacccttgcaaggcctgggaaaggctgcggggccaggcggcaccgggcaagctgagtgccaggtggtggttgcaacacaccgggcaaatctgaaaccatgggacggacgagctgcacccctgggaaagagaacagaggaaggccggttatcaacgtcctcctgtgcctcagtttccagaaacaagccagactcagtgcctcagggagaccccgtgtggcctccggagagcacgggacccgccctttgtgcaggtgaggaaactgaaccccagagcagtgagggactggcctggggaccctgggctcagccctgggcgccttccctctgcccatctcagacgggcacagccagcaccgcctcaccccaacgcgcctccagactggccctccaggggcccccaggcacaatcctctcactttcttcctcaagcccctgccttcccccttcgcactgtgacccaggggctgctagcagctgggctgggctccaaagcttgaagctgcttctccaggtctctttccagggggcggcggatggctgctcactcagggacgccaacaccaacaggaagggacccatgcacggatctgacttccctcccaggctctgccttcactcaatgtccctgtggggcagctggggctcccggccgccctcccctgcccacagccgtgaggttgcttcctagggttctgttttccccacagtcggaactgaggtgctgggaggctccagaagagggatggggtggagcaagtggcctggagccccccagggcagaccccaaagagaagggtcagaagtgccctctggggcctgggcagctggggggagcccacaagcctgagaccctgtgggagggaagcgcccccaccccgtggtaagaaaggggctggtagaggctcctatgtggctccctctgtcccctcccgacctctggccaggcttgggataatccctgagtggacacaggcgccacgatggggtctcgggggtgagggctgaggaggctgagcctccaaggaccccagggtgcctgttcccactgcacacccaccagggcacagggtagggatagtgccaggagggccacagctgcagggtccatcccaggccgtggtacacaggtagaggtgggtgccagccttcgtgaagcacctgcagaagctccactcagggagagaacgaggcactcgcccaaacagatcctgggtcacacggggcagcaagagagggtggagcaagtggcctggagcaaagggttggaggccccggggcggcgcgttctcccccaagcccattccagggccatgggcaccccccagaggcagctggtgggactgcagccatgcaggtcctagagggcaggtgacaggggacgtgacagaaggggacaaagggccggcaacatccctgggggaggcacagagagggccagactgccctcggtggactgcggaacccagaacccaacggccaatcctccccctactcctcacccacagtaaggggccagggctccatgcaatgagaacccacgggtgatgccacacgggggagaagccacgcgggggagaggccatgcaggggagaggttacaagggggagaggctgcggggtgagaggtcacatggggcagaggccacgcgggggagaggccacgcaggggagaggtcacatgggggaggccacgcaggggagaggtcacatgggggagaggccacacaagggagaggccatgcaggggagaggtcacaatggggagaggccgcaggggggagaggtcacatggggcagaggccacgcgggggagaggccacgcaggggagaggtcacatgggggaggacacgcaggggagaggtcacaagggggagaggccgcagggggagaggtcacatgggggagaggctacacaggggagaggccgcacgctggggagatggtccctgcgggaagactccgaggcagtctcctgcagctccttccggcgaatccggttcaggaagtaaaaccagccctgtgtagaggtaagtgatgcttgtggggataatctccgagcagctcaccgcggcgctggccattgccgttctcttcacggtagaagagtccatttggggaaaaggtccccatcagagatggagatgttccctttcagactccaggctatggctgtggggccggctccctaccacgtgggctgggggctgggcacatgcatgcccactcctgggccctcttcctggtaggccacagcaccacacacactgcaaaccaggcctcttcttcatccaccaccaccgtccaggcctcaacatcaccgcgtggggtcttgtgccctctgggggaacttccgggctaatgaggggggacagtccccattaccggtctatctttataaggcagtatatgcaacagtggaagttctgtgagacatgttccaaccccggggctgctggcagaactgtccccaaacccaccctcgatcccacggccaggaagtgggtccaaaattgcctggccaggtcacacccctgcgtgaaccgccccacaacacccagggcgctgcctgacttgccgtccacctctcagcccctcccctcacccctgccgcagctgcagggcctaccctcgccgggggctgctccctgcttacctccctcgcccgtgcaatgcctccacttcccgcaaggcctaccgggagatgttacaggtcacggtcatatttgagcatgagaagctcacgcagagaacattctggctgagggagaggtcttggggttcaaggctgtttcttggctctgctcagccatgccaggcaggaaaatgggcacctctagtgacccaggctggctgagagcctgcagggaagagcctttggaacgtgagccactgtgggctggcaggactgcaactggcgtctccatctactggtaccgaggcgaggaggaaaaagcaggggggcccggagacggcccctctaagtctgtaactccagagctgctgctcagtccccagaacgtcacctccgagcagagcctgtgacaactgtcaactgtgaagctgtggcgtgggttgctactgaagctctgaagtcagcgaggacacagcatgtttgttctagaccgtttggctgcgggaggaagctgtacatgcacacactcgcctcaccaccctgcgagtccacaggcccctccccggagtcacctccaggtaaagggggccctgcgtcgggacttgctctctggggcgctgagatgctctacaatgagctgtgctgcagtgcacggccgcccgactgtgcacccgcaacggggaactgaacgctgcatgaagtacatctccaagttgttctttaagaaggcttagggtccctggaagaccctcgcccacacccagcgtggagcgttgttgctcacgtggccacacctctcgggatggccgtgggtctccgtgatgggcaggcgagtggaaccacaggtgcttcccgtcctggtcacaaagtcagagtggctgggccaagtgtcctgagaagagtcacctcctgggatcccatcagcctggccatagcagaacacccagacaggggcccatccccgaggctcaactcaacgcatgcagccaccgtagaaaagtctggaaagtagttcttcaaccgactagacatggtgagcccaaaacccagccatgacactcctaggcatctgccccagaggaatgaaagcatccatcccctgcaaactcatccttacacagcagcgtgactcaagacggccaaaggcggaaacaccccaaacgtccatcagtggacaaacgggcagatgcaatgcactgtctgtaccgtgggatgtcactcagccatatgaaggaaagactccagtgtggatgagccctggaaccacggtgctgcgtgatcccgtaacacatggccagaacagacacggcccggaacctgaggccgggaggatgcgtgcaggtggcggggagacagaggggcgatggcccagtttcttttgggctgaaaatggtctaaagttgactgtggtgatggctgtacaactctgaatatgctgaaaactcgaattacacacttcagttgggcgaactgtactccatgtgaattacctctcgatggttctctcctgggctcaggcgcttctcccaccttggcctcctgagtagctggaactaccattcatgtgcggaaataaaacaactcggtctcaaaaaaactcaactcaaaactcagtctcaaaaaaataaaaaagtaaaagaggc

SEQ ID NO: 1829 - DNA, 4020 bp, Homo sapiens
agttccttctttgcctttaagtactaagtggatctgtgattttaggcaagtgattgtccctttctgggcctgtggtttttttgtttgttttacttttttgttttttaattatcatgaccaaaagtcttttattattaacaacaattgcacactttttgttgggaaaaaaggtatacaaattataaaacagttaacaatgtttccttaaggagagaagtgttaatgctcttctctaattatgcttttaatggtattttgttctatttttttattttcaatagcttctttatttcccttgggatattgaagctttacttaatcttattctttctaagtagggtagagaattcctgtttcaagtctccacaaaacaaaatcccttttcctgacatagtagaaaggacaggtgcttggatgtttggttggcaggggaaaggaaagagtccaggtgctactgatagaaatattcaaccaaatcctccagttttcgactccaccactcactgtggtgccttcctcaagaccttggagctccaagtctctgaagaatatttcaggcaatgagaggagtccctgactaagtttaagctgaatgaatgaaacttccactgcaagcaaagaggatagaagagtaatcctcatgaagcggctgttgtacactcaggaggatatgttttaaataatgttcccacaaaaagcacctgcaaacatcagaatctaaaggaaaaaaatcacaacaaatgagattcagcctgattagggaaaatgattttctctatcacttttacactgcaaggccaggctttgtctgaatcttattaatacgagagcgatgccaagataactaaggctgataaagaataaatacaatttgaccggattcagctacaaatatcagatgttttgaaagattatcataagtggctcaaattcacttaattcttttataaaacaagtttttgttggactataaaatattttccaatttccctggatgacaaatggcaaaagaggttaattaaaagtcaactgaagactacttaggcacttaaacatgtaatttcttgagcttcaaacttaaatagctcaaactagttaaaaaatagcttattattgtaattcatgtatttcctctttaaatatacttttcttagtttgatttaaaatcttactaaaagtttgaaaaaaaaaactagtcgtttaataatcattccgtatttgaaggaatgaatgagaatatacatgcaagcacagagaagggtacaagggtctcttgcgatcctcagaacactaattgcaggcttctctgtccctctttacttatattttctttctcacctctgtgtcctcaccctggcaccttttctctctctatgttggattatccagctgttacacatctgtcagaatcctattacttcctcatgacccaggttaaattgttcttcctctgaggtgctctttcagactctcatattctctctcttgatttcctgttacattctttgggcaattccctcttcatttcaggaagtttataatttttactattttgttaattttattttcatatttatattctgctatgcaccgaatgcttgtgttttcccaagatttatatattgaagcctaaatgtcaatgtgatgatatttagaggtggagtctttgaagagtaattagatcatgagactagagcccagatgtatgggattaatgcccttttaagtggctaaaaatgaccagaagtctttctctttgacgtgtcctcatgacaatgagaacatgaccatctgtaaaccaagaggaaagcattcactttgatctcagaaccccagcctcctgaattgtgctaaataaatgtctttgtttaaggcactttatctatggcattctgttagagcagcatgaactgactcaaacataggccttatctcttcctttttactgtgtatttcccgggattaaggaggatacctaatgccttgtacagcatcccttgcttgggcttggtagtggaaggaagtatcaagtttcccatattgtgtctatttcagaatctatgttcagttctgtctccactggcaagtaacttttcccataaagagaaggaagaataagcacatactccagcctagaaacaaggtcaattttcaaactcaaggccaactatggaattgaatgaggcagagttgtatggccatgaagacagataaataattttagctggggtttaaaagtgattagcagacattttcagagtatactgtcaaaaaataaacacttctttattaatatttgaagttaactttgaacacttattaaagacaaattgaggatgttctgcaattagtaataggactctgagaaactctactcattatggataagctgttcatgcaacacaacaaatgagccttgttttgccttcaagaatgcctatcagaacttttaagacttggaggcctcatgttctctcaaggctccaagcccttttacacatttctcatctgcctggagccaccctctctttaccaaggtaactcctttgccaggagttttcttaaaaacaaaaatatcactggtacacaaacaggcacatagaacagtagaacggaataaagagcccagacacaaggctgcacacctacgaccacctggtctttgacaaagctgacaaaacaagcaatgagggaacagactccctgttcgataaatgttgctgagataactggctagccatacgcagaagattgaaactggaccccttccttataccatatacaaaaatcaactcatgttgtattaaaaagttaaacataaaacccaaaactataaaaatcctggaagacaacccaagcaataccatcctggacataggagtgggcaaagacttcatgacaaagacaccaaaagcaattgcaacaaaagcaaaaattgataaatagaatgtaattaaacttaagtatttcttcaaagcaaaagaaactatccacagagcaaacagacaacctacagaatgggagaaaatttttgcaaactatacgtctgataaaggtctaatatccagcatccataagaaacttaaacaaatttacaagagaaaaactaacaaccccaaattaaaagtggacaagtgacatgaacagacacttttcaaaagaagacatacatgtggccaacaagcatatgaaaaaagctcaatatcactgatcataagataaatgcaaatcaaaaccacagtgagataccatctcacaccagtcagaatggctattattaaaatgtcaaaaaataacagatgctgacagcattgtggaaaagaacatttatacactgttggtggaatgtaaattagttcaaccattgtggaaagcagtatggtgattactcagagatctaaaagcagaactactgtttgatccagtaatcttattactgggtctatatccagaggaatacaaatcattctaccataaagacacatgcacacaaatatttttgcagcactattcacaagagcaaagacatggaatcaacctattgtttatccatcagtaacaaattggataaataaaatatggtacacatacaccatggaatactatgcagccataaaaaagaatgagattatatcatcttttgtggaaacatgaatggagctggagactattatcctctgcaaatgaacacaggaacagaaaaccaaatactacatgttctcacttataagtcaaagctaaatggtgggaactcatgaatacaaagaatggaacaagagacactagggtctacttgagagtggatggtgggaaaaaggaaaggagcagaaaaaataactattgggtactaggcttaataccttggtgattaaataatctgtataacaaacccctatgacatgagtttacctgtataacaaaccttcatctatataaaataaaacaagtgaaggttttattttatttattttattttttattttatttattcctaaaataaaagtaaacaattttatatgg

SEQ ID NO: 1830 - DNA, 4410 bp, Homo sapiens
gggaattaggtcttaaaagaagtgacaatgaaagcacaggctgctgaaaaggtcaaggctgaggtacagaaggtgaaggacagggcccaggccattgtggacagcatctctaaagacaaagccattgctgaagaaaaactggaagcagcaaaaccagctttagaagaggcagaagctgcattgcagaccatcaggccttcggacatcgccactgttcgcacgttgggccgcccccctcacctcatcatgcggatcatggattgcgtactgctgctgtttcaaaggaaagtcagtgctgtgaaaattgacctggaaaaaagctgtaccatgccctcctggcaggaatccttaaaattgatgactgcagggaactttttacagaacttacagcaattcccaaaagacacaatcaatgaagaggtgatagaatttttgagtccttactttgaaatgcctgactataacaccgaaactgctaaacgcgtatgtggaaatgtagctggtctttgttcctggacgaaagctatggcttccttcttttctataaacaaagaagtactgcctctgaaggccaacttggtggtgcaagagaatcgccatctcctggccatgcaggatctgcagaaagcccaggccgagttggatgacaagcaggcggaacttgacgtggtgcaggctgagtatgaacaggccatgactgaaaagcagaccttgcttgaagatgcagagcgatgcagacacaagatgcagacagcttccacgctcatcagtggcttggcaggtgaaaaagaaagatggacagagcaaagccaagagtttgctgcacaaactaaaagacttgtaggggatgtactgttggctacagcttttctatcttattctggtccatttaaccaagagtttcgtgatcttctgttaaatgactggcggaaggaaatgaaagcccggaaaattccatttggaaagaacctaaatctcagtgagatgttgattgatgctcctactattagtgaatggaacctccaaggtctgccaaatgatgacttgtccattcaaaatggaattattgtcacgaaggcatctcgttaccctttgttaattgatccacagactcaaggcaagatctggattaaaaataaagaaagccgaaatgaactccagatcacgtctttaaatcacaagtacttcagaaaccacctggaagacagcctttctcttggaaggcctttgcttattgaagatgttggagaggaactagatccagcactagataatgttttggaaagaaacttcattaaaactgggtctacctttaaggtgaaagttggtgacaaggaagtagatgtgttggatggctttagactctacattaccaccaaattgcctaacccagcctacacccctgagataagtgcccgtacctccatcattgacttcactgtcaccatgaaaggtctagaagatcagttactggggagggtcattctcacagagaagcagtggctacgcggggcagcatcctctacttcctcattactgagatgcgcttggttaatgagatgtatcagacttcgcttcgccagtttctgggcttatttgacctttccttagccaggtctgtcaagagcccgattacaagcaagaggattgctaatatcatcgagcacatgacctacgaggtttataagtatgctgcccgagggctgtacgaggagcacaaattcctgttcaccttgttgcttaccctaaagattgacatccagaggaaccgagtcaagcatgaagagtttctcactcttattaaaggaggtgcctcattagaccttaaagcttgtcctccaaaaccatcaaaatggatcctggacataacatggctgaatttggtggaacttagcaaactcagacagttttcagatgtccttgaccagatatcgagaaatgagaaaatgtggaaaatttggtttgataaggaaaacccggaggaggaacctcttccaaatgcctatgataaatctcttgactgcttcagacgtcttctccttattagatcctggtgtcctgacagaaccatcgcccaggcccgcaagtacatcgtggactccatgggagaaaaatatgccgaaggtgttattttagacttggagaagacgtgggaggaatctgatccacggacgccactcatctgtctcctgtctatgggctcagaccccacagattccatcattgccttggggaagagattaaaaatagaaacccgttatgtgtccatgggccagggccaggaagtccatgctcggaagctcttgcagcagaccatggcgaacggaggatgggcacttctgcagaactgccatctgggacttgatttcatggatgagctgatggacataatcatagaaactgagcttgtacatgatgcgttccgcctctggatgaccaccgaggttcataagcagtttcccattacactccttcagatgtccattaaatttgccaacgatcctccacaaggcctccgggcaggactgaaaagaacatatagtggtgtcagccaagacctgctggacgtgagctctgggtcccagtggaagcccatgctgtacgcagtggctttcctgcactccactgtccaggagaggcgcaagttcggtgccctggggtggaatatcccctacgaatttaaccaagcggactttaatgccactgtgcagttcatccaaaaccacttggatgacatggatgtcaaaaagggtgtctcctggaccaccatccgctacatgataggagagattcaatatggaggcagagtcactgacgactatgataagagattgttgaacacatttgctaaggtttggttcagtgaaaatatgtttggaccagatttcagtttttaccaaggatacaatattccaaaatgcagcacagtggataactatcttcagtatatccagagtttgcctgcctatgacagccctgaggtgtttgggctgcaccccaatgctgacatcacctaccagagcaagctggccaaggacgtgctggacaccatcctaggcatccaacccaaggacacctctggtggaggggatgagacccgggaggcggtggtggcccggctggctgatgatatgctggagaagctgcccccagactatgtcccctttgaagtaaaagagaggctgcagaagatggggccattccagcctatgaacattttcctcaggcaggaaatagacagaatgcaaagggtactcagccttgtccgcagcaccctcactgagctgaaacttgctattgatggcaccatcatcatgagcgaaaatctgcgagatgcattggattgcatgtttgatgctagaatccctgcttggtggaaaaaagcttcttggatttctagtacactgggtttctggtttactgaacttatagaaagaaacagccagtttacctcgtgggttttcaatggccgacctcactgcttttggatgacgggtttttttaacccccagggatttttaactgcaatgcgacaggaaataactcgggccaacaaaggctgggctctggacaatatggtgctttgcaatgaagtcaccaaatggatgaaggacgacatttctgcccctcccacagagggtgtctatgtctatggcttatatcttgaaggtgctggctgggacaagaggaacatgaaactcattgaatcaaagccaaaagtgctctttgagttgatgcctgtcataaggatttatgcagaaaacaatactttacgagatcctcggttttactcctgtcccatctataagaagccagttcgaacggacttgaactacattgccgctgtggatctcaggacagcccagacccctgaacactgggtgctccgtggggttgcccttctgtgtgatgtcaagtaacatgtggggagtgtccccacccaatgctttggaaaatgcaagatctaaattattgtaacctttatttctgtatgactgctggacagtgtatgttaggtcgtttatgcaattaatgagctgcataggttttccccactccttaattggatgcttatattttacttgtttcatcattagtgaccaatgtctgagtttgttgaaaatgttatttagtgatataaaagtaaatttacagcatcctaatgaagtgtggccctcaaatccacagtagtatattttcttcttacttcgctccgaagactgactagggtaagcagacagtatttctctgggaggaattattcttctgttaacgtggcctggtaacagccaagttcttgaaggtaacagggcaagtctgtgctgattttgcttctattgcctttcgtatttaggtcaagttaagagacttattttcagggtttcaagcagccaattaaaaatacctttt

SEQ ID NO: 1831 - DNA, 3898 bp, Homo sapiens
aaatagagacagagtttcactatgtggaccaggctgttctcaaactcctgggctcaaatgatacgctccacctcagccttccaaagggctgggattaccggcatgagctactgcacccggacaataatagcttttagtagggttgaggaaagacctgtaaacagcacctggcatacagtcgagctctgcccctcaatctatccaccctctcaatggtggagtccactagttgttccggatatctgttctcccggtagcaattcagtccttggttcttggttgggcatgtggctgcccagaatggaagctgcatttcccagctttctcttgcagctgggtctggtcatgttaagtaagctcaagcggtgtatgtggaagtgccacgtggcaacttctgggaactttcctgaaaagagagctggtgcagaccctctgccctcttcttcatccttttctccactccactgcctggaatgcgttatgtgattgctggagctctagctggtatcctgaaccatgaggtcaaaagccacactcaagttgctggaattattcattcaacaacatccactgagcacctgtgccatgcgacaggctgtgtgctggacgaatcaggcacagtgcttgccatccaggagctcccagtcccaatgaggaaccagcaggttcccaacaaggctacgcagaagaacccccttgactgaagcaatggaggggggtccagctgtctgctgccaggatcctcgggcagagctggtagaacgggtggcagccatcgatgtgactcacttggaggaggcagatggtggcccagagcctactagaaacggtgtggaccccccaccacgggccagagctgcctctgtgatccctggcagtacttcaagactgctcccagcccggcctagcctctcagccaggaagctttccctacaggagcggccagcaggaagctatctggaggcgcaggctgggccttatgccacggggcctgccagccacatctccccccgggcctggcggaggcccaccatcgagtcccaccacgtggccatctcagatgcagaggactgcgtgcagctgaaccagtacaagctgcagagtgagattggcaagggtgcctacggtgtggtgaggctggcctacaacgaaagtgaagacagacactatgcaatgaaagtcctttccaaaaagaagttactgaagcagtatggctttccacgtcgccctcccccgagagggtcccaggctgcccagggaggaccagccaagcagctgctgcccctggagcgggtgtaccaggagattgccatcctgaagaagctggaccacgtgaatgtggtcaaactgatcgaggtcctggatgacccagctgaggacaacctctatttgggtgagtgacctggctcattcccacagcagctcactcagggctggcccaagggctcccttgggacatgtatgaccttcaggtgggcggtgtaaatgcactgacctcctggggacagaagaaaaacacacgttctgaagccctggattcccttgcccagccctgcagaaccaggcccagaatatccagttagattcaacaaatatcgccaagccccactccctgcttccctctgagcagcaagacagtggatccacgtgggctgcgcgctcaggtagatgcaggaagcaggctgcatgggttcccagacactgtagctctgtgcctcagttttcccacctataaaacagggatactagtggtgtctacctcatagggttcctgtgaagagtaaatgagtaatcatatgtaaagcacattcgttattatccttgttaatagtaatgttattattttagttccttgtgtctggttcagggctgggcttagaggaggcctcagaaaatggggcagaagaagaactggcttaggaattagaggctgaggctttagtctccactccctaccctacctgcctgtctgctatgacctttaggaaaatttctgccccttctctgtgcctcagtttccccctctgtaaaagggccccatgctgatgctgatggttctcacctggcacctgaggatcagatgagacaggtccatagcagaccccactctcatgcatttatttgctctcatatcccagggtcccctgtcctgtccctgcctcgagtatgcctgcatgcctgccccctctcctaccctccagaacagggagggaccttggcatcggctgctttgccagccagctacaccttaccttcttgtcttttctttcagtgtttgacctcctgagaaaggggcccgtcatggaagtgccctgtgacaagcccttctcggaggagcaagctcgcctctacctgcgggacgtcatcctgggcctcgagtactgtgagtgcggggcagcttgcccactggggctggggctaggggatctggcaggcggcagagcccaggctgagcagactctgagcagctcccgtcagtcagagctgacctgccaatcagcttcagtgggagtggggcatgcacgtgtggcggggccaaaggcctttttgtggggtggggcgggcggtggactccactgggcatgtgccagatccttcgtcgtgtctggtcctgtgggtctgagtcctggctgttctgtatctttcttctgctgagttcttagcctagcttagcgttgccacggggcttcaagagatgtgggaaggaagggatttatgtccagctgctggggagagtctgtcctggcatggggccggggcatggtggcagggtggatttacctgtgaggggccctagtctgataagagctcaggagggtgatgtgagcttggcctctgtctcatttcattcattagctacattcacttgcctgggggcataggggtgaaagacccagacccgagttcacggcctagtgggagggacaggaatctaggcaggcagataatacagcgtggtgcctgccaaggctggggagcctagaggctgtaggagtgccggggggctggggaagtctccctgaagaggctacttatgattcgggtcctgagggatgagtagacttccctgctcaggttttgagggatgggcgtggaagacgatgtgcctggcataggcgtgtactctgagtctggggagaagtggagtctggctgaagcctccagtgggcagaggagggccgtggttagtgaaagatgatgctggaaacactgtccgggccacagcatgagggctgggaatccctcccctgaggtctttgctgactgcatcctgccagctctgtgaggccctgagagctttaagcatggggaggggcgtgatgggatttgtgcctgagaaagctctgtctggcagctgtgtggtggctggattggagtgtgtcatcggagggtgagaggcagccagctggccagggaggaggctgtttctgcagcccaagtgacagatggtgaggcctggattaaggcagtggcagcaggatggggataggaaggaggtggggtggtcagcatggagtgacttgccggtctggggagaggagagcccctagacacctagggtcctggcgtgggttggggaccaggggagatgcccatctctaaaatcttagcttgggccaggcgcaggggctcatgcctgtaatcccagcactttgggaggccgaggtgggtagatcacctgaggtcaggggtttgagaccagcctggccaacgtggcaaaagcctgtctctactacaaatacaaaaattagccttgtgtggtggtgggcacctgtaatcccagctactcgggaggctgaggcaggagaatcgcttgaacctgggaggtggaggttgcagtgagccgagatcacgccattgcactccagcctgggtgacaagagtgaaactccatctc

SEQ ID NO: 1832 - DNA, 3453 bp, Homo sapiens
atttcatttcgccaaaagacacaatattcactttctggtcttctctcactctccatgttctcctgagtgctcattttgtaaatgccagttatgacccatgctggatagttctctggtcgtggttgaagcttctgtaggtttgtcagcttgccttatgttacttcaaagcctgcactcaactgttcttgaagaggaatttcccttcctttaagggcatcatctttccattttggagagaacagtagaatgtcacttctaagtgtgctatgtcaccatacaatcttcctcttagatggcagagatgcatgggatgtgagcaggattgctttatagctactgctaattagatctagagcatttggagggcgtttccatttggaacaaccctctatattttggtgtctagtttttttcctagaagatttattctattttttaagctgaatacaatttttgcttaaaatgttctatcctattataatggctatgcccattcagaaagcaaaacaaaatttgtttggacaaaacagaaatttttccaatggccatgtagtttgtgaaaaaaagcagcagctggagttggattctattgtagaagaaaccataacaggagattatgccttaatcataaatggccacagtttggctcatgccctagaaagtgatgtcaagaatgatctcctagaacttgcttgcatgtgtaagactgtaatttgctgcagggtcactccactccagaaagcccaagtggtagagctggtgaagaagtacagaaatgctgttactttggccattggtgatggagccaatgatgtcagcatgattaaaagtgctcacattggtgttggcatcagcggccaggaaggattgcaagcagtcttagccagcgactattcatttgcacagtttagatatctccaaaggcttctccttgttcatggaaggtggtcttatttccgaatgtgcaaattcttatgctatttcttctataagaattttgcatttacacttgtgcatttctggtttggtttcttctgtggtttctcagcccaggttggtaaaagcatgtttttttttgtttgtttgtttgtttgtttttgtatgatattacaaatgactcttcttcatagctctttactaataaattcagagcattttttaatggctgattcaagtaatagtattacaattatgtaattgatagttgacttgagctttgtacccaagaagaatatgtacctagctggaattttatttatttattttcttatttagatagtcaaccagtgagtactccttccatgcatactttagtttttgttgaaatgtttttggtatgatgacaggtaagcttgttgtagagttttaatttagaacagaagtctgcaaatcactaataagaaatgttgaggtatctttactgggaagatggtttcttatccaacacactaaatgtatctggactgattggtactctgacatcaaagctgtttagacagcaattcatcagctaaaagttgatctatagataatgctggtaggaagaaagaaaattagcaaatgtataaattaggattctatttttatatcgcttcttatacattaaaggatagttatttaaccacacatcttcaatatcagaaaagttttgacccaatgaatcaactgtaaaatgtaatgtctatatcatttaaatatacttataaatttaaaaaatttgttaccaaaaacttaaatgtagatatggcattgacattttgaacaacaatacaagaaaaagattgtccttgaaaaggaaatggtaaccataacactcagagatttattcaattgttcttcccttctttgggtttaatcaatgacatggattcaacgatatgcatgaaggtgatttttaaaaaatcattttattcaaaaagactgaggataaatgaaatcttggcatcttcttcttacatgtgctaagggagattagtgaattcctttttacaatgaaaatacattttcaacattttttccttcttctgggaagttaagatttcttaaagtgaggcatacctgttcccattcctaattttctctttttaggataacatgccctaaactaagagtagattatgttgatatttttgccttttttttgttaatctcttgacagttgaagtaaagcagagtcttgattttagctactcagaagtagaagttatcttagtgctacttcagagtaggcgtggggctggggttatttgcatgctcataattcctcctttgtccaacaaagacaagcattggaatgtggcctgtggcttcctagtctgttgattttccttccacataagaacaaagcaagaccatctgctaacgggtgtttctaagagatctaattttcatattccaaaggcttaaggctgaagaatctcaagactatgaagggacaaaccccatttaaaaactcttagaacacagaagagtagtcagtgatttgtatttgcagacgcacaaagcttgaataggcaactgttccactaagttgtctgttaaaactgtgaagttgaaactaacgttcaatgacttctaacctctacatttaggtcattttctgggttctgataaaaatcggtcagagccagatattaagcaactagaatttttattctttcactggtatttgcattttaaaagagaacaacaagggagaacaataattgccccaaagacatgagcagcttgatggttgaacccagctgtaaggcacaccacctgtctgtgattaggtttctgaaatgtttgatttaactaacatgtttcttttctgtgtcccttcctttcccttttgtttttttacactgaaatctctagttaattgcacaatcttcattttgaatctattgttagtcccagttgaccatctgtgttctttcttaagccagtgaattgggttggaccagtggttctcaagctttagcgtgcataggaatcacctggagggctggttaaagcactgcccactgggctctagcccctagaactgtactttgagaaccactgggctagaaaacctagaagagtatcccaagttctgcttccttgaacccagaccagagtaaagtccaatctgctgactttttgttttgtcaacaacattagaccgtattcatcttttctaaagcagaggggccagttaagccaacagctgatctcccccagttgaatttttccagaggatttaaaatcctttcagccctcttgtcagaccactgtccctgaggcatattttacctgcgctaagacagggccaggtggaaaagggatgtctgttcatggtacaggatttctttccccagtttagccagtctattatatcttacctagcttaaccattagctccttgaggaaaagaagtacatctaactcatcgatacatctgtaataaaatcttgaatgttacctgcc

SEQ ID NO: 1833 - DNA, 3683 bp, Homo sapiens
agaccgcttcacacagccgcagtgccctgtgtgtggacagcctgtgggagactcgcacgcccacactcaccccgcctggctgcacccctgcccagcatgtcggcgcgccggccactgcttgccgtggccacccacgtgcacttcgaccactccggcggcctctaccagttcgaccgcgtggcagtgcaccacgccgaggccgaggcgctggctcgcggggacaactttgagaccgtgacctggctttccgatagcgaggtggtgcgggcgcccagccccggctggagggccagacagttccgggtacaggcggtgcagcccaccctcatcctgcaggatggggatgtgatcaaccttggtgacagacagctcactgttatgcacatgccaggtcactccaggggcagtatttgcttacatgacaaagaccgaaagattctcttcagtggagacgtcgtgtatgatggatcactgattgactggctcccatacagcaggataagtgactatgttggaacttgtgaacgtctaatagaattagtggacagaggtctggtagagaaggtgcttcctgggcacttcaatacctttggtgctgaaaggctttttcgattggcttctaactatatttcaaaagctgggatatgtcacaaagtttctacttttgccatgcgatctcttgcaagtttagctctacgtgtaacaaattctaggacctcgccctagtatctatactgataatatattttgattaattatatacattaattcattctgtgctatttaactgattaatagtgagcatttcatgaagtgcttttataccactattatatatcagagaaagattgagaatgaataagccaaaaagaaaattgttagtttaaattgttttctttcttccaagaaagaagccacttaaataagcttatactttgccaaagctgtcatcttgtaatatatgctctagaaatgacataaaggtttatggggaagcaaagagagattttgtggcaagagaactgcccttgcctctgtttttcttgttttattcccttgatgacctagggaaaaaaaggcatgtagagtattatgtttatactttaaacttgatatttttagtgtattatttaaagataaaggttcttgggtttaaaatacattagaacttaatgcagacatataaagtaacattgagaatgacaactaaaacattccattgttatggtcctgaattttttatgcttcatttcatgtatttattctttgtataattatagcatacatgttatgtaatataacttatgaaaagtacagtgaattttgctttattgcaaagctttaaatataaatttcagagtgcttcagtaaaaagctactatatattgttgtttgttattgtgtaggtaatattttcaattatgaaagtgaaatgcaaatgtctgttatctaactacaaattgtcagatttcttaaaaggacactgtcaggcaaatttgaaaatatacacattgagaataattttttattattatatcctattttaatattaacagctattatgaacaaaatttttcctgttaaatagcgacttcagtattgtgttatgttttacagcgttaaaacaactatgaagatctgcagctattcttttacttaacatgcatatgtactacagagggatttttaaattaattgcaaaatgtgcattagctattgacttagagtgaattgccttttgtatcctgattcacaacacctattcctgttcagtattctttgtcttgaatagagaagtctatgttcgtaaagtcatataaaaggttataccactatttagtaaaaagttttagtttggtgctgttaataataatttgctaaaaggccttttagaatatttcataaagggttttaaacagttttttcccactgcctttttattattgacatatctaaaaccaaactgaaatcgctttggaaatcagattttttaatgttaggaagatccagcaattttggtttctgaaaaattacaaaacttttctaccctacagatgcccaggttctttagttttttattcattcaactcacacacacataaacatatacatacacaaacacaatcccacatgcaaacacacacagccacatatatacatgtgtagcacagcgctaaacactgtggaggctaaaaaaagtcaaagacaacattataactaaaagtcgaaagcacacaaaatataaataatagtgtatgcaagttaatgtacattatacatgcgtgtaagggacataaatggaggggtgtgaactttggttaggcaaagtttactggaggaggggtttttgagtcaaatttggaaggatgaacttgttagatagtcagagttggaaacaaaacaatccaagaatagggatataagcattgctagtctagaatagtctattccttgtgaaaatataaatttaattttcaggaatccagtatattccaaacatcacatatttagcatgagaaaaattgatttgtgattgtgtatatgagtcattgttaatgggagacaagctgaactgccacatgccaccaaatgaacctttacttcaatcaaaaaggagggtatgattggttcaattatattaacagaatatcatgggcatttctctatgatggtcattcaaggtagtaggtctctttcaactgagtgcaacattgagaataatgatttggttcagggcaactacaaataatcacttactaagccttaaataaagccattatttttatatcaatagcacaaaggaaaaccaaaagtccttaaccactgaccatttttatcatattttaggcctttttttaaaaaatcagggtatagtaggcactaagttttattaggaaatatttaaacctgctgaaggatttatttataaaaagtgcaatttttcaaaacacattattattttttaatttcccaattttttcagtttttcaaattgtaccacaacatagaactgtgatattttgctattacttcaatgtgaataaataaggtaaagtatatcatttattgagtgcccatgctgtacatttaaaatatgcattatttaatttaatcttactcccagcaccaaaaggtaattgaccagcctcaacacaattttggacaaagctagtaactgaacacaggtctgtctgccccacacttctctttctcttgtaactgcacaatagcagaaaattggcaagatgtatttttactttccaagatgccgtgtgtgccaagaataaatgaaatgatgttaaagcataataataacatatctttaaaaagcttttcaaaatatattttcaccctgacagtgacccttgtaacttaaatgatttttggaaatattagtatgtaagtataattcaaagttgtcaaaatgtaagacatttagaagtaatttttattatttatattgttaatacttaatcactggaaattcattttccttactcgatgttttctttcaactgagaagcctaaaacaaacaaaaaccttgtgtgttatcctgatatagttgactaaatgtatttgttcttatatggatagtaatatgaatgtgacatgcaccaattgtcctattataattttcagataagtgtaactaagcacttgtgtaataaatattagtcatttt

SEQ ID NO: 1834 - DNA, 3394 bp, Homo sapiens
ctttactatctatgtagatattcttttgtgttttctttaaaattttgcagttttattctctgattaccatactctttaattctacaaattcactgtaggtcatttaacattaaatcttttagattaataattggcagtttattaaaacataaaactcaaaggatggatagaattgtattgtcgtatacatgaatataattaattcgctgagaatattaatatttacctttttattttccagaggatcaaccattttccaggaatgggggagatctgtaggaaggatttcttagcaagaaatatgaccaaaatgatcaagtctcggcctctggattatacctttgttcctcgaacttggatctttcctgctgaatatactcaattccaaaattatgtgaaagaattgaagaaaaaacggaagcagaaaacttttatagtgaaaccagctaatggtgcaatgggtcatggttttctgcaatgtactttttcaaagaaaatgtggctgaggctgcttttaataaaatacacttggccgggcgtggtggctcacacctgtaatcccagcactttgggaggccgagacgggcggatcacgaggacaggagatcgagaccatcctggctaacacggtgaagccccgtctctactaaaaatacaaaaaattggccgggcatggtggcgggcgcctgcggtcccagctgctcgggaggctgaggcaggagaatggtgtgaacctgggaggcagagcttgcagtgagccaagatcgagccactgcactccagcctgggcgacagtgcaagactctgtcaaaaaaaaatacatgagtcattttaatttaaaatgctataggaaaaaagatatttggaaatatagctaccaggatttctttgataagaaatggtgacaaacttccatctcaggatcatttgattgttcaagaatacattgaaaagcctttcctaatggaaggttacaagtttgacttacgaatttatattctggttacatcgtgtgatccactaaaaatatttctctaccatgatgggcttgtgcgaatgggtacagagaagtacattccacctaatgagtccaatttgacccagttatacatgcatctgacaaactactccgtgaacgagcataatgagcattttgaacgggatgaaactgagaacaaaggcagcaaacgttccatcaaatggtttacagaattccttcaagcaaatcaacatgatgttgctaagttttggagtgatatttcagaattggtggtaaagaccctgattgtagcagaacctcatgtcctgcatgcctatcgaatgtgtagacctggtcaacctccaggaagcgaaagtgtctgctttgaagtcctgggatttgatattttgttggatagaaaactaaagccatggcttctggagattaaccgagccccaagctttggaactgatcagaaaatagactatgatgtaaaaaggggagtgctgctaaatgcgttgaagctactaaacataaggaccagtgacaaaagaagaaacttggccaaacaaaaagctgaggctcaaaggaggctctatggtcaaaattcaattaaaaggctcttaccaggctcctcagactgggaacagcagagacaccagttggagaggcggaaagaagagttgaaagagagactcgctcaagtacgaaagcagatctcacgagaagaacatgaaaatcgacatatggggaattatagacgaatttatcctcctgaagataaagcattacttgaaaagtatgaaaatttgttagctgttgcctttcagaccttcctttcaggaagagcagcttcattccagcgagagttgaataatcctttgaaaaggatgaagaagatattttggatcttctggagcaatgtgaaattgatgatgaaaagttgatgggaaaaactaccaagactcgaggaccaaagcctctgtgttctatgcctgagagtactgagataatgaaaagaccaaagtactgcagcagtgacagcagttatgatagtagcagcagctcttcagaatctgacgaaaatgaaaaagaagagtaccaaaataagaaaagagaaaagcaagttacatataatcttaaaccctccaaccactacaaattaattcaacaacccagctccataagacgttcagtcagctgccctcggtccatctctgctcaatcaccttccagtggggacacccgcccattttctgctcaacaaatgatatctgtgtcacggccaacttctgcatctcggtcacattccttaaaccgtgcttcctcctacatgaggcatctgcctcacagtaatgatgcctgctctaccaactctcaagtgagtgagtctttgcggcaactgaaaacaaaagaacaagaagatgatctaacaagtcagaccttatttgttctcaaagacatgaagatccggtttccaggaaagtcagatgcagaatcagaacttctgatagaagatatcattgataactggaagtatcataaaaccaaagtggcttcatattggctcataaaattggactctgtaaaacaacgaaaagttttggacatagtgaaaacaagtattcgtacagttcttccacgcatctggaaggtgcctgatgttgaagaagtaaatttatatcggattttcaaccgggtttttaatcgcttactctggagtcgtggccaagggctgtggaactgtttctgtgattcaggatcctcttgggagagtatattcaataaaagcccggaggtggtgactcctttgcagctccagtgttgccagcgcctagtggagctttgtaaacagtgcctgctagtggtttacaaatatgcaactgacaaaagaggatcactttcaggcattggtcctgactggggtaattccaggtatttactaccagggagcacccaattcttcttgagaacaccaacctacaacttgaagtacaattcacctggaatgactcgctccaatgttttgtttacatccagatatggccatctgtgaaacagaagggaagatcgccattggttatacataacagcaattcatttttttcctctgaagttgaacatgcaaagaacatgaccattaagtgctgttttatgtatataagacatatatatgtgtgaaaatatatgcacatatgcaccctaataacatatatttattatattaaatgatatatgaaagaagaattagcagaaaatggaatataagacttaacctttctggaaacataataaaccatgttaaaattgtttacacaaatatgtgaatgtctagaatctgctaggtttataattaattccttcctactagaaatgttatttttgctgcagagtatataaaacaaattgatcttg

SEQ ID NO: 1835 - DNA, 3959 bp, Homo sapiens
cttttgtgactgctcaatgccaggccccgagtcttcttgcttggcgaggaagttgtgccccttgctctaagggacctcagtctagcagagtaagaatgcaggttgcactgtggggtgataaaattccacaatggagagttgttcccaatgccgtggaatctcagaggaggggcagacatctgctgagagatgtctgggaggctccccagaggaggtggtgctggagccgggcctggaaggatcaggcagagagctggggaaaggcattccatttggccagagcaggcggctcctccagcactgaactgtttccagtacaagtggcgttgaagggcaacaaggagtttcatgccattcataggattacagatggagaggaggctggagagggagatgagagagggcgaggacctgaacccagctcctggcagtgggaagggaaaaggaggagatggactcaacattgtgttggttgtttttttttttgagatggagtcttgctctgtcacccaggctggagtgcagtggggtgatcttggctcactgcaacctctgcctcccaggttcaagtgattctcctgcctcagcctcccaagtagctgggattacaggcatgtaccaccacacctggctaatttttgtatttttacgaaaatacaaaacacaggagtgctggtctcgaactcctgaccttaggtgatctacccgcctcggcctcccaaagtgctgggattacaggtgtgagccactgcgcctggcctgtattagctttctgttgctccctaactaataccacaagtttagccggctaaaacaatacccatgtactggctcatggtcctgtagatcagaacagcagggtgtggctggttctctgtttagggtgtcacaaggctggactcggtgtgtcaaccagacagttctcatctggaagcttgggggaaaattttgcttccaggctcattcttgtggttgaaataattcggttcctgcgattgtagaactgaggtccccatttccttgctggctgtcagctggaggctgggggccacgctcagctcttggaggtggcccacatttcttgaccgtacagcctccatcttcaagccagcgacggcacaatagatcctttctgtgcttcaaatctctgacctccgtttctgatcttgacacccggatttaaaggttcaggtaattaggtcaagctcagcaggacagcctctccttttgtgttcaactgtgccatataaagtaacgtcacgtaatcgcatcatattcacgtgctccccacacgcgcaagggaggagattacatgagggttagcgtcactggggttctcttacgattctgccttatatattttacaggtggaattgagagatttctgaccaattctgggtttctagcttggacagccggtagggggcggggggtggtaacatatttaactaatagagagagagtgcaaggaagaggaggaatttggtgagtgtaaggagactgtgtccaggcagagctggctagaaggccatggaagtgtggctcagcccagctggatgagataacacactggtggtgaaagcaacaagggtggaaaagaaggtccagccagggagtggaagatgagaagacaggagagctcagagagggagaaagctggcatgtcgacaggcctgatgaggtccaggaaaggctcccaaatgggtatgggcagctgaaattgtgtgcaaagcaggttgctgaagcggaggaaggcggggctggagaagtgagaatatcaggctgcccgtcactgtggatgaattaggcatgagcaactgaggttctcagagcagccagtaaggtgaatgggaaaggtactgctgtcctgctttaaaggagagggcagccaccatggctcacgcctgtaatcccagcgctttgggaggcagaggtgggtggatcgcttgagcccaggagttcgagatcagcctgggcaacgtggtgaaaccccatctctttaaaaaaatagagcgccacccccataaagggtcgcacagttagtgcatgtcagagcacccaggtcttctgaatgaggtcaggttctccaaggaggagggcagaacacttcctttcctttgaatgagttgcttaacgcttttgtaagccttggttttctcatctgtaaaatggggctgatgataatagctacctccaagtgtttttgtgagactagatgagataatgttttatagtaggtaggtaaaatactaaacatagtgtctggcacatagtgtttaaaaagtaactgatatgatgatggctgtcattctgattgttagtcttatctctacaggccccaggcctcccccagatgtgtggagctgtaccatccagaatggtagccgctaggcacatgtggctatttacttatttatatttgtttatttttagagatgggggggtctcactatgttgcccaggctggagtgcagcagctcttcacaggtgcattcttagcgcacgacagcccaggagtcctgggctcaagcagtcctctgacctcggcctcctgagttgctggaactatgggcatatgcactactgcacccagcacatgtggcgatttaaatttacaatttaattaattaaaatttaataaaataaattcagttcctcagctgcactggccccatttgcgtgctcgttagctcgtggcttgtcttgttggacagcgcagatggagaacgtttccgtgactgcaggaagttccactgcagagcgctggcagagatgatggtgggaggagcagggctcccactaacaccctcctgcccctgttcctcagaagcccaccacgggcctgttggccatcacgctggccctccacctctgtgacttggtgcacattgccggctttggctacccagacgcctacaacaagaagcagaccattcactactatgagcagatcacgctcaagtccatggcggtaagtgcctggcttgtgagcatggtgggccagggcgtggacgggcggacagtcagaggggcactgggtgagtgggagcagtgctgagacccagaggtggctcccgcagtcagaactggaaccgaggcacctggactccctggccagcatcctccatgttcagccacatgggctttgtcttccttccaagagccagcctggggaagggagctcccaagaagtgtggggccattgggaggggcagggagactttcctggggacagagaggtccctgggagtccctcagtttatttccttggctgtctccacaggggtcaggccataatgtctcccaagaggccctggccattaagcggatgctggagatgggagctatcaagaacctcacgtccttctgacctgggcaagagctgtagcctgtcggttgcctactctgctgtctgggtgacccccatgcgtggctgtgggggtggctggtgccagtatgacccacttggactcaccccctcttggggagggagttctgggcctggccaggtctgagatgaggccatgcccctggctgctcttatggagccgagatccagtcagggtgggggcgctggagccgtgggagcccggccagggcagggggctcgttgctgtggcaccccctctctgccagcaccaagagattatttaatgggctatttaattaaggggtaggaaggtgctgtgggctggtcccacacatccaggaaagaggccagtagagaattctgcccactttttataaaaacttacagcgatggccccaccaaggcctagacacggcactggcctcccaggagggcaggggcattgggaatgggtgggtgccctccagagaggggctgctacctcccagcaggcatgggaagagcactggtgtgggggttccaccgagaaggggacctcatctagaaaagaggttacaaacctaccattaaactatttttcctaaaacgg

SEQ ID NO: 1836 - DNA, 3359 bp, Homo sapiens
agttgcttggaggagcttggagaaaccagaagtgagatccaggagaagtaaggccctggagtgccaggagcccttctcccaaagatggagaaataaatgaagaaatacaggaaaataagcctcttgcctaaacccccaaagcatgacgctcctctcaccattgagtttccaaacttggacaagacttctgcagagtggcttaaggtcaatggtctgaaagccaagaaattaagtctatatcaggtcctggcacccaatgcattctctcctgtggaggaatttgtacctattctccagaaaacagtatcatcgaccatccatgagaaggcaatgatacaatttgaatggcacgacgggacagtgaagaacattcatgtggacccacccttcctctataagtaccagcaacagctcagcagagctatgcggatgtatgagaggcggattgagtggctctccctggccagcagaagaatctggggcacagtctgtgaaaaaagggtggttgtactgctcgatatctctgcgaccaattccatgtacattattcatatccagcactccctgcggctgctgctggaggagcagttatccaacaaggactgtttcaacctcatcgcgtttggaagcacaattgaaagctggaggcctgagatggttcccgtgagtcacaacaatttacaaagtgcctggcggtgggccctgaacctgcggtgtcggggcagcaggaacgttctcagcgccctgcggaaggctgtggaagtagacttcaaggacaaagacaaacaccaatcgcagggaatctacctcttcactgggggcatccccgaccaggacatgcctacactcagtgcctacatggctgaggcctgtggcggctgcgacctccagctgaacgtgtgtctcttctacgtgggcgagccaaagatggacaccataccccctgcccgctatgccagtcacactgacacagccgccgcctacaaggaggtcacccgggctgcaggtggccgcttccactggtttggagacacaggcatttatgagagcgatgacatcaactccatcatgtctgagatggaaaaggctctcaactactcccaaaagtgtgccttcctcatggcctccctgaagaaccattcaggaaaagtactgggaagttcagccctcccgaaagaaaaaccaaagacacttcagctaagaagtcagcccaagaagctctgccctcccaggcccaccgtccccctgggggccagaatgagcattaaagatgaccctgacagagagaagagccccccgctgaaatctctgaaatggcgtccactcagtagcagagttggcatctcaccagctgcggcccagccaacgaaagaagggatgatggaactgaggaggaagaccaagtcaagggaagcagagacatctcttttactgttctacacagagaaagggaatgacgtgggctcagtgtacaagaagtaccctcaaggaaggggcttgagaaggactagctcttctattgacttacccagaaaggatacagtttgctcaagccaagagtgggtggcaaaatatgggctcaaaaaattgaagctggagatttccagatgcatgggtcccaactgcactcatcaaaagtcaggacagaggtcagcatccgccaaacactgcagcatcttccccagcgttgagatccatggagtggtgagacacatccagtggacgcccagggagatggaggtgtacatcaggcacttggagaaggtgttaaggcgctatgtccagaggctgcagtggctgctgtccgggagccgccgactgtttggcaccgttttggagagcaaagtatgcatattgctggacacgtcagggtccatgggcccctacctgcagcaggtgaagacagagctggttttgctgatttgggaacagctgcggaagtgctgtgacagttttaacctgctcagctttgcagagagccttcagtcatggcaggacacgctggtggagaccacagatgcagcgtgtcatgaggctatgcaatgggtgacccacctgcaagctcagggcagcacctccatcttgcaagcattgctgaaagctttcagtttccatgatctggaaggattgtacctcctgaccgacggaaagccagacacaagctgcagccttgtcctaaatgaagtccaaaaactcagggagaaaagagatgtgaaagtgcacaccatttccttgaactgctcagacagagcggcggttgagttcctgagaaagctggcttccttcaccggcggacgctatcactgccctgtgggtgaggacacactctccaaaattcacagcctgctgaccaaaggcttcatcaatgaaaaggatcccacattgccaccatttgaaggagatgatttaaggatcctggcccaggagatcaccaaggccagaagcttcctctggcaggcccaatccttcagatcccaactccagaagaaaaatgatgcagaaccaaaggtcactctttcctagagaagtgttctcagaaaagtcatcctgcaaaggaccactcactgagcaaatctcagccccgagggcaggatgggatgaaatgctgtgacctgcaggaaacatgattcctggtaccaggactctctggaagctgaggaaggaaagactttgtcttttgtgtgaggggccattcccgggtcttaatctaactctccagccctgtcccgcagcgcactctactctccagccactagattgtccctctctgggaagccctaaaccaaccccctgcctaaatggtggtgcttcttgcaaaccaaccccctgcctgaacggtgcttcttgccccctctgcctggagactcctgctcatccatcaaggcacagctcaaatgacatcagctccctgggacctatctagagcgaggggcctccagtctttctcttgcagcatcctgaccacgcagacctctcgcactcagcactctatgtcacgccaccttgctcgctgatctaactcttctccttgatggtgagctccttcgggatgagactggtgtcccaggatctgcaggtccccagaagctgccacataggagacacatggtgaacagtgagcaggcggctgagctgtgagagcctagctctggaaagcagctgatggggtggtctccaccctggttcataagaggctaatgcagagtcacagtcagcccatcctgggggaagaagaaacaagtgagcctcagcaccaccctccatccctgcccaaccaaactgaagtgaaggctgctcatctgggttcattttctaaaattaaaaacaattaattttattctactaataggatcaacatg

SEQ ID NO: 1837 - DNA, 3718 bp, Homo sapiens
ttagctgtaaattacataaatataattgtggtaacattttagaagaggttctatgttaaagcaatctgttttcaacttcatttctctctcttttttttttctacagttgatactctagtagcaatttttttgtctggctgagttttctatcttgctgcttcttttttcatgaacacgtggagcatatccagtcttacctgcttttatttttcttccctattccaaaaatgatatatggctttatgagccttgcattttctgtcgtttaacttccagcagtacatactggcaggagctactccaggaattaaattttcttcctgtagaaactcagtctctcccctgaacttcgtatatagtataacttacactttattgaagccaaactgaagcatgttattttattatcttggcctagaatgcatgttgagttgtgggagagctagtgttcattccatgttcagaaacccaaactgcacaagaggatgtcccatgtatatatgcaaatataatcacgtatagcatgaacattggaaaatgaggaaggcagggaataggtgtagcactaatgttaccaaggacaggttaccacataataaatacaagcttgcacacaacatatgtggaagaccttttgagggattctgactaactggtctggaataaaatgtgaggattgtgatttttcttttattttatcccttccattacacaattctaatttgcaactagatttgaaaagtcattgtttagacctatatagtagtgtgaagttttcaaagtatcttaattctttccaacttatttccctagggtttcaaaggactgtggctattgcggactcaaattacaactggttttatggtccagaaagccaattagtgttccttgataaatttgtcatgcgtaatggcagtggtaactggctagctgaccaaatcagaaggaaccgtgtggtggaaggtccaggaacaccatccaaagggcagcgctggtgcactctgcacacagaatttctctggtatgatggcagcttgaaatcggttcctcctccagactttggcacccctacactgcattattttgaagactggggtgtcgtgacttatggaagtgcactacctgcagaaatcaatagatctttcctttccttcaagtctggaaaactggggggacgtgcaatatatgacattgtccacagaaacaaatacaaagattggatcaaaggatggagaaattttaatgcagggcatgaacatcctgatcaaaactcatttacttttgctcccaatggtgtgcctttcattactgaggctctgtacgggccaaagtacaccttcttcaacaatgttttgatgttttccccagctgtgtcaaagagctgcttttctccctgggtgggtcaggtcacagaagactgctcatcaaaatggtctaaatacaagcatgacctggcagctagttgtcaggggagggtggttgcagcagaggagaaaaatggggtggttttcatccgaggagaaggtgtgggagcttataacccccagctcaacctgaagaatgttcagaggaatctcatcctcctacatccacagctgcttctccttgtagaccaaatacacctgggagaggagagtcccttggagacagcagcgagcttcttccataatgtggatgttccttttgaggagactgtggtagatggtgtccatggggctttcatcaggcagagagatggtctctataaaatgtactggatggacgatactggctacagcgagaaagcaacctttgcctcagtgacatatcctcggggctatccctacaacgggacaaactatgtgaatgtcaccatgcacctccgaagccccatcaccagggcagcttacctcttcatagggccatctatagatgttcagagcttcactgtccacggagactctcagcaactggatgtgttcatagccaccagcaaacatgcctacgccacatacctgtggacaggtgaggccacaggacagtctgcctttgcacaggtcattgctgatcgtcacaaaattctgtttgaccggaattcagccatcaagagcagcattgtccctgaggtgaaggactatgctgctattgtggaacagaacttgcagcattttaaaccagtgtttcagctgctggagaagcagatactgtcccgagtccggaacacagctagctttaggaagactgctgaacgcctgctgagattttcagataagagacagactgaggaggccattgacaggatttttgccatatcacagcaacagcagcagcaaagcaagtcaaagaaaaaccgaagggcaggcaaacgctataaatttgtggatgctgtccctgatatttttgcacagattgaagtcaatgagaaaaagattagacagaaagctcagattttggcacagaaagaactacccatagatgaagatgaagaaatgaaagaccttttagattttgcagatgtaacatacgagaaacataaaaatgggggcttgattaaaggccggtttggacaggcacggatggtgacaactacacacagcagggccccatcactgtctgcttcctataccaggttgttcctgattctgaacattgctattttctttgtcatgttggcaatgcaactgacttatttccagagggcccagagcctacatggccaaagatgtctttatgcagttcttctcatagatagctgtattttattatggttgtactcttcttgttcccaatcacagtgttagcactgaagctataaattacctggtcattttgtgatcacaagagtctatgcaaaaaaaaaaaatttctttaccccagattatcagatttttttccctcagattcattttaacaaattaagggaagatattttgacacaagaaagcaggaacgtggagaaattggagcaggaaaagaaattatcaaagcaatagaaatagcttggtggtcctatggtgtttttggaagtatttggcattgctaattgagcagtccatatagtactacttttagaagaaacaaaaagtctgttttttaaagtaatgttttttcttatgagaaaaaggtttagatagaattgggttttattaatattaatttaatgctattagcaatttccatatactatattgtggaaaagactgaagaatacaattctgagaaatataaaaaaattttaatggtatactcatgttgaaagataaatgttgctaagtcctggtatgatggtgtgagcttccttggggaagtacttcttgagttatgtaactaacaggatgttttactacagatctggatggctattcagataacatggcaaaaaatgatagcagaagatcattaaaaacttaaaatatattttattagaaaacatttatctatgaatgaatatttccttgatgctggtctctgcacacatatgcttggttacttgcatgcattcattggttgttcaataagtgagatgattacagataacttaatactgtattttccttatatggaaaaccgttatagacccaataacaactaaacctttcaaaagaaaatattttctattatgaatgttgattttcataccaaagaagatggagagtctaaaatttggatatgattcttatgtttttttaatagaaaaccttcttcaagtttattttcctaaataaacatcataattgtg

SEQ ID NO: 1838 - DNA, 3896 bp, Homo sapiens
aattagccccgcacggcgaggggggaggcgccagttttctggggacactggctgccactgtactcctacccaggggagctcacggagagttggatgaattctgggttgttagctgcggtcagctgggctcccgggagcctgttgctggtggagaacagggggcgcctggccaagggaccagcggcttgctgagactcaacatgacactcctggggtctgagcattccttgctgattaggagcaagttcagatcagttttacagttaagacttcaacaaagaaggacccaggaacaactggctaaccaaggcataataccaccactgaaacgtccagctgaattccatgagcaaagaaaacatttggatagtgacaaggctaaaaattccctgaagcgcaaagccagaaacaggtgcaacagtgccgacttggttaatatgcacatactccaagcttccactgcagagaggtccattccaactgctcagatgaagctgaaaagagcccgactcgccgatgatctcaatgaaaaattgctctacgaccagggccactggagctggtggaaaaaaacattcttcctgtggattctgctgtgaaagaggccataaaaggtaaccaggtgagtttctccaaatccacggatgcttttgcctttgaagaggacagcagcagcgatgggctttctccggatcagactcgaagtgaagacccccaaaactcagcgggatccccgccagacgctaaagcctcagataccccttcgacaggttctctggggacaaaccaggatcttgcttctggctcagaaaatgacagaaatgactcagcctcacagcccagccaccagtcagatgcggggaagcaggggcttggcccccccagcacccccatagccgtgcatgctgctgtaaagtccaaatccttgggtgacagtaagaaccgccacaaaaagcccaaggaccccaagccaaaggtgaagaagcttaaatatcaccagtacattcccccagaccagaaggcagagaagtcccctccacctatggactcagcctacgctcggctgctccagcaacagcagctgttcctgcagctccaaatcctcagccagcagcagcagcagcagcaacaccggttcagctacctagggatgcaccaagctcagcttaaggaaccaaatgaacagatggtcagaaatccaaactcttcttcaacgccactgagcaatacccccttgtctcctgtcaaaaacagtttttctggacaaactggtgtctcttctttcaaacctcgcccatcagcagccaggtgtgcactgcacagaactcaggagcacacgatggccatcctccaagcttctctccccattcttccagcctccacccgcccttctctggagcccaagcagacagcagtcatggtgccgggggaaacccttgtcccaaaagcccatgcgtacagcaaaagatggctggtttacactcttctgataaggtggggccaaagttttcaattccatccccaactttttctaagtcaagttcagcaatttcagaggtaacacagcctccatcctatgaagatgccgtaaagcagcaaatgacccggagtcagcagatggatgaactcctggacgtgcttattgaaagcggagaaatgccagcagacgctagagaggatcactcatgtcttcaaaaagtcccaaagatacccagatcttcccgaagtccaactgctgtcctcaccaagccctcggcttcctttgaacaagcctcttcaggcagccagatcccctttgatccctatgccaccgacagtgatgagcatcttgaagtcttattaaattcccagagccccctaggaaagatgagtgatgtcacccttctaaaaattgggagcgaagagcctcactttgatgggataatggatggattctctgggaaggctgcagaagacctcttcaatgcacatgagatcttgccaggccccctctctccaatgcagacacagttttcaccctcttctgtggacagcaatgggctgcagttaagcttcactgaatctccctgggaaaccatggagtggctggacctcactccgccaaattccacaccaggctttagcgccctcaccaccagcagccccagcatcttcaacatcgatttcctggatgtcactgatctcaatttgaattcttccatggaccttcacttgcagcagtggtagaatgcccaatgcaccagtgctatggaagaccaatggagttccatgggggaaagcacacagccatacatactttactgtccaaaaacagaagaagaagaagagaattaaaaagaagcaatgatttctgtgccaatgaacaagaacaaaagtcatttttagaaatacatatactgtaatatttaccaacagtcagtaactgttaatgattccaacaatgcattaaaagaatgtgctttctcagattaaggatgccaaaaaagatatttcactgccttttcaaagaccagtatattttctagcccataatttttctcaggcattgttggggcataagctcacactgtaagcttttctcatgaattcactagacataacgtggaaggaaaacgtagtcttttgggagtacagggaagccagcccctcaaagcttatggaagacatacctgcaatggaagctgttgcccaatgtctccattactatctttcaaaagagaagccagacccagcttcagatcaaaagttcttgagacagaggaacaaaaccaatcgatttccagggaagctaatcaactctcttttccctctaccacaaaactgccctgctggagtggttctgaacctgtacccaggactcgatgtggtcactaataacaattaacctgaactgagtccacagaactccactcggaactttcttcttttttaactagtggcccaatcattcccaccatctctgtgctgataagtacgtgtcctagatgagaaccctgaagaatgcagaccttcttcccccgaaggagatgccacaagctctccaacacggccccctttagttccaaagactagagatgaccacattggtagaagtatatctcgaggcacaggaagggagccccaccagggataattcagacaggactagagaataacatcatttcacataccctgggataaacaccctgggttcctatagaaggactattacttatgggagtccaacttctccttttgttttgttattatcagtttatctttctcccactccacttttccttcaaggtaccaatcctttcctgttcctcgtttggccatctttctttttctgcctccacattgggaggggaggacttctcagttctaacaagctgccatactcctaagaaagccatttttgaaaaatttaacaatccaggttcttctggagaactcattctccacacgcacagtttgctgcaaaaggaagttgcaagaatttcttgaggaagaaactggtgacttggtccatcagtcacgaagttctttctattctcgtttagttttcaagaaattattggtttgtgttgctctggggaaattggaaatcattacattgtaaagacaaatatggatgatatttacaggagagaatttcagatctgggtttttgaaagaaaacagaattgcgcattgaaaacgatggaaggaaaaagacaatggtctaatgtgcattcctcattacctctcgtggctttggctgggagttggaaaaagctaaaatttcagaacagtctctgtaaggctctctgtggctccagttcaccattttatattgttgcatgctgtagaaaggagctattgctgttgttttgtttttttatttaaatcactaaggcactgtttttatcttttgt

SEQ ID NO: 1839 - DNA, 3937 bp, Homo sapiens
attgtctactgaaagctgccgctgaagctgccgccgttgcctccgccgccaagagtgagcgagcggacccgcgatggagaccatggcgagcccagggaaagacaattatcgaatgaagagctataagaacaatgctctaaaccctgaagaaatgagacgaagaagagaggaagagggcattcagctccggaagcagaagcgagagcaacaactttttaaacggagaaatgtggagctgattaatgaagaagctgccatgttcgatagtcttctcatggactcttatgagagtgtgatcacaagagagatggtggagatgctcttttctgatgattctgacctgcagttagcaaccacacagaaattccggaaactgctctccaaagagcctagtcctccaatagatgaagttatcaacactccaagagtggtggatcggttcgtggagtttctgaagaggaatgagaattgtacattacagtttgaagctgcctgggctctaacgaatattgcctctggaacctctcagcagaccaaaattgtcattgaagcaggggctgtccccatttttatagagctgcttaattcagactttgaggatgttcaggaacagtctgggcactgggaaacatagctggagatagctctgtttgccgagattacgtcttgaactgttccatccttaatcctttgttaacactccttaccaagtccacacgactgacgatgacacggaatgcagtctgggccctgtcaaatctctgccgagggaaaaacccacccccagagtttgcaaaggtctctccttgtttgcctgtactgtctcgcctactcttcagcagcgactcggacttgctggcagatgcttgctgggccctttcttatctgtctgatggccccaatgagaagatccaggcagtcatagactccggagtctgccggagattggtagagctgctgatgcacaatgattacaaagtggcttctcctgccctgagagccgtgggtaacatcgtcactggggatgacatccagacccaggtcattcttaactgttcagccctaccttgccttctccacttgttgagcagtcccaaggagtcaatccggaaggaagcttgctggactatttcaaatattactgctggcaacagggctcaaatacaggctgttatagatgcaaatatcttccctgtgttgatcgaaatccttcagaaagcagagtttcgtacaaggaaagaggcagcctgggccatcaccaatgccacatcaggaggaacccctgagcagatcaggtacctggtctcactgggctgcatcaaacccctatgtgacttgctgactgtaatggattcgaagattgtgcaagtggccctcaatggactggagaacatcctgcggcttggagagcaagagggcaagcgcagtggctcaggggtcaatccttattgtggcctcatagaggaagcctatggcttggataaaattgagtttctccagagccacgagaaccaggagatctaccagaaggccttcgacctcattgagcactactttggtgtagaagacgatgatagcagcctggctccccaagtcgatgaaacgcaacagcagttcatcttccagcagcctgaggcccccatggagggcttccagctataatatctgcctccagggaggggaggggatgggaagcaccaccagccagcggaagagcagccctctggtgggcgggaaaccagtgtccccaccatcagccaccacacacctctgctgccctggagactgtgctcttgacctgctccgcccccttccctggagggagcaccctctggacagacagaaccatctgaggctcacctttgggttttgtgacaagaaggggacgtgttgggtttttcttccttacactatattttggctgcacacatgtctttaacccaggagcccaggggtagacaaaggaggactaaggtaatcaatttgcacctttttttatttttattttttttctttttttcttcagtggtgacttccttccctttatcttttttcattcttcccggtcctctgccctgatctgtgtaactcttatcttgggtacttgagcagacggtatattccagaggtgggaggtgggaggggaagggagaaatccaaaacaaagtgttcttgctctgacagaatattaatcttgtacgcttggattgagttatttaatttttttttcttttgcacatttttcttgtattaagattgctcttcccaagagccacaagttcctggttttagtaaacccagctgcctgcattgcctgggactagaggctggggaggctaccatgaaacaaaggtccctccctccctctgactctttgcccagacctctttagtttgggggatcctcctcactctcctgaagtgtctcaagtataccggtgggagtgcaggggaggagcacaggccttcagatggggcttcccatgtgtagctactgatcccatatttcctactcaccttccaaatggtgcgacccaacttcatttgtttacttgaaaattccccctcgaggttgagagaacctctgaggtggctgtattttctcctaagcttgagatagggggctgtggtccttcctttctcctgaggagaaagtccttgctctggtgacctgtaagttgcagaggagggtggagtgagagtgtcatgtattgggatagtcagggatccctgcctttggcctttcttcttcttcttcttcctcttccatagttggatcatgtatattttacttctaaaggagagaatgtcaaaaagttctgtatttttttatattctatatattaggtaggtcaatcttaattggtctcaagaggaagaactgtctgtcatttcggtaagtaggatactgtgaggaagaccaaaaagagatatggatgcttcctcgctcaggaggcctgagcttggtccttttcctctctgcttggattctggaccaccacctgggaccaaccttcagctctggaaccttcataaagcaggtcagcgtggcctgattgtcccaggacctgaagggagcaaggatggcctcagggcctggtgaagtctgctactctgtccttactgctgaacatcctgcttgtatcaggaaactcagaagcagtttgccttgtcaaattcaatctcaatggccattgtccacataactgatcacccatggctgcctctcctattatctattatcactgaaacttagtagcctgctttttttttttttttagagctattgcgtatcttccctgtttgggatccttgtacctggtttgggttttcccttccttgtgacaattataatccagatgcctcttctttctgtttgaattacggtagtgcattgccttagtggcttgcctgtgcctctgggtggattacatatgatagtaaagcccacctgtttggatgggagtagaggaagttggtgtagaccagctgtggagctgaaggcacagtctgccccacccccacctccccactgtggttagtcagaggcatcctgctccaagctctgcttttccttcctctgaaacaatgccattcttgcttctattgctacacatctccttctggctcaggtgaaatccatgcccttctgcttatagacctaaagttcaggtacttattattggccattgatcttgaatttgccctctcctagtgctgcagtcccacttcaaagccattttctgaggaggatggtttaggtctggcaattgtccttgaaaaatcccacccatgttgtaccaccttggtgagtcatatgccactcatcagcttaggaatgatggctgccaactcccaatctcccaggaaggcagggggcagaatctttttttcacttggcctgctacctccattaaaaaaccattctcttacagttt

SEQ ID NO: 1840 - DNA, 3693 bp, Homo sapiens
attctggatctgcttcgaacctggaatatccggatggtcaccatcatgtccataatgctgtggtatgtaaaagagacctgcctgaggcttccagacaaagcttcttgaagtggccattgggcctcttgtttacagacatgcctcagacaaaattcaaagcctatgtcatcagagagtgaaaaggatatgtcttgtgttagatggaaaaaatgggcatgtcacaattcttaatgggatggaacctcagaaaaggagaatgaaaacaattgtggaggctgttgtgggaaatatggactcttgtggggaatctctccagatcttaagatgaatccttgcccaatttgggtcatttagttcccgtctcctacccagttaccgacagtggctgaggaggccaggtagggcttttaagaaggatctgagtgaagacaccatgtcctgtaggctgcagaggctgccagttactttctggaaatgtggaagtgggatgtgctcctcctgggatgtccataaacggtcctggagtcagggctatagcctagatgtccttaccaggttcccactaatgaggcaaagtatgtcagaaagggatttgtgaattaccagggagaggaaacatgtccaagtgcacatcgctagcttttgctcagcggccgaaccctgggattctaggcgacttctggagcctggtgggttagcggtgagaagatgggcgaggagggcggacttcatctcagagtccttattactagtctcatccagctttgaggcagtcagccactgtgcctactgagggagtgctatgagtcacccgcttccaaggaatggcccaggatccctccaggcagttcaccattccctgagttggcctcaagacaggagcagcatgtagcctgcaccacagacatgcaagcctgtgatgagtcacccacttttgtgttcacccaggctctcctccctgctctggatttcctggggactcatgcacatactctttttattgtaccagctgtgtgttccacctgcagatgagtcaaaacagtctaatccataaaggtctggtttgtcaaagagtgtgggtcatcaacagagagaatgcctactggggatgcccaggtcaggggtactgcagggcatcctgatgagaggcagtgtggcccctccattgggagccacctctgtgctccacaagtaccgcggggctggtgtcagctgtctctgaccagcctcttcctgactggtcaccacaggtagtgtgtgagggtctctctccaagtgtttgacctaatgttgttccttttgttatcttatcccccaaatcctatcacacctcacttgatgtctgcctcctgactcattctctagctccttctgcagttgctggatttgaggaggttcagcttaggatttttaaagctgaaaggcaggttggaatttttcttttcaatgaagtaaatctatctgaattatacaagcttttttgctgggacactgtctatatggaaggctctgagagcgcactggcgcagggtttacactgtaccacttgggctggggaaaattatcttttgatctatgaagtaagacgcagggttacagttactgctgccttactagtctctgcttaaagatggtttggaatttactgaaataattgcattgtaaaagttgtacaggttgggaaagatgtggatactgcttttccagctttcttctgcactctgtttcaggatgaccatatcagtgggctattttgggctttcgcttgatactcctaacttgcatggggacatctttgtgaactgcttcctttcagcgatggttgaagtcccagcatatgtgttggcctggctgctgctgcaatatttgccccggcgctattccatggccactgccctcttcctgggtggcagtgtccttctcttcatgcagctggtacccccagacttgtattatttggctacagtcctggtgatggtgggcaagtttggggtcacggctgccttttccatggtctacgtgtacacagccgagctgtatcccacagtggtgagaaacatgggtgtgggagtcagctccacagcatcccgcctgggcagcatcctgtctccctacttcgtttaccttggtgcctacgaccgcttcctgccctacattctcatgggaagtctgaccatcctgacagccatcctcaccttgtttctcccagagagcttcggtaccccactcccagacaccattgaccagatgctaagagtcaaaggaatgaaacacagaaaaactccaagtcacacaaggatgttaaaagatggtcaagaaaggcccacaatccttaaaagcacagccttctaacatcgcttccagtaagggagaaactgaagaggaaagactgtcttgccagaaatggccagcttgtgcagactccgagtccttcagtgacaaaaggcctttgctgtttgtcctcttgacctgtgtctgacttgctcctggatgggcacccacactcagaggctacatatggccctagagcaccaccttcctctagggacactggggctacctacagacaacttcatctaagtcctaactattacaatgatggactcagcacctccaaagcagttaatttttcactagaaccagtgagatctggaggaatgtgagaagcatatgctaaatgtacattttaattttagactacttgaaaaggcccctaataaggctagaggtctaagtcccccacccctttccccactcccctctagtggtgaactttagaggaaaaggaagtaattgcacaaggagtttgattcttaccttttctcagttacagaggacattaactggatcattgcttccccagggcaggagagcgcagagctagggaaagtgaaaggtaatgaagatggagcagaatgagcagatgcagatcaccagcaaagtgcactgatgtgtgagctcttaagaccactcagcatgacgactgagtagacttgtttacatctgatcaaagcactgggcttgtccaggctcataataaatgctccattgaatctactattcttgttttccactgctgtggaaacctccttgctactatagcgtcttatgtatggtttaaaggaaatttatcaggtgagagagatgagcaacgttgtcttttctctcaaagctgtaatgtgggttttgttttattgtttatttgtttgttgttgtatccttttctccttgttatttgcccttcagaatgcacttgggaaaggctggttccttagcctcctggtttgtgtctttttttttttttttttaaaacagaatcactctggcaattgtctgcagctgccactggtgcaaggccttaccagccctagcctctagcacttctctaagtgccaaaaacagtgtcattgtgtgtgttcctttcttgatacttagtcatgggaggatattacaaaaaagaaatttaaattgtgttcatagtctttcagagtagctcactttagtcctgtaactttattgggtgatattttgtgttcagtgtaattgtcttctctttgctgattatgttaccatggtactcctaaagcatatgcctcacctggttaaaaaagaacaaacatgtttttgtgaaagctactgaagtgccttgggaaatgagaaagttttaataagtaaaatgattttttaaataac

SEQ ID NO: 1841 - DNA, 3458 bp, Homo sapiens
ccagtttcagctcagtccctacattaccccactacctagcagccaccctaccactgtctcttgtgtatcaaggcctgcactgagctcaccttgaactgggaatctccatttctgacctcaggcctattagaggccttggctggcatagaccacggaatctgccagggcacaggcctcagctccttcctcagcccaatgtggaggggacccactgactcctcatctttgccctgagcttctatctcagctgtcctcccgcctgccattccctgggaatgccatccccatcctcaagttgtctcaaagtcctttgtacaggaagccatccttgattagattcctcacaatgtgtggcactgccaggcttcttccctctgccaccctgcaccaggggctccctagggcagggcttgtggtgggaaaactgaacagcaggtttccacggaggatctaccccgtctcttggtatcctggccctgctcccagtagctcagcaaacatatgggaaacttcttgcaaaaggagctttttctaaggagcaaaaggaaaaggaaatctgcccccaaatcagggcctccctggggccttagcaggggccctgcctaagagtttctcatttgtctccgaagtgtgccccaccctcacccaccattgccagggaggggtttggacacaggaaggccatgctcccagagaaaggtgcatctgagaacctgggactgagttttgggggtatcactgggcccccatggggctcacccttcctctgcatcgtggcacggagatcctgcccgctgggccgttcgcccccaccagctgccgtctcccctgcgtcctgggcgtggtctgactggcccacagtcagaatctgcactgggccttgggcctcagacttgtcttctgccagtgctgctggcccgctggtgcctgcaggccacggacacgcctgagttacatccaggaggaggagaggagggcctggattctcagacgtccatgaaggggatgagggaagagtggggaaaccctctgcaaaactttatttgcaaaactgatttttataaaactaatgattgcaccagcctgttaacaactggtaagctagtaagggatgtgggcttcatttcttctgctcttcccccaaattaattgccgagggttggtttacaacacctcacgtccttaaagcagacggcagccatctacaaaaccaactgcacagcggaaaaacaagatggagaacaaggactgatccagaccataggcaaggccagcaatcattcatggacacgaccagctacaagccatcaatgctggtgttttcttccacaaacagacacaacatacacacgtgcagtaactcacatacatcattaaaaacgtgggccccttgagaaagattgcaattggcatacactcgccttcccaaatggagcatctcccatcctacgtcagctttcctgcccgttaccacagagcttcagcaacagaagcaaggcctgacccacacaggtggcagccaccctgcccgcctactgagctatgcccagagtgctcggccagctccagaagcccatggcctgtgacacatcactgtccaaccgtgacgcagtggcctggaaaccactgtccgtgaacaaaagttgaggaaacggggtgtgtagccaagagacaggacctggggcaggtaccgccaatcactgtccttaatctttaggggtcttttctggagaaagaggagcagagggaacaggctggtctgtggtccagagggtggaacctggactagaatatggagtcaagggaagtccacattatacgaagagctgacggcgagggctgcataaggatggggcaagctgcctgggaagcagtcagcccccagtgcagtgagtgtcctagtccaggctgggtgagatcctccttgaggggtcatgataaagggtgctcaggccaaggtagctgaggtgggggacggtggttctgggccacagctgagcaggacttcacttcctggcagtgtggtaggcatgcccacacccagaggcagcccaggcacctcccaagctagatgaggcctgtgagccacctgagggggtgcccagagtggcagtctgtgtcttccctgaggctgttcatcctatccctcccctccaagtcaggaggacaaaccttccccagccctacagtggaggccaggcctgctgggcagggctgtagagaatgtgagctgacctttgtgctttcccttcttctccttcctagcggcgccaccctggccccctgctgtagctgccgccttggttctcttggctgaagctggtgctgttgggcgcgtggctcccagctgcacactggcgagtgagtcggcctcttgaactgctcaggaaacatccccagatggagagagagaaacaggcagtgggtgagaccagagctcccacctgaacacagtccccagcacagcatttttgactgcaccccgagtcccaccagggcccctgtaccacttctacagcccacaggatcaggcccactcatctctactaggcaaagattccagggcaggcccagctggaaggaggcggcacccccagcccagtgtaatcaagtcaacagccagaccaaaacctgtgatcagccaacaaagtgcgcactcaaaagttctgggccaccaaaccatactgagcctgaacaggggcagggagaatgtctgagaggatatggccattgaagacggggaagaaagaacaaaggctgcatcttctggaagagaccacaaccagggcaagcactccagggagcctacgagggggctctgcggggatgagcccatgggaggctggggtgtaggagtgctcagaacaacaactctgggacacaagaagctacaggcaccaacagtgaggtctcagaagggtcccagctggtggcctccaaattctccatactgcagaaccccaatctgctcaaaatccttgaatggtttctgattgctcttaagctgaagaccaacattctctcccttcccctaggtctaaaataaacacatactccccacctctggggcaccaagagttgcagccacaccaggctggtctgttgcctcacatgcactgcactccctcttgccacagggcccttgctcctgctgcctgcactgccctccccctcgcccccctcagtgatcaactcccactcatcctgcagatttcagcttggatgtcacctcccgagggacgctgtgcctgcctccctcgtcagagcaggtgttgtcatctactcacagaatctggcttccttccacaaagcacccccgtgagcatctgtttaacattgtctctccacctagactgtaaggtccgtgaaagcagggaccacacccatttgtgctcacttgggacctacagcctctaatccagagcctgacacaaacctcaataaatatttaagaactg

SEQ ID NO: 1842 - DNA, 4369 bp, Homo sapiens
attcagggtcaaatcattcagagcctcctagaccatgtgaacacatgtattatgctgtggagatactgtttaataggcagtctgcttttttttctgcagtaccaaatatgccccaacagcggcaagaccagcatcatcagagtgccatgatgcacccagcgtcagcagcgggcccaccgattgcagccaccccaccagcttactccacgcaatatgttgcctacagtcctcagcagttcccaaatcagccccttgttcagcatgtgccacattatcagtctcagcatcctcatgtctatagtcctgtaatacagggtaatgctagaatgatggcaccaccaacacacgcccagcctggtttagtatcttcttcagcaactcagtacggggctcatgagcagacgcatgcgatgtatgtttccacgggctcccttgctcagcagtatgcgcaccctaacgctaccctgcacccacatactccacaccctcagccttcagctacccccactggacagcagcaaagccaacatggtggaagtcatcctgcacccagtcctgttcagcaccatcagcaccaggccgcccaggctctccatctggccagtccacagcagcagtcagccatttaccacgcggggcttgcgccaactccaccctccatgacacctgcctccaacacgcagtcgccacagaatagtttcccagcagcacaacagactgtctttacgatccatccttctcacgttcagccggcgtataccaacccaccccacatggcccacgtacctcaggtaataccagctttagccaactttctgtgaaggccaagtagaatgtgaaggttatcagtaagcagctagaggctctcccagctaggaaaccctgtgtgtcatgccatttgcctgtctccctttccctctcaaatacacgtgatctggccctaagggaatgtttgtgtggttttgtcatgggatcagtgaaggtgctgattggtcagtcctttagttttccaactgagaccttaaaaatatctttgactctggaatgcaacccagtccttctttcctttctgtgtctgctttgctacgtctatatagcctcactactatatatatgtgtacatatatattcccctacacacttaccttggaagccaggcagggatgatggccttcacagagtctcagctctccgaagtgactaccggggcctgtcaacttgattgttactcacatgagttccagacacatctctccaattgttttccctggttatccatatatctgctttgaccataagttgtactcttgagagggcttggccttggacattggtgcagtgtaactagaagctggaagcacccaggtggtcccatttttctttaagagcagccctggaagcactttggagctcacctccagtgtaagctgctacaggtgaaaggtgtgcttgccatctcagtggttgctgtctgcatcagctgctgacaaaggtccctgcactccagggcccaggggattgtcttaatgaggagaaggagctgcactgaagttgggctctaacgctggccttgaggccctccctggggctgttacgggtgaattggctgtattagatgtctctgctactttcataacagaactctctgaggcgggtctaagtgagacctgccacaatgaattccatttcctgttaaatagtgcgccagtgaggctctggcaaggtgtgggctagagatgcgactcagttggatctatctctcagaaggctaccttgtaagtagagttccacagctctgggaagtttgggcgtcctcaccctgcaaagtttaggttctgtggtgtagcgcactgcagttgatttgctttttgatagtggggagggaagccggtttggtccgtgtgggccagcgtggtttggtggagtcagcttcataagagctggggtcctgtaggtgtctaccagaggctggtggctaagtaggcatgtgaacttacatgtaagtcagggatccctaaaacctcactctgtttttgtgctgaaagggcaaaaaggttaacacagggaagctcaaatttgccatgtgcccgtttgaatatgtgagagtaaaaacggcatttcatccaaggcttatcgtagtctagaacagtgcacagtgtgggaaaaaggaaacaagggctcttcctggccctgccaaccccctgcagagctggaatccagctgtttgggctgactaaaatcacctttccaacttgacagtgagtgagaccaggttgaacttggtacagagacgctgggctggcccagatgacttcaggttactcctttccatctcactggagccattaaaaactccaactcctcctcctcctcctgctccatcagcatatctctgagagagtcacgggggcctaagagtctcttttcactgcctggtgagcagaccagaagcagagggagagaggcaaatgaacagaggtccaagtaattcacatacttgactgtgacagtctctgcttattaatgtaatctgttttcctatttgaaagggatgttatctgcaaaactacctcaggccccacatggcagcctgattctgaagcatcattgaatcttgtatgatattaagttgagaaagctgcccttggatccagtgtctaatctttgtgaagatcttaccccatacatagaatacaatgatcagaaatgtcaagggttaggacagcacagccctgacttctacccaggctcacttgttgcctgctccctgacccttgcaggatctgcccaaaggtgaagcgcgtcttcaggtcaatagataatctactagagattgtccccagagaacagaactgggccctgaggcccaccgttgccctttcctgagagtcccagcccagtgaaaggaacacagttgacatgttgttgaagccggagatgttgcctgtatgcgtaaaagagctctctgtttcaggctcatgtacagtcaggaatggttccttctcatccaactgcccatgcgccaatgatgctaatgacgacacagccacccggcggtccccaggccgccctcgctcaaagtgcactacagcccattccagtctcgacaacagcgcatttcccctatatgacgcacccttcaggtgaggcgtgtgtgtgcaggggccgccggggcaccccaaagcattctgctcgcacaggtggaatggcaggcagggccagtgcttcaagccccgcatttgagaactagcaagacccgtccaggagtgtgcacaggagggactgtgacgatcagttcagcatcagggcctgaggcttccgggagccgagtctgtgtgtgttctgatggtatacaggatttggcttgatgagaagcagcagcagcagcaacagcagcctgatgcatgcctaggactcagttggccttccttgttatgacaggctggacagggcagtgttttccttcctgagtcccaaaagtctgacatgtggggggttattaccatggcagagtttgattgtagctctggagaagatactgctgagaaagcgctgtggatggactggctttgagtgtagcgttagccccagcccctgaacaggggagagcgccctgtgattgtgctctactacttgatggctgccatggcgatacttcacagtctgacctgttattctgaaagcaatactggtgcttggctaatatttggggagggggtttgttaaggcctttttttctaccccatgaacaagtcttctgggagttttatctgaagtggttttacgtctgactggtttgtttctacccacccacccaaccctccccactttggtgcagatgggagggggaaaagcgaattcaattttgagttttgttcagctagcacgaggatagtttacaatcatgtgctgcagagacactaggctgatgtgtggtgttgccagttttctgtttcaatgttcgcttttctttttacagtacaagcccaccaccaacagcagttgtaaggctgccctggaggaaccgaaaggccaaattccctcctcccttctactgcttctaccaactggaagcacagaaaactagaatttcatttattttgtttttaaaatatatatgttgatttcttgtaacatccaataggaatgctaacagttcacttgcagtggaagatacttggaccgagtagaggcatttaggaacttgggggctattccataattccatatgctgtttcagagtcccgcaggtaccccagctctgcttgccgaaactggaagttatttattttttaataacccttgaaagtcatgaacacatcagctagcaaaagaagtaacaagagtgattcttgctgctattactgct

SEQ ID NO: 1843 - DNA, 3689 bp, Homo sapiens
agctctgggagaggagcccagcactagaagtcggcggtgtttccactcgttgatcagcactgaacacagaggactcaccatggactttgggctggcctgggttttcctcgttgctcttttaagaggtgtccagtgtcaggtgcagttggtggaatctgggggaggcgtggtccagcctgggaggtccctcagactctcctgtgcagcctctggattcccctttagcacctatgcgatgcactgggtccgccaggctccaggcaagggactggagtgggtggctcttatatcagatgaaggaaccaaacaattttatttggactccgtgaggggccgattcaccatctccagagacaattccaagcgtacactgtatctccaaatgaacagcctgagagttgaagacacggctaaatattactgtgcgaaagatgtgagtggcagtggctggtttttcatgtacgccatggacgtctggggccaagggaccacggtcaccgcctcttcagcacccaccaaggctccggatgtgttccccatcatatcagggtgcagacacccaaaggataacagccctgtggtcctggcatgcttgataactgggtaccacccaacgtccgtgactgtcacctggtacatggggacacagagccagccccagagaaccttccctgagatacaaagacgggacagctactacatgacaagcagccagctctccacccccctccagcagtggcgccaaggcgagtacaaatgcgtggtccagcacaccgccagcaagagtaagaaggagatcttccgctggccagagtctccaaaggcacaggcctcctcagtgcccactgcacaaccccaagcagagggcagcctcgccaaggcaaccacagccccagccaccacccgtaacacaggaagaggaggagaagagaagaagaaggagaaggagaaagaggaacaagaagagagagagacaaagacaccagagtgtccgagccacacccagcctcttggcgtctacctgctaacccctgcagtgcaggacctgtggctccgggacaaagccaccttcacctgcttcgtggtgggcagtgacctgaaggatgctcacctgacctgggaggtggctgggaaggtccccacagggggcgtggaggaagggctgctggagcggcacggcaacggctcccagagccagcacagccgtctgaccctgcccaggtccttgtggaacgcggggacctccgtcacctgcacactgaaccatcccagcctcccaccccagaggttgatggcgctgagagaacccgctgcgcaggcacccgtcaagctttccctgaacctgctggcctcgtctgaccctcccgaggcggcctcgtggctcctgtgtgaggtgtctggcttctcgccccccaacatcctcctgatgtggctggaggaccagcgtgaggtgaacacttctgggtttgcccccgcacgcccccctccacagcccaggagcaccacgttctgggcctggagtgtgctgcgtgtcccagccccgcccagccctcagccagtcacctacacgtgtgtggtcagccacgaggactcccggactctgctcaacgccagccggagcctagaagtcagctgtgagtcacccccaggcccagggttgggacggggactctgaggggggccataaggagctggaatccatactaggcaggggtgggcactgggcaggggcggggctaggctgtcctgggcacacaggccccttctcggtgtccggcaggagcacagacttcccagtactcctgggccatggatgtcccagcgtccatccttgctgtccacaccacgtgctggcccaggctggctggcacagtgtaagaggtggatacaacccctcgccgtgccctgaggagtggcggtttcctcccaagacattccccacggctgggtgctgggcacaggccttccctggtgtgaccgtgaatgtggtcaccctgaacagctgccctctctggggacatctgactgtccaagaccacagtcagcacctctgggagccagaggggtctccagagacccccagatgtcaggcttgggctcagtgcccagcgaaaggtcagccccacacatgcccataatgggcgcccacccagagtgacagcccccagcctcctgccaggcccacccttttccgcccccttgaggcatggcacacagaccagtgcgcccactgcccgagcatggccccagtgggatgtggtggccacgaggggctgtacacacagcaggaggctgtccgccctgctcagggcctgctgcctatgccccagctgtccagccaagggaggcatggaagggcccctggtgtaagctggagccaggcacccaggcccccggccaccctgcagagccaaggaaaggaagacacccaagtcaacaaggggcagggctgagggctgtcccaggctcttttggcccgaggggctgccagcagccctgacccggcatgggccttccccagaagcgaccctgtgaggtggcctcacagagaaccccctctgaggacagtgtctgaccctgcctgcctcacacagatgggccccacagcagtgggcaacctggggggcagcagcccaacctgaccctgcagggactgccccctgcagcagcagctgcttctcagtcccccaacctccctgtccccgccagagggtcttccccgaagctgcagccccaacccatggctgcccacctggaaccgggactccctgtccactgccccctccccttcggggccccatctgtgctggggcccaggttcggcctacagattcccatcattgccatggcctcctgaccttgcctatccacccccaaccaccggctccatgctgaccctcccccaggctcccacgcccagctggccggccatccccaggcacagacagtctgggatctcacaggttagcctggaccatccacctggccagacctgggagaggctggaagctgccctgccaccatgctccagggccccaggttgcagtactatggggtgagggtgtgtgtgcacacccgtgtgtacctaggatatccgagtgtacccttgtgcccccaagcacaagtctccctcccaggcagtgaggcccagatggtgcagtggttagagctgaggcttatcccacagagaaccctggcgccttggtcaaggaagcccctatgcctttcttgcctcgatttcccctcttgtctgctgagccagcaggggccacgtcctgggctgctgtgaggaggaagtgagttggtgctaggaggggctcctgtgtgtgcatgggcgggaggggtgcaggtatctgagcaccccggtctccacttgagagagcagggcaggagctccctgacccacccagactacacacgctgtgtccacgtgtctcacattatctgtggcagaggatccggcttctttctcaatttccagttcttcacaaagcaatgcctttgtaaaatgcaataagaaatactagaaaaatgatatgaacagaaagacacgccgattttttgttattagatgtaacagaccatggccccatgaaatgatcccggaccagatccgtccacacccgccactcagcagctctggccgagctcacagtacaaccacaataaactcttgttgaatgaactct

SEQ ID NO: 1844 - DNA, 4087 bp, Homo sapiens
aaaatacgcggcgggggaataggctcgagggcggtgagcagtgacaattgctaggcggagacagtgcagggaagagagaccttagaaaagatcaggactggcgggaggtatttaactgaaaggaatatctgcttcactgttgcaaccaaaccagatgccttcttccacttcaccagaccaaggagatgacctggagaactgcattttaagattttctgacctggatttaaaagatatgagttttattaatcccagcagcagtcttaaagcagaattagatggcagtacaaaaaagaaatactcgtttgcaaagaaaaaggcctttgccctttttgtcaaaaccaaagaagttccaacaaaaaggagttttgaatgtaaagaaaaattgtggaaatgctgtcggcagctattcacagaccaaaccagcatccatagacatgtggcaacacaacatgctgatgaaatttatcaccagacagcttctattttaaagcaactggctgtgacattgagcacctcaaagagtctttcgtctgcagatgaaaagaaccctttaaaagagtgccttccacatagccatgacgtgtctgcttggctccctgatataagctgctttaaccctgatgagctgataagtggccagggcagtgaagaaggggaggtgctcctttattactgctaccatgacctggaggatccccaatggatctgtgcctggcagacagctctgtgtcagcacctgcacctcacaggcaagattcgaattgctgcagaaggaatcaatgggacagttggtggaagcaaattggctaccagactttatgtggaagtcatgctttccttcccattgtttaaggatgacctgtgtaaagatgattttaagaccagcaaaggaggagctcactgttttccagaattgcgtgttggtgtatttgaagaaatcgtgcccatggggatcagccccaaaaagatctcctacaagaagcctggaatccatttatccccaggtgaatttcataaagaagtagaaaagtttttatctcaggcaaatcaagaacaaagtgatactatccttcttgattgcagaaacttctatgaaagcaaaataggacgattccaaggctgcttagccccagacatcaggaaattcagttacttccctagctacgttgacaaaaatctagaacttttcagagagaagagagtgctgatgtactgtaccgggggcatccgctgtgagcggggttcagcctacctcaaagccaagggagtgtgcaaggaggtgttccagctcaagggtggcatccacaagtacctggaagagtttcctgatggcttttacaaagggaagttgtttgtttttgatgaacgctatgctctgtcctacaacagtgatgtggtgtcagagtgttcatactgtggagcccgctgggaccagtataaactctgctgtactccccagtgccgccagctcgttttgacctgccctgcctgtcaaggacaaggattcacagcctgttgtgtcacatgtcaagacaaggggagcaggaaagtttcaggccctatgcaagacagctttaaagaggaatgcgagtgcacagcccgacggccacgcatacctagggaactcttgcagcatgtgcgacagcctgtgagcccagagccagggcctgatgctgatgaggatgggccagtgcttatgtgagcagcacctttggcattttcccaggccctcggtaaaagtaggtttggggtgactatacagagaaagcatggcaagactgcagaaacagagaaatcgggaacttcagttctggccgctgccaccgtggcagccgtctacacttcacagcgggaggggaggagtcacgttgtctaccacttacctgagacattctgatttggatgatgctagagcacagaaaataggtgagctgcatgggatcccaaagctgctgagggatagagcctgagcctggtggccacagcatatgccctttctgttccatgcagctggggctgttagtagtcattgcccttgtcagcagaccttctaccctggtggcaaacacatgaaagctgtggccctgggagtggcctcctaaaacaagccacttaggtcatctgccatctacccttaacctctgtctctcgcctgaggggaatctgcaagctgtgcattgggcttacctcctgcttttgtagaaataaccatcctttggtatacatggaggatagttccagaacggctgagtatacaaaaacccaatgcatactcaagtcccacagtgggccctacagaacccacgtatgtgataaatcagccctccatgtacgcaggtttcgccccctgccaatactgtattttcaacctgtatggttgaaaaaaatccatatataagtgcagccatgcagttcaaacccatattgttcaagggtcaactgtatagtttattgaacagccacacccattcctttacacatgatctatggcagagttgaatagttgcaacagacactatgtggcctgcaaaatcggaaatttttactgtctggccttttacagaaaagtttgccagcccctgatctagaccagcagctcatctgatagaggcagaggtggccttaaagatgtggccttcttcattttctgttggtttggtttcgtttctatgagagatttcctctgatagctctgctttccccagcacttactctctgagcttttaaatgttctctctgggagcttcatataagctcggtgacatttgagccacagtttttagatcagcacctggaatacatgacacattcttactgaggtcatccagcactgccatggtggctgcccagtcttctggccagtgtgccaggcacatgtccctgtcacacaggttccaagaaacacatacgcagccatgcatagaccaacagatttaatattatattgcagttttcagcgatgcagaatgcagctgcaattgtgttttaaggagaagccaaatggggatggttgtccctgcaacatggtgccactcctgggccatgtgcagcctcagtggacactcttccatagcgctgaggccctggccccgcctccagttaccctgtactgcccactgccttacagttcagtgcgcaggccttcaccttttcatcaccagcctctctgctcagtgctctggagttcttgaccttgtcctttatcatgagatttgctgaaatcactaatgaaaataactcccaaaagcaacaaacaaaaatattagtttaactggcactgtggtatattaaaaggcacaagggcattgtggcttaacacttttgctggatcccaagagacgcacatgatgttaaaaagagatctggcagcagtactaatactacatttcagtgtaatcatcttggggtggtttggccaggatttcccaattccttgatatctggagtttcttcaccattgtccggcatcctgcggaggcttaatatacaggcgtaaggtcagcagcaatttgtctaataagtgatgagatcagtagctgaagtctctaagctgggccattactaaataccatagccatgttgatctggaaatttatccctctagtgtcttacctcacataagccatttgcccactgtgcaatatagaaaggtgttttcaaaagtatttggccgtagattttcacatccatcataaggttggcattcaataaggaaaaagttctaactccagtattaaattgtacataaatcccaaatgttcttaaagaacactcagggacatgtttgttgcctgggattggtaatgaaaggttggtttttgaaacttgaaatttcaccattggtttttttcctatcatttctgcatatccagcaaaaggaatctcatgttgactcctggcagagttcagtggcttcagtctgtctatctgttctgaggggaaaattgtgttctggatccagtaatcaatttggcaactttaatcgaggttttcaaaattccaaggagggttaataaagaatgataatcagttttatttgctaatagctaagacaaatttgtaataaagtgttttataatacttc

SEQ ID NO: 1845 - DNA, 3547 bp, Homo sapiens
aacttaaacgtgtgccatgaataagaattgggtaaccctatttcaactttgccttcagataatggctgaatgtatcactggcatgtaacatcttttaaaatttgactgctgagagtattaacagtaagtgtactacagatagtatgcttctattagtatggtctagaatgctttcacttcttttttttttttcttttttttttgagacagagtctcgctctgttgcccaggttggagtgcagtggcacaatctctgctcactgcagactgcctcccaggttcaagcgattctcctgattcagccgcccaagtggctgggattgcgggcatatgccactgcacctggctacttttttgtatttttagtggagatagggtttcatcatgttggccggcctggtctcaagctcctgacctcaggcgatccacccgccttggcctcccaaggtgctgggattgcaggtgtgagccaccgcacctggccctttcacttttttactagtcacatcacattcttagcacacattaagcttctgttcaactaaaaacctgtaattttatgttgaaatcaagagagactatgttaatattatctgccatactactaatactattcaaaatggatattagtttgctatagtattcttcatgaaactcatgctaatttccagccattgctgtcttcttttctaaatacttacaagaggatgtgtaattatttcttgtaaatattttttgtaagcagtgccaaatttattagcttttagttgtggaaatctgtcattaatttacaattacctttctgaaaactgaaatgccaatctttggtctttggttacctttttttgtgctcaataatttccactcaatgattaatcacatagctttaacttattttatatctatggaattttcttattatagtcttggagattaatatactttgatgtgtccacaggacatcttaatttgtttcttcatttatcttgggcctcactctttttatccctgttggttaatctcttcctaatttgaagaccattttggatggtgaataagaaacaaataaaatggaacttagcattcatcaccttctccatgttaggttattgaacaagataaattatgttaatgtacttggaaacagtaagattttatataaatatgagctaatgtacaattatttcaattatttgttatattatactatcttgctagagttgcaacattttccctaagaagtagattcaccattttctttgaaactcatgactttgagcctagttaaaaatcccctttgatattcttttagtggcttttgcaagcctaagatatatgggttttgtagttcctcgaaatcattctgaaaaatttatatgacacttttatattggtctgtgtttcagtgactctaacatctttaaaaaatcagagtgaaacctaaagctccttgtgagacaaacaatttcatcttctcaccccttttctctccaacacgacatgacccaactccttctttttggggcttgctggcaatgacaattgtttttcttagatttttttttattcctcacaatatatattctaaacatggaatcataatcaggtgtctttcctttcctttgaatatctgaacttcattgagatctccaggagagtagagaaccacacaaatttatagatagaggagtcttcagcaatgcagagattatttttctaactccctcattttacagtgatgaaactaagacttacatagattcgattttagccaattgtacacagccaattaataaagtttgaattacgatttcctagtccctaatgtaataatcttgtatattggtatgagattaacagatatggagattaaaactatgtttggaatttctcttcccttttgtttgcaacctagctacacatcatggtattcagtagcattcttacacaacacaggactgccacacccacttccagctccccctgtcacacaggcacatgtaatgtatcaagtaaaagaagctcagagaccaacatgagcatgctgttcatctgttaatatgggcaatgaccaaagaaaaaagagggcattttatttctaacacaattttctaaaatataagtgaaataaccatgatctatcccaaaagagttttctatgaaatttgaaaactgattctaaagtttatttgaaaaagaaaaaggccaaaaccccaaggtgtatctgaagtgaagaggacttgtcctatcagatatgaaacaatatttataatgctgtactaattaaaatagtgaggtgttagcataggtataaatatatagaccagtggaacaggataatagtctcagaaataaattcaaaaacaaatggaacttggtatgtggcagaggtggcaatgcagatcaataagggaagggatgataatccaattgatagaattgacatccaattgatatctaattgatttaattgataatatcaattatccttgaacaattgatatcccatttaggaaacaacatcagttggaaatttcacatatcattcacatatcacatatattgatatgcacaatatccattttaggtgaactgaaaatttaacaatataggcaaaacttgaattcctttagaagaaaatacagaatagtacctttataaccttgggctaagccgttttttaaaagtaatagagatcaaggataatacctatagtcaaagatggataccttcagctacagtaaaccaacaacaaaaactttggttcatcaaaggacacaatgttaaaaggtaaacaaaattaacctacaaattttggaggaaaaaaaatcaacatatataatagtcaaaagattagattccaaattacatcaagaattttaaaaaccgagtaagacagcccaaacccaaaactggcaaaagacatgaccaggaatttcacagaaaaaaacaaatcatatggaaaatgaagtgtttgcaagtaggcggaggaatgggaaccctcatagccagctggtgggagtgcaaaatggtacaaccctttaaagaacaatttggcaagatttagtagaagggaggaatacatatacttttcgacatcacagttacacacctacatatggggaatgtacaagaatgttcacagccccataatagcaacatactgaatgatctaaatgtccatcaacaggagaaatgataaattgtgacatatgcagtgtggcaataaagaggtggaaaaaggccaggcgcggttgctcacgcctgtggtcccagcactttgggaggccaaggtggtcagatcgcctgaggtcgggaatttgagaccagtctggccaacacggtgaggctccgtctctactaaaaatacaaaaaaaattagctggatgtgatggtgcatgcctgtgatcccagctacttgggaggctgaggcacaagaattgcttgaacctgtcaggcagagattacagtgagccaagatttcaccactgcactccagcctggatgacagagcgagactctgtctcaaaaacaaaaacaaacaaac

SEQ ID NO: 1846 - DNA, 4447 bp, Homo sapiens
agcactagagccagctgcgagcggagggcaccaactccgcagaactggcttttcaatgggacacctgtggctcctgggtatttggggcctctgtgggctgctcctgtgtgccgcggatcccagcacagatggctctcaaataatccccaaagtcacagaaataatacctaaatatggcagtataaatggagcaacaaggctgactataagaggggaaggtttttctcaagcaaaccagtttaactatggagttgataacgctgagttgggaaacagtgtgcaattaatttcttctttccagtcaattacttgtgatgtagaaaaagatgcaagtcattcaactcaaattacatgctatactagagcaatgccggaagattcctacactgttagagtcagtgtggacggggttcctgttacggaaaataacacctgcaaaggtcacatcaacagctgggaatgtaccttcaacgcaaaaagttttagaaccccaacaataagaagcatcacacctttatctggaactccaggtacactaataacaatccaaggcagaatcttcactgatgtctatggaagtaatattgcactaagctcaaatgggaaaaatgttaggattttgagagtttacattggaggaatgccctgtgagcttctcataccacaatctgataatttatatggtctaaaactggatcatccaaatggagatatgggttctatggtttgtaagacgactggaacttttattggtcatcacaatgtcagcttcatcttagataatgattatggaaggagttttccacagaaaatggcatattttgtttcttctctcaataaaattgcaatgtttcaaacatatgcagaggtcaccatgattttcccttcacaaggaagcattcgaggtggcaccacgctgacaataagtgggcgtttctttgatcagacagatttccccgtcagagttctagttggaggtgaaccttgtgatattttgaatgtcacagaaaatagtatatgttgcaagacaccccccaaacctcatattctcaaaactgtatatccaggagggagaggcctgaagcttgaggtgtggaataatagccgtccaatacgtttggaagagatactggaatacaatgaaaaaacgcctgggtacatgggtgccagttgggtagattcagcttcctatatttggctcatggaacaagacacatttgttgcacgctttagtggatttttggtggctccagattctgatgtttatagattctacatcaagggtgatgaccgttatgctatttattttagccagactggacttccagaagataaggtgaggattgcatatcattctgctaatgccaacagttatttttccagtccaacacaaagatcagatgatattcatctgcagaaaggaaaagaatactatattgaaatcttgctgcaggagtacagattaagtgcatttgttgatgttggactgtaccagtatcgaaatgtttatactgaacaacaaacaggagatgcagtgaatgaagaacaagttatcaaatcccagtcgacaatcctccaggaagtacaggttataacattggaaaactgggaaacaactaatgcaattaatgaggttcagaagatcaaggtaaccagcccatgtgtggaagctaattcatgttcactttaccaatatagattaatctataatatggaaaaaactgtcttcctacctgctgatgcttctgaattcatactgcaatcagccttgaatgacctctggtctataaaaccggacacagttcaagtaataagaacacaaaatccccagagctatgtctacatggtaacattcatatcaactagaggagactttgatctgcttggttatgaagtagttgaagggaataatgtcacactggatattacagaacaaaccaaaggaaaacccaacttggagacattcacactgaattgggatgggatcgcttctaagccactcactctatggtcatcagaagctgaatttcagggagcagtggaagaaatggttagcactaagtgtccaccacaaattgcaaattttgaagaaggatttgttgtgaaatatttcagagactatgaaactgattttaatctggaacatattaacagagggcagaagacagctgaaaccgatgcttactgtggtcgttattccctgaaaaacccagctgttctttttgactcagcagatgttaaaccaaacagacgaccatatggagatattttattgtttccttataatcagttatgtttagcatacaaaggattcctggcaaattatattggtctaaaatttcagtaccaagacaatagcaagattactagaagcactgatacacagtttacatacaactttgcttatggaaacaactggacttacacttgcatagaccttctggatctcgtaagaacgaaatacactgggacaaatgtttctcttcagaggattagcttacataaagcatcagaatcacagtccttctatgtggatgtagtgtacattggacacacatctacaatctcaacattggatgaaatgcccaagagaagacttcctgcattagcaaataaaggaatattcttagagcactttcaggtgaatcagaccaaaacaaatgggccaactatgacaaaccaatattctgttaccatgacttcatacaattgcagttacaatatacccatgatggctgtgagctttgggcagataatcacacatgagacagagaacgagtttgtctacagaggaaataattggccaggcgagtcaaaaattcatactcaaagaattcaagctgcatctccacctctaagtggcagctttgacattcaagcttatggacatattcttaaagggaaatccctaagtcagccaacccctcctcccatgccaatcctttcacagtctgaagcaaaaaacccacggatcaaccagctttctgcccgctggcagcaggtgtggctgttagcactggagcggcaaaggaaactgaatgatgccttggatcggctggaggagttgaaagaatttgccaactttgactttgatgtctggaggaaaaagtatatgcgttggatgaatcacaaaaagtctcgagtgatggatttcttccggcgcattgataaggaccaggatgggaagataacacgtcaggagtttatcgatggcattttagcatccaagttccccaccaccaagttagagatgactgctgtggctgacattttcgaccgagatggggatggttacattgattattatgaatttgtggctgctcttcatcccaacaaggatgcgtatcgaccaacaaccgatgcagataaaatcgaagatgaggttacaagacaagtggctcagtgcaaatgtgcaaaaaggtttcaggtggagcagatcggagagaataaataccggtttggggattctcagcagttgcggctggtccgtattctgcgcagcaccgtgatggttcgcgttggtggaggatggatggccttggatgaatttttagtgaaaaatgatccctgccgagcacgaggtagaactaacattgaacttagagagaaattcatcctaccagagggagcatcccagggaatgacccccttccgctcacggggtcgaaggtccaaaccatcttcccgggcagcttcccctactcgttccagctccagtgctagtcagagtaaccacagctgtacatccatgccatcttctccagccaccccagccagtggaaccaaggttatcccatcatcaggtagcaagttgaaacgaccaacaccaacttttcattctagtcggacatcccttgctggtgataccagcaatagttcttccccggcctccacaggtgccaaaactaatcgggcagaccctaaaaagtctgccagtcgccctgggagtcgggctgggagtcgagccgggagtcgagccagcagccggcgaggaagtgacgcttctgactttgacctcttagagacgcagtctgcttgttccgacacttcagaaagcagcgctgcagggggccaaggcaactccaggagagggctaaacaaaccttccaaaatcccaaccatgtctaagaagaccaccactgcctcccccaggactccaggtcccaagcgataacactgtctaagcacccccaagccactatccactttgaatcctgctccatacattgggtgtatatttattctgaacgggagaagttatattgttaaaagtgtaaaagaataattgtgttatgaagctgccttattttttttctttttgtaagttactattttcatgtgaatatttatgtagataaaatttgcctcctggtaaccctgtaatggatggggcccagaaatgaaatatttgagaaaaacaagtgaaaaggtcaagatacaaatgtgt

SEQ ID NO: 1847 - DNA, 3628 bp, Homo sapiens
aaaatggcgactcccgctcgtgccccggagtcaccgccgtccgcggatccggcgctagtagcggggcctgccgaggaagccgagtgcccgccgccgcgccagcctcagcccgcgcagaatgtgctcgctgccccgcggcttcgagccccaagctcccgaggacttggcgcagcggagtttggtggagctgcgggaaatgttgaagcgccaggagagacttttgcgcaacgagttacagaggatcaccattgcggaccaaggtgaacaacagtcagaagaaaacgcaagtactaagaacttgacaggcctttccagtgggactgagaagaaacctcattacatggaagtgctagaaatgcgagccaaaaacccagtgccccagctgcgtaaatttaaaaccaatgtgttaccttttcgacaaaatgattcatctagtcattgccagaagagtgggtctcctatttcctcagaagagcggcggcgcagggataagcagcatcttgatgacatcacagcagctcggcttctaccacttcaccatatgcccacgcagctgctctccatagaagaatccttggcacttcagaaacagcagaaacagaattatgaggagatgcaagcaaagctcgcagcgcaaaaattagctgaaagactgaatattaaaatgcggagttataatccagaaggggagtcttcagggagataccgagaagtaagggatgaagatgacgattggtcctctgatgaattctgaagataatctcctaaatcactgacgttgagatgtcatcatcttacatcagactttctaactagtatcaagatcagtgtcagatattgttgagggaagtaattttataaagttacacaaaggtagttataaaaaaagcccagtttgtctttcagaaggtgactttcatgtgcttgaaaagtttaatatttgaatattgtgtttaaccacatggtattaaaattttgcaatatattgtgtattggtctgatattttagtatatagtagaacatactttttttttctttaagccaaatgaaaagaggtaactttgcttttttcctttttcttacctatcaaatagcatttattacatgtctttcagtgaaatacttagttgttccaggcacctaaaatcaattaggaagacatagttcccttcttttttgggtaatgaagggagcagtctaaagaattgtatgcatgtttgcatggggttattgagacattggatgtgaaatacctaggaagacatgtatggagaatgcttaacaaatgctcttctcctttttctgtcttcccttaggaagaacgttatctctcttctgattaggaaggacttcccttttgagtagatgctggaaagtggaggttttttttgttggtttgtttgtttggttttgtgttttttttgagatggggtcttgctctgtcgcccaggctggagtgcagtggcaggatctcggctcactgcaatctaggtggaggtctttttaaataacctcatgttacttcaggcaaatctggtacaggagaagcccaagctaactgagctgggtgaaggcttgtgcatcacctggcttgagttccttgctgtcacagatgataggttcatgtacacaacattaatgtttgataaggaaagcattttttttttgttaaaattgaattgtcagtactttacttttttccccccaaataggtatatatagactgcagaagcttcagtcccatatataaacgttcatgtcattttagaggattatatggttgtctccagagaaattaacttacattatcaaaaaattctttgtctaatatattggagtctttaaaagtgttgaagaataaaatattaattagaacaacttcaaatgctaaggtgatgttttaccgggacttaattaaatacaactttttcctttcgaaaaagactgttcacatttgcttccaggtgtaattattgctttcattccttacccccctcaagcaaatgtgaaaagtatactgacctaagattctcattagttttagttcttaaaacgaatagtaaatgatttcacagcgtaaaatttgatgttatttctggaagctggatgatatggaagagttcatgtgcctggacacacagttccctgtaatcctgccatctagggagataaactctgttaacattttgatgttgtgtttttgcttatttttctatgcatagttatgcatttatattctcaaaaatgaaatcataatgtacattgctttgtagtctgctctatatattgtcaatatgttcccatattaaatattttgctttttagacagctgtaggatattttatttcatgggtataccataactttaagatttatttcctattcagcaatttgattatgtattataatgtaatctgtaaatagtgatatgattaacatcttaatcacatccatagaaaatgacttatttccagaagataccgctctaaaaatgaaattgttaggtgaaagtgtttttgagaatttttatatatattactcactgcagagatcatgttcatttacattcccattagcaatatatccaatgctcagaattgaaaattactacttaaaatctttgcaaattgaataattacagaaaagggctacatttaaaatttgtatttgtttttcttacttagtgaaggttgtgttttttttcatattcattggccatgctatattcattcttttgagaattgctcattcatatttcttctgttgcttgcttggagaatttgctctttttttggcatataagttcttaagaatgtccgtcctttgtcatatattgtaactttttttagccttatttgtcatttaacatagtttgtggtatttcagtatagaagttgttttctttaggagtctacctttgtgtatgtgcttgaaagtatttttgtaatccaagaatggataaatgtccttattttcttctagtattttcttatttcacttttacacctatctttaaaaggaatttaaattttgtttatatacattaactaaatcagtacaagtttggggtgaaaaggaaatttttaatccatctcaaatgtatttggttatattatataaggtagggatttgattttatttcgaagaatttaccaattggttcagtatgtgaaaccaccatttcccctctgattagtaatgctatttttatagaatattaaattcttatgtgtcttttgtgtcttaggccaatttctgggccttctgggttttttctacactgtcaataattatcgctttaattggtgttaatatttggtagtacacaggttctcccttgttcttttaaattttgtgaaatataacttacaaataagtacttaaaacagagcttaatgggtaaagcaacagctgtgtaatcacaaactagatgcagaggaggtcttgccagcactccaaaatctctgtgtgtcccctcttgacactcactgtttcccccagagctaactatcctgacgtatggtaattctccctctgtccttttaagaattattttaccagttatgtgtataacaatatggtttacattttgctcacttttgacttatataaaaatagaataatact

SEQ ID NO: 1848 - DNA, 4470 bp, Homo sapiens
cacttagtctaataaagatcaaagcccagcatctgcaagtgaaaattctccttctaacatgatttctgggattttgcagctttctacttaaaaacaaggcacaatagcaagtcaccccatcttccccatatgtgaaatggagatgatgccagtgtcctagggccatcgtacaaatcaagctaagatcatgtacagagaaacaggtagcgcttgaaaagcactcatggtttctctctgatgagtcagtgcctacctggcacagaacaggtagtcaataactgttcgtggaagaacagtttaaaacaaacaaaaacatagttcaagtagaaaaacctttgttataatttgaataaagatcttctctgttaaggcctcaaacttctgatgtgattattgaagtgctttttacatgcatgtgctcaggccatcactgtttctgagtatgggtcagaggcccttgggcctcttcacggtgggaagaatttacaacctccctttgttctctgtagtgactagatttaaagcgaagcatatgacacgtttaactgccatttccctcacacatacccctgttatttttacctgcattagaaatggattggctccttccagcacccctattatttgtacctgtattagtaatgagttagctgtacttgagaggcagtctttactgactttccccacatgcactagtcccaggctgtttaacaaagaagcgggtggaaggcattacccaattcgatcgttttccaggcttgtgtgatttttttttttgaggactcagatcaataatttttctggtcagactttcctggactgtgcatattagcactttgacagttgaataagcatttaatttgcatgtccacctagaaagttgcaaggggggtgtttttgaagtagaatgtgacatgtcaggcctatggtctacagcctgaagtgtctgagagggaagaaagagaaccaaagcttctgtttctgaaatataatgtgacaaataccactttaattaaattccataaattctcatcccacttttaaaggtaggtggtattacccctgttgttcaaatgaaagtggtcagaaatattgaatcttgtcacttccctttgggtgcaaaatgaaaggccctacatccttagaagtcacatcaggatacatcatgtaagcctggtgaacaaatcccaagagacatacttgaaatatggaaaggaaacaggtacttgaaagagtagggcaccttactagcttgagatgtattattctatgctctcaaaatagataatggtttggaagcacggcttggcttactgctatatttatgttcagaggttgcttgttttccacgtacttttaaaaactattctggaagggaaggggttagtatatatatgtgggatgtggaaatataatagccaatttaaatgaacttaaagctgtaacagtgatactatcagtctactgtggtggggttgctaatgcatttaactgagtgctttttaacagcccagctggagaaacaggaagtgggacaggatcagtggaaacgctgcttgggtatttgaaattcaagcagtgagacctgagagactggagttcctcgccaattccagaacctcagtgcagggcattactcttttagatacaaagattgggtgtagaaactccacatctgtcagccacgtaacacagcccatcagataatcatgttaaggctaacagccagttcgaaacattctgtagaactatatctgttcaagggccaccaggtcctacctatctgtctcacctcctgctttctcttgctgggcgtttgtgtgctgtttggagattctaaatattttacactgatgtttctttatctttaacacattgcttctctctttgtgcttcagggaagatggtgaaaaaagtctgtccttgcaaccagctctgtagtaattatcttttctgttatttttggtccttgattgcaaagcctgttaaccatgagttctttcaactctgcagtctcatagctccctgattcctaacttccatctatctctgtatcctattctaataaatatttaacatgcttaattgagaaatcatctcctagtcggtgccctcagtgataaccccatgtgagcctagcttgtgacagacatggattggtaatggccatgggtatatatagggaggtcagggatgcctagttcctatgggagagcgatcctttggtcagcaaatgtgtgccgggcagtgttattaccccaactggaaactcagcagtgacgaaagcatacaaaagtccatgccctcccacgttcacactgaagtgggagatgtgtgctagattgacgaggagaaaaacaccactttctagagtttgtcttcttagactgtggcttctcatactttaatgagaaggccacttacagtgttgtaggtagggtcaacagggaaattctgtacttgggatgttgggctgtaagttatggttcataataggttattgttagtaggatctggtgatgtgggaataggggaaatgtattataatggcaggaggaaatttaaaaatgaatcttgggggtaagtctatactacttattagggcttttcagaagaactaaaaaaggttaagaagttagcatattctctcaaaggcctttctacatcttttatagtcaagtctccttttcttaggagttaatttctggtcagaaaatgataggtttgtttcattctttaatgggaggcctgtatacagaagccagaacgtgaaggtttagctgtatggttgactcttcctcatggtttctctttcctcatagagaatcctgtattaggtaatgtagggtaaaatgaaaagtgaaatttcgttctaaaggggcctcgcagcatcaggggcgacagactagagaggtgtgtctcccagcatgagctctgtggataagcaatggtcacgcctcctgagcttcttgtatttagcttttgacagctctgctcccctgtgattatttctgttttttgttttgattgtctctcacatcaagctcaccaagcaataattgttcaaacaggatgacaatccccatgcatgtgatatgcttgctttctagattgagtcactcactgtcatgactgcccatcctcattgcctgtgcttcccacttcaccactctctcacattggctgttcatggaaggctgttttctgtgctctcatgcttctcccctcgcgtttcctgtactgtagggagcttactcttcccttcacactgtatgtgcaatagcaatccccttgtggctccagcagacaccaagaaatgagctgacactcacactgcagtagttccgtgtcttgccatagcggtaagaagcatgtgaccttcctcactgcagcttcacctcagaattagctgttactacagcacagacctgcttgtgtgtgccattccccaggtggtaggatataagcttgacttgagaccagcgatggtcagtaacaggctttgaagtggcaggattgcgttaggtgtgctgctgtgatctggtgctgctttgaccttgaaagcaggataacgcatgcacttacttacccccgcattacttgggtaccttaaggactagtggttcacaacttactttaggagcttttatttattctgtaacacgtgagatctggtaagacagtggggggtaaggaaaacagacaagaccatgactcttctttccctcttccccaaaacgtgcctcttcgaataatcttcagtgtgccctccagcagagccgaaatcaggcaggcatagactccctcctctctcatcaaaccgcagaaatagagttccttcatcataaccgcaaagcttcctcctcccctttgcaccctgcctcagctgcattttcttgtcgcttctacaggggagtgcttgctgttctgggaagagtggggagaagcggtgggaatccttgagccaattgaaactgaggtcatcttcaggaaaaccatgtcttcctgaagttgaaagattcaggcacaccatacagtcctttcctcatgaataatcttgttctttactcatgggaaattgggagaggttaacccctcccaagtttatgtttgcaaattcatgtttatgggtccaggtgaaaaacttttctgaacacagcatgctacttctcttattacctctctctatttaaagaatggctaggctgagcatggtggctcacacctgtaatcccagcactttgggaggctgacatggcaggattgcctgagcccagcagttcatgactaagcaacatatggagattctgtctatataaaaaagtaaaaaattaactgggtgtggaagtgcatacgtctagtcccaagctacttgggaggctgaggcaggaggagttggaggctgcagtgagacgtgattgtgccgctgtatccagcctgggtgacagaaaaagaagagacccttccttt

SEQ ID NO: 1849 - DNA, 3204 bp, Homo sapiens
actgtgtagttcagagtggccacagacaagaggcaggagcgggagggacagggccagctctggggctcctggaggccaggctgagctacttggactgtgcccaaagttatggggaagtcatgaagggcttgaataaggggaggcacctggctggatttatctctgggaaaatggggcagaggatgaacagaaagagagcaggaaagggtctccctttgctctgagatcccaaaagatggaaactagaacagtttatccaaccagttgtccccattgattgagcacttaatgagtacaaacaactctcctggggagaaggagggcaggcaggggatggagtgaattaggcggcctggtgcagtgggagaaagtgagctttggagttaggcctacctaggctcaacgcgtgctcccagtgacactgggctggccgtagtccctctcagggactttgtctcctctttgaatgccccggaagctgctgtcttcctcctgggcccgaggattggacaggacagtgctgctagtgccaggcctatgggcagagttcagtctgagcaatctcacctgccttcctctcagacccctgtccctgacagctccttcttccctccccagccgagatctgcactgtgggcttcatagccctcctgtttacaagattctggctcctcactgtcctgtatgcggcctggtggtatctggaccgagacaagccacggcaggggggccggcacatccaggccatcaggtgctggactatatggaagtacatgaaggactatttccccatctcgctggtcaagactgctgagctggacccctctcggaactacattgcgggcttccacccccatggagtcctggcagtcggagcctttgccaacctgtgcactgagagcacaggcttctcttcgatcttccccggtatccgcccccatctgatgatgctgaccttgtggttccgggcccccttcttcagagattacatcatgtctgcagggttggtcacatcagaaaaggagagtgctgctcacattctgaacaggaagggtggcggaaacttgctgggcatcattgtagggggtgcccaggaggccctggatgccaggcctggatccttcacgctgttactgcggaaccgaaagggcttcgtcaggctcgccctgacacacggggcacccctggtgccaatcttctccttcggggagaatgacctatttgaccagattcccaactcttctggctcctggttacgctatatccagaatcggttgcagaagatcatgggcatctccctcccactctttcatggccgtggtgtcctccagtacagctttggtttaataccctaccgccggcccatcaccactgtggtggggaagcccatcgaggtacagaagacgctgcatccctcggaggaggaggtgaaccagctgcaccagcgttatatcaaagagctgtgcaacctcttcgaggcccacaaacttaagttcaacatccctgctgaccagcacttggagttctgctgagcccaaagggcagggccaacattagggagcccagcaggaggtgctgtgctgagaagacttcctggaggtgtttgttgaacatatctgcagagccttcccagactcctgcaaatccaacccatatcaggctgtaagtcagagcaggcaatgcagaagaggagaccagaccaaggggtcagctggggctaggacagtgagggctgctagaggggctgggcctctctttgcacatggacactgggcccctctctatattgagtggtctgttaacattcattggtggctgattccaaaagatgagagccaaagctgcacggactcgagtcctaggctgcacacctcacaagcatctcttctactgcattctgttggtcgaagcaagtcacaacccagcagattcaaggagtaaggaataggatccccctctggatgggaggagcagcaatgtcatattacaaaagggtgtggacacatgcagggattcttactgccgtctttgcaaacaatccaccaaaacttaaaaactaaaagcctgaagcacaagcactctccaccccaggcacacacaccctggaattccctgtgtgaccatggtaccaccactgtgtgtcccgaggatcccagctcagctttgcatcgctgccctatctccctctcgctctcccctgttgatccctcatgcacagccacagcgagctgtctaaaacacaaagctgaccgcgccatttcctactcagcatccttccatgaccctccattgctcctaggatagggtttggaccagtctgaatccagaggatcaggatccagcaggaaccagaggataatttgaggagggtttaaaaaggaaccattttttgaggtgtgtacactgtttccaccctgaggcctggaaggatgaatggaagcagcagttcctgaaccaggaagactcatgtgtgggggccattgctggtcaaggggcacgaacaggtctggtgaccctgcaagggaggagccaggagcaagcattcccacttcaccttcctccattcagtctgctgccaagttccccactgcctgagcccaactagaagctggagggaaggagggcctgtggctgcagtccaggcatgtaggcctcctgggaaagggagaatggcaaagacaggcagagtggatctggaggggtcaacggaagacggaacatgtccacttccaggcccgagcttctcagcctgccgtttgccactctccagcatctggcccagcctgtccatcctcatctctcttcctcccttactccgtgctcccatcactcggaaccatttgcatttctttgtctcagctatattgtctcacctctgagtttttgcccatgatgttggatgccatggaatgccatatcctccccattatctcccccttgtctggataattcctactcatcctacaatactgattttatctgtgcaaagaagtcttccccagtgcctctggttgacaggggtttcctctggcttctccagactttctgttcctccaccacagcccttagcaccctggggaggaggtgttgctgtccaggtaaatgctgcgccaatgcccctgcctctagtgcactccctccagcctacccacaaacaggacctgcatcctgtctcacaaataaaactgaactcttgaaatggtg

SEQ ID NO: 1850 - DNA, 4524 bp, Homo sapiens
tacataggtccaaggccacctggagaactgtcctgcgatgcctctggatgacttcgttaataaatggaccacaccctgctatggcatgctggccatgttttaggagccatgataatcactctgcataacctaaccaatttaatttatgcagcagatccacatggagatgggattatctttattttattttattatttatttattttttttgagacggagtctcgctctggcaccaggctgaagggcagtggcgtgatctcggctcactgcaacctccgcctcccaggttcaagcgattctcctgccacagcctcccgagtagctgggactacaaggcacgcaccaccatgcccagctaatttttgtatttttagtacagatggggtttcaccatgctggccaggatggtctctatctcttgaccttgtgattcacccaccttggcctcccaaagtgctgggattacaggcgtgagccactgtgcccggccttgattttattttactttttttatttgtagttttttttctgaccacctgctgactgttgagggattgtcttgattttatagatgaggaagccaagacccagagaagtgaggttactagcacaaggttacccagctcggaagcgatggagctgggacttgagcccagtctacagattagctgtgtgatgcattgtctctcactttcttcctcactagttcctttttacagatatttcatgggaccaaaattgccagcaggatttaaattaggcgttctaaatattagaatgtgaaggggaggagagaggtagtcctgaaacaaggaaatctaatccttccttctgcttttcctgacatccttcccctttccttccaagatgtatccttatgcatctaattgtgggagaagaaagaatatatgccctgtcttcaacatgtttttccatagaggttagaaaaatacatattactggtatttttattgagttaaaatttatatagcataactattttgtagtgcacagttcactggcgtttaatactaataatagtattttattcacatggtaggtattatgtatttagtagcatactgaacaccaatatgaacttctatatttagaaacatcaaaggagtgactgcctttaacgttgtctttttaccaaatgcaaggttgtaaggaatagggtatgttttaaagcacaaagttggatgtaatcgagtaatcattttcacttttaattaactttctttgtaaatgttgatactcctacttttggattgttgatatttgcatgttcttcattctcttttaggagttttgtttgctttgaaagttcttaacaaccattattgccctggaggctttgtcaacattttgggctttcctgtaccgaacagatttgcttgttgggtcgaacttgtggctattcatttattctcaccagggtaagtgttttcttttggggaatacagttgaaggacctgatgttctgtggagaaaaaaattgcaataataatgaggtaaccaattgtttttcacagtgaggtttattctttatctattaggacagaatcaagcttaatagttttaatgtcagatatttctgggtttgaatcttttcaactattaagctgtataattttgggtcacttgtcttaactgagttgcagattcctcattttttttaagtaggagaacctgctatactgatctgaggatcaatattaaccagccaatcagctggttaattctgaaagcaagattccaaagaagcacatagaaaccacgtaactataaagattaaaaagctataaggtatgttgatctaatgctttttattattattattattcttttttttttgagatggagtcccgctctgttacccaggttggagtgcagtggcgtgatctcagctcactgcaacctccaccccctgggttcaagcaattctcctgcctcagcctcccaagtagctgggattacaggcgtgtgccaccacacctggctaatttttatatttttagtagagttggggtttcaccatgttggccaggatggtctcgatctcttgaccttgtgatctgccggccttggcctcccaaagtgctgggattacaggcatgagccaccgcacccggccgatctaatgcttttaagccattttagctgtcaattgtcttggtagtagaactttttaaacaaaaggctttacttaacactcaaaatgtgaaatggatcagctctgaagtcttttgggttgagaagtggaatggggcccctttcaccttactcccatgttgctgtggcttcctcagaggaggcacctccacaaaaccctagagctccaggaagtacagtttcagaactgctgatttagatgaattttttcccttacagagaaggacttggaaattcggaaggttaagagacttatcaacaaacagtttgtggtagacaccagccttgtgaggattcaggccccctgactcctgtctggggctcctgcccattcatgctgcactttcttcctttggttcttttctctgctttttgtttagaaaaaggaagataagttgtgttattttttccacctcttccaccagcttcactttccttaatctgtcttgtgcaactggaaatgcataatgtttgtttttactgtgggactggacgttggcaaagggtgagattcaggaaggttcagaaagaaggaagatttctatttgctactgttctttacagacagtttttattttggttttgatttgtgtgactgtgctgggtgtcttaccttatttgagagtattctcatggggctgtgtgtcagcccggtaactccaggtccttctttaatgctaatttcccatcacgggcagccactggcagctggcccataaatgacagtgacgtggcccctgagtaccactcatttacaattgtattgctacttttgacagttccacgaagaaagcctaacaaaatcttcaaagttttctttgagaaagcatccggtaatgtctgtcccttatctgaacagccctctctataccttgtcactcactgctcccctgacttgcttgatgtgacttggttctctgtgtcaatgataggctcttgtatgtgactggcaacacccacattcatatgaaaatcactccctctgctatttgaactttcatcctgtgatgaatccattgaataacagtgcgtttaatattcttatgcaactatttctgaagtgctttttatgcatttcattttttagggttccccccaacttacatggaaaagggatggttgcatttctgtgtcatatgcatattctttgtggaggcaccggtaattctgagcttgggaagtaaatgaaatttcctgtctttgaacttaaagtcttttgatttttaagatttgactgctttgaatgataaacttctaatatacaagcatctacttacacatgtatccaaataaagactacgctaaacactggcccaggaaacctaagcagtgaatgcttctttgagatggatctcggaagaatggctgaaactagagctctctttgcaatgcattgttatttgcttgatggttgtcaattagaattttcattgggaaaacactgtaaatctttagaacaaagcttgctttattgcaggactgtatgggctgcccttcgggaggaaaaaaaatctgccaaagcaaacatttggtggacctctgtgttttatgaaagccacggaattagtaatttcccccagttacagagttttatgaaggaaagccaccccaaataggcatcgtgaggagtatgaggcatgtggacttgatgccagagtgaagcaatctccctcattcacgtggtgcttttgcttctcacagtgtctgtgtgtacttacttcagaggttgctctgcttcacatccggctttccattttccttcgtgtcctgagaccctgataggtgatagtgtctgaaggggtgtcccaggagggagatgtgcaggccacctctggtgcctccttcctagaccaggcttctgtcccttcccacctcctacccccaccaagattctgttgatgggaggaagggggatatgttgcctggttttaccttctagcgagattatgaacctctgtgtgttctcgtctgagccttaggctatctagacagaaaaccaaagtggagaatcatgaacatcacccagagtaagacagccactcagcgactatactagaggagagcggttgaatgtgacagggccgggctcacatactggccgtgggacctcgggcaaggtacacagcctctctgagcctcattttcctcacctgtgtaatgggctattacttaccttctctgtttgataagtcagttttaaggtgtcatatgcgaatgagctctttgtaaacaataggaagtactcaacccttttattatgaaataaatcactggatgtgtacactgttcctaaatagaatcatacctaatttcttttgctttctaaaattaataaatcagctgttattt

SEQ ID NO: 1851 - DNA, 3388 bp, Homo sapiens
aagcgtgcccgtgcgctggtgaggtggcgtccgttctacccggtcgctcccgttccgcgccatgcagagcccagtctctggcacctggctgctctgatctggtctcagcgcggagggagcagagggagtccatggaggatccctccgagcccgaccggttggcgtccgcggacggcgggagcccggaggaggaggaggatggggagcgggagccgctgctaccgcggatcgcctgggcccacccgcggagaggcgccccaggcagcgccgtgaggctgctggaccggagccgccccgcggtttcagtaactattggtacttcagagatgaatgcattcttggatgacccagaatttgccgatattatgctgagagcagagcaagcaatagaagttggaatttttccagaaagaatctctcaaggttcaagtggaagttactttgtgaaggatcctaagaggaaaattattggtgtgtttaaacccaaatcagaagagccttatggtcaactcaatccaaaatggaccaaatatgtccataaggtctgctgcccttgctgctttggccgaggctgcctgattcctaatcaggggtacctttccgaagcgggtgcctatcttgtggacaacaagcttcatctgagcattgtacctaaaacaaaggtggtttggcttgtcagtgagacatttaactataatgcgattgaccgtgcaaaatcaagaggcaaaaagtatgctttagaaaaagtgccaaaagtgggtagaaagtttcataggataggactccctcctaagattggttcctttcagttatttgttgaaggttacaaggaggctgaatattggcttaggaaatttgaagctgaccctttgcctgagaatattagaaaacaatttcagtcacaatttgaaagattagttattttggattacatcatcagaaatacagacaggggcaatgataattggttagtcagatacgaaaagcagaaatgtgaaaaggaaattgaccataaggaatcaaaatggattgatgatgaagaattccttattaaaatagctgcaattgataatggtctagcatttccttttaaacatcctgatgaatggagagcatatccatttcactgggcttggcttcctcaagcaaaagttcccttttctgaagaaataagaaatttgattctaccatatatttctgacatgaactttgtgcaagatttatgtgaagatctctatgaactttttaagactgacaaaggatttgacaaagccacttttgaaagtcagatgtctgtgatgaggggtcagatcttaaaccttactcaggcattgagagacgggaagagtcctttccagctagtacagataccttgtgtgattgtggaacgcagtcaaggtggaagtcagggtcggattgtccacctgagcaattcctttacccagactgtcaattgcaggaagccatttttttcctcctggtagtaaatgtcagagtaagagaaacgaactgtttagaattatcatgtttttaaaacatcatagtaatataaatctgctgttaggagctccagttgctaaaacctcaatttaagtctttaaaaggttgtattttgaatgtaaccaaaagtttacagttttttgtccaaatattaaatttctatttcagggaagaagtgctatatctcctatattgtatttttgtagaaaatttgtattttatgttgttgttagtttaaaaggtaattttacacatgctggaatgactgtaattactctagaattccaagtagaatacaataacttttaatattgagaagaatgttcatgctaattcttcttacattacaaaaggcctttgaggatgcctacgtctgaaattgctcttacgaactttaataaaatagttagctaatagaaaaacaggtaagaataaagcaatgttgcctcaatttcaaaagctgctattttagaatttgaataagtactcctaaaatgaccattattagggaccagaaaattatatcttggctaagtaatagaggaccattttggtttttgtacttgagaatatttttggtgaattactttgttgtagtgaggaaaaaacctaagaaatttcccctttttttaaaaaatggaaatattcaattgagacttgaggggaataatagaaaattaaggtagatccccaatattttggaataccaaaattgccttaaaaattcccttctgtttcttacatgggatcaaatacttgagattagtacttcagagtactggccttgttcaatttagtacttcaattagtattaaacttcactaaaaagtaaaccatactccaaattgtatattggattgcattttggggtcctaggtcatacgttcttcaaaattattatgattgtactattgtacttgaaattacagatgttattataattacagtcaaatgtagactatcaggccaaattaaaggggagcatggcagataaccataaagtcatttatatttgattttgaaatgtatttttgtactttattttgaatatcatccatatgtctgacattattggaatttgtaacattgttaatgcactaagtgatttaaattcaattgatgaagatgtgattttacagaagcagaagtttcattttcttgaggcttaaaaccaatgtcaccacttgggcttaactgggtaatttgtggtctaggccttttgttttctaagcttactatcttgtgtttgtttatttgcttttaatgaagtattttgtgtagaaggttaaattaggatgcaaaacagatctgccattcctttttcccttatatcttccttttggtcttcatggacgagatgaatgaggattctgctgccctgagggagttcattggaaacctgcgttctcctacctcttccaaccctccattagctcaattttgagataatggaaaattgactggaaattcaaaactcaaactactatctttagatataaacactagtaattaaaatgtgccttttgaagatgttttctaagagaaaggaaatacgttgcagtgatgtgggtactgctttcataaaacagttttttcagtattttgagaattgccatattaatttttataatggaaaacttaataaattgctactgttttatatcataaaattaaaataccatggtaatatttgcaaaaggtctggccataccagaaaagtacagttgagatagttaagatataaccacaagtcagagtacattggttgtattttgtaaactttcatgaactgaattcttatttaaatagtatggttttttttcaataagtatatttatagtgacaaatgtggtagactaaaggtaataaaaatcattgtcttaagatt

SEQ ID NO: 1852 - DNA, 3962 bp, Homo sapiens
atattatttccttgaatcccagaacacccgaggaggtaagggccgatgttcccaatctgcagatgtgggtgtactcagttaagtcattcggcctttggtggtaccaggcttacaggagcccacatcccgacccaggtagaggagtggattggagccggggaacactgatgggaccgggcagggacgacaggaggtcagtctcccttcccttctctttaaaatttcccgccagtatggccggctcgcagcacgagttacgccctcttcaggagtccctccccttctgctctcgcccgcctccccgctgccaggcgggctcgaccaatcagaagaggtcttgggcgggcgctgccgtccagcgagccaataggcgggcagtcggagccgggcttgcccgggcatgtgggagctgccggctttccggacgccacgtgcagaccggaagagacacgcggggcttcaggtgagatccaggaccctgcaccggggcggcggggtcgggcgggctgaggccgcgtgtcccgggtcgcaggtccccgcgcgttgtttccgccccggcctgcggcggggacgcctgaactgggctgaccctgccctaccggcccgcagaaaagcaggccgggcgccgcctgtctccagccctcgctctgctcgggggtccagggccagagggggcggcgctggtcgttgggactcggcccagctgccgcggccagcaagtgatcaacgcccgagtccttcccggtgagatcaggcctcccacgcgtcacgcctgggagaacgccagccggcggggaggtcgtgccaggatagcagactttagttgttgtcgttgttccgtggactttttagcagcacaggggaccttatcgagccaggtattttcaggtttgggcgattatcagaattgtggcttgagggtaggggtcgtccgcgctctttttaaaaatctagattctcaggcccctttccccaaaatagcaattaggacggtgtgggagtgggcctgaaaatcagcctttcatcagatgtcatatggtaattaactacatttgggaagcccttatctaattcacagccctcggttgatggtgaagagacgtgacttgccccagatcatctagctacttagtgccagaggagggtctagaactgccctctgccctcttgatcagccagcaggttggtggctctcatgccaccgaggattctgacttcttggttcctttggggcctttgctccattgactctgcagctgggaccctttctttaggccagaccccctccctgcctgaaggccgggtgtctgacccccagagcgctgggtccaggctagagaaaggcttgtgtttgtccttgttgaaagggttgttttatctgagcggaacttctctccagcttcactgagctacatttgggtccccaaagaggtgtgtccttgatgactgttggttttgacgtgtcagcatgtagcaggaggagccgcggacaaaaccccacagaggtagtgaaggaattggcttttaatcagctggaagcatctgcagactagcatctcaaaatccgagcttgttgagtgcagtttctgtcccttttaaggactcacaacactaaagattttacaagaaagggccatgattgattgagcaatctagggggtatgtgacagggactgcatgcaccggtagtcagagtgaaacagaacagaacagaacaagagatttcacagtgtccttctatacaatgtctgaaatctatggataacatcggttgctaggtcatgggtttaattttaactatcaggctaaggtcaggcaggcccaggcctggttttgggtctggttttgggtctggtgcgtggcgccgggctgcctgcctttggttttgcttccttgtttcttcttaaaacaggtactgagtataaaataatacagaacaatatgggggggaggtctctttctctcttctcttaagcaaggtcagggtgtttggaaaaggactactttcctctcttgaaataggaggctacagagaccttttctcagataacttaatttctggcttctttaaaaccttgccagtaggattaggaaagccacccaccctactcctagcctcagcccctcacagagaaaggaggggactatccgccagccccctttcccaaattagttattagcagggtgggcattgggcttcttaggcttttttctcccattgctgggctgaggcagattaaggttctgaatttgtcagttctaagatgtgactgtcaatatgaggaagttggttacagttaagacctttttaaaagagagaccttttctcctggaaaggatgggatgagcaagcagggtggatgagtcaggatgggtcaggtctggatgagtcaagtcaggatgcggtgccctgccctagagtgtggggatcctttatgcaaatgctggcatcatcaaacctggcatttcacctcacctcccatccccttcccatttctcttaatctctgctgctactgctcaggttttcatcttctccagacctctttctacacccttctgaagaggacctgccacatgctagcttctaggctggctgttggggaagggacaatcaaggctctaacctgccttcttacagctctgaggtagactgtgtgtaccaatggactttgaagggtgtaataattctcaaattgtgctataagagctcagcacagagggatgaatttctttgctccccagctagacttagtgtcctgagtcagggctactgtgggatatttcagtgacctccataggtgcctctggggctcccccactcacttggccagtagagaccaattcaggggacaccagattgcggtaggggtggcttgtggaagggccaccagagtaggaaacagaagatgaaatggtgcaaaggagagaggagcgaggagcagtgcctccagcatgacccgccttatgctctacaccccagtgacttgaggctgctggtgggccctcttcctccaccctgggttagtcctttttaaggcctttgcccctaacatggccactgattcttctcccttctacctggaaggttactgttgtacatgcacacagatgtagcctcttccaggaagcctccagagaattgtcctccagcctgttttgcctccctagcacctctgcttcagcccttaacacactttatgcttggtttctgtctccaccatgaaactaaacttcttggagtccaggatccacctgtgcagccgcccagcatctggcacagtggagacccgagagagcctcagtatggcattggcctgtgcaacccagtgggacagagtttcttccagaagggcttctgggtggtggcggaacagtagctgagtctgaaagagcaggagggctgtgagtgggaagggaggctgtggcttgggaaagggcagtgagtccaggcggaggctgctctggcctgagaagagctggctgccaaccacgggctagagtctaacctctctgggagaaggagcagtggttattgagcccctactgttcagaatacaggaagaccccagcatacattgtgtcgtttcctcttcacacagtagagggggtggtaggatcattttacatgcctgaaaactgaaacttagcagtttaggtcatttacaaagagctgagttaggccgaatatggtggcccacgcctgtaatcccagcactttcggaggccggggcgggtggatcacctgaggtcgggagtttgagaccagcctgtccaacatggcaaaacgccacctctattaaaaatacaaggattggccgggcgtggtggtgcatgcctgtaatccagctgcacgggaggctgaggcaggagaatcgcttggagccgggaggcggaggttgcagtgagccgagatcacggcactgcactctagcctgggtaacgagagcgaaactccgcctc

SEQ ID NO: 1853 - DNA, 3756 bp, Homo sapiens
gggcctctcccgtccattgttctcggtgccccacgggcttgagccggggtgaatctggaggggccgggccgagcccgggggcgctttcgcacgcgaagcaaccgctagagcaggacctggtctcccgagaggtgagccggagaggcaggcctggagccacgcggaccccgggcagtagcccgagcgggactacttgttgatatttgaggagggaagtgtcttacctgagagcctggctggagaagactgaggtccaaggcttgaagcctaagtgattgccccaggactgtggatgatggctgcagacatcccgagagtgaccactccgctgagctccttggtccaggtgcctcaagaggaagatagacaggaggaggaggtcaccaccatgatcctggaggatgactcctgggtgcaagaagctgtgctgcaggaggaggtgaccaggggaccacagggtgcactcggccgcctccgagagctctgccggcgctggctgagaccagaggtacacaccaaggagcagatgttaaccatgctgccaaaggaaattcaggcttggctgcaagagcatcggcctgaaagcagtgaggaggcagcggccctggtggaagacttgacccagacccttcaggacagtgattttgagatacagagtgaaaatggggagaactgtaatcaagacatgtttgagaatgaatcacgtaagatattctcggaaatgcctgaaggtgaaagtgctcagcactccgatggggaaagtgactttgagagagatgctggcatccagaggctccagggacacaccccaggtgaggaccacggggaggtggtttctcaggacagggaagttggccagctcataggcctgcagggcacctacctaggggagaagccctacgaatgtccccagtgtgggaagaccttcagccggaaatcccacctcatcacacacgagaggacccacacaggagagaaatactacaaatgtgatgaatgtggaaaaagctttagtgatggttcaaattttagtagacaccaaaccactcacaccggggagaagccctacaaatgcagagactgtgggaagagctttagccggagtgccaacctcataacccaccagaggatccacacgggggaaaagcccttccagtgtgccgagtgtggcaagagcttcagcaggagtcccaacctcattgcacatcagcgcacccacacaggagagaaaccctactcgtgccccgagtgtggaaagagctttggcaaccgatccagccttaacacgcatcaggggatccacactggagaaaagccctacgaatgtaaagaatgcggcgaaagctttagttacaactccaatctaatcagacaccagagaatccacacaggagagaaaccctacaaatgtaccgactgtgggcagaggttcagccagagttcagccctcatcacccaccggagaacccacacaggagagaaaccctaccagtgcagcgagtgtgggaaaagcttcagccgcagctctaacctggccacacaccggagaacccacatggtggagaagccctataagtgtggggtgtgtgggaagagcttcagccagagctccagtctgattgcacaccagggcatgcacacaggggagaaaccctacgagtgcctgacatgtggggagagcttcagctggagctccaacctcctcaagcaccagaggatccacacgggagagaaaccctacaaatgcagcgagtgtgggaaatgcttcagccagcgctcccagctcgtagtgcaccagcggacccacacgggcgagaagccctacaaatgcctcatgtgcggcaagagcttcagccggggctccattctggtcatgcaccagagagcccatttgggagacaagccctacaggtgccctgagtgtgggaaaggctttagctggaactcagtcctcattatacatcagcgaatccacactggggagaagccctacaaatgccccgagtgtggcaaaggcttcagcaacagctctaactttatcacacatcagagaactcacatgaaagagaaactttattgaagtggcaaagagtgaaagtgagggactggcctggagtgggagttgccacactgccccaacagtgattccctttcaaagagctgtgcttcctaaacattctggggggttttgccagagtcttccccttgctcatcctcatttccaggacactgtcattttagtggtctgagtcaagtcccgtatacattcaagaacagggcataggcgtggaaggtctggaaagttgggtctttttcccttacattgggtgacttgattggccccctctcatgattcctctgtgcctcagtttcctctttggtaaaatggggggaaatgtttctccatgtggaatggaagacagcatggcccacaacgtgggccgagtcctcagagaaatactggaaatcattggtgtggttctggttgttttgttgttttgctgccacgttgttgggctaaggtgccttcaccccaagctgttagtgttccagggcaccccaagctgtcagttagaatctgctcttctggctttggtgtcttgggctttgatttcaggtcaagatggaggggcttctccagttctgagtcacccacgtgaaggtaaagaccctttctatttccagaaagtgtcaggagcacagaaacttgaggaagtacagcctggagccagtgtcccagtgtcctttccattggtaagagttggacagggccttcaggaaaggggtaaaccgaggacatttcagtgcttgcttttgtctctgcctactgtcctgtggtagatcagctaccaggggaacacatttgttctcgtggggttttgtcctggagagtgtagtgaagtccgagagccctagctgccaacccatggtgtatggtaacttctgtctcatcaagagtaaaacagtcctgcacacagcagggtgggtttgtgcctttggcccaacaggtacatagccccataatttctgaattattctatgcacttgtttccctcttcttttattttttatttgatatatgccgagctagaatcctgtcgggtagcttttgtatactaagaacattattattattattatttttgagacggagtctcactctgtcacccaggctggagtgcagtggtgccatctcagctcactgcaagctccgcctcccgggttcacgccattctcctgcctcagcctcccgagtagctgggactacaggtgcccaccaccacacccagctaatttctttttttgtatttttagtagagacggggtttcaccgcgttagccaggatggtttcgatctcctgtcctcgtgatctgcccgccttggcctcccgaagtgctgggattacaggcgtgagccagcgcacccggccaagaacattatttttaaagaagtgttaactttgaggacatatctgttccctggagatatttgggcttgaatcaggagtttgtcctacaggtgtcgcccttgatctcaggatgctaccagggctttgttctcgggatcctcgcacctggagagtgaagacgggcatgacggcaggtgaaggggtttgctgtgaaggaagaggagataaggcatttccaggaaatgggaaactgcctcctcctacacatggggcctgtgctcagaatgggcttagttcttataggatggatgctcagtattccttaataaagtagagttccattctt

SEQ ID NO: 1854 - DNA, 3699 bp, Homo sapiens
agctctgggagaggagccccagccctgagattcccaggtgtttccattcagtgatcagcactgaacacagaggactcaccatggagttgggactgagctggattttccttgtggctattttaaaaggtgtccagtgtgaagtgaagttggtggagtctggaggaggattggtgcagtccggcaggtccctgagactctcctgtacagcctctggatttacatttgatgattttgccatacactgggtccgacaagctccagggaagggcctggagtgggtctcaggcgtcacttggaagggcgatgccctgggttatgcggactctgtgaagggccgattcagcctcaccagagacagcgccaggaaatccctgtctctgcaaatggacaatctgagatacgacgatacggccgtgtatttctgcgcaaaagaagtgacggtgttatggttgaggggaggctccccgacattttttatggacgtctggggccaagggaccacggtcaccgtctcttcagcacccaccaaggctccggatgtgttccccatcatatcagggtgcagacacccaaaggataacagccctgtggtcctggcatgcttgataactgggtaccacccaacgtccgtgactgtcacctggtacatggggacacagagccagccccagagaaccttccctgagatacaaagacgggacagctactacatgacaagcagccagctctccacccccctccagcagtggcgccaaggcgagtacaaatgcgtggtccagcacaccgccagcaagagtaagaaggagatcttccgctggccagagtctccaaaggcacaggcctcctcagtgcccactgcacaaccccaagcagagggcagcctcgccaaggcaaccacagccccagccaccacccgtaacacaggaagaggaggagaagagaagaagaaggagaaggagaaagaggaacaagaagagagagagacaaagacaccagagtgtccgagccacacccagcctcttggcgtctacctgctaacccctgcagtgcaggacctgtggctccgggacaaagccaccttcacctgcttcgtggtgggcagtgacctgaaggatgctcacctgacctgggaggtggccgggaaggtccccacagggggcgtggaggaagggctgctggagcggcacagcaacggctcccagagccagcacagccgtctgaccctgcccaggtccttgtggaacgcggggacctccgccacctgcacactgaaccatcccagcctcccaccccagaggttgatggcgctgagagaacccgctgcgcaggcacccgtcaagctttccctgaacctgctggcctcgtctgaccctcccgaggcggcctcgtggctcctgtgtgaggtgtctggcttctcgccccccaacatcctcctgatgtggctggaggaccagcgtgaggtgaacacttctgggtttgcccccgcacgcccccctccacagcccgggagcaccacgttctgggcctggagtgtgctgcgtgtcccagccccgcccagccctcagccagccacctacacgtgtgtggtcagccacgaggactcccggactctgctcaacgccagccggagcctagaagtcagctgtgagtcacccccaggcccagggttgggacggggactctgaggggggccataaggagctggaatccatactaggcaggggtgggcactgggcaggggcggggctaggctgtcctgggcacacaggccccttctcggtgtccggcaggagcacagacttcccagtactcctgggccatggatgtcccagcgtccatccttgctgtccacaccacgtgctggcccaggctggctggcacagtgtaagaggtggatacaacccctcgccgtgccctgaggagtggcggtttcctcccaagacattccccacagctgggtgctgggcacaggccttccctggtgtgaccgtgaatgtggtcaccctgaacagctgccctctctggggacatctgactgtccaagaccacagtcagcacctctgggagccagaggggtctccagagacccccagatgtcaggcttgggctcagtgcccagcgaaaggtcagccccacacatgcccataatgggcgcccacccagagtgacagcccccagcctcctgccaggcccacccttttccgcccccttgaggcatggcacacagaccagtgcgcccactgcccgagcatggccccagtgggatgtggtggccacgaggggctgtacacacagcaggaggctgtccgccctgctcagggcctgctgcctatgccccagctgtccagccaagggaggcatggaagggcccctggtgtaagctggagccaggcacccaggcccccggccaccctgcagagccaaggaaaggaagacacccaagtcaacaaggggcagggctgagggctgtcccaggctcttttggcccgaggggctgccagcagccctgacccggcatgggccttccccaaaagcgaccctgtgaggtggcctcacagagaaccccctctgaggacagtgtctgaccctgcctgcctcacacagatgggccccacagcagtgggcaacctggggggcagcagcccaacctgaccctgcagggactgccccctgcagcagcagctgcttctcagtcccccaacctccctgtccccgccagagggtcttccccgaagctgcagccccaacccatggctgcccacctggaaccgggactccctgtccactgccccctccccttcggggccccatctgtgctggggcccaggttcggcctacagattcccatcattgccatggcctcctgaccttgcctatccaccccccaccaccggctccatgctgaccctcccccaggctcccacgcccagctggccggccatccccaggcacagacagtctgggatctcacaggttagcctggaccatccacctggccagacctgggagaggctggaagctgccctgccaccatgctccagagccccaggttgcagtactatggggtgagggtgtgtgtgcacacctgtgtgtacctaggatatccgagtgtacccttgtgcccccaagcacaagtctccctcccaggcagtgaggcccagatggtgcagtggttagagctgaggcttatcccacagagaaccctggcgccttggtcaaggaagcccctatgcctttcttgcctcgatttcccctcttgtctgctgagccagcaggggccacgtcctgggctgctgtgaggaggaagcaagttggtgctaggaggggctcctgtgtgtgcatgggcgggaggggtgcaggtatctgagcaccccggtctccacttgagagagcagggcaggagctccctgacccacccagactacacacgctgtgtccacgtgtctcccattatctgtggcagaggatccggcttctttctcaatttccagttcttcacaaagcaatgcctttgtaaaatgcaataagaaatactagaaaaatgatatgaacagaaagacacgccgattttttgttattagatgtaacagaccatggccccatgaaatgatcccggaccagatccgtccacacccgccactcagcagctctggccgagctcacagtacaaccacaataaactcttgttgaatgaactct

SEQ ID NO: 1855 - DNA, 4013 bp, Homo sapiens
gaactccggagaaaccctgggggagtaagcggtttttggcggctgcggcccccgggccctgccccgagtgcagaaatggggaaccgcgccggcccctctgcccagcgcaatgggcggaactgaagtcccgaggggaagctttgtattgggggtgcaattgaaggcggttgatggtgaagccattctgagtttatgtgttgactccggtttaagtgacacttctccagatgaagggttaatagaggacttgactatagaagacaaagcagtggagcaactggcagaaggattgctttctcattatttgccagatctgcagagatcaaaacaagccctccaggaactcaccacagctgcagttgactgtacgtgcctaaaactgaagaaagcaaaactgcagataaaggaggactgacatattttctggaagagactgtggggaattggtatcacgtcttccttaaatgtttggtaaaaattaccagtgaagccgtttggtcccggtactgtcttttttggaagacagaaccaagttgtattgttagacacactggaacaagagatttcaaaatttaaagaatgtcattctatgttggatattaatgctttgtttgctgaggctaaacactatcatgccaagttggtgaatataagaaaagagatgctgatgcttcatgaaaaaacatcaaagttaaaaaaaagagcacttaaactgcagcagaagaggcaaaaagaagagttggaaagggagcagcaacgagagaaggagtttgaaagagaaaagcagttaactgccagaccagccaaaaggatgtgaaaagttgtgtttgtgtgttttcttctcctgtcccatatttgggttatgatgactcaagtgtagactgaagttgaggtagtgccttatgccattatgtcatatgttgaaatccttattccggtattactgtgtctccatgccttttttccaagtagcagacgtcatgttgcatggtttttgatatttatatgtaagtttttcaaattttgcttaattttaaaatttattattttgatcttgaattatttataaactggaaagtggtttgattattgtgagtcaaaactctaagtggttaaaaattagtatgaattttttagcttcttaatgaatatggatttaaaactctccagttcttattttatgaaatgacttgcctttctggtaatacaatgctgattttttagtaattgccttttcattactttgttaagaagaaatgccagctgtttaatcacacctacccctggaaaagaggtaaaccttttgaacagttgaatttcatcagaagctctatagctttttggtgagaggaagtgatactctttattacaagaaacaaggaattaacaaaaataaggaacttgttgctacctttcttttctgttgaacattaaaaataatttggtttgtggactgggcatggtggcttatggaaaagaggtgagcctttgtgaagaacataatggaaaagtgcatgtacgggaaataacagcactttaggtgtagttcaggtgagcaagatgccagatagtttctactaaccatatactctttctgcttcttagcgtcgttgtcactgcttctgtggcttttgggttcaaagtagattatatatattcctaaagcttggtggaggtagtggagctatcacacactcaaatgagcttgtatatttataatacaatatagtattatagtaacagttatcatacactgagatatagtttctgtgcttgtaaaaaattcttgaagtgaggccgggtgcggtggctcatgcctgtaatcccaacgctttgggacgccgaggcgggtggatcatgaggtcaaaagattgagaccatcctggccaacatggtgaaaccccgtctctactagaaatacaaaaattagctgggtgtgggggcgtgcgcctgtagtcccagctacttgggaggctgaggcaggagaattgcttgaacccaggaggcagaggttgcagtaagccaagatcgtgccactgcactccagccttggtgacagagcaagactccgtctccaaaaaaaagaaaaaaaaatttcttgaagtggaatgatgtacaccaaatacccactttatagataattacagggatggtgaaaaattagtaaatagcttcacaaaagaggcagcgtgatacctttagtgttttctagaatttttttctggatattatatgtaagaatttattgtttgagggaaatacgaggtttcattgtttaaaatcaagagtgtattgtttactgttttacagtattatttaatatccaactggtctccaatctccattacatagggactgtacagagcctgtgaagatgtatgaatggtatcttttataatccacaatacatttctggtaagatggaatcactacctctgatcacatatcaggctaacgatagagaaagcattaggtttaagttgagggctaagaactggtttgtttaaaggtttaaattgttggaaaagagcatttgccttctttaatgaatgatggtctcacaattcagttgactttgacctaatatttaagaatataaatatattttatttgaaaggctgagtgttgccctcaaacacttgctaaaactgcctagggcaggattcattagggcttgcagacaatgtcacctaaattgctgaatgtactcattataatatgatatctgacaaaggtagtacagcgtttctgagtcatttgggaccaactgcagtggttgtttaaaatgctggttcctgcacacaattctctatctactgaagcacatctgttttctttgtttgttttgctttgctttttgtttttaaagtttcccccagtgattccagtgcacctgaaaagttgagaaccacaggcttagtggtacgttggggtttcccacgctaggctgcatagcattataacctgggaacgttaaaaaaaatacagacattcttgattcttagtgtagttatgatgtggatcctacgtattttttaaaaaactctccagataattttgatgtcacgagtcactagtatagactatctatctagtgagttgtattataagcgatgaaatactttaaaagctacccagtaactcttgggattaattttatgaaataaattctgagctgctgcttttgatatagtcagacttaagactgaaccccagtagacaggcaatagatatagaattctggttagctaattgaacttttgtgacctgtttaaaaacaaatcaaatttattgaacaaatgacaaggcacaaatactttcagaattgtatttcagttttgaagatttaaaaaaaatgtgaaaataaatatatattagtatcctttattttaaagtcaattgtaaaccagaagtactgttattttggtgattaaaatccaaaactttagctgtatttcagtaacaaaaacataccttactaggctgtgatggctcacacctgtaatcccagtgctttgggaggctgaggtgggaagattctttgagcccaggagttcaaggctgcagtgaattctgatcgcaccactgaactccagcccgtatgacagagtgagaccctgtttctaaaaacaaaacaaacaaacaaacaaacaacgtatcttactgactaaactggaatggaaatcttataattagtgttgtatttttctgcaaaatagtgaattggtacttgggagacttctgttctttgttgaaaaaaattgcctttgttttgaaattatatcacctgtgttctgaactaaaatgatgggagttcattttgtatttactttgcagtaagtatcatgtaaatatgcaaatgttgaatgtaatatagattgtgtcctcattgagtttttgggtgatacagtttataaatataacaattatacaccctcatacattcgtctgattttgagcttgtaagatgagaactgctttttacacatttaataaaaaaaggtctctgaatt

SEQ ID NO: 1856 - DNA, 4954 bp, Homo sapiens
agcgtctggccgatttggggacgcgggcagtcgcttccggccccggctcccgcacattcttgaggattgggccggggatgggaggaatggggacgcctggggacttgcacgccgcgtgcccctccaccacccgccgggacgccctctgcctcggtcccgagttcgagttcgacctccgccactcagctgggtgtcctggggaccttggtttcttccctttagatccggacactgaagcaggcggtagcgggtgtcttcctacctggctaccccttcggcgcctagcgcgaggcagggtgggcgaggcgagggcggcgccctgcgagggagggcggtcgcagaacctgcgggccttcagcgccccctggcgaggcttcccatttgcccccttgtctctctccctcctcctgactggctagaaccaagtatgggggtgatgcttattgcaactgcaactatgtacaggagaggccaagtcactgttcccaaccccacccactggcaaatgaaaaaaccaagacacagagagtttaagggatatgctcttgatcacccagccaggattggactagggctggaaccaactaggggctctggcctgagtttcagggggtcttctcataattcctcaggaatgtggagcctggagggctcctcccccaagactctccctgctctcttcagactaggacaagctggctcatggctgagttgggccagcccacactccctgctgaaaactatctccatcccatccccacccttgccacctggccttcccgctaagcagaaaggaatgacgggggggcgctaaaaagggagatgatagagggttctttggccctacccctgaatgatttggggggtggggacagaggaaatcaccccgcctttactggctcccgtctggttatcagacccacactggaggcttatctctgccactatcttccaggggaaccctgggccagtcctctctcccttgagccacggaggatctgtatgtagcaggtggctctacatggtggaggtgtgggggaggcaacaggattggctgactcactccagagaaggtgttctttcctgaacctggttagaccagtcacccccaatttcccgggaactgaggggttgagaaccggtagaagcagctgtcacccagggatgccctctataaggccctggggtggcccctagtgccagccaccttatatgtctgggggattggtcctcccactctgcaccctggcttcttccatggtggctaggtccaggccagtgcagtggggacaatagccctcagccaggcaggactcctgagcacctgtcctcagtttccccatctgtggatgaagcagtcaacccccagctgggctgtggtgtttggtgactagaccagggagcctcccttgctcagagggtggacttcatctgtcacctttccctctagggaccctgttagtgacccacagggtggcctccctcctcctcctacaatagctccctgacttttggggatctgggctctgagaggcaggaatcgagttgtagaaaggagtgcctggcttggcacctggcacaagtgggcagtttctggctgtccactcacagttgtgtgctctgtgaaccacaatgcaaagtggactacccaagatccctgaaacagtgggctgggtctacccccgggaccctgcgtgggcaggcaggcacgtgaagagcttgggacacagggagtggacacaggccacacattgtgccctaggcagagccgtgggcagctggtgccagccctccgcccctggcagccaaaatgacctgcctctcgcacccactgcagctggaggtcacagcagatctggcagagcggcggcgcatccgctcagccatccgggaactgcagcggcaggagctggagcgcgaggaggaggccctggcatccaagcgtttccgtgccgagcggcaggacaacaaggagaactggctgcactctcagcagcgggaagctgagcagcgggctgccctggcacggctggcagggcagctggagtccatgaacgatgtggaggaattgactgcactgttgcgaagcgctggtgagtatgaggagcgcaagctgatccgagctgccatccgccgtgtacgggctcaggagattgaggctgccaccttggctgggaggttgtacagcgggcgtcccaacagtggctcaagagaggacagcaaggggctagcggcacacaggctggaacagtgtgaggtgccagagcgagaggaacaggaacagcaggcagaggtttcaaagccatcccccacccctgaaggcaccagccaggatgtgaccacagtgacactcctgctgcgagccccacctgggagcacatccagctcacctgcctcacccagcagttcacccacccctgcctctcctgagcctccattggagcctgccgaggcccagtgccttacagctgaggttccaggcagcccagagccaccccccagcccacccaagaccaccagccctgagcctcaggagtctccaacgctccccagcactgagggccaggtggtcaacaagcttctgtctggccccaaagagacccctgctgcccagagccccaccagaggcccctctgacaccaagagagcagacgtggctggaccccgaccctgccaacgctccctgtcggtgctcagcccccgccaaccagcccagaaccgagagtccaccccccttgccagcggaccttcctcattccagcgggctggctctgtgcgggatcgtgtccacaagttcacatctgattctcctatggctgctaggctccaggatggcacaccccaggctgccctaagtcccctgacccccgcaaggctcctgggcccctccctcaccagcaccacccctgcctcctcctccagcggctcctcctctcggggccccagtgatacctcctcccggttcagcaaggagcaacgaggagtagcccagcccctggcccagcttcgaagctgcccccaggaggagggccccagggggcggggcttggctgctaggccccttgaaaacagagcaggggggcctgtggcacgttcagaggagcctggtgccccgctgcccgtggccgtcggcactgccgagccagggggcagtatgaagaccacattcaccatcgagatcaaggacggccgtggccaggcctccacaggccgggtgctgctgcccacaggcaaccagagggcagaactgacactggggctgcgggcgcccccgaccctactcagcaccagtagtgggggcaagagcaccatcacccgtgtcaacagccctgggaccctggctcggctgggcagtgtcactcatgtcaccagcttcagccatgccccccccagtagccgaggaggctgcagcatcaaggctgccgaggatgccgggacccccgtggcccacccacctgccttcagcacccgccgccgctcctccaccggcaccacccgcagcactagtctcatggaaccagagccagcagagcctctcgctgcagcagtggaagcggccaatggggctgagcagacccgagtgaacaaagcaccagaagggcggagccctctgagcgctgaggagctgatgactattgaggatgaaggagtcttggacaagatgctggatcagagcacggactttgaagagcggaagctcatccgggctgcacttcgtgagctccgacaaaggaagagagaccagcgggacaaggagcgggaacggcggctgcaggaggcacggggccggccaggggaggggcgcggcaacacagccactgagaccaccacgaggcacagccagcgggcagctgatggctctgctgtcagcactgttaccaagactgagcggctcgtccactccaatgatggcacacggacggcccgcaccaccacagtggagtcgagtttcgtgaggcgctcggagaatggcagtggcagcaccatgatgcaaaccaagaccttctcctcttcctcctcatccaagaagatgggcagcatcttcgaccgcgaggaccaggccagcccacgggccggcagcctggcggcgctcgagaaacggcaggccgagaagaagaaagagctgatgaaggcgcagagtctgcccaagacctcagcctcccaggcgcgcaaggccatgattgagaagctggagaaggagggcgcggccggcagccctggcggaccccgcgcagccgtgcagcgatccaccagcttcggggtccccaacgccaacagcatcaagcagatgctgctggactggtgtcgagccaagactcgcggctacgagcacgtcgacatccagaacttctcctccagctggagtgatgggatggccttctgtgccctggtgcacaacttcttccctgaggccttcgactatgggcagcttagccctcagaaccgacgccagaacttcgaggtggccttctcatctgcggagacccatgcggactgcccgcagctcctggatacagaggacatggtgcggcttcgagagcctgactggaagtgcgtgtacacgtacatccaggaattctaccgctgtctggtccagaaggggctggtaaaaaccaaaaagtcctaacccctgctcggggccccacggatgctggtggactgtgtgcccctggtggaggtggacgacatgatgatcatgggcaagaagcctgaccccaagtgtgtcttcacctatgtgcagtcgctctacaaccgcctgcgacgccacgaactgcgcctgcgcggcaagaatgtctagcctgcccgcccgcatggccagccagtggcaagctgccgcccccactctccgggcaccgtctcctgcctgtgcgtccgcccaccgctgccctgtctgttgcgacaccctcccccccacatacacacgcagcgttttgataaattattggttttcaac

SEQ ID NO: 1857 - DNA, 3423 bp, Homo sapiens
gcacgtgtgcgagcccggccgccggtgagtcggctggagcgcatctggtcctccgcgcggaaagcgctgcttttgcctggccgccctagccgctggctcatccaagtggccttcgccgctctcttgcgtcccaaccagagcgctggccacctcgccgcccagctcacgccgcgcccgcgctcccaggctccggccttaaagatggagatgacagaaatgactggtgtgtcgctgaaacgtggggcactggttgtcgaagataatgacagtggagtcccagttgaagagacaaaaaaacagaagctgtcggaatgcagtctaaccaaaggtcaagatgggctacagaatgactttctgtccatcagtgaagacgtgcctcggcctcctgacactgtcagtactgggaaaggtggaaagaattctgaggctcagttggaagatgaggaagaagaggaggaagatggactttcagaggagtgcgaggaggaggaatcagagagttttgcagacatgatgaagcatggactcactgaggctgacgtaggcatcaccaagtttgtgagttctcatcaagggttctcgggaatcttaaaagaaagatactccgacttcgttgttcatgaaataggaaaagatggacggatcagccatttgaatgacttgtccattccagtggatgaggaggacccttcagaagacatatttacagttttgacagctgaagaaaagcagcgattggaagagctccagctgttcaaaaataaggaaaccagtgttgccattgaggttatcgaggacaccaaagagaaaagaaccatcatccatcaggctatcaaatctctgtttccaggattagagacaaaaacagaggatagggaggggaagaaatacattgtagcctaccacgcagctggggaaaaggctttggcaaatccaagaaaacattcttggccaaaatctaggggaagttactgccacttcgtactatataaggaaaacaaagacaccatggatgctattaatgtactctccaaatacttaagagtcaagccaaatatattctcctacatgggaaccaaagataaaagggctataacagttcaagaaattgctgttctcaaaataactgcacaaagacttgcccacctgaataagtgcttgatgaactttaagctagggaatttcagctatcaaaaaaacccactgaaattgggagagcttcaaggaaaccacttcactgttgttctcagaaatataacaggaactgatgaccaagtacagcaagctatgaactctctcaaggagattggatttattaactactatggaatgcaaagatttggaaccacagctgtccctacgtatcaggttggaagagctatactacaaaattcctggacagaagtcatggatttaatattgaaaccccgctctggagctgaaaagggctacttggttaaatgcagagaagaatgggcaaagaccaaagacccaactgctgccctcagaaaactacctgtcaaaaggtgtgtggaagggcagctgcttcgaggactttcaaaatatggaatgaagaatatagtctctgcatttggcataatacccagaaataatcgcttaatgtatattcatagctaccaaagctatgtgtggaataacatggtaagcaagaggatagaagactatggactaaaacctgttccaggggacctcgttctcaaaggagccacagccacctatattgaggaagatgatgttaataattactctatccatgatgtggtaatgcccttgcctggtttcgatgttatctacccaaagcataaaattcaagaagcctacagggaaatgctcacagctgacaatcttgatattgacaacatgagacacaaaattcgagattattccttgtcaggggcctaccgaaagatcattattcgtcctcagaatgttagctgggaagtcgttgcatatgatgatcccaaaattccacttttcaacacagatgtggacaacctagaagggaagacaccaccagtttttgcttctgaaggcaaatacagggctctgaaaatggatttttctctacccccttctacttacgccaccatggccattcgagaagtgctaaaaatggataccagtatcaagaaccagacgcagctgaatacaacctggcttcgctgagcagtaccttgtccacagattagaaaacgtacacaagtgtttgcttcctggctccctgtgcatttttgtcttagttcagactcatatatggatttcaaatctttgtaataaaaattatttgtatttttaagtttttattagcttaaagaaataatttgcaatatttgtacatgtacacaaatcctgaggttcttaattttagctcagaatataaattagtcaaaatacacttcaggtgcttaaatcagagtaaaatgtcagctttacaataataaaaaaaggactttggtttaaagtagcaggtttaggttttgctacattctcaaaagacagcaggagtatttgacacatctgtgatggagtatacaacaatgcattttaagagcaaatgcaacaaaacaaatctggactatggataaataatttgagagctgccacccacaaatataaatacagtactcatgctgactgaaataataagacatctacaaatttataaacaaaaagtgattgtcattatcctgcttatgtactagattcaggcaagcattatagactttttggttgcggtggcttttgcatttatattatcaatgccttgcaggaacgttgcattgataggcccattttatttttttattttttttttcgagacaggatctcactctgtagcacaggctggattgcagtgcaatcctgcaattctcaatcttgcactgcagcctcgacctcccaggctccagtgactctcccacctcagcctcctaagtagctgggagtacaggcgcgcaccaccacgcctagctgatttttgtatttttttgtagagacgggggtttggccatgttgccgaggctaactcctgggattacaggcatgagctgtgctggccgggtttttttttcttgatgtaaacgtgtacagctgttttattagttaaggtctaatttttactctaggtgccttttatgttcagaactctttccactggactggtatttgctcaaaaataaataatggtagagaagaaaactataaaaatggacaaggctttcttctatcagtagcgtttaccctttgtcaccagtggctttggtatttccatgtctggcattgcataaacttctctggtgtgaaaggataaatatgcctttctaaagttgtatatcaaaattgtatcaatttttattttctatgatttctagaaacaaatgtaataaatatttttaaaatctc

SEQ ID NO: 1858 - DNA, 4473 bp, Homo sapiens
ataatatagcaaagcagacacaggcctcaaaaacttaaggaacatttatgggagaaaatcttaactgggaattcaacagatggggagaagaccatcattctcagtttttgaggcagagcatctcattccaacgagaggtgtgtacgtgcaggagcaaaacctgagacacccggggaggagggtatatgagtgggaggctgtataatacacttggttgcaatcccagatccacctctttctatttatgcagctccaagcaaattacctcatctctctttgccttggtttcctcatctattaaatggggattagaagagactgacttcatagagtcgttgtgcgaaaatgagccagtgtattgtaatgagtctagaattgtgcctctaccacaaaataagtcctcaataactattagcttactactcccagcgtcaccaccaccactaccgctacctctactattattaaatgagagggaaagaacaacgaaaatactgtttaattagcaaaactaagaggtaatgagggcctgaattaggtgccagaacaaatggacagattgcagaggtaacagagataatgagcctatagaatttagcatctaatcccccaaggatatgatttaattggtctggggtgcggctggtatcttagtttttaagctccccaggagattccaaggggcagccagagtcgaggatcattgttgtaattgcaaatcacaaaccagaggcggagtggaaggaggacctagagacatcccagtttactccatgcggctctccaggctagacgtgtgagcagaacttgaaggtttttcggagggagtcacagaggtttggacaccggcttttttgttaaaatacttgagattatgaaatgtattttagagtcaggagtaaaatatttaaggtgaggtttgccctgggagtagagcaagcgaaggaaacagcctgcatacttgcagagatttagtgagtcatgtagaagctgcctaacaaggaagtatgtctaagcaagtcacaactgggcccgggtgcgggatgaagttaagtgcttaataatttggactttacaccttcaaaacaagctctaaagactaacagtaacattgtataagcaactatttgtaagatccgatcagtgtaatttcatcacttgcagattattatccagacccctcaccatggccccacatgccaggtgcctgtcttccctccagtgtcccccaggagcactgtgtccagccacgcaaaacacatatatgcccctctagaatataagcaacacgaagacaggaatcgcatctgagcgcctgttgtaatgctcgggagcatttgttgaatgaatggaagaatgaatggtctggtaaaaagttaataccccttctctacccacatttacccaagatccaaccccttttttcattcagaactgttttttaattttaaaaaatctttttttgaaaccgtaaaagtaatgcatgcactgtgtagaactcttgggaaaatgccagaaagcacagaaaaagatctataatcccacaacccacaaacattttgttaaatagtatttcagtctggagtgtgtgtgtgtgtgtgtgtgtgtgtgtgtgtgtgtatacttataacttgctctctgatgaccaaaatgcttcctgtccaggtagatgcctaataaattctgctgagttacaggcaaatggggccagagacccagagaccaggagacaaataatccagataacttggaaatggttgcagttctccaaaactttagagtgacttaatccagctttttggaaaatggtcagatattcaggggttttttaatgcaaattttagctgttaggctgagcatccagaatcagaaaagggacctagagagtaaggagttgagggatagaggaaggtgtagagaaaaatctagatgaggttagtgcaaaggcagaaatatctaccacctttgaaactttgccacctctctcttcctggttgccttttatttaaacattttaaaaatagatagacatagatggtttccagttgtttgtttgttttgagacggtctcactgttgcccaggctggagtgcagtggcgcgaactcagctcactgcaacctccacctcctgggttcaagagattctcctgcctcagcctcccgagtacctgggattgcaggtattcaccgccacgcccagctaatttttttgtatttttagtagagacggggtttcatcatgttggctaggctggtctggcactcctggcctcacgggatccgcgcacctcagcctcccaaagtgctgggattacaggcacgagccaccacggctagcccagttttttttttttttctccgagacggagtctcactatgtcgcccaggctggagtgcagtggtgcgatctcagctcactgcaactttcacactccgggttcaagcaattctccctgcctcagcctcccaagtagctgggattacaggcgcctgccaccacacatggctaatttttgtatttttttagtagagatggggtttcaccatgatggccaggctggtcttgaactcctgacctcaggtgatctgcccgccttggcctcccaaggtgctggaattacaggcgtgagccacctcacccggccccagtttttaagctaaagttagcatcctgtgcatatatttgtatacgtgtgcgcttttccccccatttaaaaaaaattagagttagggtctcgctatgttgctcaggctggccttgcactcctggcctcaagtgatccgcctgcctcagtctccaaaggtgctaggattacaggcgtgagccatcatgcccaacctccccatttttaagatataatttacatatagtgaaattcacatgagtatatagttctgtgagttttgacaaacttttgcagtcatacatgagttcaccacaatcaagatatagaacagttctcctagtcagcttagcttggtatgaaaagtaaaaataaaaaagatataggacagttctgtgttagggttctccagggaaacagaaccaaggtgatgtatgtatatatagcgagtgagtgagtgagtgtgaatgtgtagagggagaaagatttaagagggtaagctggcaggctggagactggcagggaagagttacagtctaagtctaaaggcagtctgctagcagagttctattcaatttaatgctcaagaataatcctctttggcaccattcattctctgtccttccagcccaccaggatgggagctgggagctgtgcccctgaggccctgggcggcagccacaccttgtgaatcccctcttggggtcattcttccctcttcttgaaagataacaaatgtttgcagccacatcactgtagcccattctgtagaagtctgacagccttccttccctttgtcctgtctttgtccattttaatccaaaagggcagtatttctgctgaggtggttggttgaatccatgcttcacagccccagtctcattatctgatcgtccagccacaccattggtgttctcttaggaacacaccttctcatttttttgcaatgaggctaggctgagaattttctaaattttcaagttctggttcctttttgcttaacaataatttacttctcacattttactacaagcagtaaggagaaaccaagccacaccttcagcactttgcttagaaataacttgtgctgaatatctaaattcatcactcacaagttctacctttcacaaaacactacaaaataactcagccatgtttcttcccactttgtaacaagaatcgcctttccactagttccaataacatgttccccatttccatctgaagcctcaccggaagcacctttaacatccatatttttggggttttgtttttgtgtgtatgtgtttgttttggttttagttttggttttggttttggttttggttttggttttaggacggagttttactcttgtcacccaagcaggagtgcaatggcacatgatctcagctcgctgcaacctccacctcctgggttcaagagattctcctgtctcagcctcccggattttggttttttgtgctttgttgagagacaggatctcgctctgtcacctaggctgtagtgcagtggcatgatcatagctcactgcagcctaaactcaagcattcctccctcctcagcctcccaggtagctgggactgcaggtgtgcaccgccacatccagctatttttattatttgttgtagagatggggttccactatgtggcccgggctggtcttgacctcccaggctcaagtgatccttctgtctcggcctcccaaagtgctgagtttactggtcatatgtatttttaagggagaatgggaacatttcaatggtagctgcctttgggaagtggggaggagcataagactggtggagtgtttaagaggatttaactttctgtgatgttttatttaag

SEQ ID NO: 1859 - DNA, 3203 bp, Homo sapiens
aaaataaagaattggtgcagactgaaatccaagaaagacattccttcacaaaagagataattgctttgaagaatttctttcaacagaccacaacttcattccaaaatatggcattccaggatcacccagaaaagtcagaacaatttgaggagcttcaaagcatccttaagaaagggaaactaacttttgagaatattatggaaaaactgcgaatcaagtattccgaaatgtacaccatagtccctgcagagattgaatcccaggtggaagaatgcagaaaagctttagaagacatagatgagaagattagcaatgaagtcttaaaaagctcaccatcatatgcaatgaggagaaaaatagaagaaattaacaatgggcttcataatgttgaaaagatgttgcagcagaaaagcaaaaatattgagaaagctcaagaaattcaaaagaaaatgtgggacgagttagatctatggcattccaaactaaatgagctggattctgaagttcaggacattgttgaacaggacccaggacaggctcaagaatggatggataacttgatgattcctttccagcagtatcagcaagtatcacagagagcagagtgtagaacctcacagttgaataaggccacagttaagatggaggaatatagtgaccttctgaagagcactgaggcttggatagaaaataccagtcatttgctggccaatcctgctgactatgactctttgaggacactgagtcaccatgctagcactgtgcagatggctttggaagattcagaacagaagcacaatcttttacattcaatctttacggatctagaagacctgtcaataatttttgaaacagatgaattaacccaatccatacaagagttaagtaatcaagtaacagctttacaacaaaaaataatggaaagccttccacagattcagcgaatggctgatgatgtggttgctattgaatctgaagtaaaatcaatggaaaaaagagtttcaaaaatcaaaactatcctattatcaaaagaaatatttgatttttcacctgaagaacatctcaaacatggggaggtcatacttgaaaatatacgtcccatgaagaaaaccattgctgagatagtgtcttaccaagtggaactgaggttgccccaaacaggaatgaaacctctgcctgtgtttcagcggacaaatcagcttttacaagatataaaactattggaaaatgtgactcaagaacaaaatgagttattaaaggtagtcataaaacagaccaatgaatgggatgaagaaatagaaaatttgaaacagatcttaaataattattcagctcagttctcccttgaacatatgtcaccagaccaagctgacaagctgccacaactacagggagaaatcgaacgtatggagaaacagattctgagtttgaaccagagaaaagaagacctgttggtggacttgaaggccaccgtactaaaccttcaccagcatttgaagcaagaacaagaaggagtagaaagagataggctgccagctgtaacatcagaggaaggtggagtggcagagagggatgcttctgagcggaagttgaacagaagaggctccatgtcttacctggcagcagtcgaggaagaggtggaagaaagttccgtgaagagcgatgtaagggaaatgattttcttgttaaagtttgttagaaccagatctctaaaagaagtcaatgaaaagatcttaaagtgaatggaaacctaagaatttttaaaattaatgttgatattttaaaagtatgattgaagtagttctcttatgttattaatgtttaagtgtatggaaacctacttcactgtgtaagagtgagatgaatgtaattcagacactcttgttggcatacgggagaaggtgaagaagttctctgtagtatcctgatttctgaggactttctctgaagttttgagagcatgctgtttggcactcctggtctcatttttagaactgtatttttccgcatttcaattactcttttgctctaaaacagtatttccaatgacatgaagagttgtgttagcaagtaatactaagaatttgtactacttgattataactggttgaatgagacattttcagttgtcttttctgacgtcagtttccatttcatacttgaaaaaataagttgcaatgggtcttaagacaaaaggaagaagattgaagcaacttacaatttttgtgacttacatgtaaccaccagacactttttgggctcattttatagatggttaaatagctccactctcacacagagcagacctcttgtcctagagtgtgtcgctgggacatggtggaactgtgacaaggaagagtacaactttactgtgtgctctgtgaccatcaaacaactttgcaatctgattataccccttcatggcagagagaactacgaaaataatggagggaccaggggccaaaaagagtgacttcagtacgatgttaatttgagacatgtatttccttctgagctgatgtttatagtgttgtttgtctttgacagcaacaaaaaagtacatgttcatcaagctgtgatttttttttcttttttttaattattattatactttaagttttagggtacatgtgcacaatgtgcaggttagttacatatgtatacatgtgccatgctggtgcaccgtacccactaactcgtcatctagcattaggtatatctcccaatgctatcccttccccccccccctaacccacaacactccccagagtgtgatgatctagaactagaaataccatttgacccagccatcccattactgggtatatacccaaaggactataaatcatgctgctataaagacacatgcacacatatgtttactgcggcattattcacaatagcaaagacttggaaccaacccaaatgtccaacaatgatagactggattaagaaaatgtggcacatatacaccatggaatactatgcagccataaaaaatgatgagttcatgtcctttgtagggacatggatgaaattgaaaatcatcattctcagtaaactatcgcaagaacgaaaaaccaaacaccgcatattctcactcataggtgggaattgaacaatgagaacacatggacacatgaaggggaacatcaagctgtgatttttttaaaaaaattgacaagtaaaaattgtatgcattc

SEQ ID NO: 1860 - DNA, 4112 bp, Homo sapiens
gagcatatttttaaccttggagaagaggacgaaacatacggacctggagaatcccaaatcacagcacaaagtagggaactcttgaaggattcccctcaagatttagatctctctcacacagatctaggggagagtgatgtagattgtggtagcaccagcttagtagaaaatgtgacacttttgacacaatatgattcaggagaatgcaacattgcatctaaagaggaagtggaggctcctctttctgcccaggagagcgaaatgctctataagaagttctccctgaaattcgtatcagcaagaaagaaagcagcacccagaaaaacaggggcccaggcaggaatattggacacagtctgcaatggctttcagttggttcaggtattccagaaagaagagattgaacccttgcaaggtaaacagcaagatgtaaactggttaggtcaaggccttattcagagtgctgccaaaagcactagcactcagggcttggagcatgacctggatgatgtcaatgcacggtggaagactctcaataagaaggtggctcagcgagcagcccagctgcaggaggccttgctgcactgtgggaggttccaggatgccctggagtccctgctcagctggatggtggacactgaggagcttgtggccaatcagaagcccccgtcggctgagttcaaagtggtaaaggcccagatacaagaacaaaagcttctccagagattgttggatgaccgaaaatctacggtggaggtaatcaaacgagaaggagaaaaaattgctacaacagcagagcccgcagataaagtgaagattttgaaacagctcagtctcttggatagcagatgggaggcattgcttaataaagctgaaacaaggaatcgtcagttggaaggtatctcggtggtagcacagcaatttcatgaaaccttagaaccactgaacgagtggcttacaaccatagaaaagaggctggtgaattgtgaacccataggaacccaagcatctaaacttgaggaacaaattgcacagcacaaagccttagaagatgacatcatcaatcacaataaacatttacaccaggctgttagcattggccagtccttaaaggttttgagctccagggaggataaagatatggtgcagagtaaattagacttctctcaagtatggtacattgagattcaagagaaaagtcacagcaggtctgagctcctccagcaggccttatgtaatgctaagatttttggggaagatgaagttgaactgatgaactggctgaatgaagtgcatgacaaactgagcaagctctcagtccaggattacagcactgaggggctatggaagcagcagtctgaacttcgggttctgcaagaggacatcttactcaggaaacaaaatgtagatcaggctttactaaatggtttagaactacttaaacaaaccacaggtgatgaagttttaataattcaagataaattggaagccattaaagcaaggtacaaagacattactaaactgagcactgatgtggccaagactctggaacaggcgctgcagcttgcaaggcggctgcactccacacacgaagagctgtgtacctggctggacaaagtggaggtggaattactttcatatgaaactcaggttctgaaaggagaagaagcaagtcaagcacaaatgagaccaaaggaactgaaaaaggaagctaagaacaacaaagccttactggactcccttaatgaagtgagcagtgctttgctggaactggtaccatggagggcaagagaaggacttgagaaaatggtagctgaggacaatgagcgctaccgattagtgagcgacaccatcactcagaaggtggaggagatcgatgcagccattctgcgatcacagcagtttgaccaagcagctgatgctgagttatcctggattactgaaacagaaaaaaaattgatgtctctgggtgacatcaggcttgagcaagaccagacttctgctcagcttcaagttcaaaagacattcaccatggagattttgagacacaaggatattattgatgaccttgttaaatctgggcataaaatcatgaccgcatgcagtgaagaggaaaagcaatcaatgaagaaaaaactggacaaggtactgaagaactatgataccatctgccagattaattcagaaaggtatctgcagctggaacgggcacagtccctggttaaccaattctgggaaacatatgaagaactttggccatggctgacagaaacacaatcaatcatctctcagcttcccgccccagcccttgaatatgaaactctaaggcagcagcaggaagaacatcggcaactgcgtgagttgatagctgaacacaagcctcatatagataagatgaacaaaactgggccacagttactggaattgagccctggggaaggcttttctatccaagagaagtatgtggcagccgacaccctttacagtcaaattaaagaagatgtcaaaaagcgtgctgtggcactggatgaagccatttctcaatcaactcagttccatgacaagatagatcagatccttgagagcctggaacgcatcgtggaacgtctgaggcagccaccctctatctctgcagaggttgagaagatcaaggaacagatcagtgaaaataagaatgtgtcagtagacatggaaaagctacagccgttgtatgaaactcttaaacagaggggagaggaaatgattgctagatctggggggactgataaagacatatctgccaaagctgttcaggataagcttaaccaaatggttttcatttgggagaacatacacacactggtggaagagagggaagccaaactactggatgtgatggagctagcagaaaagttctggtgtgatcacatgtcattgatagttaccattaaagatactcaagatttcatccgggacctggaagatcctggaattgatccttcagtagtaaaacaacagcaagaagcagcagagaccataagggaagaaatagatggactacaggaggagctggatatagttattaacctaggttctgaactcattgcggcatgtggggagcctgataaacccattgtcaagaagagtatagatgagttaaattcagcatgggattctctaaataaagcttggaaagaccggattgacaaacttgaggaggcaatgcaggctgccgttcagtaccaggatggactgcaggcggtatttgactgggtagatattgcaggtggtaaattagcttcaatgtctccaattggaacagatctcgaaactgtcaagcagcagattgaagagctaaagcaatttaagtctgaggcctatcaacagcagatagaaatggaaagactgaatcatcaagcagagcttttgctaaagaaagtaacagaagagagtgacaaacacactgttcaagacccattaatggaactgaaattgatatgggatagcctggaggagagaatcatcaacagacagcataaactggagggtgctctattagccttgggtcagttccaacatgccctggatgagctcctggcatggctgacacacaccgagggcttgctaagtgagcagaaacctgttggaggagaccctaaagccattgaaattgaacttgccaagcatcatgtgctccaaaatgatgtattagcccatcagtccacagtggaagccgttaataaagcaggaaatgatctaattgaatcaagtgcaggagaagaagcaagcaaccttcagaacaagctagaggttttaaatcaacgctggcaaaatgttttggaaaaaacagaacaaaggaagcagcagctggatggtgccttgcgccaggccaaagggttccatggcgaaattgaggatttgcagcagtggctgactgacacggagcgtcatctgttggcatctaaaccgctgggaggtttaccggaaacagccaaggagcagcttaatgtccatatggaagtctgtgctgcctttgaagctaaagaagaaacatataagagtctgatgcagaaaggccagcagatgcttgcaagatgcccaaaatctgcagagacaaatattgaccaagacat

SEQ ID NO: 1861 - DNA, 4202 bp, Homo sapiens
ttttctaataattttttttttttttttttttttgagacagagtctcgctctgtcacccaggctggagtgtagtggcacgatcttggcttactgcaacctctgcctcccaggatcaagccattctccttcctcagcctccagagtatctgggactacaggcacacgccatcatgcccagctaatttttgtatttttagtagagatggagatttcactatgctggctaggctggtcatcttgaattcctgacctcaagtggtccacctgcctgggcctcccaaagtgctaggattcccagcatgagccaccgcacctggcctgtatctctaataatttaaatactgatgcagtttcttcagagtgttgtctacacctggaaaactgaggtcggtaaagtaagcaagtataatgcataatttagtttcaatgttttcattaatatgataccataccattgtgaacacttgtatttggttgcatggctaacaactaccttttggatttttcatgttagaatgaaaaaaatgcatggcatacatcaccaagaatcaaaggttgtgcctggcagtgtaattgactatgtaataaagagagaagctttgctaggtgagtggacagcataatgagaggctttgttcacatctgcagaaatgcattttcgttaaacacctgtgttaagcacaagcacataaggcacagtgatagatggatgtaaaacatgggtagatgatgtccttgtatgagattctacaaagactccgatgtgttgaggtttggaagcattcaggcagcctcctggcactattggctatgctgctaatgagattacaggcagggcatgatttcattccatgtaatatttttgtcattaggaagaggcaagttatttttacctgtcaatttctgttttttgaaattgaaaaattctcaggtacgaatcccaaaagactttacatgcaacctccatgtcctattcaggactgttcaaggagaagacagaaacaccatgtttagaggtcattggtccatctactctagaaacttccccttggcagtggtccctgcctatgttacagaagacggcaaaaatacgagccatcgtgcatctggccagttctgcaatgctctatcccagggggaaattccttcctcactccagctggtgaacagctatgccctggagcccaggacggacatgccttgtaactttttaacttagttagtgtaactaccaatattattcctattcatataaatgtctaatcctttcttgaatcttgctagactatttgcctcaataatatcctgcggcactgaattccacaggtagattatacgctgctttaaaaagtatttccttttcttggttttaaatttgttgctttttaatgtcacaaaatagcccttgttcttgcattaagaggcacaggatagaagcattacaaatggacccttatttcttccaagcagtttcttcactaatattaaaaccctattttcttcatatattttctattttggcatatataatcttgatttaatgaaatgatttatgtaattagtctcacactattttatgaacatagtaggcactggtaaaaagctttccttggcattcaatgtcatttattggacaaatatttattgagcatctattatgtgcaagaactgttctaattttggagagtcagcttcacataagactgggtcatttttctgaaggacttacttttctagagaaggagataagcagtaatatagtgaataaatctatgaacctcatggtttcagatggtattaagtattacgggaagattgaaaggtggctggagccgatttgcattgcacagtcagggagtggctctctgaaaagaggacagttgccatcagctgtcaaggagccccttatgtgaaatctccatgaaggtgaactccagctccgaaacaatgcccagtagttgttgaggctcaatcattatttgttgagtgcataaatgaattaaggttgagaaggaaagccttagttactaaaatcaccaggaatttactcagtggattcagggggatcatttcttgaatccccgtgttctgtaactcccaacactgtgggaataaacaaagcaggggctgtagttagttagactgggtttcaagacctgaccatggtccccagcttaccagctgtgtgtccttgggcaagttacctaattgctctcatccacagaaccctcctttataaaaatgagagtaaactttcttccttcatgggagttggaggtttgaaggcaaagttaacgtggaagttctttttaaactgccaaatggtgtagaggtgtggttattcttgagggaaccagctgttcccagtgtcaggctctgctctttcatttttccctcgttcccttcctcatgttctgcttccttccattccctagtttatccctgcccctgcctaaagcccaccagggcatccatgggacttagctttctgtcccggaggtggctcaagcagggtggacatacctttctgaaattcttatctatgtcttaggaacttttacagtggagctgttgtgtattgatgcagcggactggatgtggctttcgaatagtgattgtctgcttttattttgtttactgcttaatctgctggggtcaagttaccgaaacttctacgtataaaaacagtccttgcctgaatttccgagggaatcttgccccagaaatcaagcctttggttgcaacgggctgcctggctgccttcggcttccctctgtgttccagcctgactggcatatgcatacactgtttcctcatgttgcctcttgttattctttttaattgtcccttaatgtacgttttttttttcgtttaggcaatttgaaatagagcatgtgcagctctgcataataatatatgataggaaacatttcaaggaataaattattagaattgtttacatgcatggttcaaatttactggcaaattgcttaggcctcagttttatgatgtagctgccagctaggctccttcagggtgaaactctgaaataggagaagctgcccagcgctgtcccttcccagcacttcctctccttgttcctgccctttcaacacctccctcctttcccgcccccaaataactctgtggagctgccaggccttttgcaccttaatgtgaagacatttcgtgggtcctccccggacccgcccccagcaaaggtgaggtgcgcaaaggaataaatctccaatggtgtaattttagacactgtggcaactgggcagcgcggctatttttggccatggggctttctccttgacctgagatgatattgcctggctgctgccagtgcacccggccaaccctgcacgcggtccttttcgcaacgtgtttgccattcctgggggctggcttcttcctctttctgtcaagcagctctgtgctcatgcacgatgctgtgtgtttgagcaagggtgtgaagcggtcgacgcgtgcccacctaggcttgccccagggtgacactctcaggcagtggtcaggccacctctgaggggcaacgcagatggaacagacgtcctttcacattgggggtgggggaagatttccggtccagtttctgggtctccctcagcctccatacttgatcagctgctcagcgaccattctatgagtcactccttctctgggtaaggcgagccaggcagcctccaggccacagggttcatgcattcccgcccacactgcttcatttgaagccgcatcctcacagagattcttctgaccacccggcttgctgtcttcccactcaagctcctcatgcagctgctgtctacagaccccctggactgcctggggaagtgagtcggagctcctgcagcagaggggtggaacagctacacgaagatccgaaggtggccaaaaataacagcgctttccagatgagggtaatgttatagccaagatcatcgctggggtagggtgtcttgttctttgttttacaacctaaaaagtacacagaagactcaaagatcattcaggaaggaggaatcaagtcagtacagaacagagaaatgggagcagttaaaaacaaaggaattgagtttctttatgccaaaaaagagaaaacagaggccttttatagatagagagagagccctggctatctggatggaagatctgttttctccagcttccatggccgc

SEQ ID NO: 1862 - DNA, 3506 bp, Homo sapiens
agcaagcccaaggagctggtgaagcgctggcatgcgctctgccgcaccacggagccctgacccttcgcccagcaccgcggttccgctttgggagccgaccatcctcgcagttgcatgtgacagccacagccacacgcatggacgtttcatccaacagctccccgagctgccagccagcccgagccaggaggacgtgagtgctgatatgcaggagagaagaggggacaaagaagccctggcccggtcagcggctctggccatacagccttccgacacactccctcctccttatctgcggggctgcctgggctcggaatcccggctcctggtcctcacagccctgatttggaccagaatctcagatgctcagaagaaagatcctgtttagtgatgacccagctctacctgctgaatggacctgcagggtaaacttgggtgcctccatctgggaaagctgatgatgtgttcatgcagtcgatgaccctcactgctttttcagccagggtttctctgccttctgcctggcagagaaaacacactgctatggggaaaatcacagggagggcgctgtgaccagcgcactcaggcaccaagtgtcggcatggctcactgtgctgggtgaaggcctccccgagcattaggtcctccacggggctgtgtcaaatgccctcccacattgtgtcaagtctgcccatggcccaccctccccacagtccaaaaccacacagccctggttctccagctgttctgctgctgtttctgtgctctccctgattaagagcattcagttcctgggctctccctttgagcaggaaatggtgaaagcatgtggctatggtatagcccacagggctgagattgctgtgttgcagtattgatgtaaaatttgttaagaaggaagtacccacagatcactgccatcaactccccagaagttgcactcaagctagtgagcagcccttgtgcttgtcacagttactgtaacaggtagtgtgtatttgcacctggcatcgtgcagcctgcacgtcaacacgttgttttgtgtaactagaacagcacatggaaccactatctctttctcttttttccttctttttcttttttttttttattttaattttttgagacagagtttccctcttgtcacccaggctggagtgcaatggcgtgatctcggctcactgcaccctccacctcccaggttcaagcgattctcctgcctcagcctcccaagtagctgggattactggcgcccgccaccatgcctggctaattttttttatttttagtagagacggaattttaccatgttggctaggctggtctcaaattcctggcctcaggtgatccacctgcctcagcctcccaaagtgctgggattacaggcatgagtcaccgcacccagcccgaccagtatctttttcttatgcagtgaaacaactttagcaaaagaggcaatgaatgttatactgagtttctacctctttaactccacctccaatttctgtcaatctacaaacacaagtgtcgcctcgcagtgtttcgtatgaacagaatatcttgtgtttgctttttgtcacttatttcacttgcacattttttgtttgtttgtttgtttgtttgtttgtttgttttttgagatggagtcttgctctgtcgcccaggctggagtgcggtggcgcgatctaggcttactgcaagctccgcctcccgggtttacttacactactgtcctgcctcagcctccggagtagctgggactacagacacctgccaccacgccctgctaattttttgtattttcaagtagagacggggtttcactgtgttagccaggatggtctcgatctcctgacctcatgatctacccgcctcggcctcccaaagtgctgggattacaggcgtgagccaccacgcccggcccacttgcacattttcaaagtagtctgcaaagctgtagtttctaatagcttcatagctcacatgtaataggggttctctgtgtgtttatagagcaggctactacagtggaactgtttctgtttcatctgacatccggatagatgccagccacccccacattccaaggtgagatttctgactagcagtgacttttctagggccgcttggaaaagttgataagtatccttttctgcaggacagagtagactggtatctctgactcatccctgaaaaatctaaatggcaagagactagctggctctctgctctgatggggaggaggttgttgtttgggctgttctctacagacatagtcagggcaaaaagcatacgcatgcttcccatggaccagagaaacctggcctgggttgtctcaaatcctgtccacaaggcaactccagaagaaagaagccctttacatttccataaaacactttagaatcagctagtcaatttccacaaaataaagtgctagaatttgattggatttaattgattatgtagaacaatttgggggccatttgacatcattaaaatattcaatcttcctattcattaacatggtatatctcttcactttaagtcttttgcatgtttctcagaactatttttgtggttttcagtaaagtgttcttgcacatccttcaatagatttattcttagacgttttatatttgtttatggctagtatatacagattctgttgctacaaaactatgttgaccttgttatccagtgagaggctttgtgacattcatttaaattgtaataatttgcagattatttttgtataatcatgtcctctgtgaatgacagttttatttcttcctttcttaatctttatgccttatttagctcttgccaaactgcagtggctgagcaattggacaagataaagaaataaaagtgatccagatcataaagaaagaagtaaaactatatctgcacatgacataatcttgtctatggaaaatcctaaggaatccacacacaaaaaaactactagagctaataagtttggcaaggttgcaagatataaaattggtatacaaattgcagtggctaggacctccagcagaatgctgactataagtagtgatagtgggtattcttgtccatcctcaatctcaggggtggtgggtgtggcatgtggagagttgtcaatattcaccatgaagtttgatggttgttataggatttttaatgtactcattaacatatattctcaagctgttaaaaagatttttttaattacaaataaggttaaatttctctcaaatacttactctgcaccttttgaaataattttatttttctcctttattctttggatgtgatgacttatactaattgactgttgaatgtcaaaccaaacttaacattcttgtaatagaaaccagcagggtgtgtacacttttgtgtgtgtgtgcaggtttatacacataaacacaataatacttggacttatttatttaaaatttagatttattagagggagcatggccataaaataaaataaaataaaatttagatttaagtcgaag

SEQ ID NO: 1863 - DNA, 3704 bp, Homo sapiens
agctctgagagaggagcctaagccctggactccaaggcctatccacttggtgatcagcactgagcaccgaggattcaccatggagctggggctccgctgggttctcctcgttgcaattttagaaggtgtccattgtgacgtacaattgatggagtctgggggaggcctggtcaaggcggggggctctctgagactctcctgtatagcctcaggatttacaatcagcagttattccatgttatgggtccgccagagtccagggaaggggctggagtggctctcatccatcagtgaaggaggtgggcgcatcttatacaccgactcagtcaaggaccgattcatcgtctccagagacaatgccaggcagtccttctttctccaaatgaacaacctgcgcgtcgacgacacggcggtctatttctgtgcgagagagcggacacacttcgatttttggagtgactactcgaatgactatttttccttcaacatggacgtctggggccgaggggccacggtcacggtgtcctcagcacccaccaaggctccggatgtgttccccatcatatcagggtgcagacacccaaaggataacagccctgtggtcctggcatgcttgataactgggtaccacccaacgtccgtgactgtcacctggtacatggggacacagagccagccccagagaaccttccctgagatacaaagacgggacagctactacatgacaagcagccagctctccacccccctccagcagtggcgccaaggcgagtacaaatgcgtggtccagcacaccgccagcaagagtaagaaggagatcttccgctggccagagtctccaaaggcacaggcctcctcagtgcccactgcacaaccccaagcagagggcagcctcgccaaggcaaccacagccccagccaccacccgtaacacaggaagaggaggagaagagaagaagaaggagaaggagaaagaggaacaagaagagagagagacaaagacaccagagtgtccgagccacacccagcctcttggcgtctacctgctaacccctgcagtgcaggacctgtggctccgggacaaagccaccttcacctgcttcgtggtgggcagtgacctgaaggatgctcacctgacctgggaggtggctgggaaggtccccacagggggcgtggaggaagggctgctggagcggcacagcaacggctcccagagccagcacagccgtctgaccctgcccaggtccttgtggaacgcggggacctccgtcacctgcacactgaaccatcccagcctcccaccccagaggttgatggcgctgagagaacccgctgcgcaggcacccgtcaagctttccctgaacctgctggcctcgtctgaccctcccgaggcggcctcgtggctcctgtgtgaggtgtctggcttctcgccccccaacatcctcctgatgtggctggaggaccagcgtgaggtgaacacttctgggtttgcccccgcacgcccccctccacagcccaggagcaccacgttctgggcctggagtgtgctgcgtgtcccagccccgcccagccctcagccagccacctacacgtgtgtggtcagccacgaggactcccggactctgctcaacgccagccggagcctagaagtcagctgtgagtcacccccaggcccagggttgggacggggactctgaggggggccataaggagctggaatccatactaggcaggggtgggcactgggcaggggcggggctaggctgtcctgggcacacaggccccttctcggtgtccggcaggagcacagacttcccagtactcctgggccatggatgtcccagcgtccatccttgctgtccacaccacgtgctggcccaggctggctggcacagtgtaagaggtggatacaacccctcgccgtgccctgaggagtggcggtttcctcccaagacattccccacggctgggtgctgggcacaggccttccctggtgtgaccgtgaatgtggtcaccctgaacagctgccctctctggggacatctgactgtccaagaccacagtcagcacctctgggagccagaggggtctccagagacccccagatgtcaggcttgggctcagtgcccagcgaaaggtcagccccacacatgcccataatgggcgcccacccagagtgacagcccccagcctcctgccaggcccacccttttccgcccccttgaggcatggcacacagaccagtgcgcccactgcccgagcatggccccagtgggatgtggtggccacgaggggctgtacacacagcaggaggctgtccgccctgctcagggcctgctgcctatgccccagctgtccagccaagggaggcatggaagggcccctggtgtaagctggagccaggcacccaggcccccggccaccctgcagagccaaggaaaggaagacacccaagtcaacaaggggcagggctgagggctgtcccaggctcttttggcccgaggggctgccagcagccctgacccggcatgggccttccccagaagcgaccctgtgaggtggcctcacagagaaccccctctgaggacagtgtctgaccctgcctgcctcacacagatgggccccacagcagtgggcaacctggggggcagcagcccaacctgaccctgcagggactgccccctgcagcagcagctgcttctcagtcccccaacctccctgtccccgccagagggtcttccccgaagctgcagccccaacccatggctgcccacctggaaccgggactccctgtccactgccccctccccttcggggccccatctgtgctggggcccaggttcggcctacagattcccatcattgccatggcctcctgaccttgcctatccacccccaaccaccggctccatgctgaccctcccccaggctcccacgcccagctggccggccatccccaggcacagacagtctgggatctcacaggttagcctggaccatccacctggccagacctgggagaggctggaagctgccctgccaccatgctccagggccccaggttgcagtactatggggtgagggtgtgtgtgcacacccgtgtgtacctaggatatccgagtgtacccttgtgcccccaagcacaagtctccctcccaggcagtgaggcccagatggtgcagtggttagagctgaggcttatcccacagagaaccctggcgccttggtcaaggaagcccctatgcctttcttgcctcgatttcccctcttgtctgctgagccagcaggggccacgtcctgggctgctgtgaggaggaagtgagttggtgctaggaggggctcctgtgtgtgcatgggcgggaggggtgcaggtatctgagcaccccggtctccacttgagagagcagggcaggagctccctgacccacccagactacacacgctgtgtccacgtgtctcacattatctgtggcagaggatccggcttctttctcaatttccagttcttcacaaagcaatgcctttgtaaaatgcaataagaaatactagaaaaatgatatgaacagaaagacacgccgattttttgttattagatgtaacagaccatggccccatgaaatgatcccggaccagatccgtccacacccgccactcagcagctctggccgagctcacagtacaaccacaataaactcttgttgaatg

SEQ ID NO: 1864 - DNA, 3484 bp, Homo sapiens
ttatgagcttctcttcatgaacttgcacctaccttctttaccttttaccaatggtagctcctcattttttgaagattttcaagaatattgtaattcaaatgaatggcaagtttacattgaaaaatatattgtaccttatatgaagcagtatgaagctcatacattttacgatggtcatgagaacatggcactttattggaaggattgttatgaagctttaatggtaaatatgcataaacgagaccgggaaggaggggaaagcaagctcaaatttcaggagctgtttgtggagccatttaatcgaaaagcacgccaagagaacctgaggtataataatatgcttaaacaacttagcagtcaacagttagccactcttagacgctggaaagcaatacagctctatcttacatgtgaaaggggaccttgggctaaaaggaaacagaatccaattcactggaagctagctaatgtagagaattattcccgcatgagacttaagctggtaccgaattataatttcaaaacccatgaggaagctagtgccttgagagataatctgggtatccaacactcacagccttccagtgatacattgcttttggaagtagtgaaacaagtaaaagttagtgatatggtggaggataaattagaccttcctgaagaggatataacagctagagtaaatgttgatgagaaagaagaacaggatcaaaaagaaaaattggtattgatggaagactgtgaactcattacaataattgatgtaattcctggcagattagaaatcactactcaacacatttacttctatgatggcagcattgaaaaagaagatggagtaggctttgatttcaagtggcctcattctcaaattcgagagattcatctccggcgttacaatttaagaagatcagcccttgagatttttcatgttgaccaatccaactactttctcaatttcaaaaaagaggttagaaacaaaatatatagccgactgttgtcacttcattccccaaatagttattatggaagcagatcaccacaggagttattcaaagcatcaggattgacacagaaatgggtaaacagagagatatcaaattttgactacctcattcaaataaatacaatggcaggacgaacctataatgaccttgcacagtatcctgtgtttccctggattttacaagattatacttcggaagagttggaccttaataaccctgctgtatttcgagatctttccaaaccaattggggtagttaatgaaaaaaacgccaaagctatgagagaaaaatatgaaaattttgaggatcctatgggaactattgataagtttcactatggtactcactattcaaattctgcgggggtcatgcactatctcattcgtgtagaaccgttcaccaccctccacatccaacttcagagtggaaggtttgactgtgcagatcgacagttccattctattcctgctacctggcaagctcttatggataatccatatgatgttaaagaacttattcctgaattcttctatttcccagagtttttggaaaatcaaaatcaatttaacttgggtcgtctacagatttccaaagaattagtaaatgatgtcattctcccgaaatgggctaaatcagctgaagatttcatctataaacataggaaagctttggagtctgaatatgtttcagctcatcttcatgaatggatagatctgatctttggctataaacagaggggaccagctgcagtagaggcactcaacgttttctattattgtagttatgaaggagctgtggatctggatgccttaacagatgagaaagaaagaaaagccttagaagggatgattaataattttgggcaaacaccctgtcaattattaaaggaaccacaccctccaagattatcagcagaagaagcagtgcagaagccaaccaaaatagacacttcaaccctaaacctgtttcaacaccttcctgaactcaagtcattttttatagaggggattagtgatggtattccactattaaaggccaccgtccccaaaaatcagtatcgttcttttatgtctcaaggcagccctgagttactgataacaataagcatgaattatgttattggaacccatggatggttgccttatgacagaaacatttctaattactttacattcatcaaggatcaaactgtgacaaatccaaaaactcagcgcagtataaatggttcttttgctcccgggctagagatcacttctaagctatttgtagtatcacatgatgcaaagttgctcttcagtgctggatactgggataatagcattcaagtgatgtcacttacaaaaggcaaaattatctcacacatcatccggcatatggatattgtgacttgcttagctacagattactgtggaatacatttgatttctggttccagagatactacatgtatgatatggcaaataacacaacagggaggtgttcctgtgggcttagcatctaaaccttttcagattctttatggacacaccaacgaggtactgagtgtcggcatcagcactgagctagacatggcagtgtcaggatcaagggatggaacggtgattatacataccattcagaaaggtcagtacatgaggactttacgaccaccttgtgagagttctctgttcctgaccattcctaatttggctatatcttgggaaggacatattgttgtctactccagcactgaagaaaagaccaccctcaaggataagaatgcattacatctgttttctataaatggcaagtatctagggtctcaaatcctgaaggaacaagtatcagatatatgtataatcggagaacacattgtcacaggcagcatacaaggattcctgtctataagagatctccacagcttgaatctcagcatcaacccattagccatgcgactgcctatccattgtgtttgtgtcaccaaagaatacagccatattcttgtaggtttagaagatggcaaattgattgtagtgggtgttggcaagcctgctgagatgcgttcaggtcagctttctcgaaaattttggggatcgagcaagcggctcagccagatttcagctggagaaactgaatataatactcaagattccaagtgattgttatttccattttctgttatgattactgaaacctgatttattgctttgtcactttaaccacatctctcaactctctgcaatgttgcaaggcttttatccctgaaaatcatttacagataaccacaatttgctgtggtatataaactaattcttggtctatactaagatgtatttgagaaaatacatttgatttgattttgtggcccattcctaaaggtcattgtatccatttttaaaacaaactaaaatgagaacattaggttcaattttcttattattccaaatgataaaatttaagatttttctaataaaagagtacagataatgggacagttg

SEQ ID NO: 1865 - DNA, 3597 bp, Homo sapiens
ttttataaggacatgagtcctattggattaaagcccaacctaatggccttatgttaccttaatcacccctgtaaaggccctctctgcaaatgcagttccatcctgagacactggagttgggacttcagtgtgtaaatttgaggggacacatgcagcccatcacagtaggcgtgggaggcacgtggccgtcacggagcagtggcaattcccaagcccagccaggcatgtattgttcacctctcagccctgggtgcagggtgttccttgatgagcctccactgcagcttcccagaattgtcccttgtccgctgctgccctggctgtgctctgccctctgtgtcctggtgtcgctcttggcagctcctttcctgttctgtaagaaatggcccgtgcttgctgcgctcccagcctacctcccacctgtagaacgtgggcacccagaggcctccctgcactttgagccgtctctctcttttagtccaagctgttacaagtgcctgaaaaccactgtggaatttctatcaacttaaaattctgcttccctggacaaaagcacccccaccgccatcctgagtgctctttgttgggttgggagtcagggtgccatgggagagcctgccagatggtctataagatgctgtctgaatcttctaaggtttaacaaagtggatttggacctcacccttgaggccagtgtctgggatttgatctttgccctgaggccatctcttttagaatcttttgccagctggaaaggctgggaagaagaaacatttttattctccacccagtacatcctggattggaaatagttcctttaaattctgcttgaaaatggaacagttccttcatctttctcttcccatgtgttaccctaggcagcaaaaagaagccagcttcctcctggaccccttagccagatgcaggagttcccgggggaggcactccatcctccctgtcactgagggtgaccttctttccacttcttcagctggtacacacacagccccctttctccagcccccaggagtcatttcgtcctgtccgtccagcctctgccagctgcctgggtccaaggccaagtccacatgttttaggttttggtcatggcagaattccacttctggatggctgcatgtgtcagctgttgccacaaaacaaaccatcccaaacttagtggctggaaataataatgattgattatttctcagattccgtggcctgagcaggcaggactgctcccaggaagcagtgcaggtcactcatgcagctgtttcagtggacacctggcccggaaggttcaagaaggcctctctcacacctgaaacctcgattttttttttttttgagacagagttttgctcttgttgcccaggctggagcacaatggcgcgatgtcggctcactgcaacctccgcctcccgggttcaagtgattctcctgcctcagcctcccgagtatctgggattacaggcatgcaccaccacgccaggctaattttgtatttttagtagagatggggtttctccacgttggtcaggctggtctcaaattcctgacctcaggtgatgcactcgcctcggcctcccaaagtgctgggattgcaggtgtgagccaccacgcccggctagaggcctcagttcttcaagcaactctctccacaggtgatggcaccttctccagggctttccatgtggccttcggcaggatagcctggacttccttctgtcatggtggccagggtacaagagagtgaacatggcagctgtcaggccttttaaaaagggcctaggcctggaacagcatcacttctactgaattctacctactgtatcattagtcagagccagtgacacgggcattccagagccacgggcaggagggagtctgccccttctgatgtcaggggcggcctgtgtttgtatagacaggaggtctggttggcacccttgtttgccaccagactccaagtactgagcatcaggagcctgggtttgtggagggcgttgcagctcatgccagcacagacagggtacagggaggggctttcaagacccttctggcctttaatcagatggatcttttttttttttgagacggagtctcactctgtcgccaggctagagtgcagtggcacgatctcagctcactgcaacctccgcctcccgggttcaagcgattctctttcctcagcttcccgagtagctgggttacaggtacgcaccaccaggcccagctcatttttgtgtgtttagtagagatggggtttcgccatgttggccaggctgatctcgaactcctgacctcaggtgatcctcccgccttggcctcccaaagtgctgggattataggcgtgagctgctgcgcccagcctcggatagatcttttaagcagtaataagggtctggatggttgttaggctgagtttggggttgccccatttcctgaagtcagagcatacaggaatgatttgttttcattctgtttttgatttcagatactttctttcaataaaagtggcggtggtggagacatccaccagggcttccagtctcttctcaccgaagtgaacaagactggcacgcagtacttgcttaggatggccaacaggctctttggggaaaagtcttgtgatttcctctcatcttttagagattcctgccaaaaattctaccaagcagagatggaggagcttgactttatcagcgccgtagagaagtccagaaaacacataaacacctgggtagctgaaaagacagaaggtaaaattgcggagttgctctctccgggctcagtggatccattgacaaggctggttctggtgaatgctgtctatttcagaggaaactgggatgaacagtttgacaaggagaacaccgaggagagactgtttaaagtcagcaagaatgaggagaaacctgtgcaaatgatgtttaagcaatctacttttaagaagacctatataggagaaatatttacccaaatcttggtgcttccatatgttggcaaggaactgaatatgatcatcatgcttccggacgagaccactgacttgagaacggtggagaaagaactcacttacgagaagttcgtagaatggacgaggctggacatgatggatgaagaggaggtggaagtgtccctcccgcggtttaaactagaggaaagctacgacatggagagtgtcctgcgcaacctgggcatgactgatgccttcgagctgggcaaggcagacttctctggaatgtcccagacagacctgtctctgtccaaggtcgtgcacaagtcttttgtggaggtcaatgaggaaggcacggaggctgcagccgccacagctgccatcatgatgatgcggtgtgccagattcgtcccccgcttctgcgccgaccaccccttccttttcttcatccagcacagcaagaccaacgggattctcttctgcggccgcttttcctctccgtgaggacagggcagtcttggtgtgcagcccctctcctctctgtcccctgacactccacagtgtgcctgcaacccaagtggccttatccgtgcagtggtggcagttcagaaataaagggcccatttgtgggatgccgc

SEQ ID NO: 1866 - DNA, 3450 bp, Homo sapiens
acaacaggcaggcaggggcaacaagatggtgttgcagacccaggtcttcatttctctgttgctctggatctctggtgcctgcggggacaccgtgatgacccagtctcctgactccctggctgtgtctctgggcgagagggccaccatcaactgcaagtccagccagagtgttttatccagctccaacaataagaactacttagcttggtaccagcagaaaccaggacagcctcctaaactcctcatttactgggcatctacccgggcatccggggtccctgaacgattcagtggcagcgggtctgggacagatttcactctcaccatcgacagcctgcaggctgaggatgtggcagtttattactgtcagcaatattatagtagtcctcagacttttggccaggggaccaagctggagatcaaacgtaagttcttttttccactgattcttcactgtttctaattagtttactttgtgttcctttgtgtggattctcattagtcggatgccagggatctaacaaacttcattcccaggttaggtacagaggaggggaaattgttccgcaggaagctagcttgtggctaatttttaagatttctaaatcaaaattacttcattgggggaaagaggcttgctgagctttcagggacgtattgtacagggaaacgttaagacgaatcactgtgactcactttcggccctgggaccaaagtggacatcagacgtaagtacatctgtctcaatttttcgtgagattttagtgccattatatcatttgtgcaagttttgtgatattttggttgaataaacctggtgacccagaagtaaatagcaggccatcagaaaatgaacttaaaaagctgcggaaatagacgaatcattgggtttgagaggagaataggattcatgggggaaatggggaagaaatagctagatttttctctgaacaagcagcctatctcatatgattggtttcaagagaggtttttgttgaggggaaagggtgagatccctcactgtggctcactttcggcggagggaccaaggtggagatcaaacgtgagggaccaaggtggagatcaaacgtgagtgcactttcctaatgctttttcttatcaggttttaaatttggagcgtttttgtgtttgagatattagctcaggtcaactccagagagtaccggattctttcaaaaagtcagatgaataagggatagaaaattagttcatcttaaggaacacccaagcgctagccagataagtgaggcatctcaattgcaagattttctctgcatcggtcaggttagtgatattaacagcgaaaagagatttttgttaaggggaaagtaattaagttaacactgtggatcaccttcggccaagggacacgactggagattaaacgtaagtaatttttcactattgtcttctgaaatttgggtctgatggccagtattgacttttagaggcttaaataggagtttggtaaagattggtaaatgagggcatttaggatttgccatgggttgcaaaagttaaactcagcttcaaaaatggatttggagaaaaaaagattaaattgctctaaactgaatgacacaaagtaaaaaaaaaaagtgtaactaaaaaggaacccttgtatttctaaggagcaaaagtaaatttatttttgttcactcttgccaaatattgtattggttgttgctgattatgcatgatacagaaaagtggaaaaatacattttttagtctttctcccttttgtttgataaattattttgtcagacaactataaaaatcaatagcacgccctaagaaaaatcagggaaaagtgaagtgtacctatttgctatgtagaagaggcagcttacttgaaaatcagcagcaatgttgtttttagagtctgtaataagtaataaactcaaaaagacacattctataggaataagggcttcacagatagagctcattttttaaaaatccaatttgtacattagactaaacgtgaaattatctcttattgtaatggtggaaaggtggttattcccaaaagctcaatctcaaagaaatgtgtttaaatgaaaaaaagtaaataattgcattttttaatgaccgtgggtctgtgaaaaaaataggaaatattttaaagagtatgttctttcattatcctctgttattacttgtctacatttttattctgccgagaaggccgtggcaccgcgagctgtagacagagccgcggtctttctcgattgagtggctttggtggccatgccaccgcgctcttggggcagccgccttgccgctagtggccgtggccaccctgtgtctgcccgattaatgctgccgtagccagctttcctgatgcacagtgatacaaataatgccactaagggaaagagaacagaaacgtaatgggcgctgagctgggaaaaccagggagaagactgatttattagagatttcagaaataaaattcacattcattatgatatctcattagtgaaaatttctattaggggattgtaaataatttaaagcttttttttttttcagtgctatttaattatttcaatatcctctcatcaaatgtatttaaataacaaaagctcaaccaaaaagaaagaaatatgtaattctttcagagtaaaaatcacacccatgacctggccactgagggcttgatcaattcactttgaatttggcattaaataccattaaggtatattaactgattttaaaataagatatattcgtgaccatgtttttaactttcaaaaatgtagctgccagtgtgtgattttatttcagttgtacaaaatatctaaacctatagcaatgtgattaataaaaacttaaacatattttccagtaccttaattctgtgataggaaaattttaatctgagtattttaatttcataatctctaaaatagtttaatgatttgtcattgtgttgctgtcgtttaccccagctgatctcaaaagtgatatttaaggagattattttggtctgcaacaacttgataggactattttagggcctttttaaagctctattaaaactaacttacaacgattcaaaactgttttaaactatttcaaaatgattttagagccttttgaaaactcttttaaacactttttaaactctattaaaactaataagataacttgaaataattttcatgtcaaatacattaactgtttaatgtttaaatgccagatgaaaaatgtaaagctatcaagaattcacccagataggagtatcttcatagcatgtttttccctgcttattttccagtgatcacattattttgctaccatggttattttatacaattatctgaaaaaaattagttatgaagattaaaagagaagaaaatattaaacataagagattcagtctttcatgttgaactgcttggttaacagtgaagttagtttt

SEQ ID NO: 1867 - DNA, 3470 bp, Homo sapiens
tcgctctgccgccccggaggcaggatgagcatcgagatcccggcgggactgacggagctgctgcagggcttcacggtggaggtgctgaggcaccagcccgcggacctgctggagttcgctctgcagcacttcacccgcctgcagcaggagaacgagcgcaaaggcaccgcgcgcttcggccatgagggcaggacctggggggacctgggcgccgctgccgggggcggcacccccagcaagggggtcaacttcgccgaggaggcggcgcccgcggacgcaggggcgttcaatgctccagtaataaaccgattcacaaggcgtgcctcagtatgtgcagaagcttataatcctgatgaagaagaagatgatgcagagtccaggattatacatccaaaaactgatgatcaaagaaataggttgcaagaggcttgcaaagacatcctgctgtttaagaatctggatccggagcagatgtctcaagtattagatgccatgtttgaaaaattggtcaaagatggggagcatgtaattgatcaaggtgacgatggtgacaacttttatgtaattgatagaggcacatttgatatttatgtgaaatgtgatggtgttggaagatgtgttggtaactatgataatcgtgggagtttcggcgaactggccttaatgtacaatacacccagagcagctacaatcactgctacctctcctggtgctctgtggggtttggacagggtaaccttcaggagaataattgtgaaaaacaatgccaaaaagagaaaaatgtatgaaagctttattgagtcactgccattccttaaatctttggagttttctgaacgcctgaaagtagtagatgtgataggcaccaaagtatacaacgatggagaacaaatcattgctcagggagattcggctgattcttttttcattgtagaatctggagaagtgaaaattactatgaaaagaaagggtaaatcagaagtggaagagaatggtgtagtagaaatcgctcgatgctcgcggggacagtactttggagagcttgccctggtaactaacaaacctcgagcagcttctgcccacgccattgggactgtcaaatgtttagcaatggatgtgcaagcatttgaaaggcttctgggaccttgcatggaaattatgaaaaggaacatcgctacctatgaagaacagttagttgccctgtttggaacaaacatggatattgttgaacccactgcatgaagcaaaagtatggagcaagacctgtagtgacaaaattacacagtagtggttagtccactgagaatgtgtttgtgtagatgccaagcattttctgtgatttcaggttttttcctttttttacatttacaacgtatcaataaacagtagtgatttaatagtcaataggctttaacatcactttctaaagagtagttcataaaaaaatcaacatactgataaaatgactttgtactccacaaaattatgactgaaaggtttattaaaatgattgtaatatatagaaagtatctgtgtttaagaagataattaaaggatgttatcataggctatatgtgttttacttattcagactgataatcatattagtgactatccccatgtaagagggcacttggcaattaaacatgctacacagcatggcatcacttttttttataactcattaaacacagtaaaattttaatcatttttgttttaaagttttctagcttgataagttatgtgctggccttggcctattggtgaaatggtataaaatatcatatgcagttttaaaactttttatatttttgcaataaagtacattttgactttgttggcataatgtcagtaacatacatattccagtggttttatggacaggcaatttagtcattatgataataaggaaaacagtgttttagatgagagatcattaatgcatttttccctcatcaagcatatatctgcttttttttattttgcaattctctgtattctatgtctttaaaaatttgatcttgacatttaatgtcacaaagttttgtttttttaaaaagtgatttaaacttaagatccgacattttttgtattctttaagattttacacctaaaaaatctctcctatcccaaaaataatgtgggatccttatcagcatgcccacagtttatttctttgttcttcactaggcctgcataatacagtcctatgtagacatctgttcccttgggtttccgttctttcttaggatggttgccaacccacaatctcattgatcagcagccaatatgggtttgtttgttttttttaattcttaaaaacatcctctagaggaatagaaacaaatttttatgagcataaccctatataaagacaaaatgaatttctgaccttaccatatataccattaggccttgccattgctttaatgtagactcatagttgaaattagtgcagaaagaactcagatgtactagattttcattgttcattgatatgctcagtatgctgccacataagatgaatttaattatattcaaccaaagcaatatactcttacatgatttctaggccccatgacccagtgtctagagacattaattctaacgagttgtttgcttttaaatgagtgatttcattttgggaaacaggtttcaaatgaatatatatacatgggtaaaattactctgtgctagtgtagtcttactagagaatgtttatggtcccacttgtatatgaaaatgtggttagaatgttaattggataatgtatatataagaagttaaagtatgtaaagtataacttcagccacatttttagaacactgtttaacatttttgcaaaaccttcttgtaggaaaagagagctctctacatgaagatgacttgttttatatttcagattttattttaaaagccatgtctgttaaacaagaaaaaacacaaaagaactccagattcctggttcatcattctgtattcttactcactttttcaagttatctattttgttgcataaactaattgttaactattcatggaacagcaaacgcctgtttaataaagaactttgaccaaggctataaatgccacgtacattattttcagtattgttggttatatttaaattttccttacaataaagcacacttttataataaaatacatgaattattgtttttcatacttttttgcttgtttctttaaagttttctgacgtgcataatgcataattcattgaaaagcatgatagcaatgtggcatgtggaagcgaacccccagggcataacatagtaagaaagtatggttctgtatggcaataggtttttaaaattattagctattcatcatgtgtgggagaaataattgtggtgtgttgcagatttatttggccatttagaataaccaaatcaatctggctaactaggaatttatgtgtaaaattatctgattaaaacagctcaagtttg

SEQ ID NO: 1868 - DNA, 3770 bp, Homo sapiens
ttagccagcttggcgctggctcccggaatatggagccctgggcgcgggggcggcgtgtcaggtggttgcggagctggtaagaatcatattctaagaactcagccactcaggtatccaccatggtgctgggtcctgaacagaagatgtcagatgacagtgtttctggagatcatggggagtctgccagtcttggtaacatcaaccctgcctatagtaatccctctctttcacagtcccctggggactcagaggagtacttcgccacttactttaatgagaagatctccattcctgaggaggagtactcttgttttagctttcgtaaactctgggctttcaccggaccaggttttcttatgagcattgcctacctggatccaggaaatattgaatccgatttgcagctagactgggagtggttactgggctgcatcttgctgaagtatgtcaccgtcagtatcccaaggtcccacgagtcatcctgtggctgatggtggagttggctatcatcggctcagacatgcaagaagtcattggctcagccattgctatcaatcttctgtctgtaggaagaattcctctgtggggtggcgttctcatcaccattgcagatacttttgtatttctcttcttggacaaatatggcttgcggaagctagaagcattttttggctttctcatcactattatggccctcacatttggatatgagtatgttacagtgaaacccagccagagccaggtactcaagggcatgttcgtaccatcctgttcaggctgtcgcactccacagattgaacaggctgtgggcatcgtgggagctgtcatcatgccacacaacatgtacctgcattctgccttagtcaagtctagacaggtaaaccggaacaataagcaggaagttcgagaagccaataagtactttttcattgaatcctgcattgcactctttgtttccttcatcatcaatgtctttgttgtctcagtctttgctgaagcattttttgggaaaaccaacgagcaggtggttgaagtctgtacaaataccagcagtcctcatgctggcctctttcctaaagataactcgacactggctgtggacatctacaaagggggtgttgtgctgggatgttactttgggcctgctgcactctacatttgggcagtggggatcctggctgcaggacagagctccaccatgacaggaacctattctggccagtttgtcatggagggattcctgaacctaaagtggtcacgctttgcccgagtggttctgactcgctctattgccatcatccccactctgcttgttgctgtcttccaagatgtagagcatctaacagggatgaatgactttctgaatgttctacagagcttacagcttccctttgctctcatacccatcctcacatttacgagcttgcggccagtaatgagtgactttgccaatggactaggctggcggattgcaggaggaatcttggtccttatcatctgttccatcaatatgtactttgtagtggtttatgtccgggacctagggcatgtggcattatatgtggtggctgctgtggtcagcgtggcttatctgggctttgtgttctacttgggttggcaatgtttgattgcactgggcatgtccttcctggactgtgggcatacggtaagcatctctaaaggcctgctgacagaagaagccacccgtggctacgttaaataacactggattagtctgtcttctgcagtgccatctgggattgacagctcagcctgaactctatcttctgaacaccatggacgctgactcacttgtgtctagatgactgacagcctgagagactctataagaacatgtttttctaagccctttttgtgccaggtgtcccgttaacgtctctgttagttcagaggtgagttttgttcagacgttttgaacaaaaggcaaagatttcctcatgggaagggtgttcaaaactgacagctataaatgtaggtcagagacccacccacctcataacagtcatacactcccagagttaaacgattggcctctgatggccacacacccctatgggcttgtgtcttggactctgggatttaaaagatatatatgtatatatatttatgtaaacctgagcatctcagtttgggtagagttttaaggttatatgaaactgatagaacttttgtattttttttttaaatattgttttgatatatcagatatttgttttgtctggatcacaagtgagaaagaaaagagaataatgctctttttcacaatgaactggtcaaattgactatcttgtaaagtgatactttactatgtcagtgaaatttcagtttgatttcagtcaaccagattatatcctttgtatctactgatattaacacatcatattaacacatcatttcttaaaaaaacatttcttctgtttggcaatcataattaactctggttatcagcctattttgtaattattgtctttgtcgtcacttttcttgaattgttttctagtcattaaacagatatgaaggcattgccaaagagctttaatatccagtaacaagatccagaaaccaaactttaaccagtgatcagttttccgtgctgcattgtaactcagctcattctggcattcaagttttaggcaaaaaaaagaggaaacttctaacatttagcttgtaagtcctgacataagatagtgaagatatttatcttctttctaatatttgtatagtccgccaatgtattttcttcccactattcccattaacataccaaacactgtttctaggtccaaagtctatttctaggagtggccaatatttgtattgttgaatctcctagggaatgctaaatgtttcactttaaaatacctatttataccaagtagcatgagattagtactagagtgagatttggaatattagtccacatatcacaaactgcttgcctacatgtatagattttttttttcacccaccttcctaaccaggaatttgtttccttaaatttgttgttgttgttgttgttgtttgttgttatttttttgagaggagtcttgccctgtcgccaaggcgggaatgcattgacgtgatctcagttcactgtaacctctacctccccggtttaatcgattctcctccttcagcctcctgaatagctgggattacaggcaccacatttttagtggagatggggtttcaccatgttggccaggctggtctcaaactcttgacctcaagtgatctacctgcctcagcctcccaaagtgctgggattacaggtgtgagccactgcacccagcgttttttgttgttaagacagggtcttgctctgttgcccaggctggagtgcagtggtgtgatctcagctcactgcaacttctgccacctgggcttaagccatcctcccacttcagcatcccaaatagctgggactgcaggcacacaccaccacacccagctaatttttgtattttttgtagagacgggatttcaccatgttgcccaggctggtgttgaactcatgagctcaagtaatctgctggccttggcctcccaaagtgctgagattataggcgtgaaccactgcatccagctcactcctcatttctttctagccccaaaggtgttgagtcagcaaatcctgcagcctttgtgtgactttgagcatcactttcccctttcagcattaaatatatgacctctctgccttattttagaacttactacatttcaataaaactttttaaaaaatccag

SEQ ID NO: 1869 - DNA, 3349 bp, Homo sapiens
aatggatcaggaagaggggctgaaggccttggacaatattgtcactcaattcaacgcctatgaagatttcctggactcgcagatcactactgtggacttgtactacctggaggatgaaaccctggcccgccagttggtggagctaggctaccgagggactggagagagagtgaaaagggaagattttgaagcaaggaaagcggctatagagattgcaagactggctgaaagagctcagcaaaagacgctaacaagtgctggtaaagacctacaagataattttctgacggccctggcaatgagagaagaagacaatcgcagtggaaaactgagtgctggagtgcagtggcaccatctcggctcactgcaacctctgcctcctgggttcaaggaattttcctgcttcagcctcccgagtggctgggattacaggcatgcaccaccacacccagtccgtgatctttattcgtgacagaaattctcatgggcaagagatatcaggatacatcgactatgcccacaggctaaagacggaagattttgaagtctactttactggaaaaaaaagacttcttccaaggcctacagatataagcctgagaaaaaggattcttcagagacaagataagtaaattcccagtgacattcctttttaatgataagtagtgcctaaattttgttaacctcatgaggcttttgcagcacttgggacttggtctgtccagaagcctcaagaactgctcatctaacatgttttcctccacttttctttggtcaccagccaaagtgctggcccctgatcagctcaccctcatttctctcatctctgtcctattctgggacacccattccttaacacccatcattctttttactaccaatgcttgccttttattctagaacccttatctatcacctagcatctaccctacactgccaatctattcacagatgggttcttctactcccttctaaatagcatgcaagctaaaactttttattccctcttacttaactatagaaccccaaaattaagtagcagcattatgctttaactctccactgctgtattcagatcattatttgatgattataacaatacctacctcctctgagatgcctgttatcctctatccacccttactgatattatctgaagacttccttatccatcacctttttttgatttgtttgtttttgagatggagtctcgctctgtcgcccaggctggagtgcaatggtgcaatcttggatcactgctacttccacctcacgggttcaagcaattctcttgtctcagcctcccatgcagctgggactacaggcacataccaccacgtctggatactttttgtatttttagtagagacagggttccaccatattggtcaagctggtctcaaactcctgacctcaggtgatccaccggcctcagcctcccaaagtgctgggattacaggcgtcagccaccgagcctgactcccatctccactgtaatggacttagctctttcctgtcctacctaggataacatttcatttaacttctctcttgcagtaatgcccattgcccatgtctttttgatttttggttgtatctgacctactaacattccaaagtcaatcgatccacacatttttttcactgcacttgtagctaccccactgggtactgctgaaggaaattttaggaaatttcacaaaactgtggattgctgtgctaataacttatggtttccaaactcaattgagtcctttatgattcttaaaacttatgttcaaaattaaattcattttaattcctgaagcctgctattgcttctgtgtcacctgtcttggcaaatggcatcacccttgaaaccaaaggcaaaatccagatgttatcctagacctcttgtttttcatcaccacctttataactaataatttattaaaaacactgaattctattatcttagcagctttgttttgttaaagcaaatttaagatatctcatttcacctgcaaacacttcagcatggatctttatctgataccatttttaaagaaaacatcttggcattatcatacctaacaaaatactctccttaatgtcatctaatacctagttcacatttcattttcacccttaataacatttaattgactgtctaatttattttttatagtttgtttgaccagtcaaaattcaagtgattttgtgttttgtcttactatatcttgacctcttgcatgcttttttttttttttacaacagtccccctcattctttttatcttctacgctattgatttgttggagaaaccaggtcctgataaacattgtcctcaaatgtctcacattctggattttactgatccagtaaaatcgtgctgtttattctactatctatgttcctctattccctataaactgatttgattaaatgcagtataatttttttctaagtaagaaattttaatatgtgatgctctgtactgactatcgccccagttttagatctcctgagctcgatcagtaggttcaagtggtgtcagtctaattacttcattacaagattttccataaaatttcacccaatggtgttagcatctattattgaaagctacctaaatgtttttactaagggttgaataatggtgaatctataattatattatttatcctgaattttttaacttgaattcttctatagagaaaaacttttccttatcacttatttggttaccttgaaataaattcctgcagaaatacaaaataaatatttttttcatttatagaaaatttgaagccagaaacacaaaagagtgtagagattataccaaattatttttcagagtagttgtatcattttgtatccatgagaaatactgcataagtgatctggttatccctcatcctcaccaacacaagatattaacaaactgttctttcccactgtagtgagttataaatgatctctcaatgtggttttcatttttatttacttgattatttattagattgggtatcttttattggctgttcagattttctttctgtgaagtacctattaagatttttccctgttatttcaagtgagctattctttttcttgcaaattataagattcgttttatttatttttggatattgattaatcctttgcctcttatgtgtatttcaaaatatcatctctctgtgtgtagttcttcttcttttttttttttcattgattttgatggtcagaaatcagaagttctgatagtcatcttaatgcattttaaactttacctctgcagtttgtgcttttgtattttgtttaataaaccccatcctttttggaagtcataaatatactgtcttatagg

SEQ ID NO: 1870 - DNA, 3086 bp, Homo sapiens
atttaacccaggtggctcagtgtccaatatgtatgcaatgaatttagctagatacaaatattgtcctgatattaaggaaaaggggctgtctggttcgccaagattaatccttttcacatctgcagagtgtcattactctatgaagaaggcagcctcttttcttgggattggcactgagaatgtttgctttgtggaaacagatggaagaggtaaaatgatacctgaggaactggagaagcaagtctggcaagccagaaaagagggggcagcaccgtttcttgtctgtgccacttctggtacaactgtgttgggagcttttgaccctctggatgaaatagcagacatctgcgagaggcacagcctctggcttcatgtagatgcttcttggggtggctcagctttgatgtcgaggaagcaccgcaagcttctgcatggcatccacagggctgactctgtggcctggaacccacacaagatgctgatggctgggatccagtgctgtgctctccttgtgaaagacaaatctgatcttcttaaaaaatgctactctgccaaggcatcttacctcttccagcaggataaattctatgatgtgagctatgacacaggagacaagtctatccagtgtagcagaagaccagatgcattcaagttctggatgacctggaaggccctgggtacattaggccttgaagaaagagttaatcgtgctcttgctttatctaggtacctagtagatgaaatcaagaaaagagaaggattcaagttactgatggaacctgaatatgccaatatttgcttttggtacattccaccgagcctcagagagatggaagaaggacccgagttctgggcaaaacttaatttggtggccccagccattaaggagaggatgatgaagaagggaagcttgatgctgggctaccagccgcaccggggaaaggtcaacttcttccgccaggtggtgatcagccctcaagtgagccgggaggacatggacttcctcctggatgagatagacttactgggtaaagacatgtagctgtggctttggtcccccagaggcatagatcctatcctgggagagtttagatccagaacatcttggagatacacagtagattgcagcccttctgatgagaaatagggaatactcccagtccaggcccagcaaaaccaaaatgctaagcaatgaatattaaggactctctagctgcctgggcattactgttgctaaaagaagaaagtttaaaaaaaaaaatgattttctcaaggaatgcccctggaacacagctctgaagagagtttagtaagtaccatgtaggttctggattctaagcttacattgctctttaaagaacttataaactaacggtttaaagcagtggttctcaaagtgtggtccctggactatcagcatcaaagcatcacctgggaacttgctaaaaatgcagattctcaggctttctctagaccaactggatcagaagctctgggggtgaggcccagtattctgtgttttaacaagcccgtcagggaattctgatgcacagtaaaatccgagaaacactggtttaagaaaaaccttgtaatgatcgaatacccactctgatgttttgccagcaaagggatatctaatatttcagaagcctctgagccagtctttgaaaaaatacaactatggcatctgcagcacaaatatttaaggacatcagaagcatgtcaaagctatttttaaagagagaaactgtataagatgtttacttcatagagatttatgttttatgcaggctgaatgtttatctcaaaagttaaaattatccattctcaaaagttaaaattatatatatatatatatatatacacacacacacatatatatatatatataattcaaagcacaataattgaaagcacaataattgacagaaaaatacaggttctattaataaattaataaactgttggtcttcaaaatagaaatgcatgtaatatccatattagttttttcttggtagacaactggaaggttttcttttttttcgtctatgactaattttctttattcaagatacctgaactggggtgctttttaagaaaaatttgggaaatatatatgtttctgtgatatacatatatacatatatatgtatatatatacacacacatacatatgtgtgtgtgtagtatatatatatatacacacatatatgtttctgtgttcctcttttagcttgaggggcttgtttattatcttgctctgtgcctcatagggaataaacacaatgaagtccagggttgtacaacattccctttcctaagctttgaaatgtcagtatagattattaagtggtttatattacagaatctgggattcagcagactttcagtgtaaatgcttcctccatttctcctgagagtgggtgattttaattctatctctgaccctggtcctaggtttctaggagagttttgtttaactaagaaattgacagaattcataggtgtgggtgtagagttcaccaagataagattatgaatataattaaaggtctgcattaaaaggtgaatgattgaagagtgttaaagcattagacttagcacattcaataaccttttcgtactccattgttaaccaatgtcatttaaattttgagtactatttgcttttattgcttattttcattttagtgtgcacagtttctcggtatctctattggtcaaagaatattaaatctgtctctgaattacttcaaattctcaggtgaaacctattggtgtgtgtgtgtgtgtgtgtgtgtttattttgcatttcttgttgcctttttgttttaatgtctacataaaatatttctaaaattgatgtttgtaacaatttgggtttcatgaaacaaaaaggaacattactatacttagtgttgttgacttttcttttcctgtcatctcctctttactggattgtaccaatacattttagaagtgaactggacttggttggcattttagtttaatgactgaaaaagtaggttgaaagctctctgtattttagttaacaccttgaataaaatggaaaaagcagttatagc

SEQ ID NO: 1871 - DNA, 3609 bp, Homo sapiens
atttggtttaatgttctgaagtattttcttagactattttgtcaatatatttgtaccctttgttaatatttctttgacgtataactacaaatatagatgagtcatccttccttccttttgtttttttgtttttttttgtttttgttttttgagaagcagtttcactcttgttgcccaaactggagtggagtgcaatggcgtgatcttggctcactgcaacctccgcctcctgggttcaagcgattctcctgcctcaacctcccgagtagctgggattacaggtgtctgccaccacgcctggctaattttgtatttttagtagagacggggtttctccatgttggtcaggctggtctcgaactcccgacctcaggtgatcgcctgcctcagcctcccaaagtggtgggattacaggtgtgagccactgcgcctgcctgatgagtcatcctttcaaggtatattttagattatgaatatgtccatgtgatatgatttcttttttcttttttttgttttcctttttttttttttgagacggagttttgctcgtcgcccaggctggagtgcagtggcacgatctcagctcactgcagcctccacctcccgggttcgtgattctcctgcctccacctccttagtagctggcactacaggtgcgcgccactatgccgtgctaatttttttgtattattagtagagacggggttttgctgtgttggccaggctggtctcgaacttctgacctcaggtgatcccacctgtctcagcctcccaaagtgctgggattacagttgtgagctaccacacccagccccatgtgataggatttcttagatttgcttcacaataagccagtccagaatagggatgatgcaaagtggattggagtataaactagatttgtcctgtgtttcaaaatgtctataataaaaagaaaacaagtgaaaagctgtatatgatactaagttatatttaggtccttacttttatttgtttacatttaaaaatgtcttttaagaatttcatcttggttcctagttaaaattatatcaattatcctccatctcatatacaacatttagcctaaattttaaaacattttatcccagagattattcaccataaaataaatatggcttgcattcttgtttttaggctcctcttcaatgaaataccattaatttgttaagtttctactatatttcaagttatcatcctactcgatgggaatagaataatgaatgggagatatggtcactgtatttaaggggaaaaaaaagtataggcttttctatattctctttagattggcagtgtcccatcattcacagtgcctacctagcattgtactaattgtaactatttcttgaaggaataatggaatattttatttatattaatgatccttataaaatgtattttaatggaactttcttgtttagttttatatactctgagaagaaatgacactgaaaaaccaataggcttcaatttatttccttatcctctgtctcttgcactattgagttgtcaaagaaaagtctggtgacattacttttcaaaggaacttttagatcagtgtttacttaataaatctttgtttattttttaactttttccaaactaggtaaaatataagtaaaagaggatttaattacttatttattgttttagctttctaatggaatccctatagaaagttggtttatggataaaaatgacaatgaactcctaaaattgattccattcctggagaagcttgtagaactgaatgaagatgttcgaccacacatcagagacagatttcgcttgcatgatttgctgcccccagattaagtacaaagacttgtcaaatcactgaagggggagagaatgcaggacccttttggactaagacaaaaacattgccattactgttgaaattttgcatttttgtaccccgtcttgcttttcttatctttggtgcccaataataattaagggttacagaaagagactttatctatctcagatcgaatacatatagtaggtaggctaaaacagaagagtctttagaactagtgcaactccagtgaaattttttatgtacaggacatctgcagtttataaagaattctgtttctgccaccagcagtttgacctgtagtcacacaggattttatgataataacagagatgaaaatggacttttattttctctctgtttggtgctctaagtgggtttgtagccacttttctgttactttatgattctcatttcaacaggaatggccagtaaaagttgttttatttttcctgttaaggtttataacctttttacatttttgacctgtattagattagaatttcattatgcattccttttagttgaggcgcttcatagttttctggagatagtcaatttttagttttttattatacatttgaatggccgttttcctgctttgtctgcctgcacattgtatatttgtttaaaaatattctctacttttagtctatgtaagtttcatttagaaagacatgcatttatattttgtttctgtaatattctactgtaggtgaaatcttttcaaaaatcaagagactgggtagataagaatatatgaatgactaatatacaaaagatttaaaccattgtgatggcgtatattctcaaatggtaatatcttgcaatggcacacagatttaatggataaaggtatacctcagacttcactgtgctcacaaatctttgaggagaaagtttggtcacctgtttggcttgatttagttactgctgcctttggttttctccaggaatgaagtattcagcacagtgactcagtatttttagttattttgcatgggctggtagtacctctgttatgctctcagttacaatcaatttaaaactgtataacagtcttggtacctaacagtagctatgcataatcctgtggcacagtacactcccaagccaccaatgcagttaatatgctctcatagtggtttttctatgctatatgaaaatagtcttcaagtcttggttctctaatgcagctaccacaagaggttgatatttttatagtggcgtgtaatctccttttcgggaggctttttatggaaggtagaatttgtaaaagttcgtatgctttgcctctcaactgcattaacatgccacaggctcagactgtttttgtgtaaaggatgtcaaagaacggcactttttctaaagagaagtttgatattttgtatgcttgttaagaaagtacagtattggaaattaaaggtggacaactgataattgaggagtatgtcaattaattttttatgtatattacctgtttacttgtacaacttactgtacaaattacatgcagcttcattttcaaatgaatccttaaaataaggaaatctttttaggaaaacatttaatttttgtatttttgattttaaaggcatgagttatgtcaattttcagtgtattaatgaagattttaacttttcatcaggttgagtgttttcttactatattatctgttgtgtatgtagttagcatattgtgtcactgaactgtttaaaaatctagcatgtagagcaagcctgttttgtggaaaatccttattcatt

SEQ ID NO: 1872 - DNA, 3587 bp, Homo sapiens
ctgggccagtgaccggaggcggcggcggcgagcggttccttgtgggctaggtgcccaggagccactgagaacagaagacttgttgctgctctagaggacctatggtagggcagacagaggatgatacagctcagcagcttgtccctacgtgtggcatgaaaggtgttggagagagaatagtggagtatgtgtccaacattccagcacttcagagagctacccccaagggactggcttctgtttcacctgacttggagcacaggcaggagtggacatactctaaaagcccactgatgggaaagggcaccaggttggaggcctctgaaaacaagagagctgggtggcttgcagcagctccagagaacctgaagtaccacagacagatagcacagggagcaaaagattatgagatcctgaaaaaggaaacgaacaagttcatcttgagaatttatacacactggtcgagaagaagcatcctcaggaaaggttcaaaaggcatgcagaatctctagtcaggccgatcagtgaggatctttctctgtacagagccagaccacaaagactgggaggggtgatattttttcaaatgtttggatcccaacatgatgttaaaagacacacaaagaaatagggaaacatggcacaatcaaagagtcaaaatatccaggaacctactttaaggaaacacagatatcttcattatctcagaaggaattcagactaaccaccataaacatgttcagtgacccaaggaaaatgctgcatgaacaaaatggtatcaacatagagattgaaaacgtaaaaaggaaccaaacaaacattgtaacagatgcaatatgcttctttgaccaaattgaaagatttactagaggagtttagcagcagtgtttttcaaggagaagaattagtgaacttgaagccaggtcatttgaaattatccagtcagagaagcaaaaagaaaaaaaataaaaaaagaatgaagacagcctagagtactaatgggacagcatcaattttatcaatgtagattgtatggaagttccatatgttggaaagagaaaggagcaaaaagcttatttgaagaaatactggccaaaacttcccaaactgaaggaaggcagtggacatccagattcaagaagccaaatggactccagagtagaacaatccgaagacatctacatggaaacacactgtaatcaaattgtcaaagaattttgaaagcagcaggataagaacaacttgtcatatacaaaggagattctgtgggactctaagtggatttcttagcagaaaccttgcaggtcagaaagaagtgggatgatatagtcaaactgctggaagaaaaactgccagcaaagtactgtatgtggcaaaacttttctttaaaagtaaaagagaaataagattctcaaaatctgagagagttcatcaccactatatctgacttaaacgccaatgggagtctgttaaatggaaacaaaagtatgttcaacatgaaagtataaaattaaatgataaagctatggacaaatagagacctgcatattattgtaatggtgaagaatcctgcaaaaatgtctctctatccatctctcgaagacttgaaggtagacaaagtaattcaggctcaaactgctttttctgcaaaccctgccaatccagcaattttgtcagaagcttctgctcctatccctcacgatggaaatctctatcccagactgtatccagagctctctcaatacatggggctgagtttaaatgaagaagaaatacgtgcaaatgtggccgtggtttctggtgcaccacttcaggggttggtagcaagaccttccagtataaactatatggtggctcctgtaactggtaatgatgttggaattcgtagagcagaaattaagcaagggattcgtgaagtcattttgtgtaaggatcaagatggaaaaattggactcaggcttaaatcaatagataatggtatatttgttcagctagtccaggctaattctccagcctcattggttggtctgagatttggggaccaagtacttcagatcaatggtgaaaactgtgcaggatggagctctgataaagcgcacaaggtgctcaaacaggcttttggagagaagattaccatgaccattcgtgacaggccctttgaacggacgattaccatgcataaggatagcactggacatgttggttttatctttaaaaatggaaaaataacatccatagtgaaagatagctctgcagccagaaatggtcttctcacggaacataacatctgtgaaatcaatggacagaatgtcattggattgaaggactctcaaattgcagacatactgtcaacatctgggactgtagttactattacaatcatgcctgcttttatctttgaacatattattaagcggatggcaccaagcattatgaaaagcctaatggaccacaccattcctgaggtttaaaattcacggcaccatggaaatgtagctgaacgtctccagtttccttctttggcaacttctgtattatgcacgtgaagccttcccggagccagcgagcatatgctgcatgaggacctttctatcttacattatggctgggaatcttactctttcatctgataccttgttcagatttcaaaatagttgtagccttatcctggttttacagatgtgaaactttcaagagatttactgactttcctagaatagtttctctactggaaacctgatgcttttataagccattgtgattaggatgactgttacaggcttagctttgtgtgaaaaccagtcacctttctcctaggtaatgagtagtgctgttcatattactttagttctatagcatacttgcatctttaacatgctatcatagtacatttagaatgattgcctttgattttttttttaaattctgtgtgtgtgtgtaaaatgccaattaagaacactggtttcattccatgtaagcattaaacagtgtatgtaggtttcaagagattgtgatgattcttaaattttaactaccttcacttaatatgcttgaactgtcgccttaactatgttaagcatctagactaaaagccaaaatataattattgctgcctttctaaaaacccaaaatgtagttctctattaacctgaaatgtacactagcccagaacagtttaatggtacttactgagctatagcatagctgcttagttgtttttgagattttttagtcaacacataatggaaacttctttcttctaaaagttgccagtgccacttttaagaagtgaatcactatatgtgatgtaaaagttattacactaaacaggataaacttttgactccccttttgttcatttgtggattaagtggtataatacttaattttggcatttgactcttaagattatgtaacctagctactttgggatggtcttagaatatttttctgataacttgttccttttcctgactcctccttgcaaacaaaatgatagttgacactttatcctgatttttttcttctttttggtttatgtctattctaattaaatatgtataaataaagttacattttagtctgtc

SEQ ID NO: 1873 - DNA, 3226 bp, Homo sapiens
gtaaccatgaggggttcctgtgagaggtctggggaggatgaagagcagaaagaagaggctatggtggcctgtgggcgtctttcaggggtccccgaggccgagcagggtcccgaggccaattgggactccgacctggagacggaaggcaccgatgggcttggagaactggtcagggacacactgtacctgaggtcttgccgggcccatagtgttgtgcccatctcctgctttctgcgccaagggagcgcccaagagctgaacctccggcaccgtggcctggggccccagggcgcccgggctctggcttcctcattgagctccaatccatatgtcaagcggctggaccttcgagacaatgggctctgtggggcaggtgcagaggccctggcaggtgccctgagcaaaagcagcagcatccatggtaggtgctgggtctggggcaggtgggcaggcgtgtcctccttttcctcagggatgtgcctccatcgttgaaagctgggccgtgtcacctggggcctgctggtgttgctggtggatagaagaggggcctcatcacaggagggggcatgtggggtggagttagaccctctgctgtgcagccgatgcctgatagaagtcctttcctcacccaccccacaccatcactcccctcccttgctggccagcatccccctcttcacctagcacatgggagactcccagtacctgaatgcaggatgggagagtccttccacacagagaggtgggagttgggcattgtaagaagcaggtaggcaatgtgggagtttgatggggctggatccaaatgccagttctgccactgaagagctggatacctgggcaagcagcttaacctctctgagcttcagtttctgatctgtgaaatggcccccaaaataccttatgggcttggggctgtggtgagcatgaagtgaaatgcactcctgaagtggtcagaagagtgtgtgacccatgtacgtgctccatgcatggccacttgggctattattgccaatcctggcaacggggctgtgagggcttctgaagtgggtggtgatatcactgccagatgcagccatcgacggtatagctgccccccaccacagcagtctctacagtaccaggaggtaggcggttttaaccacttgacacagaagctggtgggcacacagggagggggaggtcaggggcagaggggacccagccattgggagccagagccaccatgcaaccccaggacagttaacctgtaagtccccttcctcagcctcagacctggaggtttgggggatggcagaagtaggggagtgcctggctttgcatcccactggccgaggagtggttctgtcccccagatgtggacctgtcggagaaccagctgggagtggcaggagcccaggccctctgtgccgccctcacagtgaaccaggccatgcggaagatgcagctgtcagggaatggcctggaggagcaggcggcccagcaccttgccgaactcctgctggcccacacagacctgaagtccctggacctgagctacaaccagctgaatgaccaagcagccacacggaactcttcattccttccacaaatatctcattgcgcgctgctgtatgtgctgggcactgacttagccaccagggatccaccttgaacaaaaccaagttcctgacctcaagggacaatgttaacaacatcattctgagggagacacttggaccagccctggcagaaaacacaggactcaccgagcttaacgtgagctggaatcacctccggggcccaggagctgtggcatttgccaggggactggaggcaaacatcttccttaaagttctagacatctcatacaatggctttggggatcctggagcctctgcggtgggtgaggctctgaaggccaacaacgtgttggaggaactcaacatgagagacagtctcctgctggccttgaactcttgggctgaagcagtcttcctgcctcagcctcccaaagtgctggaattacagtcatggggagttcatcgttgttacatagagacctgtgattcctatagcacaggcggatggctgcgaattgcacacggtgtataaagcatctccggcagagcctggtgcatgtaacaaccgcatctctgcgatgggagccctgagcctgggcctgggcctccgggtcaaccagacgctgaggattcttgtacagcctcaccagagcattctgtctgactatctgatggagacaccttctgagccgaaacagtgtggccatagtggctgtgtcctcagagatgaggagcccctccttccctttcacattgctctctggccttcccggacctggcttctcgcagctttgtgtgcgtgtttctcaggtgtccaggaatcccatgcgaagtgaaggctgctttggtctcctcaagtctgtccaggacaatccagcctctgccctggaactgctggatttctcagatatccaggtgaacgcagagtttgatggccttgctagctcagtgaggggaattcttccagaactctgcataaagactggcgcttgcagagtggagtataaaaaggagttgctgccagtcttcagatcagccctgccagcgtctgtccctaagtgaccttggagtgtggcttcctcatctccaatcagctgctttgacctccagggtatatacttgaaagaaatgaagacatatgtccccacaagaactcgtgcacgaatatccatagcaacattatttataatattctaagagtgaaaatgcccaccagtggataaatgcaatgtggtatatccatacagtggaatattatttggcaataaaaaggaatttgaggtgataccaatgttctaaaatgtattgtggtgatggctacgtaactgtgcatattctaaaggcaattgaattacagatgctttacatgaatgaaccgtatggtatgtgaacggcatctcaataaaactgtttcgaaaagaaggaaaaggacggacacatgctgaaaacgggtgaaactagaaaacatggcgctaagtgaaagaagccagccacaagatcacgtgtcgcatgaccgcatttatgtgaaacatccggagtacgcaaatctatacagacagaaagtagattatacattgcctaggtgcagagaaatggaagtattggaggttgacggctaaaggatgtggatttctttggggggtgataaaagtgttctaaaattg

SEQ ID NO: 1874 - DNA, 3821 bp, Homo sapiens
gtgctgtctgagagtcatggacctcctgcacaagaacatgaaacacctgtggttcttcctcctcctggtggcagctcccagatggggcctgtcccaagtgcgcctacagcagtggggcacaggggtgttgaagccctcggagaccctgtccctcacttgcgctgtcattggtgggtccttcagtgattactccttcacctgggtccgccggcccccagggaaggggctggagtggattggggaagtccagcgtggtggaacttcgatttatcacccggccctcaagagtcgagtcaccatatcaatagacacgtccaagaagtggttctccctgaagttgacgtctgtgacaaccgcggacacggctctctattactgtgcgagcggccagattcgtgacttatggggccacggaaccctcgtcagcgtcgccccctcacccaccaaggctccggatgtgttccccatcatatcagggtgcagacacccaaaggataacagccctgtggtcctggcatgcttgataactgggtaccacccaacgtccgtgactgtcacctggtacatggggacacagagccagccccagagaaccttccctgagatacaaagacgggacagctactacatgacaagcagccagctctccacccccctccagcagtggcgccaaggcgagtacaaatgcgtggtccagcacaccgccagcaagagtaagaaggagatcttccgctggccagagtctccaaaggcacaggcctcctcagtgcccactgcacaaccccaagcagagggcagcctcgccaaggcaaccacagccccagccaccacccgtaacacaggaagaggaggagaagagaagaagaaggagaaggagaaagaggaacaaggagagagagagacaaagacaccagagtgtccgagccacacccagcctcttggcgtctacctgctaacccctgcagtgcaggacctgtggctccgggacaaagccaccttcacctgcttcgtggtgggcagtgacctgaaggatgctcacctgacctgggaggtggctgggaaggtccccacagggggcgtggaggaagggctgctggagcggcacagcaacggctcccagagccagcacagccgtctgaccctgcccaggtccttgtggaacgcggggacctccgtcacctgcacactgaaccatcccagcctcccaccccagaggttgatggcgctgagagaacccggtgagcctggctcccaggtggggagacgagggtgcccacagcctgctgacccctacgcctgccccagggccatgaccccagctgggccccagcagcaccggtcatcctccacaggaaaggagaagggaggcaccagcaccctggccggccccacttctctcccagtgcccccgtggccagaggctgacagcctcccccacctccccgcagctgcgcaggcacccgtcaagctttccctgaacctgctggcctcgtctgaccctcccgaggcggcctcgtggctcctgtgtgaggtgtctggcttctcgccccccaacatcctcctgatgtggctggaggaccagcgtgaggtgaacacttctgggtttgcccccgcacgcccccctccacagcccgggagcaccacgttctgggcctggagtgtgctgcgtgtcccagccccgcccagccctcagccagccacctacacgtgtgtggtcagccacgaggactcccggactctgctcaacgccagccggagcctagaagtcagctgtgagtcacccccaggcccagggttgggacggggactctgaggggggccataaggagctggaatccatactaggcaggggtgggcactgggcaggggcggggctaggctgtcctgggcacacaggccccttctcggtgtccggcaggagcacagacttcccagtactcctgggccatggatgtcccagcgtccatccttgctgtccacaccacgtgctggcccaggctggctggcacagtgtaagaggtggatacaacccctcgccgtgccctgaggagtggcggtttcctcccaagacattccccacagctgggtgctgggcacaggccttccctggtgtgaccgtgaatgtggtcaccctgaacagctgccctctctggggacatctgactgtccaagaccacagtcagcacctctgggagccagaggggtctccagagacccccagatgtcaggcttgggctcagtgcccagcgaaaggtcagccccacacatgcccataatgggcgcccacccagagtgacagcccccagcctcctgccaggcccacccttttccgcccccttgaggcatggcacacagaccagtgcgcccactgcccgagcatggccccagtgggatgtggtggccacgaggggctgtacacacagcaggaggctgtccgccctgctcagggcctgctgcctatgccccagctgtccagccaagggaggcatggaagggcccctggtgtaagctggagccaggcacccaggcccccggccaccctgcagagccaaggaaaggaagacacccaagtcaacaaggggcagggctgagggctgtcccaggctcttttggcccgaggggctgccagcagccctgacccggcatgggccttccccaaaagcgaccctgtgaggtggcctcacagagaaccccctctgaggacagtgtctgaccctgcctgcctcacacagatgggccccacagcagtgggcaacctggggggcagcagcccaacctgaccctgcagggactgccccctgcagcagcagctgcttctcagtcccccaacctccctgtccccgccagagggtcttccccgaagctgcagccccaacccatggctgcccacctggaaccgggactccctgtccactgccccctccccttcggggccccatctgtgctggggcccaggttcggcctacagattcccatcattgccatggcctcctgaccttgcctatccaccccccaccaccggctccatgctgaccctcccccaggctcccacgcccagctggccggccatccccaggcacagacagtctgggatctcacaggttagcctggaccatccacctggccagacctgggagaggctggaagctgccctgccaccatgctccagggccccaggttgcagtactatggggtgagggtgtgtgtgcacacctgtgtgtacctaggatatccgagtgtacccttgtgcccccaagcacaagtctccctcccaggcagtgaggcccagatggtgcagtggttagagctgaggcttatcccacagagaaccctggcgccttggtcaaggaagcccctatgcctttcttgcctcgatttcccctcttgtctgctgagccagcaggggccacgtcctgggctgctgtgaggaggaagcaagttggtgctaggaggggctcctgtgtgtgcatgggcgggaggggtgcaggtatctgagcaccccggtctccacttgagagagcagggcaggagctccctgacccacccagactacacacgctgtgtccacgtgtctcccattatctgtggcagaggatccggcttctttctcaatttccagttcttcacaaagcaatgcctttgtaaaatgcaataagaaatactagaaaaatgatatgaacagaaagacacgccgattttttgttattagatgtaacagaccatggccccatgaaatgatcccggaccagatccgtccacacccgccacttagcagctctggccgagctcacagtacaaccacaataaactcttgttgaatg

SEQ ID NO: 1875 - DNA, 5003 bp, Homo sapiens
tttaaaaccagtcaacatgcttttgtccatacagcgaaacttagcagcagcatggtatgtgcaaattccagggatggagataaaaggaaaactaaaacctatgcaggttgctctcagtgaagatgacttgacagttttaatgaaaattttgctagaaaatcttggagaagcttcctcacaaccaagccctacacagtctgtgcaggagactgtaagagtgagaaaagttgatgtttcaagtgtacctgaccatctcaaagaacaagaagattggacagactcaaagctctctatgaaccagattgtcagtctccaatttgactttcactttgaatctctttccattatcctttataacaatgatatcaaccaggaatctggagttgcatttcataatgacagtttccaacttggtgaactcagactacatcttatggcctcctcagggaagatgtttaaggatggctcaatgaatgtcagcgttaaacttaagacatgcacccttgatgatctcagagaaggaattgagagagcaacatcgagaatgattgacagaaagaatgaccaagataacaacagttctatgattgatataagttacaaacaagacaaaaatggaagtcaaattgatgctgttcttgacaagctgtatgtatgtgccagtgtggaatttctgatgactgtggcagatttctttatcaaagctgtgcctcagagtccagaaaatgtggcaaaagaaacacagattttaccaagacagactgccacagggaaggtcaagatagagaaagatgactctgttagaccaaatatgactttaaaggccatgatcacagatccaggagtggtatttgttgccagcctgacaaaggctgatgctcctgctctgacagcctcgtttcagtgcaacctttctctgtcaacatccaaactcgaacagatgatggaagcttctgtgagagatctgaaagtgctcgcttgcccttttctcagagaaaagagagggaaaaacattaccacagtcttgcagccccgttctttatttatggaaaaatgtacgtgggcttcaggaaagcaaaatataaatattatggttaaagaatttataattaagatttcacccataattcttaatactgtgttgacaatcatggctgcattgtctccaaaaacaaaagaagatggatccaaagatacgtctaaggaaatggaaaatctttggggtatcaaatcgattaatgattataacacttggtttcttggtgttgacacggcaacagaaataacggaaagcttcaaaggcattgaacattcactgatagaggaaaattgtggtgttgttgtagaatccattcaagttaccttagaatgtggccttggacatcgaactgtacctttattattggcagagtctaagttttcaggaaatattaaaaattggacttctctaatggctgctgttgctgacgtgacactacaggtgcactattacaatgagatccatgctgtctgggagccactgattgagagagtggaggggaagagacaatggaatttaaggcttgatgtaaagaagaacccagttcaggataaaagtttgctgccaggagatgattttattcctgagccacaaatggcaattcatatttcttcaggaaatacaatgaatataacaatatccaaaagttgtcttaatgttttcaacaatttagcaaaaggtttttcagagggcactgcttctacttttgactactctttaaaggacagagctccttttacggtaaaaaatgctgtaggtgttcccattaaggtgaagcccaattgtaatctcagagtaatgggcttccctgagaaaagtgatatttttgatgttgatgctggccagaatttggaactggagtatgccagcatggtaccttcaagtcaagggaacctatctatattgagccgtcaagaaagctccttcttcactctgaccattgtacctcatggatatacagaagttgcaaatatccctgtggccagacctggacggcgattgtataatgtacggaatcccaatgccagtcattctgactctgtcttggtacaaattgatgcaactgaagggaataaagtaattacccttcgctctcctctacagatcaaaaaccatttctccattgcatttatcatctataaatttgttaagaatgttaagctattggagcgcattgggatagccagacctgaagaggagttccatgttcctttagattcatatagatgtcaattgtttatccagccagctggaatcttagagcatcagtacaaagaatctaccacttatatttcctggaaggaagaacttcataggagcagggaagtcagatgcatgttgcagtgtccatcagtagaagtcagcttcttacctctcatagtgaatacagttgctctgcctgatgaattgagctacatatgtacacatggggaagactgggatgtagcttacattattcatctttatccttctctcactttgcggaatcttctcccatattccctaagatatttacttgagggaacagcagaaactcatgagctggcagaaggcagtactgctgatgttctgcattcgagaatcagtggtgaaataatggaattagtcctggtgaaataccagggcaaaaactggaatggacatttccgcatacgtgatacactaccagaattctttcctgtgtgtttttcttctgactccacagaagtgacgacagtcgacctgtcagtccacgtcaggagaattggcagccggatggtgctgtctgtctttagtccctattggttaatcaacaagactacccgggttctccagtatcgttcagaagatattcatgtgaaacatccagctgatttcagggatattattttattttctttcaagaagaagaacatttttactaaaaataaggtacaattaaaaatttcaaccagtgcctggtccagtagtttctcattggatacagtgggaagttatgggtgtgtgaagtgtcctgccaacaatatggagtacctggttggtgttagcatcaaaatgagcagtttcaacctttcacgaatagttaccctgactcccttttgtaccattgcaaacaagtcgtcattagaactagaagttggcgagattgcatctgatggctcaatgccaactaataaatggaactatattgcttcttcagagtgccttccattttggccagaaaatttgtcaggcaaactttgtgtgagagtggtgggctgtgaaggatcttccaaaccattcttttataaccgacaggataatggcactttattgagcttagaagatctgaatgggggtatcttggtggatgtaaacactgccgaacattcaactgtcataactttttctgattaccatgagggatctgcacctgccttgataatgaaccatacaccatgggacatcctcacatacaaacagagtgggtcaccagaagaaatggtcttgctgccaagacaggctcgactttttgcctgggcagatcctactggtaccagaaaacttacatggacatatgcagcaaatgttggggaacatgatctgttaaaggatggatgtggacagtttccatatgatgcaaacatccagatacactgggtatcatttctggatgggcgccagagagttttgcttttcaccgatgatgttgccttggtttccaaagcactgcaggcagaagaaatggaacaggctgattatgaaataaccttgtctctccacagtcttgggctttcactggttaacaatgaaagcaagcaggaagtttcctatattgggataaccagttctggtgttgtttgggaggtgaaaccaaagcagaaatggaagccatttagtcaaaagcagataatcttattggaacaatcctatcagaaacatcaaatatcaagagaccatggctggattaagctagataataattttgaggtcaattttgataaagatccaatggaaatgcgcctccctattcgtagccctattaaacgagactttttatcaggaattcagattgaatttaagcagtcttctcaccagagaagtttaagggccaggttgtactggcttcaggttgataatcagttaccaggtgcaatgttccctgttgtatttcatcctgttgcccctccaaaatctattgctttagattcagagcccaagcctttcattgatgtgagtgtcatcacaagatttaatgagtacagtaaagtcttacagttcaagtattttatggtcctcattcaggaaatggccttaaaaattgatcaagggtttctaggagctattattgcactgtttaccccaacaacagaccctgaagctgaaagaagacggacaaagttaatccaacaagatattgatgctctaaatgcagaattaatggagacttcaatgactgatatgtcaattcttagtttctttgaacatttccatatttctcctgtgaagttgcatttgagtttgtctttgggttccggaggtgaagaatcagacaaagaaaaacaggaaatgtttgcagttcattctgtcaacttgctgttgaaaagcataggtgctactctgactgatgtggatgaccttatattcaaacttgcttattatgaaattcgatatcagttctacaagagagatcagcttatatggagtgttgttaggcattacagtgaacagttcttgaaacagatgtatgtccttgtattggggttagatgtacttggaaacccatttggattaattagaggtctgtctgaaggagttgaagctttattctatgaacccttccagggtgctgttcaaggccctgaagaatttgcagaggggttagtgattggagtgagaagcctctttggacacacagtaggtggtgcagcaggagttgtatctcgaatcaccggttctgttgggaaaggtttggcagcaattacaatggacaaggaatatcagc

SEQ ID NO: 1876 - DNA, 4577 bp, Homo sapiens
atgtcagctctgaatggggactgtctcatgcagccaagtcggacttgcttaggctgcttcatggaatccaaggatgcagtagatcctgagccagggatcagtctgaaagttggtgatctaaatagggattatgaaacgtgtgcagtctctgatatagggattcagtgtattaatgctggagaaaatatgaaatatggagagcagctgctctcagaccagctcctaggcttccccctgcataagtcaagggcaggagacagacgagaaactgagaaacctgacattgacttggaggatccggctcagaaaagctattatgaggcattactgttagacaagtgcaatacagaagaagctttgcttgcaaattccaatcaggattggggttacttcgagacttttattagtgaaagtaagattgaactgcttgacctctgttccaaaaatgagctgtctgtcaacctattctctgaagaagatgtggataactacatgtttgatgatgatgaatcaacactaggcagtgatgtctgctccctgaaaattcgatatgaatcctttcaggacaatgttcgagacaagactactcttttgatgcaggaagatgcccaattcaacttttttcccagcgtctttactacctgccccaagcgagagtctaagagtggggccctgaagcagagcagtgatttttcccaattcaaggtccctgatgtgagcatcatctggggggaggaagataaaaacttggacaagaagaaaggcaaagaggaaggacaggaagacaaaggtgtagagaagaaagatggaaaggataatggagaaaagcctgccttaaataaaccatgcagtgggactgaagtagagcaacttaagaatccaaagcagggccatcttgctaattccctggagacatcagggagtttcagtgatgatagttccttcattgagatctcatatgatgctagggtgagatcaaggactgtagtcgctatatggctcgggacactaattctggcagctcctcctcccaacagaactatgggctgcgagccaagagaaaagtcagatacagtgaagattatctatatgatgttgactcactagagggtgaaaaagtaaatgagaggaaggaatggctgccagttggttccaaagaggaagatgatgatgaatggtgtcccaaaaagagaagaaaagtaacccgtaaggagccccctgttattatcaaatatatcatcattaatcgctttaaaggtgagaagaacatgctggtgaagttgggtaaggtggatgccagtgagacaacagtgaatttgagtgagaatcagctcaacaaatatgccaagctggcacccttgaaaggcttctggcaaaagaagaagaagcagagaaacaccaacacggactccatcaagacacctttttcccaaaagcaaagctttgaaccaggtagctttgaggtgtcatttctgccacctgctcgcaaacgaaaatctaaacttggcaacaggcacaggattcaaagaatcccatccattgaaatttcagcaagtagtaaacagatttcattatgtaatgatcagaggcacgctagtaatcataaagaagatggaggcctaaaaggcacactgaagtcagcacctctgggtgctcctagctgtgcaaatggatcacatttaaatgacatcacaggccctgactcagtgaaagtcaaagcccaagacacagagtttaaggggccagagaggaaagtgctcaataaaatcaaatttaaaagtgaagctaggttaaaatctaagaaagtcaaagctgctgggcaagaaagcaagccaattgttcaaatgagccctctcttggaaaaccaatcctcaaaggctaatttaaagaatgaagttattcctgggacatcaaacagttcccgtctatctgaatttcatgaggcaaaggctgctaagagttccacttttctaccaacgacatgctcttctgaaatgcctttatcatctgctaatgttaccactaatatacctgttatcccgggagggtatctgcagacattgttagatgcttctgacttgtcaaataacactagtatctcatacttcagccaccattctccagagcaaaatgaaggcagcctcactcaaaccgaaaaatcatttgtacccctccagcctacccaggactgtgtgctcacctcatcctctgactctgagctgcagcagtcatctcataacttcaaaatggaatcaagcaactatagaaatgtgtggcccaacaaggctacttctggcacccaggaattcatggctgaagtctcaagggagatagccccaacccaatccagtgaatttggagcctcccaagtagtctccatggaaaataacctcacacctacaacatacaatccaatctgtctcaatagtggtggcagtaattgcaacaaggtcctgtatgactccatgcaagatacccaactcccatctgatgactcttaccaattatgtcactttaataatggagagatctgctttcctttccagcaggggccagtcaatatggatgatggtcggctctttagctttgattcaatggccccactctctgtcagctcaagtaattattgctccttaagcttgaagtcctgtgaaaaggatggcgatgatgatatcactgatgacttcctggcccattgcagccctaagctggtgatccagcaaagcattgatgagatagcaccactaaaggagtccactgacctcctggatatatccaacttcacccctgacaaattccgccactcttccctttcagagatgtccccaccggacacccctagtctttcccctcaaattaccagatgtgagagtatgaagacactaggaacactaaaggggttccaagagggtgtcccaggaccattggacagtgtggaaaaaatcaagtgggactgcagtaccctttcacggcaggtccaaatggaggatggatttactttaaataatcaccagtttcagttccatatgttcaatgatgaggattctgtcagcctgctccaaaaaaacccttgcctgtcaacatttaatgatccatctggtcaaattagtaccaacaacaaagtgtcaaaatcaagaaagaaaagttcacccagcaagagtggggctatgaaccaaagctcttctcagaaaaacaccaggaaaaaatccctcaaaggtaacaacaaggggattgaaaaaccacctggcaaaaactcccgccaggtccctaagtccacaaagaaagggaaatacatggctgccatcaatggagagaaaatgcaaattggcattggccgtgggggaagccaaaccaacaccatatcctccactgggaagacattggctgaatgtatccaacatggtggccctatggcctctatgaagatgccaagtcaaaagggactttctggagattgggccttggggaaggagagcagcccaggctggagtgatatgagcatgggcaccaacaccaacagccttctggatgatgaccaacgggaatttcaggagccttcctatatcttgtccaacattgcctctggtatggcagatgtgcagagattcatgatggcctccatagagcccctttgggaacccatggagcaccatggggatcccaacatattctactcccctgagtccaatagtctaaaattaaaaaccctcaaaatattggctgggacaccacaggagtctaagaaaaagatcaacagtgggtcccaaggagccactaagaatcacaggtcaatcaagggtgtgagcaaaagcaatgggaaaacagcaataggtgatcctggtcgtgcaaacatgcctggttataacgaggactctcgctctaccttctttgataaaaagtatagtaacatgagcactttaggcaataacggaccgacacacaaaaagttgtatcgtcacaaatccagctccaaggccctgagagatgagaaatgtaagggaaagcacatggagcgagaacaggtccacaaggatgagtctgggacagcttcttttgaaaaactgagggattccgactacaatctcctaaaagcagaaacaaccttttgggttttacctgtgtttgaagaagagactcgcattttccagaaagacatttgatgtttgtgttttatttctttcaaaatatgccttgtggtatgtatgttgacatgtaagtgcttaaagaaaagaattttaaattgtgggaatacgtctttggagcaaactttaatctcatgttctatgtaaaagacttaaaaagtcatacagttgcacaagtagtttatgcactatttacccacaaggaaaaaattgaaaacattgtgccaaactacaaacaagtgactgtactgtatatatttttacttctatatcaacatttggttgtatttggggaagttgtccctgttaatttactagaaacattccagtgattcttgctattaaccacccccacttatgtggatagcacctgtagatcatggtggaaaaatatgttgtgttacacaatttaccaaaattaaaggatactgtttg

SEQ ID NO: 1877 - DNA, 3590 bp, Homo sapiens
agctctgggacaggagcccagcactagaagttggcggtgtttcccctcggtgatcagcactgaagacagaggactcaccatggagtttgggctgagctgggttttcctcgttgctcttttaagaggtgtccagtgtcaggtgcagttggtggagtctgggggaggcgtggtccggcctggggcgtccctgagactctcctgtgcagcgtctggattcaacttcaaggactatgtcatgcattgggtccgccaggctccaggcaaggggcttgagtgggtggccgttgcgtgggacgtaggaattcccattcattatgcagactccgtcaagggccgattcaccatctcgagagacaactccaagaataccctctatttgcaaatggatagcctgaaagtcgaggacacggctgtctattattgtgtgagagattggggggacgatgactacagtagtaaatactattactacactctggacgtctggggccgagggacaacggtcaccgtctcctcaagtaagagtggccattttagggcctttattttgtcttagtgcgtgcggcggttcctgagcattgcaagttggtcctcggggcgtgttccgaggggtcctgggcggcctggccaggaggggacgggcactggggtgccttgaggctctgggagactccgtggattttccggtggctttgaaaaatgggactctgatgcagagaatgagcccgggggttggggaggcacatttggacgagatgcctgaagaaaccaggggtctcagcgatggctaaggaatgtgtctcaggagtggtgtctgtcggactgcaggatggctgcaatcgtgaaagcttttctctagacttgtgaggtgcgctgtgggtctacctgcatgttaaagtatttattggctggaaagagaattggcggagtgggtgaatccagccaggggggacgcgtagccccggcctcgatgacagcagggtcgggggcaggggtagcccagaaacagtggctgccgtcctgacaggggcttagggaggctccaggacctcagggccttgaagctggtttccatgagaaaaggattgtttatcctaggaggcatgcatattgttaaaggacaggatatgtttgaagtggcttctgagaaaaagggttaagaaaattctgacttaaaaatgtgagagactttcaagtgtattaatttttttaactgtccaagtatttgagattcttatcatttcattaacacccatgagtgatatgtgtccggaattgaggccaaagcaagctcagctaagaaatactagcacagtgctgtcggccccgatgcgggactgcgttttgaccatcgtaaatcaactttctttttttaattaattgagcgaagctggaagcagatgatgaatgagagtcaagatggctgcatgggggtctccggcacccacagcaggtggcaggaagcaggtcaccgcgagagtctattttaggaagcaaaaaaacacaattggtaaatttatcacttctggttgtgaagaggtggttttgcccaggcccagatctgaaagtgctctactgagcaaaacaacacctggacaatttgcgtttctaaaataaggcgaggctgaccgaaactgaaaaggctttttttaactatctgaatttcatttccaatcttagcttatcaactgctagtttgtgcaaacagcatatcaacttctaaactgcattcatttttaaagtaagatgtttaagaaattaaacagtcttagggagagtttatgactgtattcaaaaagttttttaaattagcttgttatcccttcatgtgataactaatctcaaatactttttcgatacctcagagcattattttcataatgactgtgttcacaatctttttaggttaactcgttttctctttgtgattaaggagaaacactttgatattctgatagagtggccttcattttagtatttttcaagaccacttttcaactactcactttaggataagttttaggtaaaatgtgcatcactatcctgaattatttcagttaagcatgttagttggtggcataagagaaaactcaatcagatagtgctgaagacaggactgtggagacaccttagaaggacagattctgttccgaatcaccgatgcggcgtcagcaggactggcctagcggaggctctgggagggtgactgccaggcccggcctgggctttgggtctccccggactacccagagctgggacgcgtggcttctgctgccgggccgactggctgctccggccccagcccttgttaatggacttggaggaatgattccatgccaaagctttgcaaggctcgcagtgaccaggcgcccgacatgctttcagaaatggactcagatgggcaaaactgacctaagctgacctagactaaacaaggctgaactgagctgacctgagctgagctgggctaagttggaccagcatccccgaccagccccaaggtcttcccgctgagcctctgcagcacccagccagatgggaacgtggtcatcgcctgcctggtccagggcttcttcccccaggagccactcagtgtgacctggagcgaaagcggacagggcgtgaccgccagaaacttcccacccagccaggatgcctccggggacctgtacaccacgagcagccagctgaccctgccggccacacagtgcctagccggcaagtccgtgacatgccacgtgaagcactacacgaatcccagccaggatgtgactgtgccctgcccagttccctcaactccacctaccccatctccctcaactccacctaccccatctccctcatgctgccacccccgactgtcactgcaccgaccggccctcgaggacctgctcttaggttcagaagcgaacctcacgtgcacactgaccggcctgagagatgcctcaggtgtcaccttcacctggacgccctcaagtgggaagagcgctgttcaaggaccacctgaccgtgacctctgtggctgctacagcgtgtccagtgtcctgccgggctgtgccgagccatggaaccatgggaagaccttcacttgcactgctgcctaccccgagtccaagaccccgctaaccgccaccctctcaaaatccggaaacacattccggcccgaggtccacctgctgccgccgccgtcggaggagctggccctgaacgagctggtgacgctgacgtgcctggcacgtggcttcagccccaaggatgtgctggttcgctggctgcaggggtcacaggagctgccccgcgagaagtacctgacttgggcatcccggcaggagcccagccagggcaccaccaccttcgctgtgaccagcatactgcgcgtggcagccgaggactggaagaagggggacaccttctcctgcatggtgggccacggggccctgccgctggccttcacacagaagaccatcgaccgcttggcgggtaaacccacccatgtcaatgtgtctgttgtcatggcggaggtggacggcacctgctactgagccgcccgcctgtccccacccctgaataaactccatgctcccccaagc

SEQ ID NO: 1878 - DNA, 4344 bp, Homo sapiens
gacgccgcgcacgcgcagacccagcgccgagcccgagccatggcgtccgagcggctccctaacaggcccgcctgtctgctcgtggccagcggcgccgccgaaggtgtgtcggcccagtccttcctccactgtttcacgatggccagcaccgccttcaacctgcaggtggccacccctggggggaaagccatggaatttgtggatgtgactgagagcaatgcacgctgggtgcaagacttccgcctcaaggcttacgccagccccgccaagctcgagtccatcgatgaacccatctgcgccgtcggccacggtgtcgctgccctgtgctgtgccaccaacgaggacagatcctgggtgttcgacagctacagcctgacagggggcctgggcctgtctcaggagcccccaccccgctcccgcagccctctgtgtgtgagctcgtcagggcccccggcttcgcccgcctgccgctcgtggtggaggacttcgtgaaggattcgggcgcctgcttcagtggtgagcctcgagggtgccccctgcacttacagaagatggggtggggggcttccctgctgcagcctgggggagaagcctcctgggccctgggttctatagacccccatggcactgactcagacccagacaggctgacctactgctgaccctgggagcccgcctggagttcgaggctctcagtgggtgaggtggacattgcctgaggttggtgccctcggtcctccccagcaagcgagcctgacgctgtccacgtcgtgctggaccgccacctggtcacaggccagaatgccagctccaccgtcccggccgtgcagaacctgctcttcctctgtggcagccggtgagggcaccagggtgggcacattcctgccacatcagagctgcacccggtgcttttgcccaagctttgaccacacgtctgtcctgcaggaaatgaacctgctgggtagatgcaccccctgagacagcccaggtgtctccagaggcagccccgtctcaggcttcagggaccccgcctcttccctcctgacaagggccctggatggcagcctggtctggccctgatgggattgttggaggcctcctggaatcagctctgagcgggtgtcggctctcctggagggtccaaacccccatcctcctgcatgttctctggtaggaggcagagaaaagaccccacgtgcctggagagctgtgctagctgctaggtggtcctcgggaattccaggctgggttttctagggaggactggttgtcacgtgtggtcactgttgactagacagagtcggctcgggggtcctctgtgtgggtttgccctgctgtggcctgtctgccacccaccacctctttcactgttggtgggggccttgaggggagggcccagccggcgggagctggctcagaactttggccaaaggtgaacggaattttttaggagcagcagcctcctgccccaaggccgaccggcactggcagcactttcatgttgaagaaatcttcctggcgtgtggtttcaaagtgtaagcacctcagtgatgcaccctgtcctaagcattgagaggcacgtttacttgtgaatatgagaccatgagattctcaatgataggaaagtgctgtcccccacggccttgcacagtggcctcgggtagagcggctatcaagagcagacagtggtccagcctgctgggcacctggcctgggctgtggccctccagcgggctgccccctggccccaggttagggcgtccaggagaggcttaggccctctacttcctcacagttccccagtttgagccatcgaaggccttcttcctgcccacctccccatctcagccacagccgttcccaagcaccagcgtggctcctggtgccagtgacctgccaggaggccccttgtgattataaaaccgttcagttgggccgggcgcagtggctcacacctgtaaccccagcactttgggaggccgaggcgggcggatcacgaggtcaggagatcgagaccatcctggctaacatggtgaaaccccatctctactaaaaaacaaaaatacgagaagttagcctggcatggtggtgggtgtgtgtggtcccggctacttgggaggctgaggcgggagagtggcgtgaacctgggaggcggagcttgcagtgggctgagatcgtgccactgcgctccagcctgggcgatagagtgagactccatctcaaaaaaaaaacgttcagttggctgggcgcggtggctcacgcctgtagtcccagcactttgggaggccggggtgggtggatcatctgaggtcgggagtttgggaaaagcctggccaacatggtgaaactaaaatacaaaagtgagccgggtgtggtgtcgggcgcctgtgttcccagctacttgggaggctgagacgtgagaattgcttgagcctgggaggcggaggttgcggtgggccagggttgcgccattgcactccaacctgggcgatgagtgaaactccgtctcaaaaataaaaaataataaaataaagccgttcaataaggagaatttggaaaaaagtggaagaaggaagcgctgcagccacatccccgccctgaaggctgcgtccctccagtgcctcgcagattagtcaggatgcccacttagcactggccacggggccttgctctgtcccgggtccactctcatccccgtgtggtgatggacctctgtggacaaatgctttttattttgtttatttattttttgagatggagtttgtctctcgtcgcccgggctggagtgcagtggcgcaatcttggctcactgcaacctctgtctcccgggttcgagcgattctcctgcctcagcctccggagtggctgggattacaggtgtgcgccgccacgcctggctaatttttgtatttttcgtagagaccgagtttcaccatgttggccaggctggtctcgaactcctgacctcaagtgatcctcccgcctcggcctcccaaagtgttaggattacaggcgtgagccactgcgcccggcgtaatttttgtttttagtagagatggggtttcatcatgttggccgggctggtcttgaactcctgacctcgggtgatccatcttcctcggcctcccggggtgctgggattgcaggcgtgagccgccgcgtccggctaacaagtacttttttatttttattttattttttggatggagtctcgctctgtcgcccaggctggagcgcagtggcgcgatctcggctcactgcagcctccgcctcccgggttcaggtgattctcctgcctcagcctcccaagtagctgggactacaggtgcacaccaccacacccagctaatttttgtatttttcctttttttttttttgagatggagtcttgctctgttggcaggctggagtgcagtggcgcgatctcagctcactgcaacctctgcctctgcctcccagattcaggctgaggcgggtggatcacctgaggtcaggagttcgagaccagcctggccaagatggtgaaaccccgtctctgctgggaatacagaaattagccgggcgcggtggtgggcgcctgtgatcccatttgcttgggaggctggggcaggagaatcgcttgaacccaggaggcggaggttgcagtgagctgacatcgtgccactgcactctagtctgggtgacagagcaggactccatctcaaaaaaaaaaaaagaaaatattgtaaacctagtggcttataaacaacagaaatcagtttcagttttggaggctggaagcccaagatgaaagcaccagtagatgcaacctcttttgtaagggtgatggtcccatgatgaggctgtgcccctgccctgtgaccggatgacctcccaaatgccccacctaataccatccccttgcaggtgaggacttaagcaggtgggttttggggggacgtgctcaggccacagcagggtgcatgaagagccagtgagcctcattgagcccctctggtcagccagatctgacattgagcccagcattgaagatcaaagcaggtggggctttgggatgtgaagtgggttctgacgcggggccccacagacctgtctccgcgtgagctgcctgcaggcccctgcgtcattcctcagctgcgtgcgaggcctctggcttggagagcctccccgctgtgcacagttctctctttgccagggcagggcttggggcagcaccaggctggggcagaggaggaaagcaagaggacagacctccagaagagcagcggagggcgggtgaggatttccccatataccagtgtgtgttcatctacccatgaggaataaaaccatgcagcagcatgc

SEQ ID NO: 1879 - DNA, 3647 bp, Homo sapiens
ctctgcagccgctggactggacacaaagcgtgagagacagagacaccatctctgctgatttgtacctaactggttcctgttgctgagagcccacgtgtcacagaagccagggcagaggccccacactgctgtctgcatttcccaggtatcctgagccaagcaggatactcctcctcagaggagtaggcaatagaagcgcctgaacatcatggcacaagtggactcccaggacaggtggggagaggcgtctcctctcagcagcttgactgaggaagctcatgacacccagatgctgagcatgaacttagagagtgacgatgaagatggtggggaggccgaaaaagagggcaccgctgacccggtggcctgtccaaggggcagctccccagtaacacacgaaaatcctgacttgccatggccccatccactgggcaaagaggaagagaaattctctgactcctccagtgctgggggcatggggcagaaaccagtggaaatgtctgggaaagccagttggagcagagatgtgacaaagatcaacgagacccagggttccccgggagcaagcagagctctgggttcccttcccagtggtctcgcacacaaattgttaggtcagatgcaacctcttggggaccgactacctgcgggtgatgatggatactcgggggcaaaccaggacgcagtcttggatgtcccacccagcttccccagcaatggaaagtatctctgtgcgcacaaaagtgtagacacgtccgcagggaactcttctctgttgtgtttccccaggccggggagcaactgggaccttcccacgcaagagacacatacaccagcccaggcgtcggccaccccagccagcctggctgccgcggtcctggcaaaagcgcggaacagcaggaaagtacagaaccaggcgggccggcgcgagggcggagaggctgaggcgcgtccctacaggtgcctgcggggcgggcgggcctttcagaagcccagcaagccgctgagccccgcggagacgcgcggcggcgccgccaagcgctacgcgtgcgagctatgcgggaaggcctactcccaccgcggcacactccagcagcacaggcgcctgcacacgggcgagcggccctaccagtgctccttctgcgacaaggcctacacctggtcctccgaccaccggaagcacatccgcacccacacaggcgagaaaccctacccgtgtccagactgcgggaaggccttcgtgcgctcttcggacctgcgcaaacaccagcgcaacatgcacagcaacaataagcccttcccgtgctccgagtgcggcctgaccttcaacaagccgctgtcgctgctgcgccaccagcgcacgcacctgggcgccaagcccttccgctgccccgcctgcgaccgggagttcgctgtggccagccgcatggtggagcaccagcgcgtgcactcgggcgagcggcccttcccctgccccacctgcggcaagtgcttcaccaagtcctccaatctgtccgagcaccagacgctgcacaccggccagaggcctttcaagtgcgctgactgcggcgtggccttcgcgcagccctcgcgcctcgtgcgccaccagcgcatccacactggcgagaggccctttccttgcacgcagtgtggccaggcctttgcccgctcttcgaccctgaagcggcaccaacagatccactccggggagaagggattcctctgtgccgagtgcggcagggccttccgcattgcctctgagttggcccagcacatacgaatgcacaacggagagaggccctaccagtgtgaggactgcggccaggccttcaccaggtccaatcacctccaacgacaccgagccaagcacggcacctgcaagaaggagcccatcccttcctcctctgacgagtgaagatagcatcgtcgacctcactacttggaaccttcccaggtgggcccactcacatggtattgccagcctcactggtcagcctcgcctcccagcaggtcgcgggtcatcagtggtccatttgattatttatttgatcccttgaacagaaagtcaccaccgagagagcacccaggtgggtggtttcacatcagtggttctgagtgtccgaggtcataagcaattggaaaagggaaagacaaagtagtgggagctgatcaaacgttgagttccttgggttggggaacctgaatcaatcagaaactgcttctagaattacatgctgggcactgggccgggctccagggataaggtggggaaaaagactaacctgtcctaccctcaaagccatatgcaaatactgaaaagaaggcctgaggggctggtcctctttagagaaagatgctttttggtttttatataaataaaggaatccccagaagtggtccctatgatgaactcccccaaagcaacgccgtttttggaggaactcaaacccagtccaacatcccatcatttcacttgactgcagaaatggctttacccttaggatatatctttatgagtcttggctttgaagtggagaagggctttatcttagagaaggtggtttatgtcatattccagttattctagaagttcaggacagccttagcatctgaaaaagaagcccattcctctttatagtggaatttagtaagtagatctaacccgagtctcacccacagaattcatataaattcatatatgccttctctctggctgcctcttttcctgtttgcactctgagggcttaagtcatatgtgatatttacaaagcaattggcccatttacagagagacatatataatttctccacaaagccttgaccatggttcatgaaaccgtttgggttcatttaaatttgtctgaatcattagtcttgacttgaagtgaacaaaacaccctttgcccaagtgccattggcttgtctgcatttcaaaatcattaaaaccaggtatggaagcctacgtgctcacagttatctaatgaggttatttcaaagtttgcattactaacagccattctgcaaagtgtattgatgtgtatagtgatctgtataaagtcagtagttcttagctgaacctcaactatgaggaatctatgactccacagatgtccttggtgcacataggcaaacggcacttctcatcttactgaagttaaataagatattccataagaaggtatagtgccctttttgggggagtacctttagtatattcctaaaattgccaccaaagaatgccaaatctgaatttctcttggtttccacctgatttggaactagggtgtgacctctaaatagcattctcatgacacatgggggcgccaaagagaagtaagagagatagctagatagctagatagctagatagtcttgtgtcttgtttgaccaaggtaaccgtaataaaagagtccatccccatcctttactgttgatgtgaccttgggcttcagtttctgcatctgcattggcaaaatagaagtgatagtagtaggtaaaagttagagtgatcctactatatgacggaaactttggctggatgcaagagctttaaattggtagaaaagtcacaagatgagcttgtgactatgaagagagcaaaagctaacttttttttcctagataatcaataaaatatttgaagactg

SEQ ID NO: 1880 - DNA, 3174 bp, Homo sapiens
acaacaaaaatgtaagagggaaaccatctcagaataatggatttttcttcccaagaaagggcaggtggcaatgtttagtgaatggacacagtgaagaggaggggttactatggaacttctcagatgtaagaaattttttatctttttatttttaaatttttatttgagacagggtcttgctctgtcacccaggctggagtgcagtggtgcgatcatggctcgctgcggccttgacttcctgggctcgggcgttcctcccatctcagcctctcaagtagctggagctgtaggtgcagaccacaatgcctggctaattttttattttttattttttttgtcaagacgggtctcactatgttgctcaggatggtctcaaactcctaagctcaagcgatcctccttcctcgacctcccaaaatgctgggattgcaggcatgagccaccgtgcctagcctgaaaaattttgatatagattttataatgatttttacgataccacactgtgaacagttgttttcttgatagagatttttcaatttgggctcttcggacagtgatatttgaaataaagattggattatggattgtcctggtactttgattttttaaataagaactattaacaaaacaaattacacatagctatagacaaaaaaggacaacagttaacattagttttctcagattgttatactcagcatagtataggctgcttgtagctcttaatcgttttctaaataagataatgtgcttatttactttttttctgtgaactctgcagagaagtacatttactgtttttaatgcttgtctcctggtctcgtgcattgcatgctcaagatgtgacatgcacgctctgtgctttggtccttctgtctgctcagtgcggccgcttgctgcactcctttcctctctgtctttggtgtctcagttcatctgcatttcatcttagtgtgtatatttggcttctctactcatgcttcatcagcattttttgcttagtttctcagaattcctaaacatctatttttacacttaaaacgtttacttgtttgactgaataaagaaacattaaaaaagtcctgcctggctttaactcattggttagccttttgtaggtgtgtgaatggcagtaacttagttagtaatgtgcctcagttccctgtagaagagggttgttttgaagatcaaatgactttataagcataaaacatttagaacatagtatgaagatagctactgttaagtaactgtcagaaagtgattgtcagttgttagaaacacttttatggatggcaatattgccccaatgggtgatatagttagtaacatgtgcttattccccagaagaataaataaacacatactgagaggtacattcttttcttaggaagaacaatgccactgatgcctttgcctgtctaagtcacaggggtggtttccacatggtcacccatggtgcttccttactagctgctggagcctgcacacaaaatccataccctcttgaaccttatttgtagagagaacaatttggactattctgggtggttcaagaggtgccaagcacaggccaaacactttccaacctggtgggtggtagcagatgaggctccgggtgtctgggctgcagaaggggctgtgccatccctgccaggggcaccttccactgggatcccaaggtcctgcatggtcagtctaacactgtgtagtcaagaagtcagactagtctacatgacgggggttcctaggagctttggattacccatgggctgtacaattactgtttgtgcattgtttgaatgatattaaaagaatgatttaatctttataagaagagccctgtttgaatctttatttgggagatgtttctcatgactgaatgcttaaatacagaaaattcagtttcagaatgtggctagcttcatttcctataataagattaaaatagcattttctttcttattttttttctcacctatactggccatgcaaacattttatttcttaattcatatggattagattttttttaaccctggatggaagaaaacacagattaagatgcattgtgaatatgacagttttagtagttagaagtgcttcggttgacgtcttggtcttgctcagtacttattttaagacattgggaaagaatcattttacaacattttgttcttttccgcatctttattgtagataatatccatgggagttaaattataaaatgatcaaaacaaaaccgagtgtagaacacccatgtaatatggtaatgtatttagctgttgtggagcaaaaatgctagctgcatctccatttttgcagtgtttaattgtgaatttactcctcccaaagtgaaagttacctcaacttttcaaattctgctgctactaatcatattatctgagaccatgattaaaattaatacatcatatggcagtgcctattttttaggaccgagagcagtaagttgggtatttaggcacacattttgtgtcagacacatcattttacttagtaatacacttttaaaataaaagagaaagtttcccttcctcttgttccccccctttatatgtcagtaaaagggggcaattattttggccacttttgccaggagaagccagaacatttcgtgaagcaggtagaaaggaaagcagaatgggatggataggagtaggacggatgggcagctgacctgctgctgtgtgatgggagaaatgaggctgtgagttcatgggtaatgatcatttgcccatattgaaggtggtcctggatgtaatagtctcatatatttatataaataaaatattttgagacagggtctcactttgctcactttgttgcccaggctcatgtgcagtggtgccattatggctcaatgcagcctaacttcctggcctcaagtgatcctcctgcctctaaaagtgttgggattacaggcgtgagccactgcactcagcctcataatattttatgaagtaacggaacaagatattggggaaagacatctacatgtatgtcaaggtattgagaatcattaaatttctaaagaaagatctatattcttttgtgtattgaagggaggataaatttattttcatgagattacatttgcaaactgcaagcaaatgatcttttccctctatctcatatagtcccatggatgtgtgc

SEQ ID NO: 1881 - DNA, 3518 bp, Homo sapiens
gaagttgcattgctcccaggtagcgtcatgctgggtgttaccttagtgctttcctcgatgcgtgatctgagtgactccatggtgcatacacatcatcctgggtgttacctttgtgctttcctcgacgcgtgatccgagtgactccgtggtgcacacgcgtcatgctgggtgttaccttagtgctttccttgacgcgtgatctgaatgctccgcggtgcactcgcatcatgctgggtgttaccttagtgctttccttgacacgtgatctgagtactccgcggtgcacacgcgtcatgctgggtgttaccctagtgctttcctcgacacgtgatccgaatgctccgcggtgcacacgcgtcatgctgggtgttaccttagtgctttccttgacacgtgatctgagtactccgcggtgcacacgcgtcatgctgggtgttaccctagtgctttcctcgacacgtgatccgaatgctccgcggtgcatgcgcgtcatgctgggtgttaccttagtgctttcctcgacgcgtgatccgagtgactccgtggtgcacacgcgtcatgctgggtgttaccttagtgctttcctcgacgcgtgatccgagtgactccacggtgcacattcactgcagcatctctgtgtggcagtcctcagcctttaaacttgacggatgcatttaagttcacttcttagattctcaataattctgtccctagaagaaagccagcttccctctacaagtgctctgggaaaaggagagcaggttgaagtaacatttcctgtactgagacttgcaccctgtgatctctcactcatcccaaattctgcatgtggatggtaagtatcaaaaactttgcctatgccacataaaggaaacctcttaaattccttagatgaacattaggttcattttctaagaatgactgagataaaaccaaattattttggtctctgattattagtaacttcattcttgggattgcatgttttaaatcttaaagttggtaaacttgggcaatgatacgtaagtgtctttaataaaaggaattggatgatttttaagtttattaccaaagtctaggcagatctttgcctctgtgatacaactttttctttagaaagaggaaatggtgattggaatggcctagactttcccatctaccgctgtgctatacattacacatttaaagttaaccccagactaattttatttatttctgtgctcagtagaaatattattacatatttggcaacataaggaagtactgtttaactgtgattcaagaatatattacaattatgtttacttctcctccccaaaatgcttgagattagggggcaaccttgctttgaatggccttggccgttgcttgtctttgtctctgtgcagagctgcccctggagcagaatattccctgcttggtccaaaccacagagagtaagcagggtgggcatggaggctggacacggtgctcccggtgggtgcatggacctgaggcattttgaggcttccctggcttacctcgagcagagggagccctcagagctaagccagagccacatgacccattctgttgacgatggtcgttgggtgaaccgtggactggtgctggtggatgcccaggaggagcccagggtgctgcctggggcggagctggagaggggaggtctggaaagcaggttccagctgggggcctctgccaagtccatgtccagcctccctggagatggcttctcagtgtattaacagaccccgttggcattggtattaactctgccgcctcgggccagctactttcctcctggagttggttccttattcacagaggtgggcagcttgtgtggccttcaagtctagtcactcggaggctacctgagcagtggccttggcccaggcactggcactgaccttttctgtaaccttagaagaaaatagaaaccacagaggtcagagcgagcgtcttcacagacattagcaggtgcccaggggatcaccacaaatgcgttggtggcacagatgtggccagcctggcacagatgtggttctcactggcaagaacctgccccggcccacgctctccactcctgcggagagctcacagccaggccagggggcgcacgtggggcccaacgcccacgctccccactcctgcggagagctcacagccaggccaaggggcgcacgtggggcccaacgcccacgctccccactcctgcggagagctcacagccaggccagggggcgcacgtggggcccaacgcccacactccccactcctgcggagagctcacagccaggccaaggggcgcacgtggggcccaacgcccacgctccccactcctgcggagagctcacagccaggccagggggcgcacgtggggcccaacgcccacactccccactcctgcggagagctcacagccaggccaaggggcgcacgtggggcccaacgcccacgctccccactcctgcggagagctcacagccaggccagggggcgcacgtggggcccaacgcccacactccccactcctgcggagagctcacagccaggccagggggcgcacgtggggcccaaccttcaggaataaggttattgtgtattcttttctttttttccttaaatcagtctttcttctgagaacacccgatgtgtgtggatcggaagctcagtgggcttattcgtatttaacctggcaaacctggaagtggaagctgctttgtattacaaggatttccagagcctcagcatcctgctggccggatcgtgtgccctgaggaaccgcactgcggatcaaaaggtgctgtgcttgctggcctccctctttggcgggaagattgccgtgttggagatcaacccggccgcgctagtcagggctcagcagtgccccagcatggggcagagcctctcggtgccagccagctcctgtgtcctaccgacctctccactgtatctgggaattgccaaggagaagagtaccaaggctgctagtgaacagcgacgtggtcagtacagggtgctgtgagatctaagaatacaaggctgatgcgttctcattgtggttagggctgctgcattgctttgcgaattcttatgttaaaatatgcattccgtacttccttccatccttctgtccttcatgtctctgcctctcgtgcgtgttccatgtccgctgtggtggggaacttgctgggtgcttcgcctcctgaattggccatcactcatgggattcagcaacgtgcccaagactgaccgctgttcctctggtgcctgttgcagtgggggtgcagagtggaccttcagcaattactgattgtgagaacatttttttccccttttttctctgctgaggaatttgaaagcagatcccgagcgtgtgattgtactcctgcacacttgagtgtgcatttctggaacatgtatgtttttacctagccaccatgacgttatatcaaaaccagtcattttttggaaccttgtattagcaaggccataataaattattcttgattgccttg

SEQ ID NO: 1882 - DNA, 3889 bp, Homo sapiens
actataccattacacaagaaggacaagcctcaattcgccttctctgtgccttctattaatcagagagagcctgtctcttgtgatcaatgaaaagttttattaccccaggcatgctcaacagtcctacgttatgtcagcattttgtaggaaaagcattgaaggagcctcggaatatgttttccaccacctacatcattcattatatggataatattgttttggccactcctacagatcaagtattataccagttattcagagaaataaaatgggctttaactaaatggaatctcaaaatagctcctgaaaaggtacaaacaacctcctcataccaatacttagatactactgttactgaaaaaagtattcagcctcagaaagtagctcttcgtaagaacaaattacaaactctgaataacttaggggatattaattggctgcgcccaatgctaggtattgcttcttatcaactcactcatgtttatcaaaccctccaaggagattcttcattagattcccctcggcaacttactaaggaggcagaagctgaattacagcttgtagaaagatgcttcagcaacgacatgcctcctggctacaaccacaaaagtctttggttttgtttattcttcctaccccccattctccatcaggacttttagctcaattcatagacaaaactataatggtaatagaatggctttttttatccagtcaaacagtaaaatctttgcaagtttatcttgctttagtcacacaacttataacaataggcaggcatagatcaaaaatgcttacaggatatgatcctgataaaattattgttaccttggattcccaacaacaggctgcggcctgggagatgtccactgcatggcaaatcactttcgcagattttgtagaaataatagataaccattatccatcagacaaaattttgcagttttataaaattcacccttttattccccctgtgattgctcatcacaaacccatttcaggtggacagacctattttaccgatggctcttccaaaagccacacagccatttatggacctaaatatacttaaataataaagacccctagagtttcagctcaacactctgaattaatggcagttattcaagttttaaagctcacagctttatttcctattaatattgtctgtaattcagcctatgtcgtaaatgtagctagttgcattaaaactgccactatcaagagtgtacggaccagccccacagggtcggtgggtctctccctgtgtgcggcgacgagagagtgtagaaataaagacacaagacaaagagatgaggggcagctgggcctgggggaccactaccaccaatgcgcggagaccggtagtggccccgaatgtctggctgcgctcttatttattggatacaaagcaaaaggggcagggtaaagagtgtgagtcatctccaatgataggtaaggtcacgtgggtcatgtgtccactggtcagggggcccttccctgcctggcagccgaggcagagagggagaggagacagagagaaagacagcttacgccattatttctgcatatcagggactattagtactttcactaatttactactgctatctagaaggcagagccaggtgtacaggatggaacatgaaggcggactaggagcgtgaccactgaagcacagaatcacagggagacggttaggcctccggataactgtgggcgagcctgactaatgtcaggccctccacaagaggtggaggagcagagtcttctctaacctcccccagggaaagggagaccgccccccaccctttcccggtctgctaagtagcgggtgttgttccttgacacttttcgctaccgctagaccacggtcttcccaaacgctggcgtcaccactagaccaaggagccctctggtggccctgtctgggcataacagaaggctcgcactcttgtcttctggtcacacctcactatgtcccctcagctcctatctctgtatggcctggtttttcctaggctatgattatagagcaaggattattgtaatattggaataaaaagtaattgctacaaactaatgattaatgatattcatatataatcatatctaagatctatatctggtataactattcttgttttatattttattatactggaacagcccgtgtcctctgtctcttgcttcggcgcctggatggcttgccgcccacacaagagcaccttaaaaccagaactgcttaacctatttctgagactccaaaaagctgttcgctctcatgctgccccttttcatatttctcatatccgatctcacacacaacttcctggggccactatctctaggtaatgatagagcagataaattcatcagttctatatttcaacaagcccaagcttcccatgctttactgcatcagaacaacttgcccttactcgtatgtttcatctgcctcgcagccaggcttgagttattgtgcaagcctgccccacttgccagcatgtccctggtgttgcacctgtggaaggatgcaacccacgaggcttggctccaaatgaaatctggcagatggatgttacatatatatagcagcctttggctaactccgctatgttcatgtaatatagacacttactcccatatgttacatgccacatgccaaactggggaaacagctggtcatgtctgacgatactgtctgtcgtcatttgcccatatgggggtccctaaacaatttaaaactgacagtggactcgcttatgttagtcatgctttcccaattttttacaattgtgggcaatcaatcataaaacaggaattccatacaatccctgagggccaggcattattgagcgggtacatcaaacactacaacgcatgctgaaaaaacaaaaagggagaataggggaccaattaccacttcaaacaaaattacatttagccttgtttactttaaattgtttgactcctggtacggatggcaagaccccagcagaacgacactggcaactgctagaggaaaagaggcaagtttatccaaaagtgttatggaaatccccagaagaaggacaatggaaaggtccggtggatttgctgacgtggggacgagggtatgcttgtgtttttacaggagatggacaaaccgtgtgggtgccctccaggtgtgtgtgaccatggaacgggagaccggagggatccatggtattcaaccgtgggcctgttacctccagtacgagccatgagccagcggaatctgaatgcaaagacagaacaagggccgaccggagtcacaatgacatccaaccccataacatggggacagatcaagaaaacgacacaagaagctgagaaactactggagcgccagggtcaggcaaaaacccctgactccatgttcttggccatgctagctgtagtgtcctgtgcgtctataggatcgggtgaaccaccaaccggcaattgaaagctgcacagcctgaaattacctttattcaattaatgcaaaaacaaaaggggagatgttggaggccgaaggaatgagggtcgtgaccaactcagtataccactggaggctctgtgagcaaacagcaaactgttctcatgaaagcaggatgttggcgaactgacaaactctgtctgccgccagaaggaatgctgggggcagtcatgtcccaggtcccgtgctccttgaggttatccacaggaacatccagaacctgttgaacaaagaaaggaatcatgtgggcctgtgttaaatcaaatagctgaccgacagttatcccttcctccctattcactctacctaataaatatgaagggctgtaaaagctcaggtccctgttccctaatatcaaggagccccctgaccccttctttcaaacag

SEQ ID NO: 1883 - DNA, 3705 bp, Homo sapiens
gagctctgggagacgagcccagcactggaagtcgccggtgtttccattcggtgatcatcactgaacacagaggactctccatggagtttgggctgagctgggttttcctcgttgctcttttaagaggtgtccaatgtcaggtgccgctggtggagtcggggggaggcgtggtccagcctgggaagtccctgagactctcctgtgcagcctctgggatcaccttcagaaacaacgctttccactgggtccgccaggctccaggcaaggggctggagtgggtggcgctcatatcagatgatgccaacgaggaattctacgcagattccgtgaggggccgattcatcatctccagagacaattccaacaacaggctgtatctgcaaatgaacggactgagacctgaggactcggctgtctatttctgtgcgagagatgtccgtaatttgttcctagttactcctagagaggacttcttctacttctacggtctggacgtctggggccaagggaccacggtctccatctcagcacccaccaaggctccggatgtgttccccatcatatcagggtgcagacacccaaaggataacagccctgtggtcctggcatgcttgataactgggtaccacccaacgtccgtgactgtcacctggtacatggggacacagagccagccccagagaaccttccctgagatacaaagacgggacagctactacatgacaagcagccagctctccacccccctccagcagtggcgccaaggcgagtacaaatgcgtggtccagcacaccgccagcaagagtaagaaggagatcttccgctggccagagtctccaaaggcacaggcctcctcagtgcccactgcacaaccccaagcagagggcagcctcgccaaggcaaccacagccccagccaccacccgtaacacaggaagaggaggagaagagaagaagaaggagaaggagaaagaggaacaagaagagagagagacaaagacaccagagtgtccgagccacacccagcctcttggcgtctacctgctaacccctgcagtgcaggacctgtggctccgggacaaagccaccttcacctgcttcgtggtgggcagtgacctgaaggatgctcacctgacctgggaggtggctgggaaggtccccacagggggcgtggaggaagggctgctggagcggcacagcaacggctcccagagccagcacagccgtctgaccctgcccaggtccttgtggaacgcggggacctccgtcacctgcacactgaaccatcccagcctcccaccccagaggttgatggcgctgagagaacccgctgcgcaggcacccgtcaagctttccctgaacctgctggcctcgtctgaccctcccgaggcggcctcgtggctcctgtgtgaggtgtctggcttctcgccccccaacatcctcctgatgtggctgggggaccagcgtgaggtgaacacttctgggtttgcccccgcacgcccccctccacagcccaggagcaccacgttctgggcctggagtgtgctgcgtgtcccagccccgcccagccctcagccagccacctacacgtgtgtggtcagccacgaggactcccggactctgctcaacgccagccggagcctagaagtcagctgtgagtcacccccaggcccagggttgggacggggactctgaggggggccataaggagctggaatccatactaggcaggggtgggcactgggcaggggcggggctaggctgtcctgggcacacaggccccttctcggtgtccggcaggagcacagacttcccagtactcctgggccatggatgtcccagcgtccatccttgctgtccacaccacgtgctggcccaggctggctggcacagtgtaagaggtggatacaacccctcgccgtgccctgaggagtggcggtttcctcccaagacattccccacggctgggtgctgggcacaggccttccctggtgtgaccgtgaatgtggtcaccctgaacagctgccctctctggggacatctgactgtccaagaccacagtcagcacctctgggagccagaggggtctccagagacccccagatgtcaggcttgggctcagtgcccagcgaaaggtcggccccacacatgcccataatgggcgcccacccagagtgacagcccccagcctcctgccaggcccacccttttccgcccccttgaggcatggcacacagaccagtgcgcccactgcccgagcatggccccagtgggatgtggtggccacgaggggctgtacacacagcaggaggctgtccgccctgctcagggcctgctgcctatgccccagctgtccagccaagggaggcatggaagggcccctggtgtaagctggagccaggcacccaggcccccggccaccctgcagagccaaggaaaggaagacacccaagtcaacaaggggcagggctgagggctgtcccaggctcttttggcccgaggggctgccagcagccctgacccggcatgggccttccccagaagcgaccctgtgaggtggcctcacagagaaccccctctgaggacagtgtctgaccctgcctgcctcacacagatgggccccacagcagtgggcaacctggggggcagcagcccaacctgaccctgcagggactgccccctgcagcagcagctgcttctcagtcccccaacctccctgtccccgccagagggtcttccccgaagctgcagccccaacccatggctgcccacctggaaccgggactccctgtccactgccccctccccttcggggccccatctgtgctggggcccaggttcggcctacagattcccatcattgccatggcctcctgaccttgcctatccacccccaaccaccggctccatgctgaccctcccccaggctcccacgcccagctggccggccatccccaggcacagacagtctgggatctcacaggttagcctggaccatccacctggccagacctgggagaggctggaagctgccctgccaccatgctccagggccccaggttgcagtactatggggtgagggtgtgtgtgcacacccgtgtgtacctaggatatccgagtgtacccttgtgcccccaagcacaagtctccctcccaggcagtgaggcccagatggtgcagtggttagagctgaggcttatcccacagagaaccctggcgccttggtcaaggaagcccctatgcctttcttgcctcgatttcccctcttgtctgctgagccagcaggggccacgtcctgggctgctgtgaggaggaagtgagttggtgctaggaggggctcctgtgtgtgcatgggcgggaggggtgcaggtatctgagcaccccggtctccacttgagagagcagggcaggagctccctgacccacccagactacacacgctgtgtccacgtgtctcacattatctgtggcagaggatccggcttctttctcaatttccagttcttcacaaagcaatgcctttgtaaaatgcaataagaaatactagaaaaatgatatgaacagaaagacacgccgattttttgttattagatgtaacagaccatggccccatgaaatgatcccggaccagatccgtccacacccgccactcagcagctctggccgagctcacagtacaaccacaataaactcttgttgaatgaac

SEQ ID NO: 1884 - DNA, 4399 bp, Homo sapiens
agtagggtccctagcacgtccttgccttcttgggagctccaagcggcgggagaggcaggcgtcagtggctgcgcctccatgcctgcgcgcggggcgggacgctgatggagcgcgccatcagcccggggctgctggtacgggcgctgctgctgctgctgctgctggggctcgcggcaaggacggtggccgcggggcgcgcccgtggcctcccagcacctcagcgacgcgagtaccgtcggcgggcgccgtggctgcggccgaggtgactgtggaggacgctgaggcgctgccggcagccgcgggagagcaggagcctcggggtccggaaccagacgatgagacagagttgcgaccgcgcggcaggtcattagtaattatcagcactttagatgggagaattgctgccttggatcctgaaaatcatggtaaaaagcagtgggatttggatgtgggatccggttccttggtgtcatccagccttagcaaaccagaggtatttgggaataagatgatcattccttccctggatggagccctcttccagtgggaccgagaccgtgaaagcatggaaacagttcctttcacagttgaatcacttcttgaatcttcttataaatttggagatgatgttgttttggttggaggaaaatctctgactacatatggactcagtgcatatagtggaaaggtgaggtatatctgttcagctctgggttgtcgccaatgggatagtgacgaaatggaacaagaggaagacatcctgcttctacagcgtacccaaaaaactgttagagctgtcggacctcgcagtggcaatgagaagtggaatttcagtgttggccactttgaacttcggtatattccagacatggaaacgagagccggatttattgaaagcacctttaagcccaatgagaacacagaagagtctaaaattatttcagatgtggaagaacaggaagctgccataatggacatagtgataaaggtttcggttgctgactggaaagttatggcattcagtaagaagggaggacatctggaatgggagtaccagttttgtactccaattgcatctgcctggttacttaaggatgggaaagtcattcccatcagtctttttgatgatacaagttatacatctaatgatgatgttttagaagatgaagaagacattgtagaagctgccagaggagccacagaaaacagtgtttacttgggaatgtatagaggccagctgtatctgcagtcatcagtcagaatttcagaaaagtttccttcaagtcccaaggctttggaatctgtcactaatgaaaacgcaattattcctttaccaacaatcaaatggaaacccttaattcattctccttccagaactcctgtcttggtaggatctgatgaatttgacaaatgtctcagtaatgataagttttctcatgaagaatatagtaatggtgcactttcaatcttgcagtatccatatgataatggttattatctaccatactacaagagggagaggaacaaacgaagcacacagattacagtcagattcctcgacaacccacattacaacaagaatatccgcaaaaaggatcctgttcttcttttacactggtggaaagaaatagttgcaacgattttgttttgtatcatagcaacaacgtttattgtgcgcaggcttttccatcctcatcctcacaggcaaaggaaggagtctgaaactcagtgtcaaactgaaaataaatatgattctgtaagtggtgaagccaatgacagtagctggaatgacataaaaaactctggatatatatcacgatatctaactgattttgagccaattcaatgcctgggacgtggtggctttggagttgtttttgaagctaaaaacaaagtagatgactgcaattatgctatcaagaggatccgtctccccaatagggaattggctcgggaaaaggtaatgcgagaagttaaagccttagccaagcttgaacacccgggcattgttagatatttcaatgcctggctcgaagcaccaccagagaagtggcaagaaaagatggatgaaatttggctgaaagatgaaagcacagactggccactcagctctcctagcccaatggatgcaccatcagttaaaatacgcagaatggatcctttctctacaaaagaacatattgaaatcatagctccttcaccacaaagaagcaggtctttttcagtagggatttcctgtgaccagacaagttcatctgagagccagttctcaccactggaattctcaggaatggaccatgaggacatcagtgagtcagtggatgcagcatacaacctccaggacagttgccttacagactgtgatgtggaagatgggactatggatggcaatgatgaggggcactcctttgaactttgtccttctgaagcttctccttatgtaaggtcaagggagagaacctcctcttcaatagtatttgaagattctggctgtgataatgcttccagtaaagaagagccgaaaactaatcgattgcatattggcaaccattgtgctaataaactaactgctttcaagcccaccagtagcaaatcttcttctgaagctacattgtctatttctcctccaagaccaaccactttaagtttagatctcactaaaaacaccacagaaaaactccagcccagttcaccaaaggtgtatctttacattcaaatgcagctgtgcagaaaagaaaacctcaaagactggatgaatggacgatgtaccatagaggagagagagaggagcgtgtgtctgcacatcttcctgcagatcgcagaggcagtggagtttcttcacagtaaaggactgatgcacagggacctcaagccatccaacatattctttacaatggatgatgtggtcaaggttggagactttgggttagtgactgcaatggaccaggatgaggaagagcagacggttctgaccccaatgccagcttatgccagacacacaggacaagtagggaccaaactgtatatgagcccagagcagattcatggaaacagctattctcataaagtggacatcttttctttaggcctgattctatttgaattgctgtatccattcagcactcagatggagagagtcaggaccttaactgatgtaagaaatctcaaatttccaccattatttactcagaaatatccttgtgagtacgtgatggttcaagacatgctctctccatcccccatggaacgacctgaagctataaacatcattgaaaatgctgtatttgaggacttggactttccaggaaaaacagtgctcagacagaggtctcgctccttgagttcatcgggaacaaaacattcaagacagtccaacaactcccatagccctttgccaagcaattagccttaagttgtgctagcaaccctaataggtgatgcagataatagcctacttcttagaatatgcctgtccaaaattgcagacttgaaaagtttgttcttcgctcaatttttttgtggactactttttttatatcaaatttaagctggatttgggggcataacctaatttgagccaactcctgagttttgctatacttaaggaaagggctatctttgttctttgttagtctcttgaaactggctgctggccaagctttatagccctcaccatttgcctaaggaggtagcagcaatccctaatatatatatatagtgagaactaaaatggatatatttttataatgcagaagaaggaaagtccccctgtgtggtaactgtattgttctagaaatatgctttctagagatatgatgattttgaaactgatttctagaaaaagctgactccatttttgtccctggcgggtaaattaggaatctgcactattttggaggacaagtagcacaaactgtataacggtttatgtccgtagttttatagtcctatttgtagcattcaatagctttattccttagatggttctagggtgggtttacagctttttgtacttttacctccaataaagggaaaatgaagctttttatgtaaattggttgaaaggtctagttttgggaggaaaaaagccgtagtaagaaatggatcatatatattacaactaacttcttcaactatggactttttaagcctaatgaaatcttaagtgtcttatatgtaatcctgtaggttggtacttcccccaaactgattataggtaacagtttaatcatctcacttgctaacatgtttttatttttcactgtaaatatgtttatgttttatttataaaaattctgaaatcaatccatttgggttggtggtgtacagaacacacttaagtgtgttaacttgtgacttctttcaagtctaaatgatttaataaaactttttttaaatt

SEQ ID NO: 1885 - DNA, 1839 bp, Homo sapiens
agcaggggtggtcgccatggagactcgtggccctggcctggcggtccgcgctgagagtcgccgactagtcggcatcgggcctcgggcgcccccggggcgggttgggttgcagcccagcgggcggctggaccgccgcggtggggcggggacaatggggtacaaggacaacgacggcgaggaggaggagcgggagggcggcgccgcgggcccgcgggggtctagactgccccccatcacaggcggcgcctccgagctggccaaacggaaggtgaagaagaaaaaaaggaagaagaagaccaaggggtctggcaagggggacgataaacatcagagtcagagcctgaagagccagccgctttcttcctcctttcatgacatcttaagtccttgcaaagagcgtggcccgaaaccagagcacagacagagcaaagtggaaaagaagcacctcccttctgactcctccaccgtcagcctccccgactttgccgaaatagagaaccttgcgaatcggatcaacgaaagtctgcgttgggatggaattcttgctgacccggaggcagagaaggaaaggattcgcatctataaactgaatcggagaaaacggtaccggtgcttggccctcaagggcttccaccccgaccccgaggccctcaagggcttccaccccgaccccgaggccctcaagggcttccaccccgaccccgaggccctcaagggcttccaccccgaccccgaggccctcaagggcttccaccccgaccccgaggccctcaagggcttccaccccgaccccgaggccctcaagggcatccaccccgaccccgaggccctcaagggcatccaccccgaccccgaggccctcaagggcttccaccccgaccccgaggccctcaagggcttccaccccgaccctgaggccctcaagggtttccacactgaccccgaggccctcaagggtttccacattgaccccgaggccctcaagggcttccaccccgaccccaaggccctcaagggcttccaccccgaccccaaggccctcaagggtttccacactgaccccgaggccctcaagggcttccaccccgaccccaaggccctcaagggcttccaccccgaccccgaggccctcaagggcttccaccccgaccccgaggccctcaagggcttccaccccgaccccgaggccctcaagggcttccacactgaccccaatgccgaggaggcccctgagaacttaccctacctctcggacaaagatggcagctccagccacaggcagcccacgtcgaaagccgagtgccccaatctctgttttgaaggaaaccttaccccaaagcttctacactctgacttagctcctactctgctggagtgaaaatctacccacgacgctcacaaacttataattcctcctcaccacaagtttatgtgttaaaaaccatcatcataaaaggaaatgagacccgtatctgaaggaaacagatgttcggtacacggacgacgccgactctcccatcaccaagctgccctcggttgcccaggagagccacagtgccttgagaacataagcaatttagtgaacagagttcttttcagaatttcctttttcttaagtaagcatctctgttacttaatttctcaccacagctagatgtctataatctgccccaaaaagaaaagaaagcgtgtagatgatttacctcttaagtctcaatctcatggtgaaactcctcacacggtacctgcttctgttggccggaggacgatgccctgaacctcttggagcctttttctgttttaattaaatgcatggcctgcctttatatggcctcaaat

SEQ ID NO: 1886 - DNA, 3170 bp, Homo sapiens
tcactggcttgtcgaggctccgatggctcagctcactggcttgtcgaggctccgatggctcagctcactggcttctcgaggcccccggcggctcagcacactggcttctcgaggccccggcggctcagctgactggcttctcgaggccccggcggctcagctgactggcttctcgaggctccggtggctcaccgcactggcttctcgaggctccggcggctcagctcactggcttctcgaggctccggcggctcagctcactggcgtctcgaggctccggcggctcagctgactggcttctggaggctccggcggctcagctcactggcttctcgaggctccggcggctcagctcactggcttctcgaggctccggcggctcagctcactggcgtctcgaggctccggcggctcagctgactggcttctggaggctccggcggctcagctcactggcttctcgaggctccggcggctcagcgcactggcttctccaggctccggcggctcagctgactggcttctcgaggctccggcggctcagctgactggcttctcgaggccccggcggctcagctgactggcttctcgaggccccggcggctcagcgcactggcttctcgaggccccggcggctcagctgactggcttctcgaggctccggcggctcagcgcactgcactggcttctcgaggctccggcggctcagcgcactgcactggcttctcgaggctccggcggctcagctcactggcttcacaaggctccggcggctcagctcactggcttctcgaggctccggcggctcagctcactggcttctcgaggctccgacggctcagctcactggcgtctcgaggctccggcggctcagctcactggcttcacgaggctccggcggctcagctgactggcttctcgaggctccggcggctcagctgactggcttctcaaggctccggcggctcagctcactggcttctggaggctccggcggctcagctcactggcttctcgaggctccggcggctcagctcactggcttctcgaggctccggcggctcagctcactggcttcacgaggctccggcggctcagctgactggcttctcgaggctccggcggctcagctcactggcttctcgaggctccggcggctcagctcactggcttctcgaggctccggcggctcagttcactggcttctcgaggcttctggaggcttcggtggctcagctcactggcttctcgaggctctggtggctcagctcactggcttggaggccaccttctcggtaccagcatagcacgtttccattcagtgggttcctcagtctctcaggaacacacgtgattcctaagcacctccgtgcagtttctctgctaatcctggtgtgtagtctgtgcagagaacagtgctgggagagaccgatgtctagtggcgggttgtcccctctctgtcgcctcacctctctgttttgtgggagctgaaggcaaagcgcctaggcctgtggagggtggagtgtggagggttgctgcaggcacctgggggaacaatttggtcagttcggcatccccctcgctaattgttaaactaccctgctgtggctgaggggcaggaacaatgcagccactgatgtagtgtcccacagttgagcggtccctccctgagactgccctggggtgccatctcgcgcccttgctctgctcacagatcagtcgcatcgaatacattcattcaaagaacttcatccaccgggatgtgaagccagacaacttcctcatgggcctggggaagaagggcaacctggtgtacatcatcgacttcgggctggccaagaagtaccgggatgcacgcacccaccagcacatcccctatcgtgagaacaagaacctcacggggacggcgcggtacgcctccatcaacacgcaccttggaattgaacaatcccgaagagatgacttggagtctctgggctacgtgctaatgtacttcaacctgggctctctcccctggcaggggctgaaggctgccaccaagagacagaaatacgaaaggattagcgagaagaaaatgtccacccccatcgaagtgttgtgtaaaggctacccttccgaatttgccacatacctgaatttctgccgttccttgcgttttgacgacaagcctgactactcgtacctgcggcagcttttccggaatctgttccatcgccagggcttctcctatgactacgtgttcgactggaacatgctcaaatttggtgccagccgggccgccgatgacgccgagcgggagcgcagggaccgagaggagcggctgagacactcgcggaacccggctacccgcggcctcccttccacagcctccggccgcctgcgggggacgcaggaagtggctccccccacacccctcacccctacctcacacacggctaacacctccccccggcccgtctccggcatggagagagagcggaaagtgagtatgcggctgcaccgcggggcccccgtcaacatctcctcgtccgacctcacaggccgacaagatacctctcgcatgtccacctcacagaatagcattcctttcgaacaccacggcaagtagctgctcgtctcccatcggaaggcagcactggattcctggtcgggtggcttccagtggtcttcagtctgtcgtgcaccgatgagaactctccttattgctgtgaagggcagacaatgcatggctgatctactctgttaccaatggctttactagtgacacgtcccccggtctaggatcgaaatgttaacaccgggagctctccaggccactcacccagcgacgctcgtgggggaaacatactaaacggacagactccaagagctgccaccgctggggctgcactgcggccccccacgtgaactcggttgtaacggggctgggaagaaaagcagagagagaattgcagagaatcagactccttttccagggcctcagctccctccagtggtggccgccctgtactccctgacgattccactgtaactaccaatcttctacttggttaagacagttttgtatcattttgctaaaaattattggcttaaatctgtgtaaagaaaatctgtctttttattgtttcttgtctgtttttgcagtcttacaaaaaaaatgttgactaagg

SEQ ID NO: 1887 - DNA, 2242 bp, Homo sapiens
aaagtactgtgcattttatgtactgcttgactacaacatcgtttgctttgctcttttaagagcctgtgccgatggaggtgccaaccgcttatatgatatcaccgaaggagagagagaaagcctccaacttgaaactctcctcgaggcccccagccaccagtcatctcatcaggacaccgaaagacacccattactgtggagcttccaagggtcttggcaactcttttatcggaaacgagagctttttgcctgaattcatcaatggagactttgattctattaggcctgaagtcagagaatactatgctactaagggatgtgagctcatttcaactcctgatcaagaccacactgactttactaagtgccttaaaatgctccaaaagaagatagaagaaaaagacttaaagggaaagcacaggttgcatgtagacactggaatggagggtgattggtgtggccttattcctgttggacagccttgtatgcaggttacaaccacaggcctcaagtggaacctcacaaatgatgtgcttgcttttggaacattggtcagtacttccaatacctacgacgggtctggtgttgtgactgtggaaactgaccacccactcctctggaccatggccatcaaaagctaacctgttgactggcatccataagtgtgcctctgccttatctcatttctcaacagttcattgctcaacaagaacgattcacctgggtttgcaagaatctaaacctctctaggggaagcccactgggtttaaagatgttagtgtttagataatacaggtaacattataaatgacagatctcaattttatagtagtgggaaagatacatgctaagaaagcaaataagctctattatattcggttggaacctaatgggaatcattccactatacaattcagtactgattattcttcttacattattaatcattccatttatcctagaaaattgtttttaatttgaatcagagaaaactgttgaggttcctcttggagtctagaacatccttaaatgtctaacaacaagggctacctctgagtaccttttagtattagttttctgtatatgatatatattatcttatactgaaaaaaaattcctttcagattggggtgttagaagtgcaccaggtcactctgaccttattactgtctttggtattgtcttaaataaatcaagaatcattgacctaattgttaaatttaaaaataggtagttagcaataggtggaaagagaaatgatgtgaaagataaatgatgattcgtggagccctactcacacattaacccccaaattcaaaagtaagaatgcaaaagtctagagggggtaacagtctgcatcatcatcacaacctaaatggagaaagctgtgcagaggaaacttaagcataaaaattgaattcgtttctgacataccttagactgaaaaactgttggttcatccagaagtgtattcatattaccagaaaatgagtttgtctatggggatacatgaacttcatatactaaggagcctaactccaaagcctgcgttctcatcccagtctgatattcacctaagtttccggacccttttccttagctgtaaaatggaagcggttggactgatggtgtctgaggttctttcccacactgaaattctaaatattgacacttagcagtcatagggctgataatacacacagttactgacttagcctaaacaacctggtgcatcgaaatgtattcacctttcttttgtaaagagaccatcttctatcttctttccacctctctctgttttatgaaaccaactgttgacatacaaaccatgattgaaggagaacctgtccaacatgttttatgtacacaaatccctatgttgctatataaaagtgaaagtaactgttttcttcttggtgctatgacagtgtgagactcaggttgtctgtagagaatgaaaggagcagtggcccgcgtgattgtggcatttaaggagcagtggcccatgtgactgtggcattttcggcacttttcattactttctgcttgaccggaagttgaggcttagctatgtttccatcttcagtttctgaagactagttatatattccttactagaaatatattcataatatataaaagaaatatatctgtgattttaaaattttgctaccaaagaatgcatgttctgtgtgccctgaaaatgttaccagtgttaataaatggatacttatcaaaaaag

SEQ ID NO: 1888 - DNA, 2002 bp, Homo sapiens
ctcaaggacgcccaccccaagctccacgtctacaagaaggaggcgttccccgaggccttccactacgccaacaaccccagggtcacacccctgctgatgtacagcgaccttggctacgtcatccatgggagaattaacgtccagttcaacaatggggagcacggctttgacaacaaggacatggacatgaagaccatcttccgcgctgtgggccctagcttcagggcgggcctggaggtggagccctttgagagcgtccacgtgtacgagctcatgtgccggctgctgggcatcgtgcccgaggccaacgatgggcacctagctactctgctgcccatgctgcacacagaatctgctcttccgcctgatggaaggcctactctcctgcccaagggaagatctgctctcccgcccagcagcaggcccctcctcgtgatgggactgctggggaccgtgattcttctgtctgaggtcgcataacgccccatggctcaaggtcagagacccagaaggcagaggcgggagggtggccccacgctccctgaccctccaccctgatgtcccagctacagtcctaggcaaccagaacagagctgccaggccccgccaagcaggtgactcccactgacctggctgccccagagaggccatcacccctgagatcccgaggctgacccttccagcctctctgctctgggcttggaggaggtctttccagagcagaccacccggaccagtggccagaattcccaccctcccccaaaagccagaactccctcagcctctggccagagctgctgcctcccctccttcctgccatctctgtgctccactgggatagctcggaaaccgtcacctgcggtgcatttgggaggagagctctggggctgtgttcctggaactctccaggagcctcctaggacacgcatgaggtgtgtttggtaggagagcaccagggctatattcctggaactctctggaagcccacctctgaggacacgcgtggggtgcatttaggaggagagctctggggctgcgttcctggaactctctggaagcccacctccaaggacacgcgtggggtgcatttgggaggagagctccggggctgcgttcctggaactctctggaagcccacctccaaggacacgcatggggtgcgtttgggaggagagctccggggctgtgttcctggaactccccgggagcctccgaggacagtgctcccttgtctgtctgtgcagccacagcctcctaggccaagcagaagaaagtcattcattcatcccgaaaatatgtaacgggagccagctccatgccacgctctggtctgggctcaggatatgcagcgaacaagacagtccaggacctgtcatttaaaggtgcaagaaagcagagaacacaaaagcaaatgaatccacgcacagagtgctcagatgcttgtgatggcaaagaagagacggccacaggcagggacgaggcaggcgcgaccttgtcatttgcccggcctggaatggcctctctgagaaggtggatttagggagaaaaccagaatgacagacacaccagaagaagccagacacaccaggcaggggaaagagccagggacaggcccgcggtgggacaggttcggcgtgtttgggatgagacagaaggccagtgtgcctgcaggttggcacagagcgaggctctaacaggagctgaccacagccccaaggcaggaggttgtgggatgcacagcggggagccccaagctgaggttacacagggtctgaggttgatgattaaatgagtggctcccactgctgggccggggacagaaacgggagcaggaagtggccagtttggaggtggctgcaggacccagccggacattccagtggcggggtggagaagctgcaatgtgcacagattccaaatacctttaagaggcacgacattcgaggtttgtggacagattatgtgggagggtgaagaaaatgcaaaaatgaaagatgggtcc

SEQ ID NO: 1889 - DNA, 2446 bp, Homo sapiens
ctttggcctacccccgttggctccgctgccccaggtcgatgagtcccctgtcaacgacagccatggccgggctcccgaggagggggatgcagaggtgatgcagctggggtccagctccccccctcctgcctgcggggttcagccccccgagaccacccgccccgagccacccccgcccctcgtgccgccgctgcccgccggaagcctgcccccgtaccctccctacttcgaaggcgcccccttccctcacccgctgtggctccgggacacgtacaagctgtgggtgccccagccgccgcccaggaccatcaagcgcacgcggcggcgtctgtcccgcaaccgcgacccggggcgcctcatcctcagcaccatccgcctgcggccgcgccaggtgctctgtgagaagtgcaagagcacgctgagccccccggaggccagccccggacccccagccgcgcccagggcccgcaggaggctgggcagcggcccggacagggagctccgcaagccggaggagccggagaacggcgagcccacggctgcggccaccgccaggaggagcaagagggagaggcgcgaggaggacagggccccggcagagcaggtcccgcggagcccggtcatcaagatctcctacagcacgccccagggcaagggagaggtggtcaagatcccctcccgcgtgcacggctctctggagcccttccgtccccagcaggccccgcaggacgacggcagccaggaccccgaggtgctggacagagagtcccgggaccggccgtcctgcgcgccctcggcctccatccccaagttgaaactgacacggcctgtgccggccggcgcggacctgccgccccctaagatccgcctgaagccccaccgtctggggacagcgagcacgagcccgtgtaccgggccgagctggtgggggagctgaacgggtacctgcgggacagctcgccggcgccctgtgcggacggccctgccggtgggctggcggacttgtcttctggaagttcgggtgaggacgatgacttcaagagctgtccccagggtccacagggacgcgagggcttggcttttctcgtcagctgccctgaggggagagcggactgtgccagtgagtcggcgtgcagcagcgacagcctggacgaggccagatcgtccggctcggaagggacgccggcagacacgggtgacctctcgcctggccacggcgcgtcagcgccctcggtgtccagagaggctcgccaaacggtgccgcccctgacggtcaggctgcacacacagagcgtgtcggagtgcatcacggaggacggcaggactgtggccgtgggggacatcgtctggggtaagatccatggttttccttggtggccggcgcgtgttcttgacatcagtctcggccagaaggaggacggagagccgtcttggcgagaagcgaaggtctcgtggtttggttctccgactacgtcgttcttgtctatttcaaaactctcccctttctctgaatttttcaaactgagatttaatcgtaagaagaaggggatgtatcggaaagctataaccgaggctgcaaatgccgcaagacacgtggccccggaaatcagggagctcttaacccagtttgaaacgtaactggttccctgaccaggtcaccgacgatgagggcgcacctgctgtcctggagcttccgatctctgttcggggaccctgtgagccttctggccggctgcgtgcagagcccactgggcacggtggtcggcctggtgtgaggccccccggggaccggcagtgtgtccagggaggggatggccctgagcccagcggctcctcccgctgagtgtatttcttcccaccactcagcgcatggctgccctggctcacgaggcagtcgggactcgtgacttgctggctgctggctgctgctgcctcgcgcgctggggttccatggaggaactgggcctgccgccccggcctcacctgctgcccgcatgctggggtcccatggaggaaccaggcctggcgccccggcctcgcccagcggctggtgtgggcagctgttccctgcctcgcagtgtcctggaggcagctgtctcgcagactcagcttggtctcccgcaggcttcagaaaaacccaattgcacgtgtgggattcttccccagcccttgggtgcggggtctctgtgcacttgagagctgggggacccacccaccgtctcccactccaagttcatcccagagcgtggggcccgctgggcacctggcacctggcctgcagatgctgctacgagtgaccagtgctgtgtggaggaggccaagggcggcccctgggaaaccgggcttcaacagtacaaggaaaagaaacttgctctgttttgtaagagcgtgttccttttcctcttttttgtcactttaaagaccaaaaagaataaagaaagaaaag

SEQ ID NO: 1890 - DNA, 1623 bp, Homo sapiens
agctctcagagaggtgccttagccctggatcccaaggcatttccacttggtgatcagcactgaacacagaggactcaccatggagttggggctgtactgggttttccttgttgccattttagaaggtgtccagtgtgaggtgcggttggtggagtctgggggaggcttcgtacagccgggggggtctctgagactctcctgtgcggcttctggattcaccttcagtgcccacaacatgaactgggtccgccaggctccggggaagggactggaatggatttcaaagattagtgaaaatggaaataccatatattacgcaaactctgtgaggggccgattcaccgtctccagggacaacgcccagaacacactgtatctgcaaattaacaggccgagagaagacgacacggccgtatatttttgtgcgagggatgcggatgtgtctggtatctctgtcttctggttcttcgatctctggggccgtggcaccctggtcaatgtctccactgtctcctcagcatccccgaccagccccaaggtcttcccgctgagcctctgcagcacccagccagatgggaacgtggtcatcgcctgcctggtccagggcttcttcccccaggagccactcagtgtgacctggagcgaaagcggacagggcgtgaccgccagaaacttcccacccagccaggatgcctccggggacctgtacaccacgagcagccagctgaccctgccggccacacagtgcctagccggcaagtccgtgacatgccacgtgaagcactacacgaatcccagccaggatgtgactgtgccctgcccagttccctcaactccacctaccccatctccctcaactccacctaccccatctccctcatgctgccacccccgactgtcactgcaccgaccggccctcgaggacctgctcttaggttcagaagcgaacctcacgtgcacactgaccggcctgagagatgcctcaggtgtcaccttcacctggacgccctcaagtgggaagagcgctgttcaaggaccacctgagcgtgacctctgtggctgctacagcgtgtccagtgtcctgccgggctgtgccgagccatggaaccatgggaagaccttcacttgcactgctgcctaccccgagtccaagaccccgctaaccgccaccctctcaaaatccggaaacacattccggcccgaggtccacctgctgccgccgccgtcggaggagctggccctgaacgagctggtgacgctgacgtgcctggcacgcggcttcagccccaaggacgtgctggttcgctggctgcaggggtcacaggagctgccccgcgagaagtacctgacttgggcatcccggcaggagcccagccagggcaccaccaccttcgctgtgaccagcatactgcgcgtggcagccgaggactggaagaagggggacaccttctcctgcatggtgggccacgaggccctgccgctggccttcacacagaagaccatcgaccgcttggcgggtaaacccacccatgtcaatgtgtctgttgtcatggcggaggtggacggcacctgctactgagccgcccgcctgtccccacccctgaataaactccatgctccccc

SEQ ID NO: 1891 - DNA, 2279 bp, Homo sapiens
agtttatgcgtgcttccggtccgcgagccctgagagctaacttggggtcttttcccaaggtggatgtagaagcgggctccggcgtcccactctcccttccatatgggcttagcgtctgggtcactgagaacgacgtctgaatagggccctgggtccttgccatggatgaatgtggttcccgcatccgccggcgggtgtctctccccaaaaggaaccgtccaagcttggggtgtatttttggcgctcccaccgcggccgagctcgagcccggagatgaggggaaagaggaggaggaaatggtggctgagaacaggaggcggaaaaccgcgggcgtactgccggttgaggtacagccccttctactctcagattccccggaatgtctcgtccttggaggtggtgatacaaacccggacctcctacgtcacatgcccactgacagaggggtgggagaccaggtacggaggacttggaacttgaaactgcaaacttttggcatccttcccagatgcaaagagttgaccagttttatcgccttcgtttacttctctcgtcttcgttaccactgttaatcggcacttaggagcctaatgacagtgaagtggacatgtttggtgactatgatagctttactgaaaactcctttatagctcaagttgacgacctggaacaaaaatatatgcaactccctgaacataagaaacatgctacagactttgccactgaaaatctttgctcggaaagtatcaaaaacaaactcagcattactaccataggcaaccttactgaattacaaactgataagcacacagagaaccagagtggatatgaaggtgtcactattgaacctggagctgatcttttgtatgatgtaccttcctcacaggctatatactttgaaaatttgcagaactcttcaaatgatttgggtgatcattctatgaaagaaagggattggaagtcatcctctcacaacactgtgaatgaggaactgccccataattgcatagagcaaccccagcaaaatgatgagtcctcttccaaagtcagaactagttcagatatgaacaggagaaaaagtattaaagatcatctaaaaaatgccatgactggaaatgcgaaggcccagacaccaatattttctagaagtaaacagctcaaagacactctcctatctgaggaaattaatgttgctaagaaaacaattgagtcatcatcaaatgaccttggtcctttttattcattacccagcaaagtgagagacctttatgcccaattcaagggaattgaaaaattatatggtaatgctttttgctggaataaaaaaatttttttcctatcattaccataatattagtgcaagtaaatagaagcaaatgctttcatggtccatactgtttctcattttgaaaacaaaagatcagtgatctctcagccccttccattcctacctgtcctgctaccactgaacctctttccttccctcacagtcacacttatcaaaccagttatcctttctgtctgtttccttacctgacataattcctctaattcctcatctataagaaagggataataagttgttagcaagtcagattctggttcaaagacatgccaaattcaatgttggtaatgattttcaataattatattggtagcttctaagtaagaactttagtaaattaccccactctaattctgggttctgtgctctcattctctcacttaagatctgatgactgagacgtctaaacacagtgttacttttaatgtttaccttacctgacttctcaataacttacctgatgctattgactacacccttcttgaaattcttgtttctggatgtccttacaaccactcctgttttttgaccccgattgtctagtagagatcctcagctttcttagttgtatttccttggctggctctgtcttctctaccaaaacctagctgttgtggtatgtctttgacactcacatgtcttgagtgaaagaagtcagttattagtaatactgttgattaaaccaaacatctttccccccacaccagcagccgcagccacctctccccacgggtgcatccctgccaccacccagatgctctgccttgtgctgcctttcccaaagctagacatctttaaagacagctgcaattaagttttaagtcagggatgtccaatcttttggcttccttgggccactttggaaaaagtattgtcttgagccacaataaaatacagtaacacgatagctgatgagccaagaaaaaaaaattgc

SEQ ID NO: 1892 - DNA, 1966 bp, Homo sapiens
cagtttcgaggtctatggtccactaggaggggacctgtgacactgccttgctgtccatccaatgtaaagaggaaaacactggctgcaaaccccagaagccagctccacgccagctctgttccacgtctgcttctgggtccagacccacctgtgaggcagacaggatagcagaggtaggagacagagaccgattcctgatggcttcttttgcttaagccactttgagttggatttctgttacttgcaaccatgcgccctgactcgaggagaaaagctacccactatgttgaaaatgcagaatcatcacacaaatgggcaagttccacagtccgcagtgtgatccaccccaaggcccaggcgtccacagcaacctatctagactgggacaccaaggaggagagctgtcaagtcagaggggagcagaactaccagggtctgcaccccatcagcacctgcagcagagacagacagactctggcggatgcagtggccagttccccgaaaggaagggggctgtgctgtgcaaggcgggccctggatatgaagctaaggaataggagtgtcctggtcactaggaatgaacgtgcttcctgaattaactaagagctcgctgacaccccatgtgggtagcagagatcagtgctgggcccctctgaggccgggcttcctgagagctcatccgtgaacggcggactgagctcctaaatggcccaccctccgttcgccaaaaggagaagcattctgaagcagaataaaggagggcaaatgttccacacggcctcggagtttcctgggaggtccagttccacagccagacagtgaaggcctgctggaccccacttctctcgccctctgaagcccacagcatccaggccatgcctccaagtgagagggtcctccatggaactgaggagatgtttactggttcctcccagcttcctctcctgcgagcctaccacccactctccacacaggagccaatgaccatccgcaaacagaacggatcctgtccctccaccagctgcccactctgggtctggctctgtcaccccagctggagtgcggtggcgcgacctcggctcgctgcggcctcggcctcctgggctcaggtgatcctcccgccacagcttcccaagaaagggtggttaagggtgatacaggctgtgacctggtaccatggtttgagagtggccagatcttctggaggcgagctggaccacgtgaggagccctgtggggagggagctccctagggataacatacgaaccctgcagggccccctgcctcgcccgctccgagtgctgcaacctggatgcgacaccagcaagagtgcaaatgaagcaaatctttgtaaggaaaggatgacttttgctggctgaaattcatttttaaaattaccatacagtaaaattaactcttgtgagttttaacacgtggagattcagctccaccacaatcagaatacaggacggtcccaccactcccaaaactccccacctcagcccctggcaaccactcatctgtcctgcaacaatatggctttggctttttgagaatgtaatctcaatgtaattatacattatataaccttgagactgactttttctcagaataatgtcttggagatcaatccaagtttccatgtgtatcaatggttcatgccttttgtttcctctctgaacgtcctgaaagggcagtggttcattcctttctacggctgagtcatacttcaccgcacagacgtaccactttgtttatccatcacccaatgcagaacattgggattgcttctagcttttggcagttatgaacggagctgctataaacatatgtactagttttggtgtagacataagtttcatttctatttggatcatatggtaagaggacgtttagcttcttgagaaactgttttcctgagtggttgcaccattttgcattcctaccaataaagtatgagagatcc

SEQ ID NO: 1893 - DNA, 2181 bp, Homo sapiens
ctctcccgggtttcggggtggccggggcgcctcctcaccggggcggccgcagagcagggaccccagtgcctcccatggccgccccgacaggggacgttcccgcccggggccattctcaccgcatcgcgcccgggcgggagcagcgctggggcggccggggctggtctcggcggctcctggcccaggttcgtggctctcgcgttccccggggtctgggcctgcgccggcggcggggcgtcttccacccagtgatgtggcgatgcctcccgggctcatgggggaatgtcgggtcggcttcgcgctgggcccacggcctcctcccggtgagacgccctcagggctcccccatctcagcgcccgggacgccgcagccatctcggtgggctgaagggaagtaagattcttgcagagggcgcctgccccagaaaacaaatttcatgtacaggtttcaaagaggccaagacgtccgtggcttccttcaggagaaagcggcaaaacccacgcccagatccgttgtgctttcagcttttcaccaggaaactcacttttctatgtaagagcaagcgagttccacagcgcggggaggccagtggagaggagcgcggccttgcctggctcatgtcctgtttccagcttgccctgaaaacgaattactaaatccatggaggaagagcttggggcctgcctggtcctcggccacggtggggctggggcctgtgactgcgtgtgcagagggtccgcgcccagggcccgggaaaggggctgcgctgccccgagcgagtccccgggcgcccccagcctgctgcagccacctcgggctccacatttcggccccttctcctctccgctgctctgggctcagccaccaagctccacgctgtgggcagaatccactggggcgcaggaaacctcagcttccgcagcccacctggccttcgcagtcttcctctccagggttttatttcaacatggccttttctgctgcgactcagctgtggtaggggccaagtttgggtgtgtgaggccagggaggtgcgttgtgttctcgcggaagagagagacgcagcgagggagcccgggcacacggacccagctcaccaaccgcagccaaaccaccaattctgtcccgtggcccttggtgaccggtgacagggagggaaggaaacgtggccagcttccgccagaccacaggcgaacacaggtggggcggcccactggcttgggcctaggagctgcaggagcaggggccacggtccagcctgacgcccctctcttggggcaggaagttccctctgtctgccatgagcaggggcacttgggagggcccagcataggacctcaggagctcccggagcagcctcagcagccgcaacccctcgaccttgtccagcatcacgccccggtgccagggagacagaccgaagaatcccaccactgtgcaggagaggaagcctactttaattctgttcttgaagtaatggcaggtgaagattcgtatgtcataattaattcctcacttcttaggaatcgcagcgattagctctgtcattcctttgttatcagagagaactgtgagtcctgttattctcactgcttcgccatctgtgagcatgcgcagccctcggctaagttttctaaaaggaacatcacagcgacttccctgacctcagccaggacaaaaggtgaagtctagcacgacgacccgtgcagcctgcatggctggaggccctcccttcccggtctctgggcacaggtgcggggccgtgcgcgcgcgtgcgcctccacggttcctccgggcacaggtgcgggagctgcgcgcgtgcgtgctcctccagggttcctccgggcacgggtgcggggccgtgcgcgtgcgtgcgcctccacgggtcctccgggcacaggtgcggggccgtgcgcgtgcttgcgcctccatggttcctccgggcacaggtgtggggccgtgcgcgtgcgtgcgcctccacggttcctccgagcacaggtgcggggctgtgctcggagcgcctccaggttcctctgggcacaggtgcagggccgtgcaccaagtgcctccacggttcctgtgaaggagtgcgatggccctgtaatttttgtcctcagctccggtttaccacagcttaggcctttggggtcattttaaagtagtaaagaagcttgaaaggt

SEQ ID NO: 1894 - DNA, 2301 bp, Homo sapiens
ggaaggtggcgcggccaccagtaacatgatctctagactgggacggtggggttcctgccggctgtattcgggccttggactggactgagaagctacggtggagaccatccatggaaaagaacccccctgatgatacgggccccgtgcacgtgcctttggggcatattgtggccaatgagaaatggcgcgggtcacagctggcgcaggagatgcaagggaaaattaagctcattttcgaggatggcttgacaccagacttttatctgtcgaacagatgctgcattctttatgtcaccgaagctgatttggtggcaggaaatggctacagaaagaggcttgttcgggttagaaattccaataatcttaaaggaattgtagtcgttgaaaaaacccggatgagtgaacaatacttcccagccctacagaagtttactgtgctggaccttggaatggtgctgcttccagtggccagccagatggaagcatcctgcctcgtcatccagttggttcaagagcaaaccaaagaacccagtaagaaccctcttctcgggaagaaacgggccctgctgctgtctgagccttcgctccttcgaaccgtgcagcagatcccaggagttggaaaagttaaagctccccttctcctccagaagtttccaagcatccagcaactgagtaatgcttccattggggaactggagcaggtggtcggacaagcagtggcacagcagatccatgccttcttcacgcagcccaggtgagggctggcctcagggccacggcatcttctcccgagaccacaaacaccaggatcttgttttcagctttaaaaaccaagagaatgggccgggtgcactggctcacgcctctaatctcagcactttgggaggccgaagacagcggatcatctgaggtcaggagttcaagaccagcctggccaacatggagaaacccctaaaaataggaacaattagccaggcatggtgacaggtgcctgtaatcccagctacttgggaggccgaggcatgagaatcacttgaacccgggaggcggaggttgcagtgagctgagatcgtgccactgcactccagcctgggcaccagagcgagactccgtctcaaagaaaacaacaaaaaaaaaaaaaaaaagaaaaaggattttctccagcagcaaccagtgaaagatgaggcgaggcttgaatggagcccgtgggtcgtcctgccttagcgtctgagttcagcttgtgaagttagtgggccgcagagggcactgccttcattctgctaagacgaaaagggctggtgggatcttcgcaagagagtcagggactcacactcagcaaaaagcattagggccgattttaatgtgcgaccttgacctgcatctgtcatggaaagtgccttctaaaaagcttcagtggtggatgtgaccatctgaaggaaacaaatgtacaaggaagcactgtgtatcctaagccctgggttcccagagtttcacctgctgttcatcaggtctggccttcatatacccgtactgcgagggctgtttccaatgtaaataaataactgcgcaacagttccttcatcctttcctttgttcctccctccccccggccttttttttttggcagatgtacagtttgtttataatcactgcgtatgtcttctgcacacagaaagtatgaagtctgaagttcccacttaaagttgaaaactcaacggccgggcatagtggctcacacctgtaatcccagcactttgggaggccaagcggggtgaatcacaaggtcaggagatccagaccatcctggccgacatggtgaagccctgtctctactaaaaatacaaaaattagctgggtgtggtggcacacacctgtaatcccaactactcaggagactgaggcacgagaatcgcttgaacccaggaggtggaggttgcaatgggccgagattgcaccactgcactccagcctggatgacagagtgagactccatctcaaaaaaaaaaaaaaaaaaatttaaagttgaaaactcaacatgcatgaggcagaacaggctgtgtttgtatatgaaaggcccaacaatggaaggatacaagaaaatgatggcagcagctgcatctagtgagggaagcaggggctggggatcaaaaggtacaaattgcccattcaaaaaatagacacaggccaggcacagtggctcacacctgtagtcccagcactttgggaggctgaggtgggaggattgcttgagtccaggatttcgagatcagcctgggcaacatggcaagaccccatctctac

SEQ ID NO: 1895 - DNA, 2702 bp, Homo sapiens
aatgctgctgaggacacaacaggagactcgacagacgggagaattcccgaaaaaggcctgctgagaggacaggcttccccagctctgaccacagcctgcagcccagatgacccaggacagggatgcatgaaggagcatagtcagagcagtgcccgccgcggtattgaaggtgggagtgccacctggaggccccagggacacagatgtgagtagctgggcagagggctggtggctctgcacagagcccagtgggaaaagtgacgggggtgcagaggggccgtgggaagcccccaggccgcggtgcccgggagcagatgtgcaaagtacatgatgtggctgagccacagtcctgcctgcgggaaggcctggcaggacccgcccactcacccgtgctgagaggacagcgtccgcaggttgttttctggagtgagggtcaccaccacccccacgacgttcttcatgtccttctccatggcaaagcccttttcccgggaggccaccgcaagcacgtaccagggcccaagaagctgcattgaggcggctcccgttagggccgccagccctccagcctccagcctccagcctccaaccctccagcctcagcctccagcctccaaacctccagcctcagcctccaccctccaaccatccagccctccagcctccagcctccaaccctccagcctccagccttccagccctgcagcctccagcctccaccctccaaccatccagccctccagcctccagtctccaaccctcccgccctccagcctccaaccttccagccttgcagcctctagccttcagttctccagccctccagcctccagcttccaaccccccagacctccaaccctccagcctccagccttccagccctacagcctctaggctccagccctccagccttccaacctccagcctgcagccctgcagcctctagtctccagctctccagccctccagcctccagttctgcagccctccagcctccagccctccagcctccagttctacagccctccagcctccagcccagcagcctccagcctccagttctccagccctacagcctccagccctccagcctccagttctccaaccctacaccctccagccctgcaacctccagtctccagcctccaattctccagccctccagcctccaaccctccagcatccacccctcctgccctgaggctcctgcctgtgggactccccaagggctggcccaactaattccccactgctcatgctggtctgggctagccctggggggcccagaagctgtgtggccttaaaggaggggctggcccccgaggaccagctctccccacccccaggaggactgtacctgctcagggtccagtcttcccaaccacacggcctgggccctgggcaccgagaccaaagccagaaaagcagccagcagcaggccgcccatcctcccaggtctacactgcgccgcaagcccaggatgtgcagtccctccaggccctggagacccgtttatatggctctgaatttctccgtgttccagaatgggcatcctaaagccagccgcaccacctcccccgttcctggggacccacgctctccctcgcccagcctgggaagcagggagactgctgtccgctgccaggcccggcaggaggccaaggtcaagcccaaggagaggaaccagggcgagaacaagtggttctcaggaactgcggttttggatatcttttgtttcaatcattaaatataaaaagtccctgaaagccttttgaaaaaggctcccacctcctcctggcccacccaccattctgctttgtggcctggcctctgtcccccacagccagcacccccagaacagactgtccttttccttccacctctgcagcccaccatccggccctgctgcctcctgcctcccctccctgggaccctggcctgcttgtgcctcccaaggccccttgagagttctctgcagccccagtccgggagcagaggacagaggtgctcggcagggtctatctgagcccctgaagcccactgggaggcagccgggagggtcctcccccagtgccgtggcctgcaccctctgggattcactcccacacaccttcgctcattcatcaacaagggtgcaaggagcacgtccatgcaacaaggctccagtgcctagggccgcctgcactcacagagcttatgctgcagccctggccacctgccctgtacccacgcagcagggcctgtgaccaccagagtgcaggaggaaggcagaaaccacacagctactgggggctgggcctgcgaagactgaccgggcagtggggccacggaggtgccagccacagccatggcaagcaggagttgcccaggggctgagccacagaacaagggagcgggacacttaggcctggagccttcaggagggagccgtggctgctcgcggtaatcccagcacttcaggaggctgaggcgggaggatcacttgagtccaggagtttgagaccagcctgggcgacatagcaagacttcgtctctacaagcaagtttaaaaattagctggacatggtggcgtgctcctgtagtcccagctactcaggaagctgaggtaggaggattgcttgagcccaggaggttgaggctgcagtgagctgtgatcgtgccactcctctccagcctgggtgatggagcaagaccccatctct

SEQ ID NO: 1896 - DNA, 2778 bp, Homo sapiens
taaaagcgcagcaaggcgggctggcagaactccatccgccacaacctgtcgctcaacgactgcttcaagaaggtgccccgcgacgaggacgacccaggtaaaggcaattactggaccctggaccccaactgcgagaagatgtttgacaacgggaacttccgaaggaagaggaagaggagagctgaagccagcgcggccgtgcgctcgggagccaggagcgtgggaggggccgaggcgccagcgctggagcccccgagcgcggcttgcctggacctgcaggcctcgccctctccatccgcacccgaggccgccacctgcttctccggtttcgcttctgctatgagcgctctggctggcggccttggcaccttccccgggggcctggcgggcgacttttctttcgggaggcggccaccgacagtcgccacccacgctccccagacccttaacccctcccctggcttcgcccctggccaccagaccgcggccgccggcttccgcctcagtcacctcctctacagccgggaagggaccgaagtttgaagggaggctggaggctagccgggtgcgggtccagaggtgctgagctcaggcctccggtttcccctggtgacagccccacgtgttggcgttgaaggccttggtgccctgggaggaagcgcagagccgggggcggctcggccagcagggagctgggctgagcggctcttgggctttggggtgggtggcccttctgctgtgcacccctcacccaggcgaccttcggagcctccctgctctgcctctaagtccagccgccctgggcgtctagaacctgtgctctcgagggatttgccttgaaggggcggcgggtcggccctcagctccagcgttttccaaggaggctggctgactccaaagagccttagagcagatgggaagaaggtgggctgccagagcggcccaggtggtgggggccctttccacctccacccagcttggcccacctggctcagggccttcccttctgcttcagggaagctgccgcaggggctgggggacagagctcaggagcagctgcagtgggctccaggtgggccaggagcctgcagtgaggggatctgagacagttggcattgggtcctgtgtaaggaaggtcttgctaatggttggaactgctggtggtgggagggagaagcactgcgtgggcagaaagcgcccttgggataccagctcccttccctgtcactcagccctggtccttgatgacccccctctaggacagggcaactccccagggccccgccaccactgaccacaggagcggtgcccagcacccaggagttccccaagggtccaggtttgtgccacccacacccacactcacacccacactcacactcacactcacacccacacccacacccacacccacactcacacccacactcacactcacacccacactcacacccacacccacacccacacccacacccacactcacacacactcacacccacaccacactcacacccacacacactcacacccacacacacccacactcatactcacacccacactcacaccacacccacactcacactgacacccacactcacacccacactcacactgacacccacactcacacccacactcacactcacactcacacccacactcacactcacacccacactcacactcacacccacactcacaccacactcacacccacacacacccacactcatacactcacacccacactcatactgacacacccacacccacactcacacccacacccacactcacacccacactcacacaggctcatggaaggccacacttgttttggtctctttcccctccaaacccacagtttgagccaaagctgtgcgtgtgttcagagctcctgaacagcagcctcccgtgtaaattgaaccctgccccacccagttccttcttagggatggtatctttgtgaaggacaaggagcccccagtcactgggaagaggaattttttggcctctgtactccttagaggacctaagtgccccagtcagatgccctgagtctttgtggcatctgggactccctggagatggagacgttggtggggggggggtacccaccttgttgttgatgggggtacctatcttccctgcattttgggggagggtgggaggggtccttcccaggaagagagtggagacaggttactgttactttggagtgggacaggctggtttagcaatcctaagccccagccacgcaggtattcctgatctgcctgcagggcccctcactgcagctgccaccagtgctggaaatgagagcagggctcctgactgtccctagagctgactcatcatggccctgctgaagagtgaggtgtgtgtgtgtgtgtgcgtgtgtgcgtaagacagagagggagggagaaggaaggaggcgggggaacatggagagaaggagccaggagttgggataaacctggcccctggtcatatgtttcatcagcagtggctcctaactccacgtgccatctctgctgctgccctccacaagcaggtgagcagagtgccagttgtgttgaaggtgatgatgtcgcctaactaaactcacaaccaacccgcaatctctcttggggggacactccccataagcaatacaattaaagaagaccaggaaaggaaaataaattccttagcttatacatttaaaaagtatcccttgaacctattttaatagaatgaaatgctaaaaataaagaccaatataacatacat

SEQ ID NO: 1897 - DNA, 2163 bp, Homo sapiens
cacacagcacagccgtgtggatcccgacttgccacagctccatacagagtacaggggcaaagccttgagaagtcgcatgagagccacactcaggcaatcctactgtgaacacacctggcaatgacatcttcacagcacacgcacacccactccacaccacctcagatacactcccatgacgaccacgccacagccagacccacccaggcacagtcccggagacatttttttttttttgagatggagtcttgttttgtcacccagaccggaatggagtgcagtggcacgatctcggctcactgcaagctctgcctcctgggttcaagctattcccctgcctcagcctcccgagtagctgggattacaggaacccaccatcatgcccagctaatttttgtatttttggtagagacaaagtttcaccatgtcggccaggctggtcttcaactcctgacctcaggtgatccgcctgcctcggcctcccaaagtgctgggattataggtgtgagccactgtgcccaagccagcctggtttttgtatttttagtagagatggggtttcaccatgttggccaggctggtctcaaatgcccgacctcaggtgatctgcctgcctcagcctccaaaagtgctggcattacaggcgtgagccaccgtgcctggtcctgtccttcattttccagttaaggaaacggaggctcagagtggggaagtgacctgcccaagatcacacagctaggaaggaggcagggactggcttcccatccaggagtcctagctccagagtccatgcccaaagccttggcactaactttttttttttttgacacggagtcttgctctgtcacccaggctggagtgcagtggcgcaatctcggctcactgcaacctctgcctcccgggttcaagcgattctcctgcctcagcctcctgagtagctaggactacaggtgcatgccaccacacccggctaattttttgtatttttagtagagacggggtttcaccatgttagccatgatggtcttgatctcttgaccttgtaatcccagtactttgggaggccgaggtgagcagatcatctgaggtcaggagttcaagaccagcctggccaacatggcaaaaacccggctctactaaaaatacaaaacttaggccaggtgcagtggctcacgactgtaatcccagcactttgggaggctgaggtgggcagatcacgaggtcaggagtttgagaccagccaggccaacatggtgaaaccccgtctctactaaacataaaaaaaacaaaaaattagacaggcgtggtggcacgcacctctgatcccagctactcaggaggctgaggcaggagaattgcttgaacccgggaggcgaaggttgcagtgagccaagatcgcgctattgcacttcagcctgggtgacagggcaagactctgtctcaaaaaaacaaacaaacaacaacaaattagctgggtgttatgtcgtgcgcctgtagtcccatctacttgggaggctgaggcaggagaatcacttgaacccgggaggcggaagctgcagtgagccgagatctcgccactgcactctagcctgggcgacagagtgatactctgtctcaaaaaaaagaagggtgggaggaggcgtggtcaccagaactggagagaggagcagattgcttgacagcggctaagatttttggtagaagaatacagttaatctaaaaccacttggcagatttaacccaacgttaaactgaaaaacaaagaactgttactgcagtccatatgggtgagctgacctcctggggcacagatctgggtagagggtaaatcctacccgattgttgagttcctcaaagtgtgttggagtttgcataaagaaactgtgaggctggctgcagtggcttcatggctgtaatcccagcactttgggaagtcgaggcgggaggattgcttgagcccaggagttcgagagcagtctggacaaactgtgaaatcccatctcgacaaaaaataagagaaattagccaggcgcaactgtagttccagctacttgggaggctgaggcgggaggattgcttgggcccaggagtttgaagctgcggagagctaagattgcgccactgcactccagcctaggtgacagagcaagactctgtctcttc

SEQ ID NO: 1898 - DNA, 2354 bp, Homo sapiens
caaatatgtggctatcaaattggagctgatcaagttccggaccccgcagctgcacctgggtaccggttctacaagcagctcagcgccatagagggcgtccctcaggtctactacctactacagcctggaggacctgttcgaccttcacgcccaagacggtgctcctgatcgccatccggctgatcacgcgcatggattatgtgcacaccaagaacctcatttaccaggacgtgaagcccgagaacttcctggtggggcgcccggggaccaagcggcagcacgccatccacatcatcgacctcgggctggccaaggggtacactggtctcaggaccaagaagcacatcccgtgcagccagcacaagagcttgacaggtacggcgtgctacatgagcatcaacatgcacctgggcaaggagcagagccactgcaacaacctggaggtgctgggccacatgttcatgtacttcctgtgcagcagcctcccctggcaggggctcaaggctgacacgatcatgagcggtacagaagatcggggacacatagcgcgccacgcccatcgaagtgctctgcgagaacttcccagaggagatggctacgtacctgcactacgtgcggcgcctggactttgagaagcccgactgtgactacatgcggcgcctggactttgagaagctcgactacgactacctgcggaagctctccagctacctcttcgaccgaagggtcttcgtgttcgactctgagtacgaggggctcgggaagcccttggcgacccccatcagcagtgtccacaccgacctgccctcccagcctcagcttcgggacaaagatcagccgcacagcaaaaaccaggcgctgaactccaccaatggggagctgaacgcggacgaccccatggccggccactccagcgcccatcagggcgcctgcagagatggaggtgggcgatgaaacgaaatgctgctgtttcttccccctgaatcttctccgtgcggccccttggggagcgagcttgtgtgagggccttggggcccacccacagcggcccagggccagacgctggctggaagccaggacatagactgcagggtcttggccggcggccccatccccgagacgaggggtcacttccttcacgtaagactgggcaaaatttctttttttttttttttttttgagacggagtctcgctttgtcgcccaggccggactgcggactgcagtggcgcaatctcggctcactgcaagctccgcctcccgggttcacgccattctcctgcctcagcctcccaagtagctgggactacaggcgcccgccaccgcgcccggctaattttttgtatttttagtagagacggggtttcaccttgttagccaggatggtctcgatctcctgacctcatgatccacccgcctcggcctcccaaagtgctgggattacaggcgtgagccaccgcgcccggccaagactggccaaaatttctacacctgtgtctagtcctcccctccaagagcattaactatttaaaacaaggaataaaggaaaaaaaagaaaggccccctccacccccacccctccattactttgctgaagtgagtagtgggatcctggaggcccccagggctgaggcccagccccggcccagccagctgcccccgttagcgtcataaagtccagcttgtctccctcatccaaaggccgttttctcagtgggagggcaggcctggcctggaggggtgctgtggggccatcttgcccaggcccacctgggagggacacaggcattgctgccaggagtgaggctgtgccccaggcctccccaaaactaaaggggaacggaggggtggggccgcggctgaagccagccccgcaaccaaaatgctgcaccaaagctcggtcgccacaggcacggccaccgcagcctttcacagcctggccccggcgaggggcaggtgggccctgctaggagggtgcttctcgaggcacctgttccccgaggctgtactccgaccctcagaacctgaggggggtgggccggctggcgtcgcgcggctcggcccctgggccctgctgtgtggaggcgcgcgggctcgtggcttcctgtctctgtgctccgccccctggcaagcagccgcagacaaaatgccttaaagcccccgacccagccccgcaggtgtatgtgcaggggggcctgtgggcggccctggactggctggcggactcccagcgggtcagcttgaggcagtgcccagggcggtggccgtgagtctggtttttgctttaccaagtgtacggaaatggcgtttacgtttctctgatgctcttttgaagccatacaacttaggggcttt

SEQ ID NO: 1899 - DNA, 2147 bp, Homo sapiens
agtaagagctcagtctcttcaccaggggctcccagtccttccatctgggaggccaaggcggcttcgcgttctgagaatagacagaacctctgttactctgtgaccggcaggcaccgggagatccgtagctcagacgccaggacatcccggaagctgggaaatggtgaatgtgccagatatcttttctcatgatactcaaggcctcttaagaaagaagcttatagaagcatcattccaaaaagtgatattggatggatatgggagctgtggccctcagaatttaaacttaaggaaagagtgggaaagtgagggtaagtgtgaaggtcacaatggatattatgatggacatacaaaatgtaagacaactacctataacaaaaacctcactgttacaggaggtcaaaaacatgaaaaaactcaatttatgtcagttgctttttctaaaccatgtgtttctgtaagtaagtgtcaacatcaatttttgaaacttaccttttcttttaaaggaaatttggataatccgaatagtgacttagtccatgtttcaaataatcatttaaaccaattaaaatatagaactggagtaaatgttcagtcaaatatttctgaaaaggagagatttaaaaacgaggaggtgatttctaaatatgatcaatttgatggatctttgttaaaagtttgtttcaccaacaaataacacctcgttctgcctgtgatcaatatagaaaggtcttcattcattcatcattgcttaatcaatgtcaaggaatagataatttgggaaaatatcacacacataataaaactttgacagcctttaggcaggactataccctaaataattaccagtatatttgtgttgcagagaaaaatcagtacaataaatctgatacaacattaagccaaggcataagccccagaagacatcagaaaactcattttctacataaccattgcaaacgtaaaaaatgtgagaaagcctttcatgaatgcaccaaccatgtccatcagagtatctttattcaagagaagtctgccaaatgtaataagtgtatagaaacttttatccagtcatcaaaacatactcagcctcagagaatccatattggagaaaagtcacacagatgtaataatggtgagaaaatccttagtaaattgtcaagtctaagaaaacataagataatccataatgaagagaaaccttacaaatgtaaagaatgtgacaaagcctttaaccatcgttcacaccttactcaacatcaaataattcatactggagagaaaccatacaaatgtaaagaatgtggcaaagccttcaattctagttcatattttactaaacatcagagaattcatactggagtaaaactttacaaatgtaaagcatgtagcaaatctttctctcattcctcatgtctttctgtgcatcagataactcatactgggatgaaaccatatatatgtaaggattgtggcatctcctttaaccggtcttcaaaccttagacgacatcagatgattcatactggagagaaaccctacaaatgtaaagaatgtggcaaattatttaatcgatgctcaacccttactcgacataaaagtattcatactagagaatttctatagttgtagtaaatgtgaaaagagttttatccaaaatttagaacttaaaaatcaccatagagttgatagggaaaccgactttacagattgaataaatgggaggaagtatttaatcagaactcaaatctgaatgtgtcaggacttacacaaaaaaggactaaagcacagatccccactttaaaattaaataagagtatttgttatggaggattactctaaagccaaagcagttacttattttgttatgtgtttcaaatgagcaaaagcattgatgtttggacaagtaattattcagtgagcatgttatttgtattgaaaacatttgaaatttgtataaagcaaatcataatttaattctcagattagttgttataccttaatgcctagtgtttatataaaaacatatagtctattttttctgcatcagagctgtaagaggtcgttctatagtaggtgaacatcattaatatcaacttattttcatggaaatttaatggcaaatgtaaaatacatgaagaaaatct

SEQ ID NO: 1900 - DNA, 2336 bp, Homo sapiens
gtaggcgtgagccaccgcgcccggcccgtactggttatttttgaagtatgttgattagtttccacttatttgtgagttttccaaatatctttgttattaatttctgatttcattccattgtggtcagaaaacgtattttgaattacttcagactttaacaatttattaagacatattttatggcctagcatataatttatagtggagaatgtttcatgtgtacttcagaagaatgtgtatcatattgttgttgggtaggatgttctatagatgttcgttaggtctggttggcatacattctgttttttttctgatctgatatctagttgttctctttattattaaaaatgaaggccaggcatgatggctcacgcctgcggtcccggcactttgggaggccgaggcgggcagatcacctcaggagttcgagaccggcctggccaatatgggggagccctgtctctgctaggaatgcaaaggccggccggtcgtggtggcacgcacctgtagtcccagctgctcgggaggctgaggcgggagaattgcttgagcctgggaggtggaggttgcggtgggccgggactgcgccgctgcactccagactgggcaaaagagcgagactccatctcaacaacaacaaaaagagtattgaagtggctaaatattattggtgtattgtttatcttccctccaattactgcagtttttacttcatgtactttgaggctctgtttttcggtgcatataggcttacaaatgttatatcttcttgaaggattgacccttttatcattctataatgtccttctttgtctctagtaacattttttttgtcttaaagccaatttttttctgacattaatatagccactctagctctcttttggttactttctgcatggaatatttttgcatccttttactttcaacctatttgtgttttttaatccattctgccaatctgtgccttttagttagagactttaacccatttgatttaatgtaattaatcataaggatttacttctcccagtctatatgccatttgcctttttattccttggttcttccattatagccctccttttatgttctgtagatactctctagtacaccattttaattccttgttgttacttttactatatattttttagttctttgtgtttgccctgggataacaattaacatctttgtttatagccatgtagtttgggtttttttttttttcctaattttttcttttgagacagggtctcgctccaatttgcccaggctggagtgcagtggcgcagtcttggctcactgcgaccttcgcttcctgggttcgggtgattctcctgccccggcctcccgagtggctgggattctgggcttgcaccaccatgcctggctggtttttgtatttttggtggagacggggtttcaccatgttgggtcgggctggcttcgaactcctgacctcaagtgatccgtccgcctctacctcccagggtgctgggattgcgggcgtgagccaccgcccctggccagcccaggagtttgagaccagcttgggcagcatggggagactccatctctacaaaaataaaataattttaaaaagtatccgggcatggtggcgcacgcctgtgttcccggctactcggggggctggggtggggggatctcctgggcccgggaggttgaggttgcggtggggtatggttgtgccactgtactctagcctgggtgacagagcgagaccctgtctcggaaaaaaatttacaacaacagaaaaataggttttgttttgttttgctctaatacagccaaattgttatttatcatgaaatttgtgatgggagggggatagggaaaaaaagaaatatgcaatatgccttctttcagtcttttttttctttcctgttatgcctctctacttgattctgcatcagtagtatgaccttattttaattttttttttttgttttggtgagacaggagtttcgctcgtgtcgcccgggctggagcgcagtggcgcggtctcggctcgctgcagcctctgccttctgggttcgggcgattctcctgcccgggtagctgggattgcaggcgcccaccaccatgcccggctaatttttgtatttttggtggagatggagtttcgccatgttgttcgggctggtctcgggatcctgacctcagtggttcatacctgtgatcgcaccattttgggaggccgagacaggaggatcacctgtaatcccaccattttgggaggccaagacgggaggatcacttgaggccgggagtttgaggccagcctgggcaacatggcgagaccctgtcactac

SEQ ID NO: 1901 - DNA, 3256 bp, Homo sapiens
acacagctgaaggacctggaaaaccacaggaagttgaatttggtcgacggagcatatgaggagtggtggcgggcatctcaagaggggaagactctcccactgtgttataagctgctaaagtcaaggaagacaatagtcaagcccccagaggttgcgagtcactctagccagaccgtggcagggtggaaaccagcccacagtgcgccggggcgtctggaagatgaagcagcggaactcagagagctctgaagggggacgggggcctgcagctgttttttttgttagctgctttttgttcatgggaaaacttgaacaagcttgattgcttcatggaaggagccaggtgacatggaaaggggaaagatgcagagtaaggggaccgagggacagcgagatggctgcaaaggtggagggaagaagtgagtgggaacggaggagacgtggtgctgccgctcagctgtgccccatggctttgccccgtggcttgctcccctcctcagtactgttctctcccgtgtggcacagccaggcttactcatcatttcatctgcagccctgcccataccagcgtgtgctgaacgatgttgaaccttaggcgacggaggccgactggaaccagggctctgagtgacagagacgcagttatgtctaaggacatacgctagaatggctgatgcagggcgcaagctcgattcctgcagatgtgtgttaatgagcagctccctcatttttgcaaaggtcagcattcctttggcaaactgggaaggagcagtttaaggtgcagctcccaagtgggtcacaccgaccccccaacatccagttcccaactgctgagcgtgcttctcttcgtgggagtgggcgggccagtgccgaggggctcaggacggattctcagaaacgccccaccatgcaggtggcttacgggagggcaaagccaatgccagcctccaggaagtctgcgctttctttccttaggctgccaatcagagtggaccagctggagatgaccaatcacatgacaagactcctgcacaaagggaagaaatgagatgctgcagctgaggagggcggccaacctgggaggcatctggctcccctgacaatgcctgccgatcgccaagctggcttccagacctcctgggacagaactgttcctcccaggacgctggtgtaggttcaagtccagttgatatttactaagcaactgcaatgcccaggcctgttccagtgctgcagagagtaagtgcttatgggtgcttatattcagagtaagtcaatacaccagcttcgtatgacctgcgtcttcggggccagcagggcaggttggtctcctcagcctcacactggagctcctggctggctggtgtctgcggtcaggaccctagtgatgggaggctcagcaaacagaggaggcagaggggctgttctgaaatgaccttgaaacgacctatcaccctcaggggtggtcttactggatgaagtccagcccgccataggcactgaagggctctcatttgctgagcccttgctttgcgccaggcggctcttcctctgccgacactgatcaaaggagggtgcgaggctcagctactgaagccggggtcagacttgtgggcgtgggcttttctaatgccaaacccacgggcgccaaggcttctcaagctcatcctgtcagcccctgaatttctaactggcaaagctccatgctagcggtgggggaagaaggagccagagagacctgaactgcaaggggaccccatgtgggatggttcaggggagcagcaggacagccaggcccctgtcagcacctgcctgcggtctctcacctggtcccgactgcaatgcctcctggcaggacagagccgccgacttctgtcctgtaagagctgtgtgcaaggtgggcccttgtccgtgttgccagctgaagactgacccaagactcgggaagagaactgggttggatctgttctcagtgtggtccagatctgccatgttggcaccagctgggagtgtgttagcaatgccgactctcaggccccccaggaactctgtcggggattcgggtgcttgctgtttgaggaccactggattagatatcagcaaggtccttcctgagtcttttctcagctgtccccttctcgagttgccttggcatctctcatcctgggttccgaatcctggactccctactctcaggacaccccatgcctcctactcatgctttgcggcacaggcaaggtctccagaaagagctgcgggtggggcatggccactaactgggaaaccttggccacggacagggattctctctccttcccattctgaaatcctatgatctggtgaactgaggttcatgctcacttttttttttttttttaagacagagtctcactctgtcacctaggctgaagtgcagtggtaggatcttggttcactgccaacctccacctctggggttcaagcaattctcctgcctcagcctcccgaggagctgggactacaggaacgcaccaccacatccggctaatttttgtagcttttagtacagacagggttttgccatattgctcaggctggtcttgaactcttgacctcaggtgatccgcctgccttggcctcccaaagtgttgggattacaggcgtgagccaccgcacctggcccatgctcacatttttataagcacaacggcagtaaccaacagagccatttttctgaggccttcctgtgcccagcactgggccaagcccttgacttaatccttattatcccaacaaggttggagtcagcaggcctgggttcttgtctcagctctgacacttactagctgggggaaaaagggggaggatgtgggtgggcagtggcagaaccttctttaggccccagtttttgcgttttgaaggcagggctttggagggatgaatcacaaatcagtatgctgtgtgaaagcagccagacacgaaagagggcacccggcgcagtttcattcacatgaagttctagatgaggcaaatgagtctacgctggaatcagagccggggctgtggtagtttcagaaagggggcagtttggaccgggaaggggcaaaagggggctgcgtggggtgacgggcacgtttcatcttgattgtggtggaggccacaggactgtacatccatttgtcaaaacgcaacaaacggtacatttaaaaaggatggattctactgtaggtaaaatatgcctcagtttaaaacattcttagtaaaatatgggctttgg

SEQ ID NO: 1902 - DNA, 2245 bp, Homo sapiens
tttttgccagcaggcgatggaatagggactacgagccaccctgcagcctctcctgggaggacaacgccccttctccctctccatgcactcttgaggcagcaaagaggaggcatctggacgcgtttacctcctccccacccccacagcttggccctcactaaactatcttgtgtccttcctcctgctatgattgattcgcccaggaaggagggagcgctctcccctcctctgggaggctggagactcggggacagaagatgcgctggagggaagagaacggagcgtcggacaccagaaaaactttgggggattcggggtgagaaagaaggcgtgaagagagaagggaggctcagcaggggaggaggggcgggggcgggggcgggagcgggaggagtcactgcgccgcggccgcccctccccgccctccactcggcggccccgggtcttcctccccctcctcctccccctcctcctccccctcctcttcctccgcctcctggtgtggctggctgcggccagaatcggagccccaaccgcgctgccggtgagtgaccagccccaggggacagagacgggaggcctgggaccccccctctccagggtggggcctcccgccgtgtctgggaaagtttgcgggcgccccgggacgcgggcatctccagggccgctcggcgcctccccatctccccgcgcccgccctggccgcccccaggggcgccctggggcccgcagagggatggcctcccggcagggactcctcggctcccctctgttctgagactgctgctgggaccggggtccgactctaaagagaaaactcaaacagcaaaaaaaggaatatcgactcagttccgagggcgggggccggggctcgttctcacccgcgcgcggcccctcgacctctcggacccgggccaccagctctgcgcccctcacgcctccctcggggtctctgtgtctctctcccgctcccggactccctcctccttctgactgctgttatttgggctgttgtccctccccgctccctggtacctcagctcggaccttagcctgtgcctgcagcccggattcccctcctgccctggaaggcaaggagccaggccacggggccacagccgcgggggccaccacactggcccaaatatttcctgcaggtatgaccattcactgggtattggggttgggtcccttggacccacaaactgaacctcgtgggtacagggaaaaattaaaatatattcctccttaggattgtactgcttccgttggtttggcatctttttatttttaacccttctaactgtgctttcttcgaataataatgatacttcatgtaattagcgtttctaatatctaaagacagaagaaggaagaaaataaacggaagagagagaatgcttgctaaaaatactcatttttgacttcagtccacactcgactgttttcctgggagatagaagttcagtgtagcttgttttcagactaaccgcaaacacgattacagcctcctccaggctagaagttttaatttgcctgacatgcagcacactgtttgttggtattcccagcctggcattcccgtctgcatagctctagtctccctcccaactcccccacccccactttctttctcataaaagggagctgtgaaaacaaggcaatgggagaggctcaaacgagctggaccacataataaaaacagccctacttattttaatcctgaggctatggactcccctggaccctgattgggtggaagaattgtttagttcatttgtgtggtttttctgtcagtagttattatggttgaatcagtgtttccatgacagtcttgcttctgtgggcacgatggggagcctgttaattctcggatgggtctggacagatcaagtctggagtctggagagatttttcagggcttgacctgggctgatattgcaaacctctgcacactcactcagaaccagagcagccgggagcagcctgagctggggttttcttccacatgatctgggaagaaaaagctctaccaaggagcgaactgtgtgagcatggttgctgggggatgttgaatgttttacgtttttaggaagaacacacttctcaaaactttagccattcctgtttccatacaaacaataaatgtggttgtaacaaatgtagtagatcagattctgaacaaccccttaaaaaacaggtccaagtattgaaccatttggaaataaagattttattttatttg

SEQ ID NO: 1903 - DNA, 2200 bp, Homo sapiens
gagcacggggagtcgggcgtggggcgggcagggagtggagtcggggtcttactccggtggctgcagggcgcagggtagccgtgtcaggcctgcccaggtgcagagcgctcctccgcgaccccaacagtctctggtccggtctggcgcgccctcgctttcccagagggcgacctgggctatggcggccgtggcgctggcgagcgggacacgcctcggccttgtcctcgagctgctcccgggacagcccgcgctgccccgggcgcgccgggagtcagtgaccttcgaggatgtggccgtctacttctctgagaacgaatggatcggcctgggccctgctcagagagccctgtacagggatgtgatgctggagaattatggggctgtggcttccctgggtaagggtctctccctttgggccctgcctccacccttgagagtttgctggctccttttttctcaaaggctcaggagttgttgataaccctcagctcaatggtagcttcaggctcttggatttttaatgacctaacctcagcagccgttggaaagtaggaagtcctggtatcagattgggccttatacaggacttccttgctccagagtgagaggtgccaaacccctacccttgtgttgtgggtatagtgagaagagagcaaattcatggtgctccactgagccttcagttccctcccctctcggtttgcaagatccagcctaattccaagcatcctcatgaggatgtctgaacttgagagctctaagagggagaggacaggtaagaattgaggactcaattcctcaatgagtgaaatcatccatttgctgactcaaacagttactgagtcgtctgtcaacttcctgacctttgtaagtctcctggcccctctcttgtcctttcccctggaattccttttcttgttcttcctagttatttctgtttttttcccctcctacccctgaagacactggcctgggaggagccttgggattactgtgtgccatgccactcacctgcctgtcccatttctttccttttaagcagcatttccatttcccaaaccggctctgatttcccagctggagcgaggggaaacaccctggtgctcggttcctcggggagctctggatggagaggccccaaggggcatctcctcagagggtgtgttgaagaggaagaaagaagattttattctgaaggaggaaattattgaggaagcacaggacctcatggtcctatcaagtggaccccagtggtgtggatcccaggaattatggtttgggaaaacctgtgaagagaaaagcaggttagggagatggcctggttacctcaatgggggacgtatggaaagttctacaaatgatattatagaagtgattgtcaaggatgagatgatctcagtagaagagagttcagggaatactgatgtcaataacctccttggtatacatcacaaaattctaaatgagcaaatattctatatatgtgaggaatgcggcaagtgttttgatcaaaatgaggactttgatcaacaccagaaaactcataatggagagaaggtctatggatgtaaggaatgtgggaaggctttcagttttcgatcacattgcatcgcacatcagagaattcacagtggggtgaaaccctatgaatgtcaagaatgtgctaaggcctttgtttggaagtcaaacctgattcgtcaccagagaatacatactggagagaaaccctttgaatgtaaggaatgtgggaagggctttagtcagaacacaagccttacgcaacatcaacggatccacactggtgagaaaccatacacatgtaaggaatgtgggaaaagctttactcgaaacccagcccttcttcgacatcagagaatgcacactggggagaagccttacgaatgtaaggactgtgggaagggcttcatgtggaactcagatctttctcagcaccagagggtccacactggggacaagcctcatgaatgtactgactgtgggaaaagcttcttttgcaaggcacatcttattcgacatcaaagaatccatactggggaaagaccctatagatgtaatgactgtgggaaggccttcagtcagaattctgtcttaattaagcaccagaggcgccatgctagagacaaaccctataactgtcagatctctcaccttcttgaacattagagagtgcataatggtg

SEQ ID NO: 1904 - DNA, 6068 bp, Homo sapiens
gataacagctcagtggtactgactgctttgtctttcttccagctcctctactagtggcctctccaactatgaccatgcttatctaaggcggagccctgaccagtgcagctcccaggggagcatggagagcctggagcccagtggggcatacccaccctgtcatctttcccctgccaagtccaccggcagcattgaccagctcagccacttccataacaagagagactcggcttacagctctttctccaccagttctagcatcctagagtatccacaccctggcatctctgcccgggagcgttcaggctccatggacaatacttctgctcgaggtggcctcctcgaagggatgaggcaggcagatattcgctatgtcaagacagtctatgacacccggaggggagtctcagcagagtatgaggtgaactcttcagccctgctgcttcaaggtagggaggcccgagcctcagcaaatggtcagggctatgataaatggtctaatattcctcggggcaagggagtgccacccccatcctggagccagcagtgccccagttccttggagactgccacggacaaccttcctcctaaggtgggtgcacccctgcctccagctcggagtgacagttacgcagcatttcggcaccgtgagcggcccagctcctggtctagccttgatcagaaacggctctgccggcctcaggcaaactctttaggctccctgaagtctccattcatagaggagcagctgcatactgtgctggagaagagtccagagaacagccccccagtgaagcccaagcataactatacccagaaggcccaacctggccaacctctgctgccgaccagcatctacgcggtaccttccctggagccacactttgcccaggtgcctcagccttctgtgagtagcaacggtatgctctaccctgcactggccaaggagagtggatacatagcccctcagggagcatgcaacaagatggctaccattgatgagaatgggaaccagaatggatctggcaggcctgggtttgccttctgccagcccttagaacatgacttgctgtccccagtggagaagaaaccagaagctacagccaagtatgtcccctccaaagtccatttctgttcagtgcctgaaaatgaggaggatgcctccctgaagagacatctcacacctccccaaggcaacagcccacattccaatgagagaaagagcacccacagtaacaaaccatcttctcatccccacagcctcaaatgccctcaggctcaggcctggcaagcgggtgaagacaagagatcttccaggctctcagagccctgggagggcgatttccaggaagaccacaatgccaacctctggaggaggctggagagagaaggcctaggccagagcctgtcaggcaactttggcaagaccaagtcagccttctcatctctccagaacattcctgagagtctgagaagacacagcagcctggagctaggccggggaacccaggagggttaccccgggggcaggcccacctgtgcagtcaacaccaaggcagaagaccctgggaggaaagccgctcctgacctcgggagccatctggaccggcaggtttcctacccgcggcccgaggggaggaccggtgcctcggcttctttcaacagcacagacccaagtcccgaagagccgcctgccccctcgcacccgcacacatccagtctgggccggagggggcccggcccaggcagcgcctcggctcttcagggctttcagtacgggaagccccactgctcggtgctggagaaggtctccaaattcgagcagcgagagcaagggagccagagaccgagtgtgggcggctctggttttggccataactataggccccacaggaccgtctcaacttccagtacttctgggaatgacttcgaggagacaaaagcacacattcgtttctctgagtcagctgaacccctaggcaacggggagcagcacttcaaaaacggggagctgaagttggaagaggcttcccggcagccctgcggtcagcagctgagcggaggagcgtcggacagcggccgtggcccccagaggccggacgctcggctcctccgtagccagagcaccttccagctctccagcgagccagagagggagcccgagtggcgggacaggcccggctcgcccgaatcgcccctgctggatgcccccttcagccgcgcctaccggaacagcatcaaggacgcacagtcccgtgtcttgggggccacctcctttcgacgtcgagacctggagctgggggcgcccgtggcgtcgaggtcctggcggccacggccttcctcggcccacgtggggctgcggagccccgaggcgtcagcctccgcctccccgcacacgccccgggagcggcacagcgtgacccctgctgagggcgacttggccaggcccgtgccccctgccgcccggagaggtgctcgccggcgcctgactcccgagcagaagaagcgctcctactcggagcccgagaagatgaacgaggtggggatcgtggaggaggccgaaccggcacccctgggcccgcagagaaatgggatgcgtttcccggagagcagcgtggccgaccggcgccgtctcttcgagcgcgatggcaaggcctgctccacgctcagcctgtcggggcccgagctgaagcagttccagcagagcgccctggcggactacatccagcgcaagaccggcaagcggcctacctccgccgccggctgcagcctccaggagcccgggccactgcgtgagcgcgcccagagtgcctacctccagcccggccccgcggcgctcgaaggctccggcctcgcctcggcctccagcttgagctcactgcgggagcccagcctgcagccccgcagggaggccacgctcctgccggccacagttgcagaaacccagcaggctccccgagatcgcagcagctccttcgccggtggccgccgcctcggggaacggcgacgcggggacctgcttagcggagcaaacggtggaacaaggggcacccagagaggggatgagacccccagggagccatcctcctggggggccagggccgggaagtccatgtcggccgaggacctgctggaacgctcggacgtccttgcgggccctgtccatgtgaggtccaggtcatctcccgccaccgcagacaagcgccaggatgtgcttttggggcaagacagtggctttggtcttgtgaaggatccatgttatttggctggtcctggatctaggtcactcagttgttcagaaagaggccaagaagagatgctgccgctcttccaccatctcacccctcgttggggtggttcaggctgcaaagccattggtgattcctccgttcctagtgaatgtcctggaaccctggaccatcagaggcaagccagtaggacaccctgccccaggccaccactggcaggaacgcaagggctggtcacagacaccagggctgcacccctgaccccaattggcacccctctgccttcagccattccctctggctactgctcacaggacggtcagacagggcgacagcctctcccgccctacacccctgccatgatgcacagaagcaatggtcacaccctgacccagcctcccggtccaagaggctgtgagggcgatggcccagagcatggggtagaagagggaacgaggaagagggtctcgctgcctcagtggccacctccttctcgagcaaagtgggcccacgcagccagagaggacagccttcctgaggaatcctcagcccctgattttgcaaacctgaagcactatcaaaaacagcagagtcttccaagtttatgcagcacttctgacccagacacacctcttggggccccgagcactccagggaggatctccctccgaatatctgagtctgtcctgcgggactccccgccacctcatgaggattatgaagacgaagtgtttgtgagggatccgcaccccaaggccacgtccagccccacatttgaacctcttcccccacccccacctcctccaccgagtcaggaaaccccggtgtatagcatggatgacttccctccacctcctccccacactgtatgtgaggcgcagctggacagtgaggatcccgaggggccacgccccagcttcaacaaactttctaaagtgacaattgcaagggaaaggcacatgcctggtgcagcccatgtggtaggtagtcagacactggcttccagactccaaacttctatcaagggttcagaggctgagtccacaccaccctccttcatgagcgttcacgcccaacttgctgggtctcttggtgggcagccagcacccatccagactcaaagcctcagccatgatccagtcagtggaactcagggtttagaaaagaaagtcagtcctgatcctcagaagagttcagaagacatcagaacagaggctttggccaaggaaattgtccaccaagacaaatctctagcagacattttggatccagactccaggctgaagacaacaatggacctgatggaaggtttgtttccccgagatgtgaacttgctgaaggaaaacagtgtaaagaggaaggccatacagagaactgtcagctcttcaggatgtgaaggcaagaggaatgaagacaaggaagcagtgagcatgttggttaactgccctgcctactacagtgtgtctgctcccaaggctgagctactgaacaaaatcaaagagatgccagcagaagtgaatgaggaagaggaacaggcagatgtcaatgaaaagaaggctgagctcattggaagtctcacccacaagctggagaccctccaggaggcgaaggggagcctgctcacggacatcaagctcaacaacgccctgggagaagaggtggaggctctgatcagcgagctctgcaagcccaatgagtttgacaagtataggatgttcataggggatttggacaaggtggtcaacctgctgctctccctctcggggcgtctagcccgtgttgagaatgtccttagcggccttggtgaagatgccagtaatgaagaaaggagctctctttacgagaaaaggaagatcctggctggtcagcatgaggatgcccgggagctgaaggagaacctggatcgcagggagcgagtagtgctgggcatcttggccaattacctttcagaggagcagctccaggactaccagcacttcgtgaaaatgaagtccacgctcctcattgagcaacggaagctggatgacaagatcaagctgggccaggagcaggtcaagtgtctgctggagagcctgccctcagatttcattcccaaggctggggccctggctctgcccccaaacctcacgagtgagcccattcctgctgggggctgtactttcagtggtattttcccaacattaacctctccactttaacctcttctaaaatacccaaccaaaagatcactgtttctctcaacactatttaatctgaaaaatgtttcagtacaaaccactgtttgaactatctgggttattggtgtttgttcctgatgaaaggaaaaaaattctctccaggaggaagcctttttccttcttgcccttcctgattgatcttctgagagctcgaatgctgctggacacgtacccctttctattattactttgtagtagaaagaaagttaatgaaactgagaactgattggagggtgtttgatcatttagtttttaacaggctgaggcaacatggatcagtgtgtgtccccctcaggaatgtatccacagtggccttccttgctggtgggcagtgtatcctgatggcagggtacaagtaccattaatgaagggtctgcaacataaagccttaaaaagacacacactaagaaaactgtaaaaccttgaacattgttatttatattttttaaaatggaaaagatcactatgtttgttgtgctaaccacttatttgattctgttttgtggtggacatagatgattacgtttgagctttgtattttgtgaaaaccttaatgaaatgaattccaaagatagtcacgttg

SEQ ID NO: 1905 - DNA, 3665 bp, Homo sapiens
gggttatgccagagctggacggctgtctggaggcgtccccgcgtgctcctccgccccaggggctccgagcatcctccacagttcctccggtcgccctccctagttgcttgggtcttgctgtcacttcgggcttccccagcgtcattctacgccccacgtaactccgggcccctcgatgtttccctgccccctgcgttactccgggcctcttctcgtggtatttcaggtctttttccttctgatccccactgccccctgagaccttcactgtgactctgctcaccactcacactctctcctgtcactctggatctcttttcttgtactctgggtcctcagtatgactccattcccgcaccccgttctctctcctggtgttcccccggctcagttactcagctttcgctggagacctgagcttgctgggggcgcgtggggagggctgcggtccctgccctcaccagtgcggcgcctctctctgtggctcccacgttcctcggcagtactccatatttcccccccggtactccatggtactcccagtctttgcggaggctgagacggcagcaggaagggagctttgccaggtttctcgcctgccctgccagaaggaggcccttgatcctttaccaccgtctcctcccctctggacgagcattcaagcctggggctgcctgaaaggggcagtcctaccggacacatgtaaagttgtggggagacagaatcccctctacgctttcttcaggtgatgggtacattctgagtacctcttgcccttttcccaggtgacggccctgctcgggtggccctccagtctctgagccagcggcttcgggtgcaggagcaggagatggaactggtaaaggcagccctggcagaagcccttcgcctgctgcggctgcaggtgcccccttcctccctgcagggctctggcacaccagctcctccgggggacagtcttgcagcccccccgggactgccacccacgtgcaccccttccttggtgagccgaggcacccagacggagacagaggtggagctcaagtcatcccctggaccccctggcctgagcaatggacccccagcccctcagggggccagcgaagagcctagtgggacccaatctgaaggagggggcagcagcagcagtggtgctggctcccctggccccccggggatcctcaggcccttgcagcccccacagcgtgctgacacagcggcctcggcagaagctctccaggaaggcaatctcctccgccaacctgttagtgcggtccgggagcacagagagccgtgggggaaaagaccccctctccagccctgggggccctggatctcggaggagcaattacaatttggaaggcatctcagtgaagatgttccttcgagggcgccccattaccatgtacatcccgtctggcatccgcagccttgaggagctgccgagtggcccaccgccagagaccctcagccttgactgggtttatgggtacaggggtcgtgactcccgctctaatctgtttgtgttgcgctctggggaggtggtctactttatcgcctgtgtggtggtgctgtaccggcctggaggaggcccagggggtcctggaggtggcggccagagacattaccgggggcacacagactgcgttcgatgccttgctgttcaccctgatggtgttcgggtagcctcgggacagacagctggagtggataaggatggaaagcccctgcagcctgtggttcacatctgggactcagagacgctgttgaaactgcaggagattggactgggggccttcgagcggggtgttggggccctggccttttcagctgcggatcagggtgcctttctttgtgtggtggatgattccaatgagcacatgctgtcggtgtgggactgcagccggggaatgaagctggctgagatcaagagtacaaatgactcagtcctggccgttggcttcaaccctcgtgacagcagctgcatcgtcaccagtgggaaatctcacgtccacttctggaattggagtggtggagtaggggttcctgggaatgggacccttacccggaaacagggtgtctttgggaaatacaagaaacccaagtttatcccttgctttgtgttccttccggatggagacattctcactggagactcagaggggaacattctcacctgggggcggagcccttcagattccaagaccccaggcaggggtggcgccaaagagacctatgggattgtggcccaggctcacgctcatgaaggttctatcttcgccttgtgtctccggagggacgggactgtgctgagtggtggcgggcgggaccgccggctggtacagtgggggcccgggttggtggccctccaggaggctgagattcccgagcacttcggggccgtgcgagccattgctgaagggcttggctctgagctgctggtgggaaccacgaagaatgcattgctgaggggagacctggcccagggcttctcccctgtaatccagggccacactgatgagctctgggggctctgcacacacccctcccagaaccgcttcctcacctgcggccacgaccggcagctctgcctgtgggatggggagagccatgcactggcctggagcatcgacctcaaggagactggtctctgtgctgacttccacccgagtggggcagttgtggccgtaggactgaacacggggaggtggttggttttggacacagagaccagagagatcgtgtctgatgtcattgatggcaatgagcagctctcagtggtccggtacagcccagatgggttgtacctggccattggttcccatgacaacgtgatctacatctatagtgtttccagtgatggtgccaaatccagccgctttggccgctgtatgggtcactccagcttcatcactcatcttgactggtccaaggatgggaatttcatcatgtccaattctggggactatgagattctttactgggacgtggctggaggctgcaagcagctgaagaatcgctatgagagccgagaccgggaatgggctacctacacctgtgtgctgggctttcacgtctacggcgtctggccggacggctccgatgggaccgacatcaactccctgtgccgctcccacaacgagcgcgtggtggcggtggccgacgacttctgcaaagtgcatctcttccagtacccgtgcgctcgtgccaaggcgccgagccgcatgtacgggggccacggcagccacgtgaccagcgtccgattcacgcacgacgactcgcacctcgtctcgctgggcggcaaggacgccagcatcttccagtggcgagtgctgggcgctggaggcgcggggccggcgcccgccacgccctctcgaaccccctccctgtcccccgcctcctccctcgacgtttgatcgctgcctggcgggaccgactggcccggcggcgtggccccgccccgccctgcccttccctggcccaatcccccacgactaggggccgactctttcctggactgacttcgagacattcccgatcgcgcattttcctggagggcgcgaacggcgcccctgcacacactgtttagacccgctggctgagccgggcagccccagcctaggccttgactcccgctgcctgctgaggggcaataaaccagaacc

SEQ ID NO: 1906 - DNA, 4014 bp, Homo sapiens
ttcttagctcttcccacataccaggctcccctcctcaccacgaccccatgaagaggtcacatctttaccctctttatggatgaggaaactgaggctcagagagggagagttccttgcccaagggctagaatatggagagctcagcggaacccaggactctgcccacaaagggcctttcagccccttcctttctctgggacctggaaccctgttgacctccaacctggtataactgggggaggtgctgtgagggcggccatgcagcctggtggcactgaaactggagaaggggacagggaggaggcccagatatggagggggatggtccgtcccttgggggaggggccctgggctagacctccccaccaccgaccatgcccctgcctcccagatgtggacgaatgcctggaggggttggacgactgtcactacaaccagctctgcgagaacaccccaggcggtcaccgctgcagctgccccaggggttaccggatgcagggccccagcctgccctgcctaggtacggggacacccaccctctggccacaccgctgcagctgccccaggggttaccggatgcagggccccagcctgccctgcctagttacggggacacccaccctctggccagcacctcagctcaggggctgagggtgtctaaggcgccagtgctgttgagttctgagaataaccaaacagcagccgacactttgcactcactgggtgcctgcctgtgcaccaaaacctcagcctgaccctgtggggtcatcttccggggaatttcaggagggggaggactgtggaggcaagtgggtgtatctcagagaggcttaggagagggaatggatctaactggggcactgaagggctgagggggagctggagtctgggacgaggctgagagctggggaggctgggcctctgggagctgtaggtggaatcggagaggaggctggagttggtccgggagagggggatgcagcgtggctcacatgcagcatgggagtggctggattctagggaatgccaacaagagagaaggcagggccaggcaatggctgcaggctgcaggggaacctgggccacctgtgcacacacctgaccccacccgtctgcagatgtcaatgagtgcctgcagctgcccaaggcctgcgcctaccagtgccacaacctccagggcagctaccgctgcctgtgccccccaggccagaccctccttcgcgacggcaaggcctgcacctcactggagcggaatggacaaaatgtgaccaccgtcagccaccgaggccctctattgccctggctgcggccctgggcctcgatccccggtacctcctaccacgcctgggtctctctccgtccgggtcccatggccctgagcagtgtgggccgggcctggtgccctcctggtttcatcaggcagaacggagtctgcacaggtaaggccaggccctgaccatccacgggacactgccgttatgggctcttgggcccctagggtgggtgtgcaggtgtcacccaccgagttcagaaacccagaccttccaggcaagtggggtgagtggtgtggtggatggtggcttctccaatgcagggtgtctcagagccttggctgtgctattgggcagggggcttccaagatggtgtggactattttttaaaccatttgacttcaggacactttgcccagagggagggcatcctaggcaagtggtcctgggaaccccctttgagaaacactcctcttagcactcagagggaaagcagtcagggagggagattttcaggggtgaaggagaatgttccaggtagacatgagaatgtgacaagggactgctgggtagaggggggtgggggtgggggatggcccctggaccctgcagagagggacaaagaggaggtggcctgccccagggctgatgcctcggcattcccgcctggacggaggggtctgcggggtggtgctgcttgctccttctatgccttggtgagcacggggtaggtaaggtggggctcctccctctcagcaagcacagggactcccccaacccctgaacctgggctgggaggggcaggacagggagaaggagcagggcagctccagagcccagcgggcaggtgtgtggccacgttggtgtctgtggctcagtgcgtctctctgcccccatcccccacctgccccacccccatgcccgggccagaccttgacgagtgccgcgtgaggaacctgtgtcagcacgcctgccgcaacactgagggcagctaccagtgcctgtgccccgccggctaccgtctgctccccagcgggaagaactgccaggacatcaacgagtgcgaggaggagagcatcgagtgtggacccggccagatgtgcttcaacacccgtggcagctaccagtgtgtggacacaccctgtcctgccacctaccggcagggccccagccctgggtaagggctgagttggcagggcctcgtgccctcaggaaaagcacatttttcagtcactgggggtgcaggctggccctgtcattgtcactccccacacaagtgatgcaggcaggaacgcacagagccctgggggcagggagaggccagagtgggagagaacggggacacaggagcacacacaccaaaccccagacacaggaccaccatgcagactcacacaaccccaggacaaaactcagacacgccagcaccaaacccatctcctccacgccactcacagcggccacggacactcatcaagacacacggagacatggggaccttaggggtggcagctgctgccctggaaaggtttctcccggcgggtgacctgccccaggccttacaactagaaacgtaggctggggttggaagcagatgcccgcggcaaggctaagcgcagtctccacctccaaccccgcccccgcagggcaaatccagactgggtgacttggcccaggggcacatcgctcccctgtgtctgctgggcttccctggggcatggatcccgaaagtccgctggagggaccatgaaagggcaggcctctggcttctctgggcttcagtttgttgaactctaaaacgggctagcgtgggagcctgcagagaaggcgtgtggggctctgcgggagaaggacgggcagcgcgtgggcggaactgcaggggctggcagggaggtctgagttacgcggatgggccacgctccgaccgcacccccgagtccgcctgtccgtgtgtctgtgccgcccgcaggacgtgcttccggcgctgctcgcaggactgcggcacgggcggcccttctgcgctgcagtaccggctgctgccgctgcccctgggcgtgcgcgcccaccacgacgtggcccgcctcaccgccttctccgaggtcggcgtccccgccaaccgcaccgagctcagcatgctggagcccgacccccgcagccccttcgcgctgcgtccgctgcgcgcgggccttggcgcggtctacacccgtcgcgcgctcacccgcgccggcctctaccggctcaccgtgcgtgctgcggcaccgcgccaccaaagcgtcttcgtcttgctcatcgccgtgtccccctacccctactaaacgggagagggcattggcggccgccctggcgtgacccccgaggaaggggtcgaggagaagcttggtccacgccacctgctgtggcaagcggagcgtcatcgtctcccgccccgtgcgtcagcgagaccttgggtcaacacgaccctgcgcacagccttgacccccgacagcgaggacctgacctcacagagggaggcgtccagggcggcccttgggtggccagtcccgcaggcagggcccggggaagcccggatcagacctccaggtctgatccgcccctcagtgggagcgggacagggacacagggcacctggacgcgcgggagagggggcagaccccgcgttaggggtggcagcagctgtcgcccggccacacctggtggtgtcattctgaaccctgttgcaatataaagggatttttttttaacc

SEQ ID NO: 1907 - DNA, 3613 bp, Homo sapiens
cctgggacctctgcagtgcacctggaaacctctgggactccagcctccctccctggccacacagcccctggccctctcctggtgccattcaccctcaacttcactatcaccaacctgcagtatgaggaggacatgcgtcaccctggttccaggaagttcaacaccacggagagagtcctgcagggtctgctcaagcccttgttcaagagcaccagtgttggccctctgtactctggctgcagactgaccttgctcaggcctgaaaaacgtggggcagccaccggcgtggacaccatctgcactcaccgccttgaccctctaaaccctggactggacagagagcagctatactgggagctgagcaaactgacccgtggcatcatcgagctgggcccctacctcctggacagaggcagtctctatgtcaatggtttcacccatcggaactttgtgcccatcaccagcactcctgggacctccacagtacacctaggaacctctgaaactccatcctccctacctagacccatagtgcctggccctctcctggtgccattcaccctcaacttcaccatcaccaacttgcagtatgaggaggccatgcgacaccctggctccaggaagttcaataccacggagagggtcctacagggtctgctcaggcccttgttcaagaataccagtatcggccctctgtactccagctgcagactgaccttgctcaggccagagaaggacaaggcagccaccagagtggatgccatctgtacccaccaccctgaccctcaaagccctggactgaacagagagcagctgtactgggagctgagccagctgacccacggcatcactgagctgggcccctacaccctggacaggcacagtctctatgtcaatggtttcacccatcagagctctatgacgaccaccagaactcctgatacctccacaatgcacctggcaacctcgagaactccagcctccctgtctggacctacgaccgccagccctctcctggtgctattcacaattaacttcaccatcactaacctgcggtatgaggagaacatgcatcaccctggctctagaaagtttaacaccacggagagagtccttcagggtctgctcaggcctgtgttcaagaacaccagtgttggccctctgtactctggctgcagactgaccttgctcaggcccaagaaggatggggcagccaccaaagtggatgccatctgcacctaccgccctgatcccaaaagccctggactggacagagagcagctatactgggagctgagccagctaacccacagcatcactgagctgggcccctacaccctggacagggacagtctctatgtcaatggtttcacacagcggagctctgtgcccaccactagcattcctgggacccccacagtggacctgggaacatctgggactccagtttctaaacctggtccctcggctgccagccctctcctggtgctattcactctcaacttcaccatcaccaacctgcggtatgaggagaacatgcagcaccctggctccaggaagttcaacaccacggagagggtccttcagggcctgctcaggtccctgttcaagagcaccagtgttggccctctgtactctggctgcagactgactttgctcaggcctgaaaaggatgggacagccactggagtggatgccatctgcacccaccaccctgaccccaaaagccctaggctggacagagagcagctgtattgggagctgagccagctgacccacaatatcactgagctgggcccctatgccctggacaacgacagcctctttgtcaatggtttcactcatcggagctctgtgtccaccaccagcactcctgggacccccacagtgtatctgggagcatctaagactccagcctcgatatttggcccttcagctgccagccatctcctgatactattcaccctcaacttcaccatcactaacctgcggtatgaggagaacatgtggcctggctccaggaagttcaacactacagagagggtccttcagggcctgctaaggcccttgttcaagaacaccagtgttggccctctgtactctggctgcaggctgaccttgctcaggccagagaaagatggggaagccaccggagtggatgccatctgcacccaccgccctgaccccacaggccctgggctggacagagagcagctgtatttggagctgagccagctgacccacagcatcactgagctgggcccctacacactggacagggacagtctctatgtcaatggtttcacccatcggagctctgtacccaccaccagcaccggggtggtcagcgaggagccattcacactgaacttcaccatcaacaacctgcgctacatggcggacatgggccaacccggctccctcaagttcaacatcacagacaacgtcatgcagcacctgctcagtcctttgttccagaggagcagcctgggtgcacggtacacaggctgcagggtcatcgcactaaggtctgtgaagaacggtgctgagacacgggtggacctcctctgcacctacctgcagcccctcagcggcccaggtctgcctatcaagcaggtgttccatgagctgagccagcagacccatggcatcacccggctgggcccctactctctggacaaagacagcctctaccttaacggtcaccacactctacaaaggcagtcaactacatgacacattccgcttctgcctggtcaccaacttgacgatggactccgtgttggtcactgtcaaggcattgttctcctccaatttggaccccagcctggtggagcaagtctttctagataagaccctgaatgcctcattccattggctgggctccacctaccagttggtggacatccatgtgacagaaatggagtcatcagtttatcaaccaacaagcagctccagcacccagcacttctacctgaatttcaccatcaccaacctaccatattcccaggacaaagcccagccaggcaccaccaattaccagaggaacaaaaggaatattgaggatgcgctcaaccaactcttccgaaacagcagcatcaagagttatttttctgactgtcaagtttcaacattcaggtctgtccccaacaggcaccacaccggggtggactccctgtgtaacttctcgccactggctcggagagtagacagagttgccatctatgaggaatttctgcggatgacccggaatggtacccagctgcagaacttcaccctggacaggagcagtgtccttgtggatgggtattctcccaacagaaatgagcccttaactgggaattctgaccttcccttctgggctgtcatcctcatcggcttggcaggactcctgggactcatcacatgcctgatctgcggtgtcctggtgaccacccgccggcggaagaaggaaggagaatacaacgtccagcaacagtgcccaggctactaccagtcacacctagacctggaggatctgcaatgactggaacttgccggtgcctggggtgcctttcccccagccagggtccaaagaagcttggctggggcagaaataaaccatattggtcgg

SEQ ID NO: 1908 - DNA, 5144 bp, Homo sapiens
agatgaacatcaaagcccccaagatctccatgcctgactttgatttgcatctgaaaggccctaaggtgaaaggagatgtggatgtttctctgcctaagatggaaggtgatctaaaggcccctgaagttgacatcaagggccccaaagtggacattgatgccccagatgtggatgttcatggcccagactggcacctgaagatgcccaaggtgaaaatgcccaaattcagcatgccaggatttaaaggagagggcccagaagtggatgttaatttgcccaaagctgacattgatgtctcaggacccaaagtggacattgacactcctgatattgatattcatggtccagaagggaaactgaagggccccaaatttaaaatgcctgacctgcacctcaaggcaccgaagatctctatgcctgaagttgacctgaatctgaaaggtccaaagatgaagggcgacgtggacgtttctctgcccaaagtggaaggcgacctcaagggccctgaagttgacatcaagggccccaaagtggacattgatgtcccagatgtggacgttcaaggcccagactggcacttaaaaatgcccaaagtgaaaatgcccaagttcagcatgcctggcttcaaaggagagggcccagatgtggatgtgaacctgcccaaggctgaccttgacgtctcaggacccaaggtggacattgatgttcctgatgtgaatatcgaaggtccagatgcgaaactaaagggccctaaattcaagatgcctgagatgaacatcaaagcccccaagatctccatgcctgactttgatttgcatctgaaaggtcccaaggtgaagggtgatgtggatgtttcccttcctaaagtggaaggtgacctcaagggcccagaagttgacatcaagggccccaaagtggacatcgatgcccctgatgtagatgttcatggcccagactggcacctgaagatgcccaaggtgaaaatgcccaaattcagcatgccaggattcaaaggagagggcccagatgtggatgttacccttcctaaggctgacattgagatttctggccccaaagtggacattgatgcccctgatgtcagtatcgaaggtccagatgcaaaactcaagggtccaaagttcaagatgccagagatgaacatcaaggcccccaaaatctccatgcctgacattgactttaacttgaagggtcccaaagtgaaaggtgatgtggatgtctctctgcccaaagtggaaggtgatctcaagggccctgaaattgacataaaaggccccagtttggacattgacacacctgatgtcaatattgaaggtccggaaggaaaattgaaggggcccaaatttaagatgcctgagatgaacatcaaagctcccaaaatctctatgcctgactttgatttgcacctgaaaggtcccaaggtgaagggtgatgtggatgtttcactacctaaggtggaaagtgatctgaaagggccagaggtagacattgaaggtcctgaagggaagctcaaaggtcccaagtttaagatgcctgatgtacatttcaaaagcccacaaatctccatgagtgacattgatttgaatttgaaaggacctaagataaaaggagatatggacatttccgttcctaaactggagggagatctgaaaggtcccaaagtggatgtcaaaggccctaaagtgggcattgacactcctgatattgacattcatggtccagaagggaaactgaagggccccaaatttaaaatgcctgacttacacctcaaggcaccgaagatctctatgcctgaagttgacctgaatctgaaaggtccaaaggtgaagggcgacatggacatttctctgcccaaagtggaaggcgacctcaagggccccgaagttgacatcagggaccccaaagtggacattgatgtcccagatgtggacgttcaaggcccagactggcacctaaaaatgcccaaagtgaaaatgcccaagttcagcatgcctggcttcgaaggagagggcccagatgtggatgtgaacctgcccaaggctgacattgatgtctcaggacccaaagtggacgttgatgttcctgatgtgaatatcgaaggtccagatgcgaaactaaagggccccaagttcaagatgcctgagatgagcatcaaagcccccaagatctccatgcctgatattgacttaaacctgaaaggacccaaagtgaagggcgatgtggatgttacccttcctaaagtggaaggtgacctcaagggcccagaagctgacatcaagggcccaaaagtggacatcaacacccctgatgtggatgttcatggcccagactggcacctgaagatgcccaaggtgaaaatgcccaaattcagcatgcctggcttcaaaggagaaggtccagatgtggatgtgagcctgcccaaggccgacatcgatgtctcgggacccagggtggacgttgatattccagatgtgaatatcgaaggtccagacgcaaaactgaagggccccaagttcaagatgcctgaaataaatatcaaagctcccaagatctccatacctgatgttgacctggatttgaaaggacccaaagtaaaaggagattttgatgtgtctgtccctaaggttgaagggactttgaaaggcccagaagtagatcttaaaggtccacgtctggatttcgaaggccctgatgccaaactcagtggcccatctttgaagatgccatcgctggagatatctgctcctaaagtaactgctcctgatgttgatttgcatctcaaggcaccaaaaattggattttcaggtccgaagttagaaggtggtgaagtggacctcaagggacccaaagttgaagctccaagcttagatgtacacatggacagcccagatattaacatcgaagggccagatgttaaaatccccaaatttaagaaacccaagtttggatttggggcaaaaagccccaaagctgacatcaagtcaccttcactggatgtcactgttcctgaggcagagctgaaccttgagactcctgaaattagtgttggtggcaagggcaagaaaagtaagtttaaaatgcctaaaattcatatgagtggtcctaagattaaggccaaaaaacagggatttgacctgaatgttcctgggggtgaaattgatgccagcctcaaggctccggatgtagatgtcaacatcgcagggccggatgctgcactcaaagtcgacgtgaaatcgcccaaaaccaagaaaacgatgtttggaaaaatgtacttcccagatgtagagtttgacattaaatcacctaaatttaaagctgaggcccctctccctagccccaaactggagggtgaactccaggcacctgatctggaactttctttgccagcgattcacgtcgaaggtcttgacatcaaggcgaaggctcccaaggtcaagatgccagatgtggacatctcagtgccaaaaatagagggtgacctgaaaggccccaaagtgcaggcaaacttgggtgcacctgacatcaacatcgaaggcctagatgctaaagtcaaaacaccgtccttcggcatttctgcccctcaagtctccatccctgatgtgaatgtaaacttgaaaggaccaaagataaagggtgatgtccccagcgtgggactggaaggaccagatgtagatctgcaaggtccagaagcaaaaattaagttccccaagttttccatgcccaagatcggcatcccaggtgtgaaaatggagggtgggggagccgaggtccatgcccagctaccctctcttgaaggagacttgagaggaccagatgttaagctcgaagggcccgatgtttctctaaaggggccaggagtagacttgccttcagtgaacctctctatgccaaaagtctctgggcctgaccttgatctgaacttgaaaggaccaagtttgaagggagacctggatgcatctgttcccagcatgaaggtgcatgctccagggctcaacctcagtggtgtcggtggcaaaatgcaggtgggaggagacggtgtgaaagtgccagggatcgatgccacaacaaagcttaacgttggggcaccagatgtgacactgaggggaccaagcctgcagggagatctggctgtctctggtgacatcaaatgccctaaagtatccgtaggagctcctgatctaagcttggaggcatccgaaggcagcattaaacttcccaaaatgaagctgccccaatttggcatctctactccggggtccgacttgcacgtcaatgccaaggggccacaggtttctggcgaactgaaggggccaggtgtggatgtgaacctgaaagggcctcggatttcagcaccgaatgtggactttaacttggaaggaccaaaagtgaaagggagccttggggccactggtgagatcaaaggccccactgtcggaggaggtctttcaggcattggtgttcaaggcctagaaggaaacctccagatgcctggaattaagtcctctggatgtgatgtgaacctgccaggcgtgaatgtgaaactcccaactgggcagatttctgggcctgaaatcaaaggtggtctgaaaggttcagaagtaggtttccatggggctgctcctgatatcagtgtgaaggggcctgcctttaatatggcatctcctgagtcagattttggcatcaacttgaagggcccaaaaatcaaaggaggtgcggatgtttcagggggtgtcagtgccccagacatcagccttggtgaagggcatttgagtgttaaaggttccgggggtgagtggaagggaccccaagtctcctctgctctcaacttggacacatctaagtttgctgggggccttcatttctcaggaccaaaggtggaagggggtgtgaaaggaggtcagattggactccaggctcctgggctgagtgtgtctgggcctcaaggtcacttggaaagtggatctggaaaagtaacattccctaaaatgaagatccccaaatttaccttctctggccgtgagctggttggcagagaaatgggggtggatgttcacttccctaaagcagaggccagcatccaagctggtgctggagacggcgagtgggaagagtctgaagtcaaactg

SEQ ID NO: 1909 - DNA, 4088 bp, Homo sapiens
gcagtgcgcgacggcggcggcggcgcgggaggttcggagcgggagctcgggctcgcggacggtatggaggactacgagcaggagctgtgcggcgtcgaggatgatttccacaaccagttcgcggccgagctggaggtgctggcagagctggaaggggcgtcgactccgtcgccctccggggtccccctgttcaccgcgggccgacccccgcggacgttcgaggaggcccttgccagaggggacgcggcctccagtcccgccccagccgcatctgtgggcagcagccagggcggcgccaggaagaggcaggcggccccccatcttggaggactacgtccacgtgacatccacggagggcgtccgggcttatctggtgctgcgtgctgaccccatggccccgggggtgcagggctctctcctccacgtcccatggcgaggcggtggccagctggacctgctgggtgtgtccttagcctccctgaagaagcaggtcgacggcgagcggcgggagcggctgcttcaggaggcccagaagctttcagacaccctgcacagtctcaggtcgggggaggaggaggcagcccagcccttgggggcccctgaggaggagccgactgacggtcaagacgcctccagtcactgcctctgggtggatgagtttgcaccccgccactacacggagctgctcagtgatgacgtgaggtcttgttctcactcaagtgtggctggcttcctctgttcccaagatggaagaacctgggcccagtgatttttgcacagccaatccactgggcctcggagacggagtgggctctggtttgcccttttgagttgtaggtggtgaactgagcacagggctgtgtgctactggtcccctgtgacctgtgaggcaggctaggggtccagggggtcacctgatccaagtctctgttccctttcctaccttcacagcagctgacactggagtgcccctggggagggcaggggcctcccagatgggttgtggccagagccgtgggggtggagcccctggtgtgagccttgcggtcactcgctggcaggaagacgggggtggccattcatcctgtggcttggcatcccatggggcatggggctcatggtggcaggtggactgtccgtgcctggaggcggtgccctcaggctgtgcttcccttcccgtccttcccgcagttcaccaaccgctgcctgctcaagtggctgaagttgtgggacctggtggtgtttggccacgagaggccttcccggaagcccaggcccagtgttgagccggcccgggtcagcaaggaggccacagccccaggcaagtggaagagccacgaacaggtgctggaggagatgctggaggctgggctggacccgagccagcgaccgaagcagaaggtgagccccgctggctgtgccgccgggaacaagcctgaggctttgcactcggcgccggcacccttgcagcctgttgactttctccaggagccgtgggtgtggtgacgtgtgggtcttggcgtgaagcgccattagcgtgagttagaactggagcgttgcagtaacaactcgggggaagtcgttgtccctgaagggctctgcggctggccaggatgatctgggtggacggtgggtggtttctgggggccagtcacactggtatcagctgtgttttgtctgcacgaactttgctttgtgtaggtttttttttccgttgccatcttggtgtgtgaaagtgctcaattttgttcttatttgatggctggagtggggtggagggagcgcccagcctgtgggacacatgtggcagtccctggctgctaggccgggagcgtcctgtaggtgcggtgcacactacgccttcatctacctgggctgcaggtggcactgctctgtgggcccccggggctggggaagaccaccctggcacacgtgattgcgcgtcacgcggggtactctgtggtggagatgaacgccaggtgagtgatgtgaggtccgtctctggctcgccttctgtcctgacgtgtttgagttctggtggcggacctgaaaccgggtgtggatgttcccgtcttgagggtggtgggggcctgggtgtgtgggccgggaaaacgtgtccttcctcggggttcacgggatcggcagcagccgcgtcatgtgacggtctccacgcaaatgcggcagccccggccttgggaggctgccctgccagggacgcccactgccctgacgacccctgacctccccattgcagtgacgaccgtagcccggaggtcttccgcacacgcatcgaggcggccacccagatggagtcggtgctgggtgctggcgggaagcccaactgcctgatcatcgatgagatcgacggggcccccgtggtgggctccttgatgcctgggccgccatcaacgtcctcctgagcatcctgaaccgcaaggggccacaggaggtggggccacagggcccggctgtgccttcgggaggcggccgacggcgccgggcagagggggggctcctcatgaggcccattatctgcatttgcaatgaccagttcgcaccgtccctgcggcagctgaagcagcaggccttcctgctccacttcccgccgactctgccctcgaggctggtgcagcggctccaggaggtctccctgcggcagggcatgagggccgacccaggggtgctggccgccctctgtgagaaaactgacaatgacatccgggcctgcatcaacaccctgcagttcctgtacagccggggccagcgggagctgagcgtgcgggacgtgcaggccacacgcgtgggcctcaaggaccagcgcagagggctcttctcggtgtggcaggaggtcttccagctgcctcgagcccagaggcgccgtgtgggccaggaccccgccctgcctgctgacacactcctgctgggtgacggggacgcgggctccctcacctccgcctcacagcgattctaccgtgtcctgcatgccgctgcctctgcgggcgagcacgagaaggtggtccagggcttgtttgacaacttcctgcgtctgcggctgcgagactccagcctgggtgctgtgtgtgtggccctcgactggctggccttcgatgacctgctggcgggggctgctcatcacagccagagcttccagctgctgcgctacccacccttcctgcccgtggccttccatgtgctgtttgcttccagccacacacccaggatcaccttccccagcagccagcaggaggcccagaaccggatgagccagatgaggaacctgatccagacgctggtgtccggcatcgcgccagccacgcgcagccgggccacgccccaggccctgctcctcgatgccctctgcctgctcctggacattcttgcacccaagctccgccccgtgagcacacagctgtacagcacccgtgaaaagcaacagctggccagcctggtgggcacgatgctcgcttacagcctgacctaccgccaggagcgcacgcccgatggccagtacatctacaggctggagccgaacgtggaggaactctgccgcttccctgagctgcctgcccgcaagcccctcacctaccagacgaagcagctcatcgcccgcgagatcgaggtggagaagatgcggcgggcggaggcttctgcccgggtagagaacagcccccaggtggatgggagccccccagggctcgagggtctgctggggggcattggggagaaaggggtgcaccgacctgccccacgcaaccatgagcagcggctggagcacatcatgaggcgagcggcccgggaggaacagcctgagaaggacttctttggacgtgtggtcgtcaggagcacagcagtcccgagtgcaggggacacggccccggagcaggactcagtggagcggcgcatgggcacagcggtgggcaggagcgaggtctggttccgcttcaacgagggtgtctccaacgccgtgcggcgcagcctgtacatcagggacttgctctagttctctgagccgcggacatgccctcgcattgcttcccgcagagtgcagagacaggaagctggagatgtctttataaagtcacaccttt

SEQ ID NO: 1910 - DNA, 3635 bp, Homo sapiens
ggcctgcctgatatccagcaacagagggcaagggcggcagcacctccagcatgacagtcccttccaagcacgtcaggatgctcccttgcctgtgctggcagcttcctaaacatggggactgggcatggtggcaggtttttgtccttctgaaagagcaattttgctgtgaggttacttgctccttgagttcttgtctgaggcccacctggcggctgctccgtgaggaacgaggtggccctgctgcagctcagcatcccgccacgctcccaggagtgtgtgtttcctggggggagcggcccgggaccgtggctctgtggtccattctgtggatgtccacaaggcctgggcgttctgtgggtttgggtggcagtcccgtctgggcagctcctgctgggctgggtgtgggtctcctgctggtctgcccccagctgcacaacgtgtcttgtgccttgccctcttgtacctctgcaggttttggctacgggcctccacctccaccgccagatcagtttgcccctccgggggttcctcctccaccagccactcccggggcagcacctctggctttcccaccgcctccgtctcaggctgccccgggcatgagcaagcccccgacagctcagccagacttcccctatggtcagtatggtaagtggtctcctgccatgccgcgtccccgctggccccaggaccctgggcacggcctgccttcttctgcttcctcccctgctggacgctccccagcctttacctggtgtgaaaggggagagggaggagaggggggtgtgggggttgttggagagatctcgtggcaactcgggtccagcagaagggagcgtgggagtcttgtcgcagcagagcactcgtcatacagcaggtgctgcagggcctgcatgtgtgggaacctgagtggcgaccgggtcgagggaagtgagtcgcaggcagctgtgatcactgtctagaggttcaggccctcggtgtgggtcccgggtgcactggccccttggtgggttccagtttctggcgtcatcagcctcctgctgggtccagaccccgcttggggcagaagctgggtctgtagtaggcgtggcctggacgtgggcttcaccctggactggatggctgtcgtggcttgggtctgcctggacgtgatctgcaggcagcgcatgtgcttccggggcaggagcttgtgggggggcggggtcagcatgggtcaaggtctgcatgtcagtagttctcgccctgcactgagccaggagtcacagcagccttgctcaggaccaacgcggtggcctcagtgggcagggctccaactacggtcagctcctccagcaccaggggtcattcacaagcagggtttgagaacatggggcacctgtctgcaggtggccacgggcttccggggtgcctgtgaacacgcttcctctaggcctggtggaggccggggtgtgggagctgtgttcggccgaggtgcccgcccacccacctcgcatggctgtggttcccctgcccccacgctcaggccctgggccgaggttgccgcatgtgtgggttcttgacccactcaccaccaaaccctggcgtgtctgagactggcaggggggtgtgaggcgcccggttggggcgtggcgtgtgtcagccgctgctcttggtggcggctgcttgggttggtcaccctggtctcgtctcttgccaggcctgggttcctattctccagccccgccgggctgcggcccacactttgtttacagtcttatggtcaggctgagcagtgatgtggcctaggcaggtgccgcctccttctccagggtcctcccacccgcctgcaccgggaggtggacgtggcttcctctgccgtcccgggcgggggtggacgctggcggtgccctctgggaaggggcccttgccggtgccaagacattggccacaagccttcagcgggcccaggatcccccagagagagcccacgcccacctgtgcccacgtgcacccgaatgggaacccagaggtcgtgggaggggcttcctgcaaggtgtgcagcggggtggggagcggcgtgagcagctctgtccttgtaaagacaccgctgtccatgctcctgaggtcggctgtgtgggccggacgggctgcagggtgtgctggcccctcagccagtggtgtcactggggcagtcaggttgggcccagaaacccttccctgacgcgtgccaccgatggacgtgccctgacaggaaggacaacgtggggtctggtctgcgacggaggggcaggccctgtatcgctgcaagggcccgtcaggggttttctgaaacttcgagagccagctttctagaagcctggttcaccgtgccttgggccatgtgtgtctccaagccccgaggcttctctacctcccctcacccccccaaccacgtcttcgggattgaacagggaagcggtgaggttacgtgggccatggagggctctggaagccgcttttctctgtgtgtgcccctgctcacatgtttttgagggagagaacatgcccggggtcctctccccggcccaggtgctggcctcagaagggccccacccgcaccccgtgggacccgtggactcaaggcaggctcggcggagctgtgtccaggtggcctcgctcgacggcagtgccaaccgcccagggaccgccccgagctcacaggactttctcccccagcaggttacgggcaggacttgagtggcttcggacagggcttctcagaccccagccagcagcctccttcctacgggggtccctccgtgccagggtcggggggcccccccgccggcggcagcggctttggacgagggcagaaccacaacgtgcaagggttccacccctaccgacgctagcccgcggcgccgcgacgtctgcacggcccagacccaggattccaaacttgtgaactcgtgacaatcacaaacttggcggcaaagtggcgactcaaccttggggggggggggcggggggagggcgcgaggcttttggagcggctgtgggtgtcgtctggactgaggtttttaaatatttctttctctaacccatcagcacaataaaaaaaagtcactggttcaacaacagggtttaaaaaaaatgtcttcagctttaattcaaaacttcaggtttctttttcttccttttttttggaaattattttcctgagccttttgttttacggtatattgtaaacttttatgttaaagaaaaaatatacatttacaaattgtgagatttttaagagaaattttctacgatgtatactggcttattttttaatttaaaacggggtttccgtcggcactggtggagggggtgcgctgttagtcccctcgctcctggctttgggggttgggacttggtggtccagaaactctgggagcttctagaagaaatctactgagtgtatttctgttttttgtttaattccttgcttttgtcgactgacctgcttggtagtgtctgaggtgaactgtgggggttgcgcacagccagccgcgtggatcccacgcagcgctgaaccgaaccgagtaggaagcctttctccccaggcacgtggctttagggcgtttcccattgaccagtttgaccctggtttgaataaagagaagtgcgtttgg

SEQ ID NO: 1911 - DNA, 4436 bp, Homo sapiens
attatttgtcggccctacttttcatgcagttttaggtggggaaaatcaaacttcttagttttgaaagtaaaatgacctggtttttaattaccagctcttttatttacctgtgctgcagaagtgcttgggggggggcgttgtttttcttctgaggtctttgcttttctcaaagactggggagcagcctcaagaaatgacacttgtattgcacaaagcctacttacagtaaagaggtttgggtgcctatgaacatctggggtgcctcacttgcccgtggttgtaactgcagcctgcagacattattcattctctgcttcctccctaatctcttggtgcagagaccagtgcagggcaacctgagcttagtgttctatgttttgaagccagagttagggctccagctctgtccactgtgtactcatgtggcaccaagaagatcacagatcccactggggagttgccaaggctctcccctggccgcattgccaggaagtcctccagtcatcgttgttactagtctgcagcaggtgtagcaatgcttgtgtttttgccctttgtttcccccatgtctctaaagacttcattttcattaaagcgtaattttgcaccctgggctgaaagaagcgatcactgtttctgactgcctaatttgtttttgagaagcacaaatctatctaaaagcaatttaatagtggtatttattctaacactctgaaggagtcttatcattgctaaattctttaaaattcaaaagcttgttccatcaggccacagcagtatgagtgactgtggggctgacagcatgttgaatcttgattgtctcgagtgtcggtttaaagtgtactctttatttgtgttttgttttgcttttctgattgtaaaagaaacgcttattcattgccaaatttttggaaaataataagatatacagggaataaaaccaaaattactcataatttcactgcccaaaaatccattaacatatagggtatttctttcctatatttttctttgacgtaagtaccttttaatcccaaaattaggattataatgtatatatagctttgttcttctttgtttacttaatgctataacatgttcttttcctcatgtcattgaaagtcacatttttgtataaagtactcattgcttagatggatcatgatccagtatattctgttgcagtgggaagaggagaggaactttggtgcatcccttttgcttccaggcctaaaacaaaagaactcagtgggtttcagttcccagttgtatggctatgcacttcttggtaagctaaatgatccttacaaatactgttcttcatggttagaattgttgcattcttccagttcataataaaattgtaatttgatttaaatttaccagtgaaatccaattagccttcgtttttagacataaaaatagaccttgatggccttacagttactccataagagagtaaagagggttcttaaaacctgccatcactggcaaagcaagaactagttctggtggatataggtaataatattcagtggtaatcagtctgaagaagggataaagaaagggatgttctggccctgtttagggagactagctagtagaatcttttccagtattaacaaagatctttctgtctctttagatctaaagtccagaaggtaagaaattaagagttagagttgaacttgtatctttggtattgttttcaggtaagggaagataaactaagagcagaagtagtagcacttcaggaaaagtggagtggttcatgggtaccatgtgattgcaccaggaggtgcagtggtggctttcctcttgtgccctgattgcattgaaaatcagacaggttaagaggacaaagccttctgaagagtggcctcggaacctgggttgtgtggaatctgggtaaataagattcaacctaaatgtaacgtcccgatttacagacgtttattaaatttatgttatttcattactctcccatcgtctcttaagtagttaggcatctctcaattatacattgcttctgcttacctttgttttttaaaaatcataaagttatagcagtttgactgcttttgaagttgatctttgccaacagaatgtagtgtgttattcttggtgctgattctgatataataactcaggaacttcagagtttattgactgtctatcagactaacaaaggagttgaccactctttttaaaaataattttttccttatttgccacctacttttgatattgatttacatgtattttcctttgcttttagatcagcattcaggactgtcatacagcctgaattggtcagaagtgacagggcaaagaatatgtactttgttgtggtttgtgagcagaggccctggttctttgtgatagcagccatcagatcagaagctctttgctctcattgtgtcatttgccgtgcagcctcactcagccctgatggaagcagctgcccagaatgtaactgcagtccagccccaagcaccttaaagggaaggtggagttgcagcaagggctacgggctgtgtaccacaacatgcctctgatatggaaaccaggctaccttgacagagcccttcaagtgatggagaaagtggctgcctccccagaagacataaagctgtgtagagaagcgctcgatgtgctgggtgcagtgctgaaggctctgacttcagctgatggggcttcagaggagcagtcccaaaatgatgaagacaaccaggggtcagaaaaactggtggagcagttagacatcgaggaaacagagcagtccaagcttcctcaatacctggaacgatttaaggccttacattctaagcttcaagctctgggcaaaattgagtcagaaggtcttttaagtctgaccacccagcttgtcaaggaaaaactctccacctgtgaagcagaggacatcgccacctatgagcagaatctgcagcagtggcatctagaccttgtacagttgatccagagagaacagcaacagagggagcaagcgaagcaggagtaccaggctcagaaagcagcaaaggcatctgcctaatagggtcccccagggccccacctgtctcacaagaacttcactcaaccccgtgccaggactcagcagtggcctggacaacagcctcagcttcctctacccatcttcttttcttaaagcaggctatgtgccctacatggcaaggcaccatgactgcccatcgagatgccaagaagggctatggaactatgcaggtggctagtggtcagactgaagtcaccagctgaataccttaaggaggactcttgaggctcataatggagttcctggggcacagggattagttatgagcattaaagttcctaagacccagtgacagtactgggagaaaccaaggctgaagagtcaggttgaagcacaggcttttgttttttgttgtttttgttttttgagacagagtctcattctgtcacccaggctggagtgcagtggcgcaatcttggctcactgcaacctccgactcccaggttcaagcaattctcctgcctcggcctcctttagtaggtgggattacaggtgcataccaccacacctttctaatttttgcatttttagtagagatggggtttcaccatgttggtcaggctggtctcaacctcctgacctcaagtgatctgcccgcctcagcctcccaaagtgctgggatgataggcgtgagccaccacacccggccaagcacaggcttttgaatggtctccctctccccagcccaggtacatgaggccaaggtgaactgtgcatcctgagaccttgtgtccctgagtctcctttctgagtgcaagctgcactgtgagctggctgtgggatactcacacattcccacattctcctttctgccacatctcgcccttctggacctgcactgggagaaattcaggacaggagtgaactcaaggccatgaactcactggatttccatttttaggcacccatagggatgtttttaggatgtaagtttctgaggagaaagctagctctagcatgaagcttttttggattggcttctccatcgtgttggggtaacattttttttccaatttttttttttcccaaaacatcgtctcagctcatttatcaagtaggtaaaatgagccttttgtgtacacacagaggcacatgtgcatgcacacacaacttgtgaacacacatttctgttaaagaagttagaaaatgagagatgggttggggcttgaagtgcatcagaggtatgaatgttgtaaaactgtcaggagatgtaaaattcctttctgaagtgtctcttctgtgaaagggttcagagcagattttgcttactatgtagtgttgcccttaagtacagtggtgtaattttattcaagattgtgctcttctatcaaaagcctctggaaataaatgttccgggatc

SEQ ID NO: 1912 - DNA, 3832 bp, Homo sapiens
ttttgggatgccagggactgagtagggggtgctctaagctgataactgagatcgctagcctgtggctgcctattccaaacaaaacagcaggatccaaggaaccatgacttatcaggggccggccagggccgtacacagcatcccacccactgatcaattgcacagggctgctctgcaggcagtgaggggctgggtgggtctcactccccttgctctctgccaggccacccagcccagcgcccagagcccagccctccagagccagagccccaggctcccgaagggtcccaggccggagcagaggggccctccagccccgaggcatcaaggagccctgcacggggagcctacctgcaaagcctggagcccagtagccgccgatgggtgctgggtggggccaagccagctgaggacacctctttagggcctggggtacctggcactggggagcccgccggcgagatctggtacaaccccatccctgaggaagaccccagacctccagcacctgagcccccggggccacagcctggctcagctgagtcagagggcctggccccccaaggtaagaacaagcttcccatccccttccccaaggtgagcaccagctccacatcccttcccttcagggtagcaccagcctcacactccctcctcccagaggagcaccaacctcacactccttcccttcaggggagcaccagcctcacatccccaccccgtcagatgctcccagaggagcatcagcctcacaccctcctccccgccaggggaacaccagcctcacactccttcccttcaggggagcaccagcctcacccccctcccctaagcccaggttcctggaccctgaagtctgctctccacacaggtgcagcccccgccagccccccaaccaaagcctcccgcaccaagtccccgggccccgccaggcgcctctccataaagatgaagaagctgccggaactgcggcgccgcctgagcctgcgaggcccccgggctggcagggagcgcgagagggctgcccctgcgggctccgtcatcagccgctaccacctggacagcagcgtggggggccccgggccggcagcagggcctgggggcaccgggagcccgagggccggttacctcagcgacggggactcaccggagcgcccagctgggcccccatcacccacctccttccggccctacgaggtgggtcccgcagcccgggcacccccggccgcactctggggccgcctcagcctgcacctgtacggtctcggggggctgcggccagcgccgggggccacccccagggacctctgctgcctactgcaagtggatggggaggccagggcccgaacagggccactgcgaggggggccggacttcctgcggctggaccacaccttccacctggagctggaggccgccaggctcctgcgcgccctggtgcttgcgtgggaccctggcgtgagaaggcaccggccctgtgcccagggcaccgtgctgctgcccacggtcttccgaggtaggacatgcggctgcaggggaggaggggcagggacccccaaaccccaccgccaccccccgcagagtgcctagggggctgggctccgggcggaaggtgtggcctggagcagcgaggccagggtacatgaagcttcagagcacacccggctcaggcccccttgtgtcctcagggtgccaggcccaacagctggccgtgcgcctggagcctcaggggctgctgtatgccaagctgaccctgtcggagcagcaggaagcccctgccacagctgagccccgcgtctttgggctgcccctgccactgctggtggagcgggagcggccccccggccaggtgcccctcatcatccagaagtgcgttgggcagatcgagcgccgagggctgcgggtagtgggactgtaccgtctttgtggctcagcggcagtgaagaaagagcttcgggatgcctttgagcgggacagtgcagcggtctgcctatctgaggacctgtaccccgatatcaatgtcatcactggcatcctcaaggattatcttcgagagttgcccaccccactcatcacccagcccctgtataaggtggtactggaggccatggcccgggaccccccaaacagagttccccccaccactgagggcacccgagggctcctcagctgcctgccagatgtggaaagggccacgctgacgcttctcctggaccacctgcgcctcgtctcctccttccatgcctacaaccgcatgaccccacagaacttggccgtgtgcttcgggcctgtgctgctgccggcacgccaggcgcccacaaggcctcgtgcccgcagctccggcccaggccttgccagtgcagtggacttcaagcaccacatcgaggtgctgcactacctgctgcagtcttggccagatccccgcctgccccgacaatctccagatgtcgcgccttacttgcgacccaaacgacagccacctctgcacctgccgctggcagaccccgaagtggtgactcggccccgcggtcgaggaggccccgaaagccccccgagcaaccgctacgccggcgactggagcgtttgcgggcgggacttcctgccctgtgggcgggatttcctgtccgggccagactacgaccacgtgacgggcagtgacagcgaggacgaggacgaggaggtcggcgagccgagggccaccggtgacttcgaagacgacttcgatgcgcccttcaacccgcacctgaatctcaaagacttcgacgccctcatcctggatctggagagagagctctccaagcaaatcaacgtgtgcctctgagccagatgacggggtgggaccccggttagtaaggaccgggcgcccagtggctaaggcggtgccctggtgaccaaggagagccagacctgttgctcaggccgagctcctggttgccagcgagttaccacgggaccagtcgcgtgtatggctgagactcattcccagtttccagggcccggtatttggacactagttgccaagtctggggcctggggattttagggaccagcggttgtgaccatctttcctgagcaccaagggcttccccttttgttgccaaaaaggtagttctcgcgcttgctaggctggcctctcttgcctccccttggccggggcaacaccagttactgtgagcatcaccctggtgtggtgagtcacctctagtcggccctcttgctgctgccaaccaaatcagtattagctttgagcactgcactgtttctccctcccttggacgacacaaagactagcatgaggcactctttgtggggggcagcccctatcctgggttccagcatggacacaggggtagcctggggcttatagagaaacagctggtttcccctaccctttcccggggaagaccccacgattggcctctagtcagcaaatggagataacagagtctggcctttccaatccccatctccttgcccccccttgccccccccccccgaaaaaaattgagcacttaaacccctcccttttggagggggccccctgaagcgtcaggctgggggcagtctggtacggaacatatttattgcctccatgcatgtgtgtgtgtgtctgtgaggactggtgtgcgtggacacgtctgaagcaggcgtgtggggctctttcagggaccacagaggagggagcagtttgcagtgcccagccaccctgaaatccccaataatggtgcctcagtgggccccagagttccagtgggagagtacggttccctcctgtctccctcttcttttccgcacctccatctttgtggataataaataaatatgcacaggt

SEQ ID NO: 1913 - DNA, 3876 bp, Homo sapiens
ctgtccctgattcccagccatcacggggaggctctaccttcaagtgttatccagaatcagaccacctcacctcatctactgtggcctccctgggatgggcctggcctccttcagtctgttctcaccacaaagccaccagaaggatccttttatttttattgattgattgattgatacggggtctgactctgtcagcaggctggagtgcaatggcacgatctcacctcactgcaacctctgcttcttggactcaagcaatcctcccaccactgcctcctgagtagctgggaccacaggtgcacaccaccacacccagttaatctttttgtatttttggtagagatggggtttcaccattttgcccaggatggtctcgaactgttgagctcgggcaatctacccacctcagcttcccacagtgctgggattacagatatgggccaccacgcccagcgccttttaaaagtgcagttggatcatagcatttatctgctcataacaatggcttttgcttccccgctcactcaaaagaaattccttcttcactgcagaactgcccctcctaccacaggatgtttagggttcctggctgcaacccccaaaggtcctaatggtgctggtcatggggggatccacaccattgtgacaacgaaatatgcccacatgatgcccaaggcttcagtcctggccccacccttccactgtgtcactgtgctgggttggttttctcatctaaaacatggtgatggggataacaaacttgaaagagtgtcatgcaaatgaggtgtccagcatcgggaggtgtccagcatcaggaatattaataaagggtccccagtgataccggccgaggcataagcaaactccactgctcctattatctgcacctgaagatttacaccttgcatatatgtggatccttttccaatttcttctgtattaaacattctctcctgtatcagaaagtcaggttatgggttggagctacaaatctgcccttcgatccatcccccccatagagtgctttgctggccgtaaggatggactgcagacagcagctccctttgaggccgcccccagctcctctctttcatagcgggctgtgtgaatcaagctccagcacttctactgtgtgatcctagatcagtgtctgaacctcccagagtttccttctctgcagatggatgtgccgatagcccctgctacacagggctgagctgaaggggaaatgagacagtgagagcaaagggagcctggtgccaggcatgtaccgggcattcagaagtggctaaccatggtagcctgtccctagtctaaagccctgggcaccatgcccccacctccaccccctcagttccttcccgcttgacttcaggagctggattccctcctcttgccagaaaagtccagctcatactgcctacggcacaaattctcacaccaaccattaggttcctgccaggtcctggccagtcccaacaccatgaagcaggagggcaggcgaattttgagcagagagactgtttctgtttggcatcagcctctgccgatgcccaggaaagctggaatgctctcctacaagagtgacagttccccacacactaaacattctttttttttttttttttttttgagacagagtcttgctctgtcgcccaggctggagtgcagtggccgcctcccgggttcaagtgattctcctgcctcagccccccaagtagctgggactacaggcatgtgttaccacacccagctaattttcttttgtatttttagtagagacggggttttgccatgttggccaggctggtctcaaactcctgacctcagacgatccacccacctcagcctcccaacgtgctgggattacaggcgtgaaccaccacgtccggccaattctgtcttttgatggaacaacagaggcttagactccaggctccagttactttttttttttttttttttttgagacagggtcttactctgtcacccagactggggtgcagtggagcaatcacagctcaccgcagcctcaacctccctgggctcaaagtgatcctcccatctcagcctcctgagagactgggactacaggtgtgcaccaccacgcccagctaattttttttttttttgtattttgtttcgctattgccaggctggtcttgaactcctgagctaaagcaatcagcccgcctcagcctcccaaagtgctagcgctaggattacaggtgtgtgccaccacacctggccaggctccatttaattctttttttttggagacggagtctcgctcttgtcgcccaggctggagtacaatggtatgatctcggctcactgcaacttctgcctcctgggttcaagcgattctcctgtctcagcctctcaagtagctgggactacaggtgcccaccaccacgcctggctaatttttgtatttttagtagagacgaggtttcactctattggccaggctggtctcgaactcctgacctcaggtgatctgcccacctcagcctcccaaagtgctgggattacaggtgtgagccaccatgcctggccagctccatttacttcttgagaaactcatggttctctttttagtcactttggtcacagagagattatttaacatcgtttaataaaaaagtagtagtgcaaacaggaaagtagcataaaaatatagtgttgttgtggaaggctggtgcttgctgctgagaagctgaagccagaggaggccaggtgtgaggaaggaggattctttaaaggcaagaagagagaggcctgcctttaagagccaagagagccgctcatccatgaccccaacacagagctctgtagaactgctgtcacacgccaaacaccaacataagggggtgagagaatgaactccagccgcttctcccaacacaacccaacagagctattctgggacatgtgtgtttgcgagcttgtgtgtggagagcaccaaaaagctcatcagcagccccaggcctctgtgcggtctggttttcagactggcacccgcaggcagtgcatctgaagcaccttctagttactatccccatctggaatcttggttttctccattccatgtcaccttctattgccaacccaagggtgccagtgcctgtgggtctcattatatgatactctcttccaggactgaatccgctagtctggccaaaaaaaaagcactcagccacatcctactccccaataaatgtctctggggtcttcattttctcttccggctgatcctcagttcatccagttccttctccattaagtgggattcagcagtggactctgaaagctgagagtgaagcagcggctgttagcaagcagcacatttctaggaaatgtttcgggttagcaaggccggccctacacacggaggaaaggccccctgccacttctctgatgctgctggcttcctcgatgggaaaccctctgtaactgggtagaatgcaacccctgatgacccaggaccacaagtacttgaagaatattcacagtccactctgtcagcacgctgtcacccacgagggcatggcactccctgcacgaaggagagcaggtctcagaggacgtcaaaggcagatactggtgattgtaaggctaagggattagagctgaaattgattctaagctgtagctcccataatggggatgaggggaaaaaatgctagaaatagaatgccactttcctccttagggtttttttgtttttgttttttggtttgtttgttttctgagacacggtctcgctctgtcggccaggctgggtgcttttcttgtactaactcactatgaggtagatactacgattatgctcatttttaaaaaaaaacatcatgcccagcctagtcctttttt

SEQ ID NO: 1914 - DNA, 4881 bp, Homo sapiens
atattcagagcctcagaaccacgtgcagcgtctgtttctgcagtgcgagctgtttaatgccctgttaagtactgcagatgtctggagtgccgtgcatcttggcattcaggggtgacgtctttttttattcgagagggcaaagcagagggtatgggttaggcagtgccttctgggaggggccttttgttccttctccacatctctccctgataagggtagctggattcctttctacaacttggcttccttgtggcctgagctgtttgtagtccttgctgaaaatggctccgattccatttaacaaatgagaaacacttcttgtccagatgcctccatggtccccagtcttccttctgtgtcatttcactttccctcttccagagggctgaggccctcctcaatacagggaaacaccttggtcatcagatcttgtcatgcttgcctttgccccaaaactgtctcgaccacttggtggactttcagtgggatccttgtaaactgtcaaaggaaaccacttcatcctcacagctgccagtttttaagcctcgtgaactcagatctggatggtccttctgtcatttataatcaatcactcagtattcctgcagcaacttcagggcctctggtcttgaagcagaccctgcagagcaatcaatcaaacgctgagcgcctggagggcttaacctcgctcagtttcctgttcttcagtctccctaacccaggtctacccggtcctatgcagttatattccttaccatacactgacagcgtccagctgggggcccggtgcagtaagctgcacagtagagatgctgggacgcttttaaattcctgatgcccaggaaattcccagcttaattaaatcagaaatgccgcagtgggggccagacaccgtttcacgttcccaggtgactccagtatgcagccagactcgagccactgcaatagacccattttcctgttgaaaaatcatgctccccccagtgttagtaaatgtccttcagaccctgtggagtggccttctttaaaccacgacaatggactggcctttatgtccaaaggagacaatgctagcttggcttcagccctagtgaacagtgaacagaggaagcaggcagtttaatccatccgtggtccttcctctgcctcccaattaactaagtgtgcctttgcagtcaactctgacgtccttggctggtaggcaggcaagggagggaagtacaaggcaagtttacaatcctgattcaaaccagcccactatcccgaaaccagcacacagagccggcatcaccatggaaacacatttcctcacagtggagcaagatgccagtagaggcagcgagtgtgtttgtgaagacagccatagccaggggcagggtttccctttgcaggagcaggagtggcaggagcggggaggcaggaagctctctgggttcctgggggctttggagtccattctaacagtctcacatgagactgggcattttggtgctgccaagtcttggtaccagaggatgatctgctgctgccgttagcagccagggttggcagaaaatcaaatttggagtccccaagtgtgacttcagtcctcactgagaagtgcacagccggtgtggggggcttaacaagagcactttgctttctggggatttctgcttgggcataaaagcatttgccaatgcttgcagaaaacacagaacaaaggatgcaagtacagcagcaacacagccaggagggcagccccagaattgggaggccaacagtgctactgggctcaagtgctgttataaggagaagtgtggctgtacacgatgctctgtgtgttgaagtgctgaagacctcggctgggctgggactgagtctggatgggggaaaatcatcggtgacgggagatgggcccttggtcattaaaagagtgtacaaaggtggtgcggctgaacaagctggaataatagaagctggagatgaaattcttgctattaatgggaaacctctggttgggctcatgcactttgatgcctggaatattatgaagtctgtcccagaaggacctgtgcagttattaattagaaagcataggaattcttcatgaattttaacaagaatcattttctcagttctcttctttctttagcaaatcagagtgacttctttaaaccacaggttgttgaaatggccaacactggtacagacacggactataaaaatctccaagcttgtgcttacacatgaagcctgacttaactgtatgtgcaacagcaatgaaattaactccagaagccttccacctgcgtcacccaggccgggagggttccttcgttccagtgcctgtcccctacctttatgttatgtttactgatggggatacaagatgtgacacacccttctttatttgaaacaaacaaacatttagctagacctttgcttccttcttgccagctctcccaacatacccaatcctggtgatcagggaactaaaagtctgagggggacacaaatgtcacacctaagaggacaatcaatcattttgtatgattttgtaagtaagtaaatgacagaatgcttttaggcacattcaatggaaggaggagatgtaggtctgtatatgttaccctgaaaagagaataagacttacttaaaaaaatgaattatgacctgttaggctgagctcaggaattgtccaaaaaggaaaaagcaaaataattaattgagagtattttttagtgagtgtaatgtataatgtacgtatgcaaagttcaactcaataggttattgatcaccatgaagtattgatcattttctatctcaaaagtgtaagccataaggctgttttacagaatagcacttctgataagctgtattaaatagccatgagcttcactgcttagagggagcagaaaggtcaacatctaaaagcaccttacaactagtttttgaacctgtcttgataagtgcttgaattcaagactggtcagtacaagagcagacaaaaatatcacaagtcagtcactgggtttccatttctgaattttatgcactccaaccatgaatttaaactaaatttttagaaatcaagtatctttctaagtgtccttggatttatagacaatgtatgtacaatccaaatagaggagcttaatggaatccttttaggagactggttggtttttttttccctctttcccaacatgtttaagaaatgtaacattctaagtattggatctcttttcttgacctagtataatgacaactgcagtgacttaagtttttgctgttttcgttttcccgctttgcaatttcctccttttgccaaaaatgttttcctacagaagactgtcgtgactcacgctacttgggaaactcactctggccactcctcctctggtggcatgagctgcttcccagtagctattccgattggatattccgttcgtcgtcacatagctggcttttctctcctcatgatgtaccttattttcttaggtaaataattccaaactctcatcgggtcgtaaagaggaggagaaacagggtgagtcaaggtaaaggagcagaaatgtagttacaagccaggtcgtcttcagtggcacaaaccaacccgttgagccctgacaacatgagtggagagtgcatttgccatacctgtgtgcatgacactaagattttatgttggagatacttctttaaataacctacagcttgggtctatggctgtgacccccagattcatggaggggctttagccatcagctttgtacatcatcatttttctgaatgaccaatcccactaaacatctttgaagtcggcctagagaggtccttcggatgagagagaaatagctggcttgtctgagtccagatttctcatcgactggcaatacaaaggaaaatatggtacaggagttagttagaaaggtcttattgattttacttctacttttcactacagttacaggtagaatactgtaggaagtcagtgcaaggtgcatgcttgattgatagatattgattgtttttcagtctctggggtcagttttgtggtttctgctttcttgcctaaatcaaagactatttcaagtcaacaacactgaaaactgcttttcgcctccactcttacagctgtgcctaataataattaattaataaacgcacagccctatgtgaacagacaggaatttcttgtgcaatgtggagcgaatggaatggtctccttccgcaagtctttttaatcctcatatctggagtacaagggtagacctctggcttaccacatacactatgctaaagtcatcagccactgctactacatcttgccagaaggtttccctcgccaacaaacagttgaaatttaagggaagaagcaaaagctaaactgtctttgaccctaagatagatagaaagctatttatttgtcttcagtgttcaaggcatgactagtatttctaattagcctaataaattcccacactttctgaagtgaacactaatggtattgtcctactaaaactgtcattgtttctttttttttaactggtcagtcattcacaataagctatgagggtaaataaatatgtgttataacaagtaaaccgtagttgcaagaatataccatgaagattaaagtaggctgggtttcatttccatcttcccacacatctcattgaatttgatggttgacttaattggcaccataactttgtatgatattatacattaacctttatttatgtaaagtaaaatgccttatatattaaagagtaagtgcaataatatgaaatagcctgtacattttaaaaatgttgtcaccaagttatataaatccacatctctgtaaacaaccttttttaagtaattttaaaaaaaataaacactctgcttact

SEQ ID NO: 1915 - DNA, 3663 bp, Homo sapiens
aggccacagactgggagaaaatatttgcaaagcacacatcaaaacactgacttgcacccagaacatacagagaactcttaaaaactcaaaactgcaaaaagaaacacctaaaaattggcaaaagagttgacaatttgcgaaggggatatacacatggcgaaaaagcacaggaaaagatgctcaacgccattacaggttagggaagacaaactacaaccaggatgagggcccgaaacacatggcttcagaatggtgaaactcagcaacactgacgaggccacgtgcctgggaggatgcagaggaactgggacactccagtgttactggcgggaaggcaggtggtacgggcactgtagaaaatggtttggccatctctgatgcagttaaaagcgcacttcccgtgggacttggctgccccactcctgggtataagatttacccccagagaagtgaaagcgcgcagccttgtagaaacccacacaccagtgtttgtagcagtcttgtttgcattttggatagcggccttgtttggttttcacaaaccaccctcagcggacagtcagataaactgtaggcatccatacaatggaataccactcagatctgagagggaacgacctgtggatacagggagggaacaacttggatgaatctcattagagacattatgtggatggcgggaagccagtctcaacaggttacttgtctcgcgatgccatctacataaagttccagcagagacaaaagtacagtgagagaacagatcagtgtttgccggggctaatggtggggacggtgtgatagtgaagggacagcacggagagttttgcagggtgacagacctcttctgcatcctgccaacggctgtgtgaatctacttgtgtgaagactcagggaactcacaccaaaggaagacggtcacttttcctactgtatgatagataattaataaaaagggagaacggaggagtgtcgtcccaggaggcagggcaggagggcgaagacgtgtcacaggggagcctggccaagtggcgcccccggaactcgtcctctgggcttgtgtgtggatgagacaaggtctacctggtacgacagggatatactgggagtgcgcccttgccgtggaggcggggacccggcagcgctacgtatccagcatcaacctttatccagcatcaacccgccaagttcactaacttggtaggggtgaggttagggatccttaggagcccaggcagccagactttctggggagcccattcccatttgtgttgccaaagtacccccagcaggttgtgggaatgttgcctgtgaagagagtctgttggggtgagatcttgtgtgtgtgcacagggtgacagttgtgtcccatttcccgggaagctgtgatggcagcagaacctagaggagcctgagagagtgtgggagagcgggcctctggaagagtagaggctgcggagccaggtgcagggctgtctgtcacccaaaggaagagggactgatgactcactgagcgtgtgtgtcccctggtggcagcaggccccatagtgaacataccataccttttctgtcctgagcgatgctcccagcagtcctgggagatggaacggtccttattcggctcacaggaaggaccgccttaactggacagacacagcaaggtgctaaagatgccttccatcagaggccaggttggaagctctaaagagacttctcttgctgttctctcacccacccccaggttgtgtgtgtcccgctgtggattctcatgtcctttctgtgcctggtggtcctctactacattgtgtggtccgtcttgttcttgcgctctatggatgtgattgcggagcagcgcaggacacacataaccatggccctgagctggatgaccatcgtcgtgccccttcttacatttgagattctgctggttcacaaactggatggccacaacgccttctcctgcatcccgatctttgtccccctttggctctcgttgatcacgctgatggcaaccacatttggacagaagggaggaaaccactggtggtttggtatccgcaaagatttctgtcagtttctgcttgaaatcttcccatttctacgagaatatggaaacatttcctatgatctccatcacgaagataatgaagaaaccgaagagaccccagttccggagccccctaaaatcgcacccatgtttcgaaagaaggccagggtggtcattacccagagccctgggaagtatgtgctcccacctcccaaattaaatatcgaaatgccagattagatgccacttccggggacagagcttaagtggactgggacgcactctctccgccttcctctgccccctcgttcaccccgcagaccagaaccagtactggagctgggtctccaggtacgtccatctcatgccttgtttgcatccagcgcctatcagccactcaccacgacgggacgcggaagtggcaggtgacgggggtgtgtgccagcagatgcggatgccaggaagagtgtgagaacaggggtgggattaccgtctgtctgggaggggctccaggtacccctcttccccgtcagacccactgggagatggctgcttgccaggcccccagaaggaacatctgtctatacggtgctgaaatcccaatcaaaagtattgtttagaaatgtatttctccacagggctgacctcctgcagctcgctgagcactcccaggtcctcagcactcccaggtcgtggctggggcagtcagtaggaactgtaactatgtctctgatgcaccacgtgtttagacacagcacagtccttttttctgttcctactgtggaagtagtttctctttgggcatgctgacagcagtttttcatagcctcacggatgagccctttctacgggagtgactccatgcttgtatacagagtatttatacaaatgttttagcatcttcatatgcggtgttaacccctagttctgtacagcatattctgttcaagtatttttttacaagcttgtgctgtaggcacatgccttctgccctggaactcgtgcaggtacgtagtagctgctactgccacaacggcaacaccaagcaagagatggtccatgcttttctgacgttctcagaatagtggctagcttcaaacctgacaagcgctgcttgaagccggaacactagagaatgttgctgagagcagaaacggccacgcgggtcacgactatgcgtgggaaagtctcaagcttccctcctgccagcaacaagaaggctttggagtaggcatgatgttttcacgtgtgcgtgccgtttctccaagcactgcaggttccaccgtgtgtcagaggctgcaagtttaacatcctcctgcctgaaaacaaataggtcctttgctgaaaagagggtaaaaaaagagctttgatcttctcagccaggagaagagggtggtgttttcacgcgggcaactgctcgccggcctacatggggttaattcaagtctgctgcgagcacgactccgcccttggcactggcctccagcaagccctgttctctttggggtacaggggaacgggatggtttagactttcctgctcagtgtgtaaaaaatgtagctaaagccactatttttgctctccttaagctgttcaataaaccggttcctcatttt

SEQ ID NO: 1916 - DNA, 5120 bp, Homo sapiens
tattgtaatagagggtgggcctgactcctaatgggaggcccaggtctgcggctggactggacacaagcaggtgtgtgtgtgtgtgtgtgcatgtgtgtgtgtggccagtggcagcaccagtaagtgccaaggataccagaaccactggggcagctggaataacaagcccaagtatgggggtcccccgtgctgggcacatcccaggtatctccctccccacccattgccacaggacacctctggggactgggtgcctcacgccccttctgtcttgactgccctccatgccctgccccacaaacgctctgataacagtctgtccctgtctctctcttgctgctcctatggaagcgaagttttccgctcctgcagaaagcaaagttacgactcagagacggctgaggatgacatcagcgatgtgcagggaacccagcgcctggagcttcgggatgacggggccttcagcacccccacggggggttctgacaccctggtgggcacctccctggacacacccccgacctccgtgacaggcacctcagaggagcaagtgagctggtggggcagcgggcagacggtcctggagcaggaagcgggcagtgggggtggcacccgccgcctcccgggcagcccaaggcaagcacaggcaaccggggccgggccacggcacctgggggtggagccgctggtgcgggcatctcgagctaatctggtgggcgcaagctgggggtcagaggatagcctttccgtggccagtgacctgtacggcagcgcattcagcctgtacagaggacgggcgctctctatccacgtcagcgtccctcagagcgggttgcgcagggaggagcccgaccttcagcctcaactggccagcgaagccccacgccgccctgcccagccgcctccttccaaatccgcgctgctccccccaccgtcccctcgggtcgggaagcggtccccgccgggacccccggcccagcccgcggccacccccacgtcgccccaccgtcgcactcaggagcctgtgctgcccgaggacaccaccaccgaagagaagcgagggaagaagtccaagtcgtccgggccctccctggcgggcaccgcggaatcccgaccccagacgccactgagcgaggcctcaggccgcctgtcggcgttgggccgatcgcctaggctggtgcgcgccggctcccgcatcctggacaagctgcagttcttcgaggagcgacggcgcagcctggagcgcagcgactcgccgccggcgcccctgcggccctgggtgcccctgcgcaaggcccgctctctggagcagcccaagtcggagcgcggcgcaccgtggggcacccccggggcctcgcaggaagaactgcgggcgccaggcagcgtggccgagcggcgccgcctgttccagcagaaagcggcctcgctggacgagcgcacgcgtcagcgcagcccggcctcagacctcgagctgcgcttcgcccaggagctgggccgcatccgccgctccacgtcgcgggaggagctggtgcgctcgcacgagtccctgcgcgccacgctgcagcgtgccccatcccctcgagagcccggcgagcccccgctcttctctcggccctccacccccaagacatcgcgggccgtgagccccgccgccgcccagccgccctctccgagcagcgcggagaagccgggggacgagcctgggaggcccaggagccgcgggccggcgggcaggacagagccgggggaaggcccgcagcaggaggttaggcgtcgggaccaattcccgctgacccggagcagagccatccaggagtgcaggagccctgtgccgccccccgccgccgatcccccagaggccaggtcgaaagcaccccccggtcggaagcgggagcccccggcgcaggccgtgcgcttcctgccctgggccacgccgggcctggagggcgctgctgtaccccagaccttggagaagaacagggcggggcctgaggcagagaagaggcttcgcagagggccggaggaggacggtccctgggggccctgggaccgccgaggggcccgcagccagggcaaaggtcgccgggcccggcccacctcccctgagctcgagtcttcggatgactcctacgtgtccgctggagaagagcccctagaggcccctgtgtttgagatccccctgcagaatgtggtggtggcaccaggggcagatgtgctgctcaagtgtatcatcactgccaaccccccgccccaagtgtcctggcacaaggatgggtcagcgctgcgcagcgagggccgcctcctcctccgggctgagggtgagcggcacaccctgctgctcagggaggccagggcagcagatgccgggagctatatggccaccgccaccaacgagctgggccaggccacctgtgccgcctcactgaccgtgagacccggtgggtctacatcccctttcagcagccccatcacctccgacgaggaatacctgagccccccagaggagttcccagagcctggggagacctggccgcgaacccccaccatgaagcccagtcccagccagaaccgccgttcttctgacactggctccaaggcaccccccaccttcaaggtctcacttatggaccagtcagtaagagaaggccaagatgtcatcatgagcatccgcgtgcagggggagcccaagcctgtggtctcctggctgagaaaccgccagcccgtgcgcccagaccagcggcgctttgcggaggaggctgagggtgggctgtgccggctgcggatcctggctgcagagcgtggcgatgctggtttctacacttgcaaagcggtcaatgagtatggtgctcggcagtgcgaggcccgcttggaggtccgaggtgagtacctgatttctccatgaatgcccacctggccctggccccttccttcccccactgtctgctctcacacagcctcagttagaggatgccaccactgaaagggccttaaggggcccctagtccagctgcttatattattgttgagtgaaccaaagcccagagacaggaagtgacctgcccaaagctgcacagcacattgttccgtgctcagcttactacacaacaccaccttccctgttgctccatcacggagccctggcggcagccagagaccctgcacctgccactggccaagctctctctacactcttctgagcctttgtcaccctgctctgcccaggaccctccctcatccccctccccctctcctctcgcccctttgcccaccctcccatcccattgctgtgcagaagctactgtgaggtagcggtggggagagtctggtggctggacccgttcggaggggcccttggggtggcttaggcttggagcatcacagggaccctagggtgccagggtgagcacagctgtgacgtgtgaagaggcctgggcccccagagcctggggcatatgtgcaggggccctctcaggcagcagaaatgccaggccctggctagggggccctcgagggccatgggttttcctccccaaaggccacaaccgtttatcttgccttccacctcacccttcgcctcaatggctcctcgcttcctctcctcgcttctcactcagcccccagcccctgaccttccccaaggctcagagctcagaccctgacagtcatggtccctctgctggcccccctgcctcagttcccctcctctgtgcctgccgttcctgtagttgccacttccttggtctccagattcttcagccctcctccccggcctgctttctctccagggcctggctctgcctcgcttctctgtattaacccatgtcttggtgcttctttctcttggggattccttccgacacccccaggctttggggtgctcctgatcccatgaatgcctggttgcccggggtctctgcctgcccaggaaccccgaggaaccagtctctggctagctgccggccctcgcagcccagagctgtccttgggggagccaagagtggcagtgctgccctgacggtgtgagaggcagccctctatgcagaagggccctagccaggtctgcgtgcctgtgcgtgcatgcgtgcgtgtgcgtgcgcatgcgtgcgtgtatgtgcatgcatgtgtgtgcatgtgtgtgcgtgtgtgcgtgcgtgtgcatgtgtgtgtatgggtgtgtgcatgcgtgtgtgtgtgtgcgcgtgtgcgtgcatgtgtgcgtgtgcatgcgtgtgtgtgcatgtgtgtgtgtgcgcgtgcgtgcgcgtatgctgcactaacctgccgcttgctgactgaggtttttgtctgtacacaggcgagtgagctcagggggccacctgtgctccccccgctaccctccgagccgcgcccctgtctcaggcacctctcggacctcgctgtgtttcactgcctcctgcccacagacccaggcctgccggcccggacccgtcccagcctcccctccccaccccatgcagcccccagggggatagcccatgggcccctgtggacactccctccccaagtggacacatggctgtgcaggccaggaggcccacagatggactgagtgctgggaaggggcggctgcgaggggtatcaaccccccgagtctctccctgaaggggagcaccgggcgagtgcatgtgctactgctgctacaggcctgtctatctgtttgtctgtctgtgtgtctgtgacagtcagggaaggatgcctcggagctgaggtggggtgagacagagtgggagagattacggcatggcatggaggggcccaaggagcaggggctgttgacaaaggccttaccaggaagggttaggacactgaccattctagaaatgggtttcgaatggcacaacactttctatttcacaaaagaccaaaagccagaggccccaggctctgtgctgatgaacagcctggctgggccctggccctggcaggtttagggcccatttggggccccctccttctctgtcagggctggggtgctctgtctgggaatgagggagttaaccaagtttggtgcaggagcaggggcagggggccactgtagtgagcgtggagaaatttggaaacacctatttcttaactcaaataaagtccagtttgtacct

SEQ ID NO: 1917 - DNA, 3923 bp, Homo sapiens
agtccagatgatagttaagaaagcagtaagaatacagagagtccacaatgagatgaaaatgcactgccagttgaaacatcctcctacactggagctttataaatattttaaagacaaggattggattagatttgacattagaaatgtaccataatacagaaggcaatggacacctaaagaacagaatgaaaaccttcttaggaaatgaagcttgacacttcacccaccaggccaccacaagaatgttgcattttcattattatgatacttcaaacaaaataatggagccccacagaccgaatgtgaagacagcagtgccattgtctttggaaagctatcacatatctgaagagtatggctttcttcttccagattctctgaaagaacttccagatcattataggccttggatggaaattgccaacaaacttcctcaattgattgatgctcaccagcttcaagctcatgtggacaagatgcccctgctgagctgccagttcctgaagggtcaccgggagcagcgcctggcccacctggtcctgagcttcctcaccatgggttatgtctggcaggaaggagaggcgcagcctgcagaggtcctgccaaggaatcttgcccttccatttgtcgaagtctccaggaacttggggctccctcctatcctggtccactcagacttggtgctgacgaactggaccaaaaaagatccagacggagacggagtctccctctgtctcccaggctggagtgcagtggcatgatctcggctcactgcaacctctgcctcctgggtttgagcggttctcctgcctcggcctcctgagtggctgggattgcgggcgcctaccgccacacccgactgatttttgtatttttggggagatggggttttaccacgttggccagtctggtatcgaatcctcgacctcatgatccacctgcctcagccttccaaagtgctaggattgcaggcatgagccactgtgcccagcctaataatatattaagatggccacaggccaaatattctggggctggaatgtgagtggaaatgtcgctcaccctttatcacatagcaccccatagtccagccacaacttgcagaattcaaagtaagtgtggatgtgtgtgtgcctgcagtgccttgcacacaagtgtgcatgcctgtggacatgtgaccctagaagttattaatatatctggtttacaaactgaattgttcttttattttttttctctcttggtggtcatcaataactgaaattgggctagattcctggaaattgggtaagttctcagaaatcatttacgcactttagaatccaggccaaatttaaaatcttacaataaaacaaagaacaaagcatgctaaattatatgtataatataatatcaaccatataaaatgcataaaaaatatactagaaggaaatgtgcctaaaattcacagtctaaaatttaacagtgattgcctcttccttgtatagataagggatttttttttactgtattttccagtctgtacataataaaacaagtaatgtgcaatgcaaacaaaacaaaatgaaactttatcaaatttcagtaactccttgaagtttaattttttttttgagactgagtcttagtctgttgcccaggttggagtgcagtggtgtgatctcggctcactgcaacctctgcctctgggttcaagggattctcctgcctcagcctcccgagtacctgagattacaggcacccaccaccacacctggctaatttttgtatttttagttgagacagcgtttcactatattggccaggcaggtcttgaactcctgacctcaggtgatccacccgccttggcctcccaaagtgctgggattgcaggcgtgagccactgcacccagttgaagtttaatagtgtgaaaaaaatatttctcatctcactatatcttctatgggaggccagattgcagattgtctacagaaaaatcccttcaaaagaccttgttattacatagactggagctcatggggcaggtctggtccacacatccttaggctccgcttctcctggaaaacaaaaatagcctctgatccagtgttgcctctcccatcaccaaacctcagcttctatcgccaaactcatcaaataagagtgtccagtagaaaaactgggcagatgggggcacagaaggtgaagacatcatttcccaagctaatgttgctgctggaacaatagtctcactctatctcccaggctggagtgcagtggtgtcatctcggctctctgcaacctcttgcctcagtctcttgcgtagctgggattacaggcatgccccgccatgcccagctaatttttgtatttttagtagagacggagtttcaccatgttggccaggctgatctcgaactcctgacctcaggaacctggagaccatcatctcatttcctgggggagagagcctgcatggttttatactggtgactgctttggtagagaaagaagcagtgcctgggataaaggctcttgttcaggccacgaatgctatcttgcagcccaaccaggaggccctgctccaagccctgcagcgactgagactgtctattcaggacatcaccaaaaccttaggacagatgcatgatggaaagacaacccagcaatgcctgcagggctgatgtatgaaggagtttcccaagagcccctgaaatactccggcgggagtgcagctcagagcacagtgcttcatgcctttgatgagttcttaggcattcgtcatagcaaggaaagtggtgactttctgtacagaatgagggattacatgcctccttcccataaggccttcatagaagacatccactcagcaccttccctgagggactacatcctgtcctctggacaggaccacttgctgacagcttataaccagtgtgtgcaggccctggcagagctgcggagctatcacatcaccatggtcaccaaatacctcatcacagctgcagccaaggcaaagcatgggaagccaaaccatctcccagggcctcctcaggctttaaaagacaggggcacaggtggaaccgcagttatgagctttcttaagagtgtcagggataagaccttggagtcaatccttcacccacgtggttaggaggctgccctctccccagcaatgcagagcccccatggagggcaggtgggcctggagaatgagggttagggttctgcctgggatcatccaggaaggatctcagccctattcatgtttctgctctacagagcactatattctccttgttgagagctgttggcttcacaaaggagagttgatgtggccaagcctttccctccctacctgatcactgcttaacggcatgtataatggatacttcctcatgcagaacccccagaggagtgactgtacgccattctctttgccaagtaatagaaaaccaatctaaatgtcaaaaatcagataaaattgcctggggatacattacttgttgactttcaaaaaaaacaaattcacttaacaattcattaagttcatactgagcactgcctccaagattaaaacaaggatttctgtggtcccagaccagccctcttctccctgaatgtgttgagttggtggcaggaggttggaaatgctccagtggagatgggaagatagaggatgctgacaataaggacttggaagtcactagtgtgaaaatgagcagttaatgatatgggaacggatgagactttccacgtggtacctagatttgcaaattctattgtaatgcctttatttttagaagaattattctctcttcttactctgaaaatctgtatttgtaaaatgaatgaatggatcctatataagtaaataagaaaactgggaataagtagtaaatcaatgtgtttagtgtgcaaataaatgtaaatgcttttattg

SEQ ID NO: 1918 - DNA, 4433 bp, Homo sapiens
ggatgagccccagcaccccaacgtggggccggacacagcttccgccacccaggtcccagggcagccctgctctcgcatttgtgttggcgttctcacgggccttttgttgtggttgtggtcttgtgtttttttaataaccttcttattcacacatggttcataagtctcatagagtttattcatttgaagtatgtatacagtggttttctgtatattcacagagttgtgcaaccatcatcacctctgtctagttccagaactttccatgacccctaaagaagctccattcccaccagccgttacttctcactcccttccctgccctggcacccacgcatccccttcctgtctctgtggatcagtgtgtcctggacatttcatagaaatggggtcatacaccgtgtggtcttttgtgtgtggcgtctcactgagtgtgatgtcctcaaggtgcatccacactatggcttgggtcagagcctggttcctgttcgtggccgggtcatgttccagtgcgtggacaggtcaccctctgctgaccccgttcctccgcggatgggccacactgtgctgacccactcatctgttgatagccacttgggccgcttcccctttgtggtgacacagtatgccgctttgaacatctgcgcagtgcgcgtggatgtgtgtgttccctctcggatgtgcacatgggcgtggggttgctgcgtcaagtgtggtgtcctcactggtttgccctgcatggctccctggtcggtggggactgttccccgggctgctttggcgcttgccgccaaccagagacggccccagcctccgctgggcctggtctggcctgagcttgtcccggtaggcctgaggcgtggctggtcctgccatcccacccaggcacgtgggaccttcagcctgagcagccctgctgtgatcctgacctcacactgtgatgggggcgtgctggagcagcctgggcactgaacccgaccctcctcttgctccagaaatctcccaagcctaagaagaagaagcacaggaaggagaaggaggagcggaccaaaggcaagaagaagtccaagaagcagcctccaggcagcgaggaggcagcgggggagccggtgcagaatggcgcgccagaggaggagcagctcccggtgaggggtacttcagcgcccccgccccacgccggggttcctggcgggctgtgcgctgctccccactcctgcagcctccatgcgggagagaactgagcagattcgagaagaagccgagcctggcgggggcaggggactggccctggcccgcagccccacattaggcacccccgtggtgggctgtgtggtcctgggagccggggatccctcatcggctcctttgaagccccttgccccaagcattcttggagtcgtggcattcgacctggggtattgggccatactggagtcttcgctgagacggagctcggggcccccaaggctgatgcgccttttctatttccagcctgagtccagctactccctcctcgctgaaaattcctatgttaaaatggtgagtggcagccgctcccaggggcagggtgggccagcccacactctttggcatgggatcgcgcggaacccgggcagcccccacagctcccggatgttggtatacccagggcctgtgattcctggcaggggcgttgcttgggcagcacctctggcttggggtaaggttggagacatgccctgagacttggactggcaggagggtccccgccatgcactcaaagagcagccataggaggcgcttggcctgcggctagggggcgcccctctccgtgccttcctgtgcctgtgggacccctgctgcctctgtggtcattaagagacaggtggctgtgcctgttccctgtggcgggcccgcctgccctgctaacactggccatgccctgcagacctgtgacatccggggcagtctgcaggaggacagccaggtcactgtggccatcgtgctggagaacaggagcagcagcatcctcaagggcatggagctcagcgtgctggactcactcaatgccaggatggcccggccgcagggctcctccgtccacgatggcgtccccgtgcctttccagctgcccccaggcgtctccaacgaagcccagtatgtgttcaccatccagagcatcgtcatggcgcagaagctcaaggggaccctgtccttcattgccaagaatgacgagggtgcgacccacgagaagctggacttcaggctgcacttcagctgcagctcctacttgatcaccactccctgctacaggtggggcccaggcccactcccctatgtccccgaaccccctccgcctcccctctaccttgcagacacctgtgccccggggactgaggcttctgggcaggactttagagacggatttggaggcgctggctcgtgactggtgcaggtcaggctgcctggtgtctgcgccagccggggccgtgtagttgaagccacaggccaggcagcgtcacccatagaggtccaggcccctggaagtcctgaaggctggaggggtgagaccaaggagccagcagggcaggctcctcctgaagcctctcctcggcacggcttggcgtgcggcaccccctcccccctgagtcctcacaggccgtcctctgcgtgcctgcatcctagcctatccccccagtcccttcctacaggacatccgtccttgtcggaggagggcccatcccatggcttcaggcacctctgtgacctctttaaagacaagtcattgtcagtttctgggtgtgacggcttccgcacatgaaaatgagccacaccttccaggacccccaagacctcccggcccagacacacaggagggtgtccaagcgcagcgtgtgtggcaggttttgttggcctctgtgccaggaagcctgaggagcccggctccaccgcagtcagcctccctgtccctcccacagtgacgcctttgctaagttgctggagtctggggacttgagcatgagctcaatcaaagtcgatggcattcggatgtccttccagaatcttctggcgaagatctgttttcaccaccatttttccgttgtggagcgagtggactcctgcgcctccatgtacagccgctccatccagggccaccatgtctgcctcctggtgaaaaagggtgagaactctgtctcagtcgacgggaagtgcagtgactccacgctactgagcaacttgttagaagagatgaaggcgacgctggccaagtgttgagagctgcctgcgagccccgcaccaccccgcggagcacgtacccagggaccgcagccctgacgtgtctcgcctctcctcagtcgtgtgtactgtacccaagcctgagtgttaatttaactctatgttgtccgccgtgtagacatccgaggtcatttgttgcgttgaattatctgaccatccttttttactgtgactcttcccattctctttggcaagaagtccccttctcgcccccaaaccagcaagggactcccccacctgggtctgtgccctgccccgcgctgggggccgagtccttgaatgtggcttcaggggctcctgtcctgggccagggcctgatgggcaccacgtgaggggcacttggtggacagggcggggctgacgtggcctcctctggggtcgcctgcttttgacccaaaggtcctgacggttgcgtccgggggaggggaaggaagggccgctgtcgccaaggttttctctcccagaacccacagtgggaaagcggtcttgccaggcgttgtccattgtcagtgtgctcgtgggctggtgactgggtcttgggatcccaggccacgcgccagccaggctgtgggcagggcggggccagggacgccaaagagaggttgcagtcagaaccgtggacggggtgggttgaggcctctctgccacccgtcttcctggtcagcagaagtgcatctcggcttgggtttggggtggtccgcatcccctgcttgccactatgcgcaccaaggtttccccacatccttcccagcacccttaggaaggcccaggcagggcctggaagcagcggacctgggctgttctgtgttgaaggagtgtgcccagtgcccttgggcaggacctgtgagagccacctcacaggcagagcccccaccaggcagggcaaggagactccgctcactccccacggccagcgtgggcacaggactgacccttcttcagagataatgacattttatcttctccttttgatgaaaactgtcactttagcatgtaatccattacagaatcccatgcagtgattccaggatttgaaattgtatgatgtgttacataagaatttatttgctatcgacattcccgtataaagagagagacatatcacgctgctgtcatgattttgtgtcaagatgatccaataaagttgtaaaacaggc

SEQ ID NO: 1919 - DNA, 3920 bp, Homo sapiens
atcgagcttcgcggggttgctgggctgacggatccgcgggccggcatctgaagcgagcgggacgcagcgcggccagggcctccgggcatacgcaggctggtccccaaggcccgcggccgccgccatgtcggtgctgggcgagtacgagcgacactgcgattccatcaactcggactttgggagcgagtccgggggttgcggggactcgagtccggggcctagcgccagtcaggggccgcgagccggcggcggcgccttcggggaagccacgctgtaccgccgcaccgaggatgactcactggttgtgtggaaggaagtcgatttgacccggctgtctgagaaggaacgtcgtgatgccttgaatgagatagttattctggcactgctgcagcacgacaacattattgcctactacaatcacttcatggacaataccacgctgctgattgagctggaatattgtaatggagggaacctgtatgacaaaatccttcgtcagaaggacaagttgtttgaggaagagatggtggtgtggtacctatttcagattgtttcagcagtgagctgcatccataaagctggaatccttcatagagatataaagacattaaatatttttctgaccaaggcaaacctgataaaacttggagattatggcctagcaaagaaacttaattctgagtattccatggctgagacgcttgtgggaaccccatattacatgtctccagagctctgtcaaggagtaaagtacaatttcaagtctgatatctgggcagttggctgcgtcatttttgaactgcttaccttaaagaggacgtttgatgctacaaacccacttaacctgtgtgtgaagatcgtgcaaggaattcgggccatggaagttgactctagccagtactctttggaattgatccaaatggttcattcgtgccttgaccaggatcctgagcagagacctactgcagatgaacttctagatcgccctcttctcaggaaacgcaggagagagatggaggaaaaagtcactctgcttaatgcacctacaaagagaccaaggtcaagcactgtgactgaagcacccattgctgtagtaacatcacgaaccagtgaagtctatgtttggggtggtggaaaatccaccccccagaaactggatgttatcaagagtggctgtagtgcccggcaggtctgtgcagggaatacccactttgctgtggtcacagtggagaaggaactgtacacttgggtgaacatgcaaggaggcactaaactccatggtcagctgggccatggagacaaagcctcctatcgacagccaaagcatgtggaaaagttgcaaggcaaagctatccgtcaggtgtcatgtggtgatgatttcactgtctgtgtgactgatgagggtcagctctatgccttcggatcagattattatggctgcatgggggtggacaaagttgctggccctgaagtgctagaacccatgcagctgaacttcttcctcagcaatccagtggagcaggtctcctgtggagataatcatgtggtggttctgacacgaaacaaggaagtctattcttggggctgtggcgaatatggtaggggtagccttgtctctgtccacttcttcacaggtatacaacctgacttcaaagttgtatgcatctaaacccatcatgcagcccctaaatgagaagtgttaattcagtaaatctttttttttttttttttttttttctcgagacagagtctctctctgtcacccaggctggagtgcaatggcatgatctgggctcattgcaaccaccacctcccgagttcgagtgattctcctgcctcagcctcccgagtagctgggattacaggcacacaccatcacacccagctaattttttgtatttttagtagagatggggtttcaccacactggccaggcttgtctcgctcgaacttctgacctcatgatccacctgcctcggcctcccaaagtgctgggattacaggtgtgagccaccgcacctggcaaaagagaatcttacagaacctattcactgggaaggaagccctcattataatgattttcattcttatgtgtgtttcaggacgactgggtttggattcagaagaggattattatacaccacaaaaggtggatgttcccaaggccttgattattgttgcagttcaatgtggctgtgatgggacatttctgttgacccagtcaggcaaagtgctggcctgtggactcaatgaattcaataagctgggtctgaatcagtgcatgtcgggaattatcaaccatgaagcataccatgaagttccctacacaacgtcctttaccttggccaaacagttgtccttttataagatccgtaccattgccccaggcaagactcacacagctgctattgatgagcgaggccggctgctgacctttggctgcaacaagtgtgggcagctgggcgttgggaactacaagaagcgtctgggaatcaacctgttggggggaccccttggtgggaagcaagtgatcagggtctcctgcggtgatgagtttaccattgctgccactgatgataatcacatttttgcctggggcaatggtggtaatggccgcctggcaatgacccccacagagagaccacatggctctgatatctgtacctcatggcctcggcctatttttggatctctgcatcatgtcccggacctgtcttgccgtggatggcataccattctcatcgttgtgtttcagagctctagcccgggaggaggcggcgggggcggcggtggtgaagaagaggacagtcagcaggaatctgaaactcctgacccaagtggaggcttccgaggaacaatggaagcagaccgaggaatggaaggtttaatcagtcccacagaggccatggggaacagtaatggggccagcagctcctgtcctggctggcttcgaaaggagctggaaaatgcagaatttatccccatgcctgacagcccatctcctctcagtgcagcgttttcagaatctgagaaagataccctgccctatgaagagctgcaaggactcaaagtggcctctgaagctcctttggaacacaaaccccaagtagaagcctcgtcacctcggctgaatcctgcagtaacctgtgctgggaagggaacaccactgactcctcctgcgtgtgcgtgcagctctctgcaggtggaggttgagagattgcagggtctggtgttaaagtgtctggctgaacaacagaagctacagcaagaaaacctccagatttttacccaactgcagaagttgaacaagaaattagaaggagggcagcaggtgagagcattaaaagaataatccaatttctaagcctgttttgaagaatcacagaaacaaaacacgaagtactgaaatagacttgttcctttgcaggtccttactttttttttgagacggagtctcgctctgttgccaggccagagtgcagtggtgctatcttggcttactgcagcctccgcctcccggattcaggcggctctcctgcctcagcctcccgagtagctgggactgcgggtgtgcaccaccatgcccggctaattttggtatttttggtagagacagggtttcaccgtgttggccaggatggtctcgatcacttgacttcatgatccacccgcctcagcctcccaaagtgctgggattacaggtgtgagccaccacgcctggccgatccttagtttttaatgataccatttttgtaattataatcccagaagccttgggccttgttcaggcacctagattgaatcattttcatcacttgcattgctttttcttagtgtatgttttttcttttacaatacttaattacatacctctgaaaatagacattctcctgaacaaccacaatactataaccacacct
